(19) United States
(12) Patent Application Publication
(10) Pub. No.: US 2021/0107993 A1
(43) Pub. Date: Apr. 15, 2021

(54) CARTYRIN COMPOSITIONS AND METHODS FOR USE

(71) Applicant: Poseida Therapeutics, Inc., San Diego, CA (US)

(72) Inventors: Eric M. OSTERTAG, San Diego, CA (US); Devon SHEDLOCK, San Diego, CA (US)

(21) Appl. No.: 16/977,547

(22) PCT Filed: Mar. 7, 2019
(86) PCT No.: PCT/US2019/021224

§ 371 Date: Sep. 2, 2020

Related U.S. Application Data
(60) Provisional application No. 62/783,140, filed on Dec. 20, 2018.
(60) Provisional application No. 62/745,151, filed on Oct. 12, 2018.
(60) Provisional application No. 62/639,978, filed on Mar. 7, 2018.

(51) Int. Cl. C07K 16/30; C07K 14/705; C07K 14/725; C12N 5/0783

(52) U.S. Cl. CPC C07K 16/3069; C07K 14/70517; C07K 14/7051; C07K 14/70575; C07K 2319/02; C07K 2318/20; C07K 2319/03; C07K 2319/33; C12N 5/0636

(57) ABSTRACT

Disclosed are Centryin chimeric antigen receptors (CARTyrins), CARTyrin transposons encoding CARTyrins of the disclosure, cells modified to express CARTyrins of the disclosure, as well as methods of making and methods of using the same for adoptive cell therapy. In preferred embodiments, CARTyrins of the disclosure specifically bind to a sequence of prostate specific membrane antigen (PSMA).

### RELATED APPLICATIONS

[0001] This application claims the priority benefit of U.S. provisional application No. 62/639,978 filed Mar. 7, 2018, U.S. provisional application No. 62/745,151 filed Oct. 12, 2018 and U.S. provisional application No. 62/783,140 filed Dec. 20, 2018, the contents of each of which are herein incorporated by reference in their entirety.

### INCORPORATION-BY-REFERENCE OF SEQUENCE LISTING

[0002] The contents of the file named “POTH-033_001WO_SequenceListing_ST25_R.txt”, which was created on Mar. 7, 2019, and is 6 KB in size are hereby incorporated by reference in their entirety.

### FIELD OF THE DISCLOSURE

[0003] The disclosure is directed to molecular biology, and more, specifically, to chimeric antigen receptors, and to transposons containing one or more CARTyrins, as well as methods of making and using the same.

### BACKGROUND

[0004] There has been a long-felt but unmet need in the art for a method of directing the specificity of an immune cell without using traditional antibody sequences or fragments thereof. The disclosure provides a superior chimeric antigen receptor.

### SUMMARY

[0005] The disclosure provides a chimeric antigen receptor (CAR) comprising: (a) an ectodomain comprising an antigen recognition region, wherein the antigen recognition region comprises at least one Centyrin; (b) a transmembrane domain, and (c) an endodomain comprising at least one costimulatory domain. As used throughout the disclosure, a CAR comprising a Centryin is referred to as a CARTyrin. In certain embodiments, the antigen recognition region may comprise two Centyrins to produce a bi-specific or tandem CARTyrin. In certain embodiments, the antigen recognition region may comprise three Centyrins to produce a tri-specific CARTyrin. In certain embodiments, the ectodomain may further comprise a signal peptide. Alternatively, or in addition, in certain embodiments, the ectodomain may further comprise a hinge between the antigen recognition region and the transmembrane domain. In certain embodiments, the ectodomain may further comprise a signal peptide. Alternatively, or in addition, in certain embodiments, the ectodomain may further comprise a hinge between the antigen recognition region and the transmembrane domain.

[0006] The disclosure provides a chimeric antigen receptor (CAR) comprising: (a) an ectodomain comprising an antigen recognition region, wherein the antigen recognition region comprises at least one Centyrin and wherein the at least one Centyrin specifically binds to a sequence of Prostate-Specific Membrane Antigen (PSMA); (b) a transmembrane domain, and (c) an endodomain comprising at least one costimulatory domain. As used throughout the disclosure, a CAR comprising a Centryin is referred to as a CARTyrin. In certain embodiments, the antigen recognition region may comprise two Centyrins to produce a bi-specific or tandem CARTyrin. In certain embodiments, including those wherein the antigen recognition region may comprise two Centyrins to produce a bi-specific or tandem CARTyrin, one or both of the two Centyrins specifically bind(s) to a sequence of PSMA. In some embodiments, a first Centyrin may specifically bind to a first sequence of PSMA and a second Centyrin may specifically bind to a second sequence of PSMA. In some embodiments, the first sequence of PSMA and the second sequence of PSMA are identical. In some embodiments, the first sequence of PSMA and the second sequence of PSMA are not identical. In certain embodiments, the antigen recognition region may comprise three Centyrins to produce a tri-specific CARTyrin. In certain embodiments, including those wherein the antigen recognition region may comprise three Centyrins to produce a tri-specific or tandem CARTyrin, one, two, or three of the three Centyrins specifically bind(s) to a sequence of PSMA. In certain embodiments, a first Centyrin may specifically bind to a first sequence of PSMA, a second Centyrin may specifically bind to a second sequence of PSMA and a third Centyrin may specifically bind to a third sequence of PSMA. In certain embodiments, the ectodomain may further comprise a signal peptide. In certain embodiments, two or more of the first, second or third sequences of PSMA are identical. In certain embodiments, two or more of the first, second or third sequences of PSMA are not identical. In certain embodiments, the first sequence of PSMA, the second sequence of PSMA and the third sequence of PSMA are not identical. Alternatively, or in addition, in certain embodiments, the ectodomain may further comprise a hinge between the antigen recognition region and the transmembrane domain. In certain embodiments, the ectodomain may further comprise a signal peptide. Alternatively, or in addition, in certain embodiments, the ectodomain may further comprise a hinge between the antigen recognition region and the transmembrane domain. As used herein, the term “anti-PSMA CARTyrin” refers to a CARTyrin comprising at least one centyrin that specifically binds a sequence of PSMA.

[0007] In certain embodiments of an anti-PSMA CARTyrins of the disclosure, the Centyrin comprises or consists of the amino acid sequence of

(SEQ ID NO: 18000)
MLPAPKNLVVSRVTEDSARLSWDIDEQRDWFESFLIQYQESEKVGEAIVL
TVPGSERSYDLTGLKPGTEYTVSIYGVYHVYRSNPLSAIFTT

(“PSMA5 Centyrin”) or the nucleic acid sequence of

(SEQ ID NO: 18001)
ATGCTGCCTGCACCAAAGAACCTGGTGGTGTCTCGGGTGACCGAGGACTC
TGCCAGACTGAGCTGGGACATCGATGAGCAGAGGGATTGGTTCGAGAGCT
TTCTGATCCAGTATCAGGAGTCCGAGAAAGTGGGCGAGGCCATCGTGCTG
ACAGTGCCTGGCAGCGAGCGGTCCTATGACCTGACCGGCCTGAAGCCAGG
CACAGAGTACACCGTGTCCATCTACGGCGTGTATCACGTGTACAGGTCCA
ATCCTCTGTCTGCCATCTTCACCACA

### (“PSMA5 Centyrin”).

[0008] In certain embodiments of an anti-PSMA CARTyrins of the disclosure, the at least one PSMA-specific Centyrin comprises an amino acid sequence having at least 70% identity to the amino acid sequence of

(SEQ ID NO: 18000)
MLPAPKNLVVSRVTEDSARLSWDIDEQRDWFESFLIQYQESEKVGEAIVL
TVPGSERSYDLTGLKPGTEYTVSIYGVYHVYRSNPLSAIFTT.

In certain embodiments, the at least one PSMA-specific Centyrin comprises an amino acid sequence having at least 75%, 80%, 85%, 90%, 95%, 97%, 99%, or any percentage in between of identity to the amino acid sequence of

(SEQ ID NO: 18000)
MLPAPKNLVVSRVTEDSARLSWDIDEQRDWFESFLIQYQESEKVGEAIVL
TVPGSERSYDLTGLKPGTEYTVSIYGVYHVYRSNPLSAIFTT.

[0009] In certain embodiments of an anti-PSMA CARTyrins of the disclosure, the Centyrin comprises or consists of the amino acid sequence of

(SEQ ID NO: 18002)
MLPAPKNLVVSRVTEDSARLSWAIDEQRDWFESFLIQYQESEKVGEAIVL
TVPGSERSYDLTGLKPGTEYTVSIYGVYHVYRSNPLSAIFTT

(“PSMA8 Centyrin”) or the nucleic acid sequence of

(SEQ ID NO: 18003)
ATGCTGCCTGCACCAAAGAACCTGGTGGTGTCTCGGGTGACCGAGGACTC
TGCCAGACTGAGCTGGGCCATCGACGAGCAGAGGGATTGGTTCGAGAGCT
TTCTGATCCAGTATCAGGAGTCCGAGAAAGTGGGCGAGGCCATCGTGCTG
ACAGTGCCTGGCAGCGAGCGGTCCTATGATCTGACCGGCCTGAAGCCAGG
CACAGAGTACACCGTGTCCATCTACGGCGTGTATCACGTGTACAGGTCCA
ATCCTCTGTCTGCCATCTTCACCACA

### (“PSMA8 Centyrin”).

[0010] In certain embodiments of an anti-PSMA CARTyrins of the disclosure, the at least one PSMA-specific Centyrin comprises an amino acid sequence having at least 70% identity to the amino acid sequence of

(SEQ ID NO: 18002)
MLPAPKNLVVSRVTEDSARLSWAIDEQRDWFESFLIQYQESEKVGEAIVL
TVPGSERSYDLTGLKPGTEYTVSIYGVYHVYRSNPLSAIFTT.

In certain embodiments, the at least one PSMA-specific Centyrin comprises an amino acid sequence having at least 75%, 80%, 85%, 90%, 95%, 97%, 99%, or any percentage in between of identity to the amino acid sequence of

(SEQ ID NO: 18002)
MLPAPKNLVVSRVTEDSARLSWAIDEQRDWFESFLIQYQESEKVGEAIVL
TVPGSERSYDLTGLKPGTEYTVSIYGVYHVYRSNPLSAIFTT.

[0011] In certain embodiments of the CARTyrins of the disclosure, the signal peptide may comprise a sequence encoding a human CD2, CD3δ, CD3ε, CD3γ, CD3ζ, CD4, CD8α, CD19, CD28, 4-1BB or GM-CSFR signal peptide. In certain embodiments of the CARTyrins of the disclosure, the signal peptide may comprise a sequence encoding a human CD8α signal peptide. The human CD8α signal peptide may comprise an amino acid sequence comprising MALPVTALLLPLALLLHAARP (SEQ ID NO: 18004). The human CD8α signal peptide may comprise an amino acid sequence comprising MALPVTALLLPLALLLHAARP (SEQ ID NO: 18004) or a sequence having at least 70%, 80%, 90%, 95%, or 99% identity to the an amino acid sequence comprising MALPVTALLLPLALLLHAARP (SEQ ID NO: 18004). The human CD8α signal peptide may be encoded by a nucleic acid sequence comprising

(SEQ ID NO: 18005)
atggcactgccagtcaccgccctgctgctgcctctggctctgctgctgca
cgcagctagacca.

[0012] In certain embodiments of the CARTyrins of the disclosure, the transmembrane domain may comprise a sequence encoding a human CD2, CD3δ, CD3ε, CD3γ, CD3ζ, CD4, CD8α, CD19, CD28, 4-1BB or GM-CSFR transmembrane domain. In certain embodiments of the CARTyrins of the disclosure, the transmembrane domain may comprise a sequence encoding a human CD8α transmembrane domain. The CD8α transmembrane domain may comprise an amino acid sequence comprising IYIWAPLAGTCGVLLLSLVITLYC (SEQ ID NO: 18006) or a sequence having at least 70%, 80%, 90%, 95%, or 99% identity to the amino acid sequence comprising IYIWAPLAGTCGVLLLSLVITLYC (SEQ ID NO: 18006). The CD8α transmembrane domain may be encoded by the nucleic acid sequence comprising

(SEQ ID NO: 18007)
atctacatttgggcaccactggccgggacctgtggagtgctgctgctgag
cctggtcatcacactgtactgc.

[0013] In certain embodiments of the CARTyrins of the disclosure, the endodomain may comprise a human CD3ζ endodomain.

[0014] In certain embodiments of the CARTyrins of the disclosure, the at least one costimulatory domain may comprise a human 4-1BB, CD28, CD40, ICOS, MyD88, OX-40 intracellular segment, or any combination thereof. In certain embodiments of the CARTyrins of the disclosure, the at least one costimulatory domain may comprise a CD28 and/or a 4-1BB costimulatory domain. The CD3ζ costimulatory domain may comprise an amino acid sequence comprising

(SEQ ID NO: 18008)
RVKFSRSADAPAYKQGQNQLYNELNLGRREEYDVLDKRRGRDPEMGGKPR
RKNPQEGLYNELQKDKMAEAYSEIGMKGERRRGKGHDGLYQGLSTATKDT
YDALHMQALPPR

or a sequence having at least 70%, 80%, 90%, 95%, or 99% identity to the amino acid sequence comprising

(SEQ ID NO: 18009)
RVKFSRSADAPAYKQGQNQLYNELNLGRREEYDVLDKRRGRDPEMGGKPR
RKNPQEGLYNELQKDKMAEAYSEIGMKGERRRGKGHDGLYQGLSTATKDT
YDALHMQALPPR.

The CD3ζ costimulatory domain may be encoded by the nucleic acid sequence comprising

(SEQ ID NO: 18010)
cgcgtgaagtttagtcgatcagcagatgccccagcttacaaacagggaca
gaaccagctgtataacgagctgaatctgggccgccgagaggaatatgacg
tgctggataagcggagaggacgcgaccccgaaatgggaggcaagcccagg
cgcaaaaaccctcaggaaggcctgtataacgagctgcagaaggacaaaat
ggcagaagcctattctgagatcggcatgaagggggagcgacggagaggca
aagggcacgatgggctgtaccagggactgagcaccgccacaaaggacacc
tatgatgctctgcatatgcaggcactgcctccaagg.

The 4-1BB costimulatory domain may comprise an amino acid sequence comprising KRGRKKLLYIFKQPFMRPVQTTQEEDGCSCRFPEEEEGGCEL (SEQ ID NO: 18011) or a sequence having at least 70%, 80%, 90%, 95%, or 99% identity to the amino acid sequence comprising

(SEQ ID NO: 18012)
KRGRKKLLYIFKQPFMRPVQTTQEEDGCSCRFPEEEEGGCEL.

The 4-1BB costimulatory domain may be encoded by the nucleic acid sequence comprising

(SEQ ID NO: 18013)
aagagaggcaggaagaaactgctgtatattttcaaacagcccttcatgcg
ccccgtgcagactacccaggaggaagacgggtgctcctgtcgattccctg
aggaagaggaaggcgggtgtgagctg.

The 4-1BB costimulatory domain may be located between the transmembrane domain and the CD28 costimulatory domain.

[0015] In certain embodiments of the CARTyrins of the disclosure, the hinge may comprise a sequence derived from a human CD8α, IgG4, and/or CD4 sequence. In certain embodiments of the CARTyrins of the disclosure, the hinge may comprise a sequence derived from a human CD8α sequence. The hinge may comprise a human CD8α amino acid sequence comprising TTTPAPRPPTPAPTIASQPLSLRPEACRPAAGGAVHTRGLDFACD (SEQ ID NO: 18014) or a sequence having at least 70%, 80%, 90%, 95%, or 99% identity to the amino acid sequence comprising

(SEQ ID NO: 18015)
TTTPAPRPPTPAPTIASQPLSLRPEACRPAAGGAVHTRGLDFACD.

The human CD8α hinge amino acid sequence may be encoded by the nucleic acid sequence comprising

(SEQ ID NO: 18016)
ACCACAACCCCTGCCCCCAGACCTCCCACACCCGCCCCTACCATCGCGAG
TCAGCCCCTGAGTCTGAGACCTGAGGCCTGCAGGCCAGCTGCAGGAGGAG
CTGTGCACACCAGGGGCCTGGACTTCGCCTGCGAC
or
(SEQ ID NO: 18017)
ACCACAACCCCTGCCCCCAGACCTCCCACACCCGCCCCTACCATCGCGAG
TCAGCCCCTGAGTCTGAGACCTGAGGCCTGCAGGCCAGCTGCAGGAGGAG
CTGTGCACACCAGGGGCCTGGACTTCGCCTGCGAC.

[0016] Centyrins of the disclosure may comprise at least one fibronectin type III (FN3) domain. Centyrins of the disclosure may be capable of specifically binding an antigen. Preferred Centryrins of the disclosure specifically bind a sequence of PSMA. The at least one fibronectin type III (FN3) domain may be derived from a human protein. The human protein may be Tenascin-C. The consensus sequence may comprise

(SEQ ID NO: 18018)
LPAPKNLVVSEVTEDSLRLSWTAPDAAFDSFLIQYQESEKVGEAINLTVP
GSERSYDLTGLKPGTEYTVSIYGVKGGHRSNPLSAEFTT
or
(SEQ ID NO: 18019)
MLPAPKNLVVSEVTEDSLRLSWTAPDAAFDSFLIQYQESEKVGEAINLTV
PGSERSYDLTGLKPGTEYTVSIYGVKGGHRSNPLSAEFTT.

The consensus sequence may be modified at one or more positions within (a) a A-B loop comprising or consisting of the amino acid residues TEDS (SEQ ID NO: 18020) at positions 13-16 of the consensus sequence; (b) a B-C loop comprising or consisting of the amino acid residues TAPDAAF (SEQ ID NO: 18021) at positions 22-28 of the consensus sequence; (c) a C-D loop comprising or consisting of the amino acid residues SEKVGE (SEQ ID NO: 18022) at positions 38-43 of the consensus sequence; (d) a D-E loop comprising or consisting of the amino acid residues GSER (SEQ ID NO: 18023) at positions 51-54 of the consensus sequence; (e) a E-F loop comprising or consisting of the amino acid residues GLKPG (SEQ ID NO: 18024) at positions 60-64 of the consensus sequence; (f) a F-G loop comprising or consisting of the amino acid residues KGGHRSN (SEQ ID NO: 18025) at positions 75-81 of the consensus sequence; or (g) any combination of (a)-(f). Centyrins of the disclosure may comprise a consensus sequence of at least 5 fibronectin type III (FN3) domains, at least 10 fibronectin type III (FN3) domains or at least 15 fibronectin type III (FN3) domains. Centyrins and/or CARTyrins of the disclosure may bind an antigen with at least one affinity selected from a K_{D} of less than or equal to 10⁻⁹ M, less than or equal to 10⁻¹⁰ M, less than or equal to 10⁻¹¹ M, less than or equal to 10⁻¹²M, less than or equal to 10⁻¹³M, less than or equal to 10⁻¹⁴M, and less than or equal to 10⁻¹⁵M. The K_{D} may be determined by surface plasmon resonance.

[0017] The disclosure provides a composition comprising a CARTyrin of the disclosure and at least one pharmaceutically acceptable carrier.

[0018] The disclosure provides a transposon comprising the CARTyrin of the disclosure.

[0019] Transposons of the disclosure may comprise a selection gene for identification, enrichment and/or isolation of cells that express the transposon. Exemplary selection genes encode any gene product (e.g. transcript, protein, enzyme) essential for cell viability and survival. Exemplary selection genes encode any gene product (e.g. transcript, protein, enzyme) essential for conferring resistance to a drug challenge against which the cell is sensitive (or which could be lethal to the cell) in the absence of the gene product encoded by the selection gene. Exemplary selection genes encode any gene product (e.g. transcript, protein, enzyme) essential for viability and/or survival in a cell media lacking one or more nutrients essential for cell viability and/or survival in the absence of the selection gene. Exemplary selection genes include, but are not limited to, neo (conferring resistance to neomycin), TYMS (encoding Thymidylate Synthetase), MGMT (encoding O(6)-methylguanine-DNA methyltransferase), multidrug resistance gene (MDR1), ALDH1 (encoding Aldehyde dehydrogenase 1 family, member A1), FRANCF, RAD51C (encoding RAD51 Paralog C), GCS (encoding glucosylceramide synthase), and NKX2.2 (encoding NK2 Homeobox 2).

[0020] Transposons of the disclosure may comprise an inducible proapoptotic polypeptide comprising (a) a ligand binding region, (b) a linker, and (c) a proapoptotic polypeptide, wherein the inducible proapoptotic polypeptide does not comprise a non-human sequence. In certain embodiments, the non-human sequence comprises a restriction site. In certain embodiments, the ligand binding region may be a multimeric ligand binding region. Inducible proapoptotic polypeptides of the disclosure may also be referred to as an “iC9 safety switch”. In certain embodiments, transposons of the disclosure may comprise an inducible caspase polypeptide comprising (a) a ligand binding region, (b) a linker, and (c) a caspase polypeptide, wherein the inducible proapoptotic polypeptide does not comprise a non-human sequence. In certain embodiments, transposons of the disclosure may comprise an inducible caspase polypeptide comprising (a) a ligand binding region, (b) a linker, and (c) a caspase polypeptide, wherein the inducible proapoptotic polypeptide does not comprise a non-human sequence. In certain embodiments, transposons of the disclosure may comprise an inducible caspase polypeptide comprising (a) a ligand binding region, (b) a linker, and (c) a truncated caspase 9 polypeptide, wherein the inducible proapoptotic polypeptide does not comprise a non-human sequence. In certain embodiments of the inducible proapoptotic polypeptides, inducible caspase polypeptides or truncated caspase 9 polypeptides of the disclosure, the ligand binding region may comprise a FK506 binding protein 12 (FKBP12) polypeptide. In certain embodiments, the amino acid sequence of the ligand binding region that comprise a FK506 binding protein 12 (FKBP12) polypeptide may comprise a modification at position 36 of the sequence. The modification may be a substitution of valine (V) for phenylalanine (F) at position 36 (F36V). In certain embodiments, the FKBP12 polypeptide is encoded by an amino acid sequence comprising

(SEQ ID NO: 18026)
GVQVETISPGDGRTFPKRGQTCVVHYTGMLEDGKKVDSSRDRNKPFKFML
GKQEVIRGWEEGVAQMSVGQRAKLTISPDYAYGATGHPGIIPPHATLVFD
VELLKLE.

In certain embodiments, the FKBP12 polypeptide is encoded by a nucleic acid sequence comprising

(SEQ ID NO: 18027)
GGGGTCCAGGTCGAGACTATTTCACCAGGGGATGGGCGAACATTTCCAAA
AAGGGGCCAGACTTGCGTCGTGCATTACACCGGGATGCTGGAGGACGGGA
AGAAAGTGGACAGCTCCAGGGATCGCAACAAGCCCTTCAAGTTCATGCTG
GGAAAGCAGGAAGTGATCCGAGGATGGGAGGAAGGCGTGGCACAGATGTC
AGTCGGCCAGCGGGCCAAACTGACCATTAGCCCTGACTACGCTTATGGAG
CAACAGGCCACCCAGGGATCATTCCCCCTCATGCCACCCTGGTCTTCGAT
GTGGAACTGCTGAAGCTGGAG.

In certain embodiments, the induction agent specific for the ligand binding region may comprise a FK506 binding protein 12 (FKBP12) polypeptide having a substitution of valine (V) for phenylalanine (F) at position 36 (F36V) comprises AP20187 and/or AP1903, both synthetic drugs.

[0021] In certain embodiments of the inducible proapoptotic polypeptides, inducible caspase polypeptides or truncated caspase 9 polypeptides of the disclosure, the linker region is encoded by an amino acid comprising GGGGS (SEQ ID NO: 18028) or a nucleic acid sequence comprising GGAGGAGGAGGATCC (SEQ ID NO: 18029). In certain embodiments, the nucleic acid sequence encoding the linker does not comprise a restriction site.

[0022] In certain embodiments of the truncated caspase 9 polypeptides of the disclosure, the truncated caspase 9 polypeptide is encoded by an amino acid sequence that does not comprise an arginine (R) at position 87 of the sequence. Alternatively, or in addition, in certain embodiments of the inducible proapoptotic polypeptides, inducible caspase polypeptides or truncated caspase 9 polypeptides of the disclosure, the truncated caspase 9 polypeptide is encoded by an amino acid sequence that does not comprise an alanine (A) at position 282 the sequence. In certain embodiments of the inducible proapoptotic polypeptides, inducible caspase polypeptides or truncated caspase 9 polypeptides of the disclosure, the truncated caspase 9 polypeptide is encoded by an amino acid comprising

(SEQ ID NO: 18030)
GFGDVGALESLRGNADLAYILSMEPCGHCLIINNVNFCRESGLRTRTGSN
IDCEKLRRRFSSLHFMVEVKGDLTAKKMVLALLELAQQDHGALDCCVVVI
LSHGCQASHLQFPGAVYGTDGCPVSVEKIVNIFNGTSCPSLGGKPKLFFI
QACGGEQKDHGFEVASTSPEDESPGSNPEPDATPFQEGLRTFDQLDAISS
LPTPSDIFVSYSTFPGFVSWRDPKSGSWYVETLDDIFEQWAHSEDLQSLL
LRVANAVSVKGIYKQMPGCFNFLRKKLFFKTS

or a nucleic acid sequence comprising

(SEQ ID NO: 18031)
GGATTTGGGGACGTGGGGGCCCTGGAGTCTCTGCGAGGAAATGCCGATCT
GGCTTACATCCTGAGCATGGAACCCTGCGGCCACTGTCTGATCATTAACA
ATGTGAACTTCTGCAGAGAAAGCGGACTGCGAACACGGACTGGCTCCAAT
ATTGACTGTGAGAAGCTGCGGAGAAGGTTCTCTAGTCTGCACTTTATGGT
CGAAGTGAAAGGGGATCTGACCGCCAAGAAAATGGTGCTGGCCCTGCTGG
AGCTGGCTCAGCAGGACCATGGAGCTCTGGATTGCTGCGTGGTCGTGATC
CTGTCCCACGGGTGCCAGGCTTCTCATCTGCAGTTCCCCGGAGCAGTGTA
CGGAACAGACGGCTGTCCTGTCAGCGTGGAGAAGATCGTCAACATCTTCA
ACGGCACTTCTTGCCCTAGTCTGGGGGGAAAGCCAAAACTGTTCTTTATC
CAGGCCTGTGGCGGGGAACAGAAAGATCACGGCTTCGAGGTGGCCAGCAC
CAGCCCTGAGGACGAATCACCAGGGAGCAACCCTGAACCAGATGCAACTC
CATTCCAGGAGGGACTGAGGACCTTTGACCAGCTGGATGCTATCTCAAGC
CTGCCCACTCCTAGTGACATTTTCGTGTCTTACAGTACCTTCCCAGGCTT
TGTCTCATGGCGCGATCCCAAGTCAGGGAGCTGGTACGTGGAGACACTGG
ACGACATCTTTGAACAGTGGGCCCATTCAGAGGACCTGCAGAGCCTGCTG
CTGCGAGTGGCAAACGCTGTCTCTGTGAAGGGCATCTACAAACAGATGCC
CGGGTGCTTCAATTTTCTGAGAAAGAAACTGTTCTTTAAGACTTCC.

[0023] In certain embodiments of the inducible proapoptotic polypeptides, wherein the polypeptide comprises a truncated caspase 9 polypeptide, the inducible proapoptotic polypeptide is encoded by an amino acid sequence comprising

(SEQ ID NO: 18032)
GVQVETISPGDGRTFPKRGQTCVVHYTGMLEDGKKVDSSRDRNKPFKFML
GKQEVIRGWEEGVAQMSVGQRAKLTISPDYAYGATGHPGIIPPHATLVFD
VELLKLEGGGGSGFGDVGALESLRGNADLAYILSMEPCGHCLIINNVNFC
RESGLRTRTGSNIDCEKLRRRFSSLHFMVEVKGDLTAKKMVLALLELAQQ
DHGALDCCVVVILSHGCQASHLQFPGAVYGTDGCPVSVEKIVNIFNGTSC
PSLGGKPKLFFIQACGGEQKDHGFEVASTSPEDESPGSNPEPDATPFQEG
LRTFDQLDAISSLPTPSDIFVSYSTFPGFVSWRDPKSGSWYVETLDDIFE
QWAHSEDLQSLLLRVANAVSVKGIYKQMPGCFNFLRKKLFFKTS

or the nucleic acid sequence comprising

(SEQ ID NO: 18033)
ggggtccaggtcgagactatttcaccaggggatgggcgaacatttccaaa
aaggggccagacttgcgtcgtgcattacaccgggatgctggaggacggga
agaaagtggacagctccagggatcgcaacaagcccttcaagttcatgctg
ggaaagcaggaagtgatccgaggatgggaggaaggcgtggcacagatgtc
agtcggccagcgggccaaactgaccattagccctgactacgcttatggag
caacaggccacccagggatcattccccctcatgccaccctggtcttcgat
gtggaactgctgaagctggagggaggaggaggatccggatttggggacgt
gggggccctggagtctctgcgaggaaatgccgatctggcttacatcctga
gcatggaaccctgcggccactgtctgatcattaacaatgtgaacttctgc
agagaaagcggactgcgaacacggactggctccaatattgactgtgagaa
gctgcggagaaggttctctagtctgcactttatggtcgaagtgaaagggg
atctgaccgccaagaaaatggtgctggccctgctggagctggctcagcag
gaccatggagctctggattgctgcgtggtcgtgatcctgtcccacgggtg
ccaggcttctcatctgcagttccccggagcagtgtacggaacagacggct
gtcctgtcagcgtggagaagatcgtcaacatcttcaacggcacttcttgc
cctagtctggggggaaagccaaaactgttctttatccaggcctgtggcgg
ggaacagaaagatcacggcttcgaggtggccagcaccagccctgaggacg
aatcaccagggagcaaccctgaaccagatgcaactccattccaggaggga
ctgaggacctttgaccagctggatgctatctcaagcctgcccactcctag
tgacattacgtgtcttacagtaccttcccaggctttgtctcatggcgcga
tcccaagtcagggagctggtacgtggagacactggacgacatctttgaac
agtgggcccattcagaggacctgcagagcctgctgctgcgagtggcaaac
gctgtctctgtgaagggcatctacaaacagatgcccgggtgcttcaattt
tctgagaaagaaactgttattaagacttcc.

[0024] Transposons of the disclosure may comprise at least one self-cleaving peptide(s) located, for example, between one or more Centyrin(s) or CARTyrin(s) of the disclosure and a selection gene of the disclosure. Transposons of the disclosure may comprise at least one self-cleaving peptide(s) located, for example, between one or more Centyrin(s) or CARTyrin(s) of the disclosure and an inducible proapoptotic polypeptide of the disclosure. Transposons of the disclosure may comprise at least two self-cleaving peptide(s), a first self-cleaving peptide located, for example, upstream or immediately upstream of an inducible proapoptotic polypeptide of the disclosure and a second first self-cleaving peptide located, for example, downstream or immediately upstream of an inducible proapoptotic polypeptide of the disclosure.

[0025] The at least one self-cleaving peptide may comprise, for example, a T2A peptide, GSG-T2A peptide, an E2A peptide, a GSG-E2A peptide, an F2A peptide, a GSG-F2A peptide, a P2A peptide, or a GSG-P2A peptide. A T2A peptide may comprise an amino acid sequence comprising EGRGSLLTCGDVEENPGP (SEQ ID NO: 18034) or a sequence having at least 70%, 80%, 90%, 95%, or 99% identity to the amino acid sequence comprising EGRGSLLTCGDVEENPGP (SEQ ID NO: 18035). A GSG-T2A peptide may comprise an amino acid sequence comprising GSGEGRGSLLTCGDVEENPGP (SEQ ID NO: 18036) or a sequence having at least 70%, 80%, 90%, 95%, or 99% identity to the amino acid sequence comprising GSGEGRGSLLTCGDVEENPGP (SEQ ID NO: 18037). A GSG-T2A peptide may comprise a nucleic acid sequence comprising

(SEQ ID NO: 18038)
ggatctggagagggaaggggaagcctgctgacctgtggagacgtggagga
aaacccaggacca.

An E2A peptide may comprise an amino acid sequence comprising QCTNYALLKLAGDVESNPGP (SEQ ID NO: 18039) or a sequence having at least 70%, 80%, 90%, 95%, or 99% identity to the amino acid sequence comprising QCTNYALLKLAGDVESNPGP (SEQ ID NO: 18040). A GSG-E2A peptide may comprise an amino acid sequence comprising GSGQCTNYALLKLAGDVESNPGP (SEQ ID NO: 18041) or a sequence having at least 70%, 80%, 90%, 95%, or 99% identity to the amino acid sequence comprising GSGQCTNYALLKLAGDVESNPGP (SEQ ID NO: 18042). An F2A peptide may comprise an amino acid sequence comprising VKQTLNFDLLKLAGDVESNPGP (SEQ ID NO: 18043) or a sequence having at least 70%, 80%, 90%, 95%, or 99% identity to the amino acid sequence comprising VKQTLNFDLLKLAGDVESNPGP (SEQ ID NO: 18044). A GSG-F2A peptide may comprise an amino acid sequence comprising GSGVKQTLNFDLLKLAGDVESNPGP (SEQ ID NO: 18045) or a sequence having at least 70%, 80%, 90%, 95%, or 99% identity to the amino acid sequence comprising GSGVKQTLNFDLLKLAGDVESNPGP (SEQ ID NO: 18046). A P2A peptide may comprise an amino acid sequence comprising ATNFSLLKQAGDVEENPGP (SEQ ID NO: 18047) or a sequence having at least 70%, 80%, 90%, 95%, or 99% identity to the amino acid sequence comprising ATNFSLLKQAGDVEENPGP (SEQ ID NO: 18048). A GSG-P2A peptide may comprise an amino acid sequence comprising GSGATNFSLLKQAGDVEENPGP (SEQ ID NO: 18049) or a sequence having at least 70%, 80%, 90%, 95%, or 99% identity to the amino acid sequence comprising GSGATNFSLLKQAGDVEENPGP (SEQ ID NO: 18050).

[0026] Transposons of the disclosure may comprise a first and a second self-cleaving peptide, the first self-cleaving peptide located, for example, upstream of one or more Centyrin(s) or CARTyrin(s) of the disclosure the second self-cleaving peptide located, for example, downstream of the one or more Centyrin(s) or CARTyrin(s) of the disclosure. The first and/or the second self-cleaving peptide may comprise, for example, a T2A peptide, GSG-T2A peptide, an E2A peptide, a GSG-E2A peptide, an F2A peptide, a GSG-F2A peptide, a P2A peptide, or a GSG-P2A peptide. A T2A peptide may comprise an amino acid sequence comprising EGRGSLLTCGDVEENPGP (SEQ ID NO: 18034) or a sequence having at least 70%, 80%, 90%, 95%, or 99% identity to the amino acid sequence comprising EGRGSLLTCGDVEENPGP (SEQ ID NO: 18035). A GSG-T2A peptide may comprise an amino acid sequence comprising GSGEGRGSLLTCGDVEENPGP (SEQ ID NO: 18036) or a sequence having at least 70%, 80%, 90%, 95%, or 99% identity to the amino acid sequence comprising GSGEGRGSLLTCGDVEENPGP (SEQ ID NO: 18037). A GSG-T2A peptide may comprise a nucleic acid sequence comprising

(SEQ ID NO: 18038)
ggatctggagagggaaggggaagcctgctgacctgtggagacgtggagga
aaacccaggacca.

An E2A peptide may comprise an amino acid sequence comprising QCTNYALLKLAGDVESNPGP (SEQ ID NO: 18039) or a sequence having at least 70%, 80%, 90%, 95%, or 99% identity to the amino acid sequence comprising QCTNYALLKLAGDVESNPGP (SEQ ID NO: 18040). A GSG-E2A peptide may comprise an amino acid sequence comprising GSGQCTNYALLKLAGDVESNPGP (SEQ ID NO: 18041) or a sequence having at least 70%, 80%, 90%, 95%, or 99% identity to the amino acid sequence comprising GSGQCTNYALLKLAGDVESNPGP (SEQ ID NO: 18042). An F2A peptide may comprise an amino acid sequence comprising VKQTLNFDLLKLAGDVESNPGP (SEQ ID NO: 18043) or a sequence having at least 70%, 80%, 90%, 95%, or 99% identity to the amino acid sequence comprising VKQTLNFDLLKLAGDVESNPGP (SEQ ID NO: 18044). A GSG-F2A peptide may comprise an amino acid sequence comprising GSGVKQTLNFDLLKLAGDVESNPGP (SEQ ID NO: 18045) or a sequence having at least 70%, 80%, 90%, 95%, or 99% identity to the amino acid sequence comprising GSGVKQTLNFDLLKLAGDVESNPGP (SEQ ID NO: 18046). A P2A peptide may comprise an amino acid sequence comprising ATNFSLLKQAGDVEENPGP (SEQ ID NO: 18047) or a sequence having at least 70%, 80%, 90%, 95%, or 99% identity to the amino acid sequence comprising ATNFSLLKQAGDVEENPGP (SEQ ID NO: 18048). A GSG-P2A peptide may comprise an amino acid sequence comprising GSGATNFSLLKQAGDVEENPGP (SEQ ID NO: 18049) or a sequence having at least 70%, 80%, 90%, 95%, or 99% identity to the amino acid sequence comprising GSGATNFSLLKQAGDVEENPGP (SEQ ID NO: 18050).

[0027] In some embodiments of the transposons of the disclosure, including those comprising a CAR of the disclosure, the transposon further comprises a sequence encoding a chimeric stimulatory receptor (CSR). In some embodiments, the CSR comprises: (a) an ectodomain comprising an activation component; (b) a transmembrane domain; and (c) an endodomain comprising at least one signal transduction domain; wherein the combination of (a), (b) and (c) is non-naturally occurring. In some embodiments, the activation component of (a) is isolated or derived from a first protein. In some embodiments, the at least one signal transduction domain of (c) is isolated or derived from a second protein. In some embodiments, the first protein and the second protein are not identical. In some embodiments, the Activation component comprises one or more of a component of a human transmembrane receptor, a human cell-surface receptor, a T-cell Receptor (TCR), a component of a TCR complex, a component of a TCR co-receptor, a component of a TCR co-stimulatory protein, a component of a TCR inhibitory protein, a cytokine receptor, and a chemokine receptor. In some embodiments, the activation component comprises a portion of one or more of a component of a T-cell Receptor (TCR), a component of a TCR complex, a component of a TCR co-receptor, a component of a TCR co-stimulatory protein, a component of a TCR inhibitory protein, a cytokine receptor, and a chemokine receptor to which an agonist of the Activation component binds. In some embodiments, the activation component comprises a CD2 protein or a portion thereof to which an agonist binds. In some embodiments, the signal transduction domain comprises one or more of a component of a human signal transduction domain, T-cell Receptor (TCR), a component of a TCR complex, a component of a TCR co-receptor, a component of a TCR co-stimulatory protein, a component of a TCR inhibitory protein, a cytokine receptor, and a chemokine receptor. In some embodiments, the signal transduction domain comprises a CD3 protein. In some embodiments, the CD3 protein comprises a CD3ζ protein. In some embodiments, the endodomain further comprises a cytoplasmic domain. In some embodiments, the cytoplasmic domain is isolated or derived from a third protein. In some embodiments, the first protein and the third protein are identical. In some embodiments, the ectodomain further comprises a signal peptide. In some embodiments, the signal peptide is derived from a fourth protein. In some embodiments, the first protein and the fourth protein are identical. In some embodiments, the transmembrane domain is isolated or derived from a fifth protein. In some embodiments, the first protein and the fifth protein are identical. In some embodiments, the Activation component does not bind a naturally-occurring molecule. In some embodiments, the CSR does not transduce a signal upon binding of the activation component to a naturally-occurring molecule. In some embodiments, the ectodomain comprises a modification. In some embodiments, the modification comprises a mutation or a truncation of a sequence encoding the activation component when compared to a wild type sequence of the first protein. In some embodiments, the Activation component binds to a non-naturally occurring molecule. In some embodiments, the CSR selectively transduces a signal upon binding of the Activation component to a non-naturally occurring molecule.

[0028] In some embodiments of the transposons of the disclosure, the transposon is a piggyBac or a piggyBac-like transposon.

[0029] In some embodiments of the transposons of the disclosure, the transposon is a TcBuster transposon.

[0030] In some embodiments of the transposons of the disclosure, the transposon is a Sleeping Beauty transposon.

[0031] In some embodiments of the transposons of the disclosure, the transposon is a Helraiser transposon.

[0032] In some embodiments of the transposons of the disclosure, the transposon is a Tol2 transposon.

[0033] The disclosure provides a composition comprising the transposon the disclosure. In certain embodiments, the composition may further comprise a plasmid comprising a sequence encoding a transposase enzyme. The sequence encoding a transposase enzyme may be an mRNA sequence.

[0034] The disclosure provides a composition comprising a CAR of the disclosure. In some embodiments, the composition further comprises a CSR of the disclosure or a sequence encoding the CSR. In some embodiments, the sequence encoding the CSR comprises DNA. In some embodiments, the sequence encoding the CSR comprises RNA. In some embodiments, the sequence encoding the CSR comprises messenger RNA (mRNA). In some embodiments, upon introduction to a cell of the disclosure, the CSR or the sequence encoding the CSR is stably integrated by the cell. In some embodiments, upon introduction to a cell of the disclosure, the CSR or the sequence encoding the CSR is not stably integrated by the cell. In some embodiments, upon introduction to a cell of the disclosure, the CSR or the sequence encoding the CSR is stably expressed by the cell. In some embodiments, upon introduction to a cell of the disclosure, the CSR or the sequence encoding the CSR is transiently expressed by the cell. In some embodiments, upon introduction to a cell of the disclosure, the CSR or the sequence encoding the CSR comprises an RNA or an mRNA and the CSR or the sequence encoding the CSR is transiently expressed by the cell.

[0035] The disclosure provides a cell comprising a CAR of the disclosure. In some embodiments, the cell further comprises a CSR of the disclosure or a sequence encoding the CSR. In some embodiments, the sequence encoding the CSR comprises DNA. In some embodiments, the sequence encoding the CSR comprises RNA. In some embodiments, the sequence encoding the CSR comprises messenger RNA (mRNA). In some embodiments, the CSR or the sequence encoding the CSR is stably integrated into a genomic locus or loci of the cell. In some embodiments, the CSR or the sequence encoding the CSR is not stably integrated into a genomic locus or loci of the cell. In some embodiments, the CSR or the sequence encoding the CSR is stably expressed by the cell. In some embodiments, the CSR or the sequence encoding the CSR is transiently expressed by the cell. In some embodiments, the CSR or the sequence encoding the CSR comprises an RNA or an mRNA and the CSR or the sequence encoding the CSR is transiently expressed by the cell.

[0036] Transposons of the disclosure may comprise piggyBac transposons. In certain embodiments of this method, the transposon is a plasmid DNA transposon with a sequence encoding the chimeric antigen receptor flanked by two cis-regulatory insulator elements. In certain embodiments, the transposon is a piggyBac or a piggyBac-like transposon.

[0037] Transposase enzymes of the disclosure may include piggyBac transposases or compatible enzymes. Transposase enzymes of the disclosure may include piggyBac-like transposases or compatible enzymes. In certain embodiments, and, in particular, those embodiments wherein the transposon is a piggyBac transposon, the transposase is a piggyBac™ or a Super piggyBac™ (SPB) transposase. In certain embodiments, and, in particular, those embodiments wherein the transposase is a Super piggyBac™ (SPB) transposase, the sequence encoding the transposase is an mRNA sequence.

[0038] In certain embodiments of the methods of the disclosure, the transposase enzyme is a piggyBac™ (PB) transposase enzyme. The piggyBac (PB) transposase enzyme may comprise or consist of an amino acid sequence at least 75%, 80%, 85%, 90%, 95%, 99% or any percentage in between identical to:

```
(SEQ ID NO: 14487)
    1 MGSSLDDEHI LSALLQSDDE LVGEDSDSEI SDHVSEDDVQ SDTEEAFIDE VHEVQPTSSG
  61 SEILDEQNVI EQPGSSLASN RILTLPQRTI RGKNKHCWST SKSTRRSRVS ALNIVRSQRG
121 PTRMCRNIYD PLLCFKLFFT DEIISEIVKW TNAEISLKRR ESMTGATFRD TNEDEIYAFF
181 GILVMTAVRK DNHMSTDDLF DRSLSMVYVS VMSRDRFDFL IRCLRMDDKS IRPTLRENDV
241 FTPVRKIWDL FIHQCIQNYT PGAHLTIDEQ LLGFRGRCPF RMYIPNKPSK YGIKILMMCD
301 SGTKYMINGM PYLGRGTQTN GVPLGEYYVK ELSKPVHGSC RNITCDNWFT SIPLAKNLLQ
361 EPYKLTIVGT VRSNKREIPE VLKNSRSRPV GTSMFCFDGP LTLVSYKPKP AKMVYLLSSC
421 DEDASINEST GKPQMVMYYN QTKGGVDTLD QMCSVMTCSR KTNRWPMALL YGMINIACIN
481 SFIIYSHNVS SKGEKVQSRK KFMRNLYMSL TSSFMRKRLE APTLKRYLRD NISNILPNEV
541 PGTSDDSTEE PVMKKRTYCT YCPSKIRRKA NASCKKCKKV ICREHNIDMC QSCF.
```

[0039] In certain embodiments of the methods of the disclosure, the transposase enzyme is a piggyBac™ (PB) transposase enzyme that comprises or consists of an amino acid sequence having an amino acid substitution at one or more of positions 30, 165, 282, or 538 of the sequence:

```
(SEQ ID NO: 14487)
    1 MGSSLDDEHI LSALLQSDDE LVGEDSDSEI SDHVSEDDVQ SDTEEAFIDE VHEVQPTSSG
  61 SEILDEQNVI EQPGSSLASN RILTLPQRTI RGKNKHCWST SKSTRRSRVS ALNIVRSQRG
121 PTRMCRNIYD PLLCFKLFFT DEIISEIVKW TNAEISLKRR ESMTGATFRD TNEDEIYAFF
181 GILVMTAVRK DNHMSTDDLF DRSLSMVYVS VMSRDRFDFL IRCLRMDDKS IRPTLRENDV
241 FTPVRKIWDL FIHQCIQNYT PGAHLTIDEQ LLGFRGRCPF RMYIPNKPSK YGIKILMMCD
301 SGTKYMINGM PYLGRGTQTN GVPLGEYYVK ELSKPVHGSC RNITCDNWFT SIPLAKNLLQ
361 EPYKLTIVGT VRSNKREIPE VLKNSRSRPV GTSMFCFDGP LTLVSYKPKP AKMVYLLSSC
421 DEDASINEST GKPQMVMYYN QTKGGVDTLD QMCSVMTCSR KTNRWPMALL YGMINIACIN
481 SFIIYSHNVS SKGEKVQSRK KFMRNLYMSL TSSFMRKRLE APTLKRYLRD NISNILPNEV
541 PGTSDDSTEE PVMKKRTYCT YCPSKIRRKA NASCKKCKKV ICREHNIDMC QSCF.
```

[0040] In certain embodiments, the transposase enzyme is a piggyBac™ (PB) transposase enzyme that comprises or consists of an amino acid sequence having an amino acid substitution at two or more of positions 30, 165, 282, or 538 of the sequence of SEQ ID NO: 14487. In certain embodiments, the transposase enzyme is a piggyBac™ (PB) transposase enzyme that comprises or consists of an amino acid sequence having an amino acid substitution at three or more of positions 30, 165, 282, or 538 of the sequence of SEQ ID NO: 14487. In certain embodiments, the transposase enzyme is a piggyBac™ (PB) transposase enzyme that comprises or consists of an amino acid sequence having an amino acid substitution at each of the following positions 30, 165, 282, and 538 of the sequence of SEQ ID NO: 14487. In certain embodiments, the amino acid substitution at position 30 of the sequence of SEQ ID NO: 14487 is a substitution of a valine (V) for an isoleucine (I). In certain embodiments, the amino acid substitution at position 165 of the sequence of SEQ ID NO: 14487 is a substitution of a serine (S) for a glycine (G). In certain embodiments, the amino acid substitution at position 282 of the sequence of SEQ ID NO: 14487 is a substitution of a valine (V) for a methionine (M). In certain embodiments, the amino acid substitution at position 538 of the sequence of SEQ ID NO: 14487 is a substitution of a lysine (K) for an asparagine (N).

[0041] In certain embodiments of the methods of the disclosure, the transposase enzyme is a Super piggyBac™ (sPBo) transposase enzyme. In certain embodiments, the Super piggyBac™ (sPBo) transposase enzymes of the disclosure may comprise or consist of the amino acid sequence of the sequence of SEQ ID NO: 14487 wherein the amino acid substitution at position 30 is a substitution of a valine (V) for an isoleucine (I), the amino acid substitution at position 165 is a substitution of a serine (S) for a glycine (G), the amino acid substitution at position 282 is a substitution of a valine (V) for a methionine (M), and the amino acid substitution at position 538 is a substitution of a lysine (K) for an asparagine (N). In certain embodiments, the Super piggyBac™ (sPBo) transposase enzyme may comprise or consist of an amino acid sequence at least 75%, 80%, 85%, 90%, 95%, 99% or any percentage in between identical to:

```
(SEQ ID NO: 14484)
    1 MGSSLDDEHI LSALLQSDDE LVGEDSDSEV SDHVSEDDVQ SDTEEAFIDE VHEVQPTSSG
  61 SEILDEQNVI EQPGSSLASN RILTLPQRTI RGKNKHCWST SKSTRRSRVS ALNIVRSQRG
121 PTRMCRNIYD PLLCFKLFFT DEIISEIVKW TNAEISLKRR ESMTSATFRD TNEDEIYAFF
181 GILVMTAVRK DNHMSTDDLF DRSLSMVYVS VMSRDREDFL IRCLRMDDKS IRPTLRENDV
241 FTPVRKIWDL FIHQCIQNYT PGAHLTIDEQ LLGFRGRCPF RVYIPNKPSK YGIKILMMCD
301 SGTKYMINGM PYLGRGTQTN GVPLGEYYVK ELSKPVHGSC RNITCDNWFT SIPLAKNLLQ
361 EPYKLTIVGT VRSNKREIPE VLKNSRSRPV GTSMFCFDGP LTLVSYKPKP AKMVYLLSSC
421 DEDASINEST GKPQMVMYYN QTKGGVDTLD QMCSVMTCSR KTNRWPMALL YGMINIACIN
481 SFIIYSHNVS SKGEKVQSRK KFMRNLYMSL TSSFMRKRLE APTLKRYLRD NISNILPKEV
541 PGTSDDSTEE PVMKKRTYCT YCPSKIRRKA NASCKKCKKV ICREHNIDMC QSCF.
```

[0042] In certain embodiments of the methods of the disclosure, the transposase enzyme is a TcBuster transposon and wherein the transposase enzyme is a TcBuster transposase enzyme. In some embodiments, the TcBuster transposase enzyme is a hyperactive TcBuster transposase enzyme. In some embodiments, the TcBuster transposase enzyme comprises a sequence having at least 75% identity to:

(SEQ ID NO: 17900)
MMLNWLKSGK LESQSQEQSS CYLENSNCLP PTLDSTDIIG
EENKAGTTSR KKRKYDEDYL NEGFTWTGDK DEPNGLCVIC
EQVVNNSSLN PAKLKRHLDT KEFILKGKSE YEKRKCNELN
QKKETFERYV RDDNKNLLKA SYLVSLRIAK QGEAYTIAEK
LIKPCTKDLT TCVFGEKFAS KVDIVPLSDI TISRRIEDMS
YFCEAVLVNR LENAKGGFTL QMDESTDVAG LAILLVEVRY
IHESSFEEDM LFCKALPTOT IGEE1FNLLN AYEEKHSIPW
NLCYHICIDG AKAMVGVIKG VIARIKKLVP DIKASHCCLH
RHALAVKRIP NALHEVLNDA VKMINFIKSR PLNARVFALL
CDDLGSLHKN LLLHTEVRWL SRGKVLIREW ELRDEIRIFF
NEREFAGKLN DTSWLQNLAY IADIFSYLNE VNLSLQGPNS
TIFKVNSRIN SIKSKLKLWE ECITKNNTEC FANLNDFLET
SNIALDPNIK SNILEHLNGL KNTFLEYFPP TCNNISWVEN
PFNECGNVDT LPIKEREQLI DIRTDITLKS SFVPDGIGPF
WIKLMDEFPE ISKRAVKELM PEVITYLCEK SESVYVAIKT
KYRNRLDAED DMRLQLTTIH PDIDNLCNNK QAQKSH.

[0043] In certain embodiments of the methods of the disclosure, the transposase enzyme is a Sleeping Beauty transposon and the transposase enzyme is a Sleeping Beauty transposase enzyme. In some embodiments, the Sleeping Beauty transposase enzyme comprises the sequence of SEQ ID NO: 14485. In some embodiments, the Sleeping Beauty transposase enzyme is a hyperactive Sleeping Beauty transposase (SB100X). In some embodiments, the hyperactive Sleeping Beauty transposase (SB100X) comprises the sequence of SEQ ID NO: 14486.

[0044] In certain embodiments of the methods of the disclosure, the transposase enzyme is a Helraiser transposon and wherein the transposase enzyme is a Helraiser transposase enzyme. In some embodiments, the Helraiser transposase enzyme comprises the sequence of SEQ ID NO: 14501.

[0045] In certain embodiments of the methods of the disclosure, the transposase enzyme is a Tol2 transposon and wherein the transposase enzyme is a Tol2 transposase enzyme. In some embodiments, the Tol2 transposase enzyme comprises the sequence of SEQ ID NO: 14502.

[0046] The disclosure provides a vector comprising a CARTyrin of the disclosure. In certain embodiments, the vector is a viral vector. The vector may be a recombinant vector.

[0047] Viral vectors of the disclosure may comprise a sequence isolated or derived from a retrovirus, a lentivirus, an adenovirus, an adeno-associated virus or any combination thereof. The viral vector may comprise a sequence isolated or derived from an adeno-associated virus (AAV). The viral vector may comprise a recombinant AAV (rAAV). Exemplary adeno-associated viruses and recombinant adeno-associated viruses of the disclosure comprise two or more inverted terminal repeat (ITR) sequences located in cis next to a sequence encoding a Centyrin or CARTyrin of the disclosure. Exemplary adeno-associated viruses and recombinant adeno-associated viruses of the disclosure include, but are not limited to all serotypes (e.g. AAV1, AAV2, AAV3, AAV4, AAV5, AAV6, AAV7, AAV8, and AAV9). Exemplary adeno-associated viruses and recombinant adeno-associated viruses of the disclosure include, but are not limited to, self-complementary AAV (scAAV) and AAV hybrids containing the genome of one serotype and the capsid of another serotype (e.g. AAV2/5, AAV-DJ and AAV-DJ8). Exemplary adeno-associated viruses and recombinant adeno-associated viruses of the disclosure include, but are not limited to, rAAV-LK03.

[0048] Viral vectors of the disclosure may comprise a selection gene. The selection gene may encode a gene product essential for cell viability and survival. The selection gene may encode a gene product essential for cell viability and survival when challenged by selective cell culture conditions. Selective cell culture conditions may comprise a compound harmful to cell viability or survival and wherein the gene product confers resistance to the compound. Exemplary selection genes of the disclosure may include, but are not limited to, neo (conferring resistance to neomycin), TYMS (encoding Thymidylate Synthetase), MGMT (encoding O(6)-methylguanine-DNA methyltransferase), multidrug resistance gene (MDR1), ALDH1 (encoding Aldehyde dehydrogenase 1 family, member A1), FRANCF, RAD51C (encoding RAD51 Paralog C), GCS (encoding glucosylceramide synthase), NKX2.2 (encoding NK2 Homeobox 2) or any combination thereof.

[0049] Viral vectors of the disclosure may comprise an inducible proapoptotic polypeptide comprising (a) a ligand binding region, (b) a linker, and (c) a proapoptotic polypeptide, wherein the inducible proapoptotic polypeptide does not comprise a non-human sequence. In certain embodiments, the non-human sequence comprises a restriction site. In certain embodiments, the ligand binding region may be a multimeric ligand binding region. Inducible proapoptotic polypeptides of the disclosure may also be referred to as an “iC9 safety switch”. In certain embodiments, viral vectors of the disclosure may comprise an inducible caspase polypeptide comprising (a) a ligand binding region, (b) a linker, and (c) a caspase polypeptide, wherein the inducible proapoptotic polypeptide does not comprise a non-human sequence. In certain embodiments, viral vectors of the disclosure may comprise an inducible caspase polypeptide comprising (a) a ligand binding region, (b) a linker, and (c) a caspase polypeptide, wherein the inducible proapoptotic polypeptide does not comprise a non-human sequence. In certain embodiments, viral vectors of the disclosure may comprise an inducible caspase polypeptide comprising (a) a ligand binding region, (b) a linker, and (c) a truncated caspase 9 polypeptide, wherein the inducible proapoptotic polypeptide does not comprise a non-human sequence. In certain embodiments of the inducible proapoptotic polypeptides, inducible caspase polypeptides or truncated caspase 9 polypeptides of the disclosure, the ligand binding region may comprise a FK506 binding protein 12 (FKBP12) polypeptide. In certain embodiments, the amino acid sequence of the ligand binding region that comprise a FK506 binding protein 12 (FKBP12) polypeptide may comprise a modification at position 36 of the sequence. The modification may be a substitution of valine (V) for phenylalanine (F) at position 36 (F36V). In certain embodiments, the FKBP12 polypeptide is encoded by an amino acid sequence comprising

(SEQ ID NO: 18026)
GVQVETISPGDGRTFPKRGQTCVVHYTGMLEDGKKVDSSRDRNKPFKFML
GKQEVIRGWEEGVAQMSVGQRAKLTISPDYAYGATGHPGIIPPHATLVFD
VELLKLE.

In certain embodiments, the FKBP12 polypeptide is encoded by a nucleic acid sequence comprising

(SEQ ID NO: 18027)
GGGGTCCAGGTCGAGACTATTTCACCAGGGGATGGGCGAACATTTCCAAA
AAGGGGCCAGACTTGCGTCGTGCATTACACCGGGATGCTGGAGGACGGGA
AGAAAGTGGACAGCTCCAGGGATCGCAACAAGCCCTTCAAGTTCATGCTG
GGAAAGCAGGAAGTGATCCGAGGATGGGAGGAAGGCGTGGCACAGATGTC
AGTCGGCCAGCGGGCCAAACTGACCATTAGCCCTGACTACGCTTATGGAG
CAACAGGCCACCCAGGGATCATTCCCCCTCATGCCACCCTGGTCTTCGAT
GTGGAACTGCTGAAGCTGGAG.

In certain embodiments, the induction agent specific for the ligand binding region may comprise a FK506 binding protein 12 (FKBP12) polypeptide having a substitution of valine (V) for phenylalanine (F) at position 36 (F36V) comprises AP20187 and/or AP1903, both synthetic drugs.

[0050] In certain embodiments of the inducible proapoptotic polypeptides, inducible caspase polypeptides or truncated caspase 9 polypeptides of the disclosure, the linker region is encoded by an amino acid comprising GGGGS (SEQ ID NO: 18028) or a nucleic acid sequence comprising GGAGGAGGAGGATCC (SEQ ID NO: 18029). In certain embodiments, the nucleic acid sequence encoding the linker does not comprise a restriction site.

[0051] In certain embodiments of the truncated caspase 9 polypeptides of the disclosure, the truncated caspase 9 polypeptide is encoded by an amino acid sequence that does not comprise an arginine (R) at position 87 of the sequence. Alternatively, or in addition, in certain embodiments of the inducible proapoptotic polypeptides, inducible caspase polypeptides or truncated caspase 9 polypeptides of the disclosure, the truncated caspase 9 polypeptide is encoded by an amino acid sequence that does not comprise an alanine (A) at position 282 the sequence. In certain embodiments of the inducible proapoptotic polypeptides, inducible caspase polypeptides or truncated caspase 9 polypeptides of the disclosure, the truncated caspase 9 polypeptide is encoded by an amino acid comprising

(SEQ ID NO: 18030)
GFGDVGALESLRGNADLAYILSMEPCGHCLIINNVNFCRESGLRTRTGSN
IDCEKLRRRFSSLHFMVEVKGDLTAKKMVLALLELAQQDHGALDCCVVVI
LSHGCQASHLQFPGAVYGTDGCPVSVEKIVNIFNGTSCPSLGGKPKLFFI
QACGGEQKDHGFEVASTSPEDESPGSNPEPDATPFQEGLRTFDQLDAISS
LPTPSDIFVSYSTFPGFVSWRDPKSGSWYVETLDDIFEQWAHSEDLQSLL
LRVANAVSVKGIYKQMPGCFNFLRKKLFFKTS

or a nucleic acid sequence comprising

(SEQ ID NO: 18031)
GGATTTGGGGACGTGGGGGCCCTGGAGTCTCTGCGAGGAAATGCCGATCT
GGCTTACATCCTGAGCATGGAACCCTGCGGCCACTGTCTGATCATTAACA
ATGTGAACTTCTGCAGAGAAAGCGGACTGCGAACACGGACTGGCTCCAAT
ATTGACTGTGAGAAGCTGCGGAGAAGGTTCTCTAGTCTGCACTTTATGGT
CGAAGTGAAAGGGGATCTGACCGCCAAGAAAATGGTGCTGGCCCTGCTGG
AGCTGGCTCAGCAGGACCATGGAGCTCTGGATTGCTGCGTGGTCGTGATC
CTGTCCCACGGGTGCCAGGCTTCTCATCTGCAGTTCCCCGGAGCAGTGTA
CGGAACAGACGGCTGTCCTGTCAGCGTGGAGAAGATCGTCAACATCTTCA
ACGGCACTTCTTGCCCTAGTCTGGGGGGAAAGCCAAAACTGTTCTTTATC
CAGGCCTGTGGCGGGGAACAGAAAGATCACGGCTTCGAGGTGGCCAGCAC
CAGCCCTGAGGACGAATCACCAGGGAGCAACCCTGAACCAGATGCAACTC
CATTCCAGGAGGGACTGAGGACCTTTGACCAGCTGGATGCTATCTCAAGC
CTGCCCACTCCTAGTGACATTTTCGTGTCTTACAGTACCTTCCCAGGCTT
TGTCTCATGGCGCGATCCCAAGTCAGGGAGCTGGTACGTGGAGACACTGG
ACGACATCTTTGAACAGTGGGCCCATTCAGAGGACCTGCAGAGCCTGCTG
CTGCGAGTGGCAAACGCTGTCTCTGTGAAGGGCATCTACAAACAGATGCC
CGGGTGCTTCAATTTTCTGAGAAAGAAACTGTTCTTTAAGACTTCC.

[0052] In certain embodiments of the inducible proapoptotic polypeptides, wherein the polypeptide comprises a truncated caspase 9 polypeptide, the inducible proapoptotic polypeptide is encoded by an amino acid sequence comprising

(SEQ ID NO: 18032)
GVQVETISPGDGRTFPKRGQTCVVHYTGMLEDGKKVDSSRDRNKPFKFML
GKQEVIRGWEEGVAQMSVGQRAKLTISPDYAYGATGHPGIIPPHATLVFD
VELLKLEGGGGSGFGDVGALESLRGNADLAYILSMEPCGHCLIINNVNFC
RESGLRTRTGSNIDCEKLRRRFSSLHFMVEVKGDLTAKKMVLALLELAQQ
DHGALDCCVVVILSHGCQASHLQFPGAVYGTDGCPVSVEKIVNIFNGTSC
PSLGGKPKLFFIQACGGEQKDHGFEVASTSPEDESPGSNPEPDATPFQEG
LRTFDQLDAISSLPTPSDIFVSYSTFPGFVSWRDPKSGSWYVETLDDIFE
QWAHSEDLQSLLLRVANAVSVKGIYKQMPGCFNFLRKKLFFKTS

or the nucleic acid sequence comprising

(SEQ ID NO: 18033)
ggggtccaggtcgagactatttcaccaggggatgggcgaacatttccaaa
aaggggccagacttgcgtcgtgcattacaccgggatgctggaggacggga
agaaagtggacagctccagggatcgcaacaagcccttcaagttcatgctg
ggaaagcaggaagtgatccgaggatgggaggaaggcgtggcacagatgtc
agtcggccagcgggccaaactgaccattagccctgactacgcttatggag
caacaggccacccagggatcattccccctcatgccaccctggtcttcgat
gtggaactgctgaagctggagggaggaggaggatccggatttggggacgt
gggggccctggagtctctgcgaggaaatgccgatctggcttacatcctga
gcatggaaccctgcggccactgtctgatcattaacaatgtgaacttctgc
agagaaagcggactgcgaacacggactggctccaatattgactgtgagaa
gctgcggagaaggttctctagtctgcactttatggtcgaagtgaaagggg
atctgaccgccaagaaaatggtgctggccctgctggagctggctcagcag
gaccatggagctctggattgctgcgtggtcgtgatcctgtcccacgggtg
ccaggcttctcatctgcagttccccggagcagtgtacggaacagacggct
gtcctgtcagcgtggagaagatcgtcaacatcttcaacggcacttcttgc
cctagtctggggggaaagccaaaactgttctttatccaggcctgtggcgg
ggaacagaaagatcacggcttcgaggtggccagcaccagccctgaggacg
aatcaccagggagcaaccctgaaccagatgcaactccattccaggaggga
ctgaggacctttgaccagctggatgctatctcaagcctgcccactcctag
tgacattacgtgtcttacagtaccttcccaggctttgtctcatggcgcga
tcccaagtcagggagctggtacgtggagacactggacgacatctttgaac
agtgggcccattcagaggacctgcagagcctgctgctgcgagtggcaaac
gctgtctctgtgaagggcatctacaaacagatgcccgggtgcttcaattt
tctgagaaagaaactgttctttaagacttcc.

[0053] Viral vectors of the disclosure may comprise at least one self-cleaving peptide. In some embodiments, the vector may comprise at least one self-cleaving peptide and wherein a self-cleaving peptide is located between a CARtyrin and a selection gene. In some embodiments, the vector may comprise at least one self-cleaving peptide and wherein a first self-cleaving peptide is located upstream of a CARtyrin and a second self-cleaving peptide is located downstream of a CARtyrin. Viral vectors of the disclosure may comprise at least one self-cleaving peptide(s) located, for example, between one or more of a CARTyrin, CAR or CAR of the disclosure and an inducible proapoptotic polypeptide of the disclosure. Viral vectors of the disclosure may comprise at least two self-cleaving peptide(s), a first self-cleaving peptide located, for example, upstream or immediately upstream of an inducible proapoptotic polypeptide of the disclosure and a second first self-cleaving peptide located, for example, downstream or immediately upstream of an inducible proapoptotic polypeptide of the disclosure. The self-cleaving peptide may comprise, for example, a T2A peptide, GSG-T2A peptide, an E2A peptide, a GSG-E2A peptide, an F2A peptide, a GSG-F2A peptide, a P2A peptide, or a GSG-P2A peptide. A T2A peptide may comprise an amino acid sequence comprising EGRGSLLTCGDVEENPGP (SEQ ID NO: 18034) or a sequence having at least 70%, 80%, 90%, 95%, or 99% identity to the amino acid sequence comprising EGRGSLLTCGDVEENPGP (SEQ ID NO: 18035). A GSG-T2A peptide may comprise an amino acid sequence comprising GSGEGRGSLLTCGDVEENPGP (SEQ ID NO: 18036) or a sequence having at least 70%, 80%, 90%, 95%, or 99% identity to the amino acid sequence comprising GSGEGRGSLLTCGDVEENPGP (SEQ ID NO: 18037). A GSG-T2A peptide may comprise a nucleic acid sequence comprising

(SEQ ID NO: 18038)
ggatctggagagggaaggggaagcctgctgacctgtggagacgtggagga
aaacccaggacca.

An E2A peptide may comprise an amino acid sequence comprising QCTNYALLKLAGDVESNPGP (SEQ ID NO: 18039) or a sequence having at least 70%, 80%, 90%, 95%, or 99% identity to the amino acid sequence comprising QCTNYALLKLAGDVESNPGP (SEQ ID NO: 18040). A GSG-E2A peptide may comprise an amino acid sequence comprising GSGQCTNYALLKLAGDVESNPGP (SEQ ID NO: 18041) or a sequence having at least 70%, 80%, 90%, 95%, or 99% identity to the amino acid sequence comprising GSGQCTNYALLKLAGDVESNPGP (SEQ ID NO: 18042). An F2A peptide may comprise an amino acid sequence comprising VKQTLNFDLLKLAGDVESNPGP (SEQ ID NO: 18043) or a sequence having at least 70%, 80%, 90%, 95%, or 99% identity to the amino acid sequence comprising VKQTLNFDLLKLAGDVESNPGP (SEQ ID NO: 18044). A GSG-F2A peptide may comprise an amino acid sequence comprising GSGVKQTLNFDLLKLAGDVESNPGP (SEQ ID NO: 18045) or a sequence having at least 70%, 80%, 90%, 95%, or 99% identity to the amino acid sequence comprising GSGVKQTLNFDLLKLAGDVESNPGP (SEQ ID NO: 18046). A P2A peptide may comprise an amino acid sequence comprising ATNFSLLKQAGDVEENPGP (SEQ ID NO: 18047) or a sequence having at least 70%, 80%, 90%, 95%, or 99% identity to the amino acid sequence comprising ATNFSLLKQAGDVEENPGP (SEQ ID NO: 18048). A GSG-P2A peptide may comprise an amino acid sequence comprising GSGATNFSLLKQAGDVEENPGP (SEQ ID NO: 18049) or a sequence having at least 70%, 80%, 90%, 95%, or 99% identity to the amino acid sequence comprising GSGATNFSLLKQAGDVEENPGP (SEQ ID NO: 18050).

[0054] The disclosure provides a vector comprising the CARTyrin of the disclosure. In certain embodiments, the vector is a nanoparticle. Exemplary nanoparticle vectors of the disclosure include, but are not limited to, nucleic acids (e.g. RNA, DNA, synthetic nucleotides, modified nucleotides or any combination thereof), amino acids (L-amino acids, D-amino acids, synthetic amino acids, modified amino acids, or any combination thereof), polymers (e.g. polymersomes), micelles, lipids (e.g. liposomes), organic molecules (e.g. carbon atoms, sheets, fibers, tubes), inorganic molecules (e.g. calcium phosphate or gold) or any combination thereof. A nanoparticle vector may be passively or actively transported across a cell membrane.

[0055] Nanoparticle vectors of the disclosure may comprise a selection gene. The selection gene may encode a gene product essential for cell viability and survival. The selection gene may encode a gene product essential for cell viability and survival when challenged by selective cell culture conditions. Selective cell culture conditions may comprise a compound harmful to cell viability or survival and wherein the gene product confers resistance to the compound. Exemplary selection genes of the disclosure may include, but are not limited to, neo (conferring resistance to neomycin), TYMS (encoding Thymidylate Synthetase), MGMT (encoding O(6)-methylguanine-DNA methyltransferase), multidrug resistance gene (MDR1), ALDH1 (encoding Aldehyde dehydrogenase 1 family, member A1), FRANCF, RAD51C (encoding RAD51 Paralog C), GCS (encoding glucosylceramide synthase), NKX2.2 (encoding NK2 Homeobox 2) or any combination thereof.

[0056] Nanoparticle vectors of the disclosure may comprise an inducible proapoptotic polypeptide comprising (a) a ligand binding region, (b) a linker, and (c) a proapoptotic polypeptide, wherein the inducible proapoptotic polypeptide does not comprise a non-human sequence. In certain embodiments, the non-human sequence comprises a restriction site. In certain embodiments, the ligand binding region may be a multimeric ligand binding region. Inducible proapoptotic polypeptides of the disclosure may also be referred to as an “iC9 safety switch”. In certain embodiments, nanoparticle vectors of the disclosure may comprise an inducible caspase polypeptide comprising (a) a ligand binding region, (b) a linker, and (c) a caspase polypeptide, wherein the inducible proapoptotic polypeptide does not comprise a non-human sequence. In certain embodiments, nanoparticle vectors of the disclosure may comprise an inducible caspase polypeptide comprising (a) a ligand binding region, (b) a linker, and (c) a caspase polypeptide, wherein the inducible proapoptotic polypeptide does not comprise a non-human sequence. In certain embodiments, nanoparticle vectors of the disclosure may comprise an inducible caspase polypeptide comprising (a) a ligand binding region, (b) a linker, and (c) a truncated caspase 9 polypeptide, wherein the inducible proapoptotic polypeptide does not comprise a non-human sequence. In certain embodiments of the inducible proapoptotic polypeptides, inducible caspase polypeptides or truncated caspase 9 polypeptides of the disclosure, the ligand binding region may comprise a FK506 binding protein 12 (FKBP12) polypeptide. In certain embodiments, the amino acid sequence of the ligand binding region that comprise a FK506 binding protein 12 (FKBP12) polypeptide may comprise a modification at position 36 of the sequence. The modification may be a substitution of valine (V) for phenylalanine (F) at position 36 (F36V). In certain embodiments, the FKBP12 polypeptide is encoded by an amino acid sequence comprising

(SEQ ID NO: 18026)
GVQVETISPGDGRTFPKRGQTCVVHYTGMLEDGKKVDSSRDRNKPFKFML
GKQEVIRGWEEGVAQMSVGQRAKLTISPDYAYGATGHPGIIPPHATLVFD
VELLKLE.

In certain embodiments, the FKBP12 polypeptide is encoded by a nucleic acid sequence comprising

(SEQ ID NO: 18027)
GGGGTCCAGGTCGAGACTATTTCACCAGGGGATGGGCGAACATTTCCAAA
AAGGGGCCAGACTTGCGTCGTGCATTACACCGGGATGCTGGAGGACGGGA
AGAAAGTGGACAGCTCCAGGGATCGCAACAAGCCCTTCAAGTTCATGCTG
GGAAAGCAGGAAGTGATCCGAGGATGGGAGGAAGGCGTGGCACAGATGTC
AGTCGGCCAGCGGGCCAAACTGACCATTAGCCCTGACTACGCTTATGGAG
CAACAGGCCACCCAGGGATCATTCCCCCTCATGCCACCCTGGTCTTCGAT
GTGGAACTGCTGAAGCTGGAG.

In certain embodiments, the induction agent specific for the ligand binding region may comprise a FK506 binding protein 12 (FKBP12) polypeptide having a substitution of valine (V) for phenylalanine (F) at position 36 (F36V) comprises AP20187 and/or AP1903, both synthetic drugs.

[0057] In certain embodiments of the inducible proapoptotic polypeptides, inducible caspase polypeptides or truncated caspase 9 polypeptides of the disclosure, the linker region is encoded by an amino acid comprising GGGGS (SEQ ID NO: 18028) or a nucleic acid sequence comprising GGAGGAGGAGGATCC (SEQ ID NO: 18029). In certain embodiments, the nucleic acid sequence encoding the linker does not comprise a restriction site.

[0058] In certain embodiments of the truncated caspase 9 polypeptides of the disclosure, the truncated caspase 9 polypeptide is encoded by an amino acid sequence that does not comprise an arginine (R) at position 87 of the sequence. Alternatively, or in addition, in certain embodiments of the inducible proapoptotic polypeptides, inducible caspase polypeptides or truncated caspase 9 polypeptides of the disclosure, the truncated caspase 9 polypeptide is encoded by an amino acid sequence that does not comprise an alanine (A) at position 282 the sequence. In certain embodiments of the inducible proapoptotic polypeptides, inducible caspase polypeptides or truncated caspase 9 polypeptides of the disclosure, the truncated caspase 9 polypeptide is encoded by an amino acid comprising

(SEQ ID NO: 18030)
GFGDVGALESLRGNADLAYILSMEPCGHCLIINNVNFCRESGLRTRTGSN
IDCEKLRRRFSSLHFMVEVKGDLTAKKMVLALLELAQQDHGALDCCVVVI
LSHGCQASHLQFPGAVYGTDGCPVSVEKIVNIFNGTSCPSLGGKPKLFFI
QACGGEQKDHGFEVASTSPEDESPGSNPEPDATPFQEGLRTFDQLDAISS
LPTPSDIFVSYSTFPGFVSWRDPKSGSWYVETLDDIFEQWAHSEDLQSLL
LRVANAVSVKGIYKQMPGCFNFLRKKLFFKTS

or a nucleic acid sequence comprising

(SEQ ID NO: 18031)
GGATTTGGGGACGTGGGGGCCCTGGAGTCTCTGCGAGGAAATGCCGATCT
GGCTTACATCCTGAGCATGGAACCCTGCGGCCACTGTCTGATCATTAACA
ATGTGAACTTCTGCAGAGAAAGCGGACTGCGAACACGGACTGGCTCCAAT
ATTGACTGTGAGAAGCTGCGGAGAAGGTTCTCTAGTCTGCACTTTATGGT
CGAAGTGAAAGGGGATCTGACCGCCAAGAAAATGGTGCTGGCCCTGCTGG
AGCTGGCTCAGCAGGACCATGGAGCTCTGGATTGCTGCGTGGTCGTGATC
CTGTCCCACGGGTGCCAGGCTTCTCATCTGCAGTTCCCCGGAGCAGTGTA
CGGAACAGACGGCTGTCCTGTCAGCGTGGAGAAGATCGTCAACATCTTCA
ACGGCACTTCTTGCCCTAGTCTGGGGGGAAAGCCAAAACTGTTCTTTATC
CAGGCCTGTGGCGGGGAACAGAAAGATCACGGCTTCGAGGTGGCCAGCAC
CAGCCCTGAGGACGAATCACCAGGGAGCAACCCTGAACCAGATGCAACTC
CATTCCAGGAGGGACTGAGGACCTTTGACCAGCTGGATGCTATCTCAAGC
CTGCCCACTCCTAGTGACATTTTCGTGTCTTACAGTACCTTCCCAGGCTT
TGTCTCATGGCGCGATCCCAAGTCAGGGAGCTGGTACGTGGAGACACTGG
ACGACATCTTTGAACAGTGGGCCCATTCAGAGGACCTGCAGAGCCTGCTG
CTGCGAGTGGCAAACGCTGTCTCTGTGAAGGGCATCTACAAACAGATGCC
CGGGTGCTTCAATTTTCTGAGAAAGAAACTGTTCTTTAAGACTTCC.

[0059] In certain embodiments of the inducible proapoptotic polypeptides, wherein the polypeptide comprises a truncated caspase 9 polypeptide, the inducible proapoptotic polypeptide is encoded by an amino acid sequence comprising

(SEQ ID NO: 18032)
GVQVETISPGDGRTFPKRGQTCVVHYTGMLEDGKKVDSSRDRNKPFKFML
GKQEVIRGWEEGVAQMSVGQRAKLTISPDYAYGATGHPGIIPPHATLVFD
VELLKLEGGGGSGFGDVGALESLRGNADLAYILSMEPCGHCLIINNVNFC
RESGLRTRTGSNIDCEKLRRRFSSLHFMVEVKGDLTAKKMVLALLELAQQ
DHGALDCCVVVILSHGCQASHLQFPGAVYGTDGCPVSVEKIVNIFNGTSC
PSLGGKPKLFFIQACGGEQKDHGFEVASTSPEDESPGSNPEPDATPFQEG
LRTFDQLDAISSLPTPSDIFVSYSTFPGFVSWRDPKSGSWYVETLDDIFE
QWAHSEDLQSLLLRVANAVSVKGIYKQMPGCFNFLRKKLFFKTS

or the nucleic acid sequence comprising

(SEQ ID NO: 18033)
ggggtccaggtcgagactatttcaccaggggatgggcgaacatttccaaa
aaggggccagacttgcgtcgtgcattacaccgggatgctggaggacggga
agaaagtggacagctccagggatcgcaacaagcccttcaagttcatgctg
ggaaagcaggaagtgatccgaggatgggaggaaggcgtggcacagatgtc
agtcggccagcgggccaaactgaccattagccctgactacgcttatggag
caacaggccacccagggatcattccccctcatgccaccctggtcttcgat
gtggaactgctgaagctggagggaggaggaggatccggatttggggacgt
gggggccctggagtctctgcgaggaaatgccgatctggcttacatcctga
gcatggaaccctgcggccactgtctgatcattaacaatgtgaacttctgc
agagaaagcggactgcgaacacggactggctccaatattgactgtgagaa
gctgcggagaaggttctctagtctgcactttatggtcgaagtgaaagggg
atctgaccgccaagaaaatggtgctggccctgctggagctggctcagcag
gaccatggagctctggattgctgcgtggtcgtgatcctgtcccacgggtg
ccaggcttctcatctgcagttccccggagcagtgtacggaacagacggct
gtcctgtcagcgtggagaagatcgtcaacatcttcaacggcacttcttgc
cctagtctggggggaaagccaaaactgttctttatccaggcctgtggcgg
ggaacagaaagatcacggcttcgaggtggccagcaccagccctgaggacg
aatcaccagggagcaaccctgaaccagatgcaactccattccaggaggga
ctgaggacctttgaccagctggatgctatctcaagcctgcccactcctag
tgacattacgtgtcttacagtaccttcccaggctttgtctcatggcgcga
tcccaagtcagggagctggtacgtggagacactggacgacatctttgaac
agtgggcccattcagaggacctgcagagcctgctgctgcgagtggcaaac
gctgtctctgtgaagggcatctacaaacagatgcccgggtgcttcaattt
tctgagaaagaaactgttattaagacttcc.

[0060] Nanoparticle vectors of the disclosure may comprise at least one self-cleaving peptide. In some embodiments, the nanoparticle vector may comprise at least one self-cleaving peptide and wherein a self-cleaving peptide is located between a CARTyrin and the nanoparticle. In some embodiments, the nanoparticle vector may comprise at least one self-cleaving peptide and wherein a first self-cleaving peptide is located upstream of a CARTyrin and a second self-cleaving peptide is located downstream of a CARTyrin. In some embodiments, the nanoparticle vector may comprise at least one self-cleaving peptide and wherein a first self-cleaving peptide is located between a CARTyrin and the nanoparticle and a second self-cleaving peptide is located downstream of the CARTyrin. In some embodiments, the nanoparticle vector may comprise at least one self-cleaving peptide and wherein a first self-cleaving peptide is located between a CARTyrin and the nanoparticle and a second self-cleaving peptide is located downstream of the CARTyrin, for example, between the CARTyrin and a selection gene.

[0061] Nanoparticle vectors of the disclosure may comprise at least one self-cleaving peptide(s) located, for example, between one or more Centyrins(s) or CARTyrin(s) of the disclosure and an inducible proapoptotic polypeptide of the disclosure. Nanoparticle vectors of the disclosure may comprise at least two self-cleaving peptide(s), a first self-cleaving peptide located, for example, upstream or immediately upstream of an inducible proapoptotic polypeptide of the disclosure and a second first self-cleaving peptide located, for example, downstream or immediately upstream of an inducible proapoptotic polypeptide of the disclosure. The self-cleaving peptide may comprise, for example, a T2A peptide, GSG-T2A peptide, an E2A peptide, a GSG-E2A peptide, an F2A peptide, a GSG-F2A peptide, a P2A peptide, or a GSG-P2A peptide. A T2A peptide may comprise an amino acid sequence comprising EGRGSLLTCGDVEENPGP (SEQ ID NO: 18034) or a sequence having at least 70%, 80%, 90%, 95%, or 99% identity to the amino acid sequence comprising EGRGSLLTCGDVEENPGP (SEQ ID NO: 18034). A GSG-T2A peptide may comprise an amino acid sequence comprising GSGEGRGSLLTCGDVEENPGP (SEQ ID NO: 18036) or a sequence having at least 70%, 80%, 90%, 95%, or 99% identity to the amino acid sequence comprising GSGEGRGSLLTCGDVEENPGP (SEQ ID NO: 18036). A GSG-T2A peptide may comprise a nucleic acid sequence comprising

(SEQ ID NO: 18038)
ggatctggagagggaaggggaagcctgctgacctgtggagacgtggagga
aaacccaggacca.

An E2A peptide may comprise an amino acid sequence comprising QCTNYALLKLAGDVESNPGP (SEQ ID NO: 18039) or a sequence having at least 70%, 80%, 90%, 95%, or 99% identity to the amino acid sequence comprising QCTNYALLKLAGDVESNPGP (SEQ ID NO: 18039). A GSG-E2A peptide may comprise an amino acid sequence comprising GSGQCTNYALLKLAGDVESNPGP (SEQ ID NO: 18041) or a sequence having at least 70%, 80%, 90%, 95%, or 99% identity to the amino acid sequence comprising GSGQCTNYALLKLAGDVESNPGP (SEQ ID NO: 18041). An F2A peptide may comprise an amino acid sequence comprising VKQTLNFDLLKLAGDVESNPGP (SEQ ID NO: 18043) or a sequence having at least 70%, 80%, 90%, 95%, or 99% identity to the amino acid sequence comprising VKQTLNFDLLKLAGDVESNPGP (SEQ ID NO: 18043). A GSG-F2A peptide may comprise an amino acid sequence comprising GSGVKQTLNFDLLKLAGDVESNPGP (SEQ ID NO: 18045) or a sequence having at least 70%, 80%, 90%, 95%, or 99% identity to the amino acid sequence comprising GSGVKQTLNFDLLKLAGDVESNPGP (SEQ ID NO: 18045). A P2A peptide may comprise an amino acid sequence comprising ATNFSLLKQAGDVEENPGP (SEQ ID NO: 18047) or a sequence having at least 70%, 80%, 90%, 95%, or 99% identity to the amino acid sequence comprising ATNFSLLKQAGDVEENPGP (SEQ ID NO: 18047). A GSG-P2A peptide may comprise an amino acid sequence comprising GSGATNFSLLKQAGDVEENPGP (SEQ ID NO: 18050) or a sequence having at least 70%, 80%, 90%, 95%, or 99% identity to the amino acid sequence comprising GSGATNFSLLKQAGDVEENPGP (SEQ ID NO: 18050).

[0062] The disclosure provides a composition comprising a vector of the disclosure. The disclosure provides a cell comprising a CARTyrin of the disclosure. The disclosure provides a cell comprising a transposon of the disclosure. In certain embodiments, the cell comprising a CARTyrin, a transposon, or a vector of the disclosure may express a CARTyrim on the cell surface. The cell may be any type of cell. Preferably, the cell is an immune cell. The immune cell may be a T-cell, a Natural Killer (NK) cell, a Natural Killer (NK)-like cell, Cytokine Induced Killer (CIK) cell), a hematopoeitic progenitor cell, a peripheral blood (PB) derived T cell or an umbilical cord blood (UCB) derived T-cell. Preferably, the immune cell is a T-cell. The T-cell may be an early memory cell, a stem-like T-cell, a T_{SCM}-like cell, a T_{SCM} or a T_{CM}. The T-cell may be a T_{SCM}. The cell may be an artificial antigen presenting cell, which, optionally, may be used to stimulate and expand a modified immune cell or T cell of the disclosure. The cell may be a tumor cell, which, optionally, may be used as an artificial or modified antigen presenting cell.

[0063] Modified cells of the disclosure that may be used for adoptive therapy may be autologous or allogeneic.

[0064] The disclosure provides a method for expressing a CARTyrin on the surface of a cell, comprising: (a) obtaining a cell population; (b) contacting the cell population to a composition comprising a CARTyrin of the disclosure or a sequence encoding the CARTyrin, under conditions sufficient to transfer the CARTyrin across a cell membrane of at least one cell in the cell population, thereby generating a modified cell population; (c) culturing the modified cell population under conditions suitable for integration of the transposon; and (d) expanding and/or selecting at least one cell from the modified cell population that express the CARTyrin on the cell surface.

[0065] In certain embodiments of this method of expressing a CARTyrin, the cell population may comprise leukocytes and/or CD4+ and CD8+ leukocytes. The cell population may comprise CD4+ and CD8+ leukocytes in an optimized ratio. The optimized ratio of CD4+ to CD8+ leukocytes does not naturally occur in vivo. The cell population may comprise a tumor cell.

[0066] In certain embodiments of this method of expressing a CARTyrin, a transposon or vector comprises the CARTyrin or the sequence encoding the CARTyrin. In certain embodiments, a transposon comprises an anti-PSMA CARTyrin or the sequence encoding an anti-PSMA CARTyrin. In certain embodiments, the transposon comprises a piggyBac transposon. In certain embodiments, the transposon further comprises a composition comprising a plasmid comprising a sequence encoding a transposase enzyme. In certain embodiments, including those embodiments wherein the transposase is a piggyBac transposase, the transpose enzyme is an mRNA sequence. In certain embodiments, the piggyBac transposase comprises an amino acid sequence comprising SEQ ID NO: 18017. In certain embodiments, the piggyBac transposase is a hyperactive variant and wherein the hyperactive variant comprises an amino acid substitution at one or more of positions 30, 165, 282 and 538 of SEQ ID NO: 18017. In certain embodiments, the amino acid substitution at position 30 of SEQ ID NO: 18017 is a substitution of a valine (V) for an isoleucine (I) (I30V). In certain embodiments, the amino acid substitution at position 165 of SEQ ID NO: 18017 is a substitution of a serine (S) for a glycine (G) (G165S). In certain embodiments, wherein the amino acid substitution at position 282 of SEQ ID NO: 18017 is a substitution of a valine (V) for a methionine (M) (M282V). In certain embodiments, the amino acid substitution at position 538 of SEQ ID NO: 18017 is a substitution of a lysine (K) for an asparagine (N) (N538K). In certain embodiments, the transposase is a Super piggyBac (sPBo) transposase. In certain embodiments, the Super piggyBac (sPBo) transposase comprises an amino acid sequence comprising SEQ ID NO: 14484.

[0067] The disclosure provides a vector comprising a CARTyrin or a sequence encoding a CARTyrin of the disclosure. In certain embodiments, the vector comprises an anti-PSMA CARTyrin or a sequence encoding an anti-PSMA CARTyrin of the disclosure.

[0068] In certain embodiments of this method of expressing a CARTyrin, the conditions sufficient to transfer the sequence encoding the CARTyrin across a cell membrane of at least one cell in the cell population comprise nucleofection.

[0069] In certain embodiments of this method of expressing a CARTyrin, wherein the conditions sufficient to transfer the sequence encoding the CARTyrin across a cell membrane of at least one cell in the cell population comprise at least one of an application of one or more pulses of electricity at a specified voltage, a buffer, and one or more supplemental factor(s). In certain embodiments, the buffer may comprise PBS, HBSS, OptiMEM, BTXpress, Amaxa Nucleofector, Human T cell nucleofection buffer or any combination thereof. In certain embodiments, the one or more supplemental factor(s) may comprise (a) a recombinant human cytokine, a chemokine, an interleukin or any combination thereof; (b) a salt, a mineral, a metabolite or any combination thereof, (c) a cell medium; (d) an inhibitor of cellular DNA sensing, metabolism, differentiation, signal transduction, one or more apoptotic pathway(s) or combinations thereof; and (e) a reagent that modifies or stabilizes one or more nucleic acids. The recombinant human cytokine, the chemokine, the interleukin or any combination thereof may comprise IL2, IL7, IL12, IL15, IL21, IL1, IL3, IL4, IL5, IL6, IL8, CXCL8, IL9, IL10, IL11, IL13, IL14, IL16, IL17, IL18, IL19, IL20, IL22, IL23, IL25, IL26, IL27, IL28, IL29, IL30, IL31, IL32, IL33, IL35, IL36, GM-CSF, IFN-gamma, IL-1 alpha/IL-1F1, IL-1 beta/IL-1F2, IL-12 p70, IL-12/IL-35 p35, IL-13, IL-17/IL-17A, IL-17A/F Heterodimer, IL-17F, IL-18/IL-1F4, IL-23, IL-24, IL-32, IL-32 beta, IL-32 gamma, IL-33, LAP (TGF-beta 1), Lymphotoxin-alpha/TNF-beta, TGF-beta, TNF-alpha, TRANCE/TNFSF11/RANK L or any combination thereof. The salt, the mineral, the metabolite or any combination thereof may comprise HEPES, Nicotinamide, Heparin, Sodium Pyruvate, L-Glutamine, MEM Non-Essential Amino Acid Solution, Ascorbic Acid, Nucleosides, FBS/FCS, Human serum, serum-substitute, anti-biotics, pH adjusters, Earle's Salts, 2-Mercaptoethanol, Human transferrin, Recombinant human insulin, Human serum albumin, Nucleofector PLUS Supplement, KCL, MgCl2, Na2HPO4, NAH2PO4, Sodium lactobionate, Manitol, Sodium succinate, Sodium Chloride, CINa, Glucose, Ca(NO3)2, Tris/HCl, K2HPO4, KH2PO4, Polyethylenimine, Poly-ethylene-glycol, Poloxamer 188, Poloxamer 181, Poloxamer 407, Poly-vinylpyrrolidone, Pop313, Crown-5, or any combination thereof. The cell medium may comprise PBS, HBSS, OptiMEM, DMEM, RPMI 1640, AIM-V, X-VIVO 15, CellGro DC Medium, CTS OpTimizer T Cell Expansion SFM, TexMACS Medium, PRIME-XV T Cell Expansion Medium, ImmunoCult-XF T Cell Expansion Medium or any combination thereof. The inhibitor of cellular DNA sensing, metabolism, differentiation, signal transduction, one or more apoptotic pathway(s) or combinations thereof comprise inhibitors of TLR9, MyD88, IRAK, TRAF6, TRAF3, IRF-7, NF-KB, Type 1 Interferons, pro-inflammatory cytokines, cGAS, STING, Sec5, TBK1, IRF-3, RNA pol III, RIG-1, IPS-1, FADD, RIP1, TRAF3, AIM2, ASC, Caspase1, Pro-IL1B, PI3K, Akt, Wnt3A, inhibitors of glycogen synthase kinase-3β (GSK-β) (e.g. TWS119), Bafilomycin, Chloroquine, Quinacrine, AC-YVAD-CMK, Z-VAD-FMK, Z-IETD-FMK or any combination thereof. The reagent that modifies or stabilizes one or more nucleic acids comprises a pH modifier, a DNA-binding protein, a lipid, a phospholipid, CaPO4, a net neutral charge DNA binding peptide with or without a NLS sequence, a TREX1 enzyme or any combination thereof.

[0070] In certain embodiments of this method of expressing a CARTyrin, the conditions suitable for integration of the CARTyrin or a sequence encoding the CARTyrin of the disclosure comprise at least one of a buffer and one or more supplemental factor(s). In certain embodiments, a transposon or vector of the disclosure comprise the CARTyrin or a sequence encoding the CARTyrin of the disclosure. In certain embodiments, the buffer may comprise PBS, HBSS, OptiMEM, BTXpress, Amaxa Nucleofector, Human T cell nucleofection buffer or any combination thereof. In certain embodiments, the one or more supplemental factor(s) may comprise (a) a recombinant human cytokine, a chemokine, an interleukin or any combination thereof; (b) a salt, a mineral, a metabolite or any combination thereof; (c) a cell medium; (d) an inhibitor of cellular DNA sensing, metabolism, differentiation, signal transduction, one or more apoptotic pathway(s) or combinations thereof; and (e) a reagent that modifies or stabilizes one or more nucleic acids. The recombinant human cytokine, the chemokine, the interleukin or any combination thereof may comprise IL2, IL7, IL12, IL15, IL21, IL1, IL3, IL4, IL5, IL6, IL8, CXCL8, IL9, IL10, IL11, IL13, IL14, IL16, IL17, IL18, IL19, IL20, IL22, IL23, IL25, IL26, IL27, IL28, IL29, IL30, IL31, IL32, IL33, IL35, IL36, GM-CSF, IFN-gamma, IL-1 alpha/IL-1F1, IL-1 beta/IL-1F2, IL-12 p70, IL-12/IL-35 p35, IL-13, IL-17/IL-17A, IL-17A/F Heterodimer, IL-17F, IL-18/IL-1F4, IL-23, IL-24, IL-32, IL-32 beta, IL-32 gamma, IL-33, LAP (TGF-beta 1), Lymphotoxin-alpha/TNF-beta, TGF-beta, TNF-alpha, TRANCE/TNFSF11/RANK L or any combination thereof. The salt, the mineral, the metabolite or any combination thereof may comprise HEPES, Nicotinamide, Heparin, Sodium Pyruvate, L-Glutamine, MEM Non-Essential Amino Acid Solution, Ascorbic Acid, Nucleosides, FBS/FCS, Human serum, serum-substitute, anti-biotics, pH adjusters, Earle's Salts, 2-Mercaptoethanol, Human transferrin, Recombinant human insulin, Human serum albumin, Nucleofector PLUS Supplement, KCL, MgCl2, Na2HPO4, NAH2PO4, Sodium lactobionate, Manitol, Sodium succinate, Sodium Chloride, CINa, Glucose, Ca(NO3)2, Tris/HCl, K2HPO4, KH2PO4, Polyethylenimine, Poly-ethylene-glycol, Poloxamer 188, Poloxamer 181, Poloxamer 407, Poly-vinylpyrrolidone, Pop313, Crown-5, or any combination thereof. The cell medium may comprise PBS, HBSS, OptiMEM, DMEM, RPMI 1640, AIM-V, X-VIVO 15, CellGro DC Medium, CTS OpTimizer T Cell Expansion SFM, TexMACS Medium, PRIME-XV T Cell Expansion Medium, ImmunoCult-XF T Cell Expansion Medium or any combination thereof. The inhibitor of cellular DNA sensing, metabolism, differentiation, signal transduction, one or more apoptotic pathway(s) or combinations thereof comprise inhibitors of TLR9, MyD88, IRAK, TRAF6, TRAF3, IRF-7, NF-KB, Type 1 Interferons, pro-inflammatory cytokines, cGAS, STING, Sec5, TBK1, IRF-3, RNA pol III, RIG-1, IPS-1, FADD, RIP1, TRAF3, AIM2, ASC, Caspase1, Pro-IL1B, PI3K, Akt, Wnt3A, inhibitors of glycogen synthase kinase-3β (GSK-3β) (e.g. TWS119), Bafilomycin, Chloroquine, Quinacrine, AC-YVAD-CMK, Z-VAD-FMK, Z-IETD-FMK or any combination thereof. The reagent that modifies or stabilizes one or more nucleic acids comprises a pH modifier, a DNA-binding protein, a lipid, a phospholipid, CaPO4, a net neutral charge DNA binding peptide with or without a NLS sequence, a TREX1 enzyme or any combination thereof.

[0071] In certain embodiments of this method of expressing a CARTyrin, the expansion and selection steps occur sequentially. The expansion may occur prior to selection. The expansion may occur following selection, and, optionally, a further (i.e. second) selection may occur following expansion.

[0072] In certain embodiments of this method of expressing a CARTyrin, the expansion and selection steps may occur simultaneously.

[0073] In certain embodiments of this method of expressing a CARTyrin, the expansion may comprise contacting at least one cell of the modified cell population with an antigen to stimulate the at least one cell through the CARTyrin, thereby generating an expanded cell population. The antigen may be presented on the surface of a substrate. The substrate may have any form, including, but not limited to a surface, a well, a bead or a plurality thereof, and a matrix. The substrate may further comprise a paramagnetic or magnetic component. In certain embodiments of this method of expressing a CARTyrin, the antigen may be presented on the surface of a substrate, wherein the substrate is a magnetic bead, and wherein a magnet may be used to remove or separate the magnetic beads from the modified and expanded cell population. The antigen may be presented on the surface of a cell or an artificial antigen presenting cell. Artificial antigen presenting cells of the disclosure may include, but are not limited to, tumor cells and stem cells.

[0074] In certain embodiments of this method of expressing a CARTyrin, wherein the transposon or vector comprises a selection gene and wherein the selection step comprises contacting at least one cell of the modified cell population with a compound to which the selection gene confers resistance, thereby identifying a cell expressing the selection gene as surviving the selection and identifying a cell failing to express the selection gene as failing to survive the selection step.

[0075] In certain embodiments of this method of expressing a CARTyrin, the expansion and/or selection steps may proceed for a period of 10 to 14 days, inclusive of the endpoints.

[0076] The disclosure provides a composition comprising the modified, expanded and selected cell population of the methods of the disclosure.

[0077] The disclosure provides a method of treating cancer in a subject in need thereof, comprising administering to the subject a composition of the disclosure, wherein the CARTyrin specifically binds to an antigen on a tumor cell. In certain embodiments, the tumor cell may be a malignant tumor cell. In certain embodiments, comprising administering to the subject the composition comprising a modified cell or cell population of the disclosure, the cell or cell population may be autologous. In certain embodiments, comprising administering to the subject the composition comprising a modified cell or cell population of the disclosure, the cell or cell population may be allogeneic.

[0078] The disclosure provides a method of treating cancer in a subject in need thereof, comprising administering to the subject a composition of the disclosure, wherein the anti-PSMA CARTyrin specifically binds to a PSMA antigen on a tumor cell or a component of a vasculature of a tumor cell. In certain embodiments, the tumor cell is a prostate cell. In certain embodiments, the tumor cell may be a malignant tumor cell. In certain embodiments, comprising administering to the subject the composition comprising a modified cell or cell population of the disclosure, the cell or cell population may be autologous. In certain embodiments, comprising administering to the subject the composition comprising a modified cell or cell population of the disclosure, the cell or cell population may be allogeneic.

[0079] Methods of modifying a cell therapy of the disclosure may be used to terminate or dampen a therapy in response to, for example, a sign of recovery or a sign of decreasing disease severity/progression, a sign of disease remission/cessation, and/or the occurrence of an adverse event. Cell therapies of the disclosure may be resumed by inhibiting the induction agent should a sign or symptom of the disease reappear or increase in severity and/or an adverse event is resolved.

### BRIEF DESCRIPTION OF THE DRAWINGS

[0080] The patent or application file contains at least one drawing executed in color. Copies of this patent or patent application publication with color drawing(s) will be provided by the Office upon request and payment of the necessary fee.

[0081] FIG. 1 is a schematic diagram depicting a piggyBac CARTyrin P-PSMA-101 plasmid of 7738 base pairs that includes an EF1α promoter, a safety switch (iC9), a PSMA CARTyrin and a selection gene casette.

[0082] FIG. 2 is a schematic diagram depicting a piggyBac CARTyrin that includes a P-PSMA-101 transposon comprising a PSMA CARTyrin (comprising a CD8α signal peptide, an anti-PSMA Centyrin, a CD8α spacer, a CD8α transmembrane sequence, a 4-1BB costimulatory domain and a CD3ζ costimulatory domain).

[0083] FIG. 3A is a schematic diagram of the amino acid sequence of a P-PSMA5-101 construct of the disclosure.

[0084] FIG. 3B is a schematic diagram of the nucleic acid sequence of a P-PSMA5-101 construct of the disclosure.

[0085] FIG. 3C is a schematic diagram of the nucleic acid sequence of a P-PSMA5-101 construct of the disclosure.

[0086] FIG. 4A is a schematic diagram of the amino acid sequence of a P-PSMA8-101 construct of the disclosure.

[0087] FIG. 4B is a schematic diagram of the amino acid sequence of a P-PSMA8-101 construct of the disclosure.

[0088] FIG. 4C is a schematic diagram of the amino acid sequence of a P-PSMA8-101 construct of the disclosure.

[0089] FIG. 5 is a schematic diagram depicting the construction of a CARTyrin of the disclosure and a table contrasting characteristics of Centyrins and antibodies.

[0090] FIG. 6A-6E shows the transient expression and function of PSMA CARTyrins. In vitro assays were performed to test the expression and function of the lead PSMA CARTyrins used to produce P-PSMA5-101 and P-PSMA8-101. PSMA CARTyrins were detected on the surface of primary human T cells that were transiently transfected with mRNA encoding the PSMA CARTyrins the night before (FIG. 6A). Briefly, previously activated then frozen Pan T cells were thawed and rested overnight in T cell culture media, cells were electroporated with 10 μg of PSMA CARTyrin mRNA the next evening, and then surface expression analysis was performed the next morning by FACS using soluble recombinant human PSMA protein (rPSMA) for labeling. To test the function of these T cells in vitro, cells were co-cultured with a panel of PSMA-expressing cells for 4 hours and then target cell killing was measured by expression of CD107a, which is a marker for degranulation and a surrogate for T cell killing. Surface expression of PSMA was assessed on K562 cells engineered to stably express PSMA (K562.PSMA) and LNCaP, a human prostate cancer cell line that endogenously expressed PSMA (FIG. 6B). PSMA CARTyrin-expressing T cells were capable of degranulating against all cell lines expressing PSMA (LNCaP, K562.PSMA) with little to no degranulation above background against PSMA− cell lines (K562, PC-3) (FIG. 6C). mRNA encoding PSMA was titrated into a PSMA− cell line, K562, to control for the level of surface expression of PSMA (FIG. 6D). PSMA CARTyrin+ cells exhibited strong cytotoxic function against K562 cells expressing various amounts of surface PSMA (FIG. 6E). These data show that the PSMA CARTyrins can be expressed on the surface of T cells and facilitate cytotoxic function against PSMA+ cell targets.

[0091] FIG. 7A-7F shows the phenotype and function of piggyBac manufactured P-PSMA-101. To support in vivo evaluation of the lead PSMA CARTyrins, P-PSMA-101 was constructed using the piggyBac DNA modification system. PSMA CARTyrin was detected on the surface of primary human T cells from a representative donor that were transposed with either P-PSMA5-101 or P-PSMA8-101 plasmids, but not on cells transposed with the P-BCMA-101 plasmid control (FIG. 7A). In both cases, a majority of the CD8+ CAR-T cells were double positive for expression of CD45RA and CD62L, markers commonly associated with a T stem cell memory phenotype (T_{SCM}), following staining and FACS analysis (FIG. 7B). Furthermore, these cells (gated on CD8+ or CD4+) expressed low to no levels of PD-1, Tim-3 and Lag-3 by FACS analysis, which are molecules associated with activation and/or functional T cell exhaustion (FIG. 7C). Next, the effector function of these CAR-T cells was assessed in vitro following co-culture with PSMA-expressing cells. IFN-γ secretion was measured by standard ELISA after 24 hours and detected in the medium when CAR-T cells (from 3 independent donors) were incubated in the presence of their cognate target antigen; P-BCMA-101 secreted IFN-γ only in the presence of K562 cells engineered to express BCMA on the surface (K562.BCMA), whereas P-PSMA-101 secreted IFN-γ only in the presence of cell tumor lines expressing PSMA on the surface (LNCaP and K562.PSMA) (FIG. 7D). In addition, P-PSMA-101 exhibited strong cytotoxic function against LNCaP as measured by a standard killing assay, whereas P-BCMA-101 exhibited little killing capability; data from 2 independent donors (FIG. 7E). The capacity for cell proliferation upon co-culture with a several tumor cell lines was assessed after 96 hours. P-PSMA-101 exhibited a robust capacity for proliferation against PSMA+ LNCaP and 22Rv1 and P-BCMA-101 proliferated against BCMA+H929, whereas neither CAR-T cell proliferated against PSMA-BCMA− cell lines K562 nor DU145 (FIG. 7F). These data show that P-PSMA-101 cells expressed the PSMA CARTyrin on the surface and demonstrated cytotoxic function and proliferative capacity in vitro against PSMA+ cell targets.

[0092] FIG. 8A-8F shows the pre-clinical evaluation of P-PSMA8-101 using a murine xenograft model. FIG. 8A is a schematic of the treatment schedule. A murine xenograft model using a luciferase-expressing LNCaP cell line (LNCaP.luc) injected subcutaneously (SC) into NSG mice was utilized to assess in vivo anti-tumor efficacy of P-PSMA8-101. For these in vivo studies, all CAR-T cells were produced using PB delivery of the P-PSMA8-101 plasmid and the Poseida manufacturing process. Mice were injected in the axilla with LNCaP (n=25 to account for poor LNCaP “take” rate) and treated when tumors were established (100-300 mm³ by caliper measurement, 17 days post implantation). Mice were treated with several doses including ultra-low (1×10\hat{ }6), ‘stress’ (5×10\hat{ }6), and standard (10×10\hat{ }6) doses of P-PSMA-101 by IV injection. FIG. 8B is a survival curve graph of anti-tumor activity. FIG. 8C is a bar graph showing the P-PSMA8-101 CD8+ T cell expansion and detection in the blood. FIG. 8D is a series of line graphs showing tumor volume assessment by caliper measurement. FIG. 8E is a line graph showing the bioluminescence of LNCaP tumor by BLI. FIG. 8F shows representative photographs of the bioluminescense of LNCaP tumor in mice quantified in FIG. 8E.

[0093] FIG. 9A-9G shows the preclinical evaluation of lead P-PSMA5-101 and P-PSMA8-101 candidates as a “stress” dose using the murine xenograft model. FIG. 9A is a schematic diagram depicting the timeline of a study for the preclinical evaluation of P-PSMA-101 candidates at a ‘stress’ dose using the Murine Xenograft Model. A murine xenograft model using a luciferase-expressing LNCaP cell line (LNCaP.luc) injected subcutaneously (SC) into NSG mice was utilized to assess in vivo anti-tumor efficacy of P-PSMA5-101 and P-PSMA8-101 at a ‘stress’ dose (4×10\hat{ }6) total CAR-T cells. For these in vivo studies, all CAR-T cells were produced using PB delivery of either the P-PSMA5-101 or P-PSMA8-101 plasmid using the Poseida manufacturing process. Mice were injected in the axilla with LNCaP and treated when tumors were established (100-300 mm³ by caliper measurement). Mice were treated with a ‘stress’ dose (4×10\hat{ }6) of P-PSMA-101 by IV injection in order to tease out any possible differences in efficacy between the PSMA5 and the PSMA8 CARs. Anti-tumor activity was evaluated by survival, CD8+ T cell expansion and detection in the blood, tumor volume assessment by caliper measurement, and bioluminescence of LNCaP tumor. P-PSMA5-101 and P-PSMA8-101 at a ‘stress’ dose demonstrated significantly enhanced anti-tumor efficacy and survival in comparison to the T cells (no CAR) control mice against established SC LNCaP.luc solid tumors in NSG mice. Specifically, there was no survival in T cells (no CAR) control animals, 25% survival in the P-BCMA-101 treated group, 75% survival in the P-PSMA5-101 treated group, and 100% survival in animals treated with a ‘stress’ dose of P-PSMA8-101. In the peripheral blood, P-PSMA5-101 and P-PSMA8-101 expanded and gave rise to differentiated effector CARTyrin+ T-cells that were concomitant with a decrease in tumor burden below detectable caliper and bioluminescent imaging limits. These cells then contracted, yet persisted in the peripheral blood. FIG. 9B is a survival curve graph of anti-tumor activity. FIG. 9C is a bar graph showing the P-PSMA5-101 and P-PSMA8-101 CD8+ T cell expansion and detection in the blood. FIG. 9D is a series of line graphs showing tumor volume assessment by caliper measurement. The left panel shows the average of the tumor volume data shown in the series of graphs on the right panel. FIG. 9E is a line graph showing the bioluminescence of LNCaP tumor by BLI. FIG. 9F shows representative photographs of the bioluminescnece of LNCaP tumor mice quantified in FIG. 9E. FIG. 9G is a series of flow cytometry plots showing that P-PSMA-101 (T_{SCM}/T_{CM}) give rise to CARTyrin+ T_{CM}, T_{EM}, and Teff to attack solid tumor. After solid tumor elimination, a population of P-PSMA-101 T_{SCM} persists.

[0094] FIG. 10 is a series of flow cytometry plots depicting the abundance of cells moving from an area of live cells (the gated lower right quadrant) to an area populated by apoptotic cells (the upper left quadrant) as a function of increasing dosage of the induction agent (AP1903) in cells modified to express a therapeutic agent (a CARTyrin) alone or in combination with an inducible caspase polypeptide of the disclosure (encoded by an iC9 construct (also known as a “safety switch”) introduced into cells by a piggyBac (PB) transposase) at day 12 post nucleofection.

[0095] FIG. 11 is a series of flow cytometry plots depicting the abundance of cells moving from an area of live cells (the gated lower right quadrant) to an area populated by apoptotic cells (the upper left quadrant) as a function of increasing dosage of the induction agent (AP1903) in cells modified to express a therapeutic agent (a CARTyrin) alone or in combination with an inducible caspase polypeptide of the disclosure (encoded by an iC9 construct (also known as a “safety switch”) introduced into cells by a piggyBac (PB) transposase) at day 19 post nucleofection.

[0096] FIG. 12 is a pair of graphs depicting a quantification of the aggregated results shown either in FIG. 10 (left graph) or FIG. 11 (right graph). Specifically, these graphs show the impact of the iC9 safety switch on the percent cell viability as a function of the concentration of the induction agent (AP1903) of the iC9 switch for each modified cell type at either day 12 (FIG. 10 and left graph) or day 19 (FIG. 11 and right graph).

[0097] FIG. 13 is a bar graph depicting the knock out efficiency of targeting various checkpoint signaling proteins that could be used to armor T-cells. Cas-CLOVER was used to knockout the checkpoint receptors, PD-1, TGFBR2, LAG-3, TIM-3 and CTLA-4 in resting primary human pan T cells. Percent knock-out is shown on the y-axis. Gene editing resulted in 30-70% loss of protein expression at the cell surface as measured by flow cytometry.

[0098] FIG. 14 are schematic diagrams of wildtype, null and switch receptors and their effects on intracellular signaling, either inhibitory or stimulatory, in primary T-cells. Binding of the wildtype inhibitory receptor expressed endogenously on a T-cell with its endogenous ligand results in transmission of an inhibitory signal which, in part, reduces T-cell effector function. However, mutation (Mutated null) or deletion (Truncated null) of the intracellular domain (ICD) of a checkpoint receptor protein, such as PD1 (top panel) or TGFBRII (bottom panel), reduces or eliminates its signaling capability when cognate ligand(s) is bound. Thus, expression of engineered mutated or truncated null receptors on the surface of modified T cells results in a competition with endogenously-expressed wildtype receptors for binding of the free endogenous ligand(s), effectively reducing or eliminating delivery of inhibitory signals by endogenously-expressed wildtype receptors. Specifically, any binding by a mutated or null receptor sequesters the endogenous ligand(s) from binding the wildtype receptor and results in dilution of the overall level of checkpoint signaling effectively delivered to the modified T-cell, thereby reducing or blocking checkpoint inhibition and functional exhaustion of the modified T cells. A switch receptor is created by replacement of the wildtype ICD with an ICD from either a co-stimulatory molecule (such as CD3z, CD28, 4-1BB) or a different inhibitory molecule (such as CTLA4, PD1, Lag3). In the former case, binding of the endogenous ligand(s) by the modified switch receptor results in the delivery of a positive signal to the T-cells, thereby helping to enhance stimulation of the modified T cell and potentially enhance target tumor cell killing. In the latter case, binding of the endogenous ligand(s) by the modified switch receptor results in the delivery of a negative signal to the T-cells, thereby eliminating stimulation of the modified T cell and potentially reducing target tumor cell killing. The signal peptide (purple arrow), extracellular domain (ECD) (bright green), transmembrane domain (yellow), intracellular signaling domain (ICD)(orange), and replacement ICD (green) are displayed in the receptor diagrams. “*” indicates a mutated ICD. “+” indicates the presence of a checkpoint signal. “−” indicates the absence of a checkpoint signal.

[0099] FIG. 15A is a schematic diagram showing an example of the design of null receptors with specific alterations that may help to increase expression of the receptor on the surface of modified T cells. Examples are shown for PD1 and TGFBRII null receptors and the signal peptide domain (SP), transmembrane domain (TM) and extracellular domain (ECD) of truncated null receptors for PD1 (top panel) and TGFBRII (bottom panel) are displayed. The first of the top four molecules is the wildtype PD-1 receptor, which encodes the wildtype PD-1 SP and TM. For the PD1 null receptor, replacement of PD1 wildtype SP or TM domain (green; light green) with the SP or TM domain of a human T cell CD8a receptor (red) is depicted. The second molecule encodes the CD8a SP along with the native PD-1 TM, the third encodes the wildtype PD-1 SP and the alternative CD8a TM, and the fourth encodes both the alternative CD8a SP and TM. Similarly, for the null receptor of TGFβRII, replacement of the wildtype TGFBRII SP (pink) with a SP domain of a human T cell CD8a receptor (red). The names of the constructs and the amino acid lengths (aa) of each construct protein is listed on the left of the diagram.

[0100] FIG. 15B is a series of histograms depicting the expression of the PD1 and TGFBRII null Receptors on the surface of modified primary human T cells as determined by flow cytometry. Each of the six truncated null constructs from FIG. 15A were expressed on the surface of primary human T cells. T cells were stained with either anti-PD1 (top; blue histograms) or anti-TGFβRII (bottom; blue histograms), or isotype control or secondary only (gray histograms). Cells staining positive for PD-1 or TGFβRII expression were gated (frequency shown above gate) and mean fluorescence intensity (MFI) value is displayed above each positive histogram. The names of the null receptor constructs are depicted above each plot. Both null receptor gene strategies, replacement of the wildtype SP with the alternative CD8a were successfully expressed. 02.8a SP-PD-1 and 02.8aSP-TGFβRII resulted in the highest level of expression at the T-cell surface. 02.8aSP-PD-1 null receptor exhibited an MFI of 43,680, which is 177-fold higher than endogenous T cell PD-1 expression and 2.8-fold higher than the wildtype PD-1 null receptor. 02.8aSP-TGFβRII null receptor exhibited an MFI of 13,809, which is 102-fold higher than endogenous T cell TGFβRII expression and 1.8-fold higher than the wildtype TGFβRII null receptor. Replacement of wildtype SP with the alternative CD8α SP for both PD1 and TGRBRII results in enhanced surface expression of the null or Switch receptor, which may help to maximize reduction or blockage of checkpoint inhibition upon binding and sequestration of the endogenous ligand(s).

[0101] FIG. 16A-B is a pair of schematic diagrams depicting NF-KB inducible vectors for expression in T-cells. Two T cell activation NF-KB inducible vectors were developed; one with the gene expression system (GES) in the forward orientation (A) and the other in the complementary direction (B), both preceding the constitutive EF1a promoter. These vectors also direct expression of a CAR molecule and a DHFR selection gene, separated by a T2A sequence. Both the conditional NF-KB inducible system and the EF1a directed genes are a part of a piggyBac transposon which can be permanently integrated into T cells using electroporation (EP). Once integrated into the genome, the T cells will constitutively express the CAR on the membrane surface and the DHFR within the cell, while expression of the NF-KB inducible gene, GFP, will be expressed to the highest level only upon T cell activation.

[0102] FIG. 17 is a pair of graphs depicting NF-KB inducible expression of GFP in activated T cells. T cells were nucleofected with a piggyBac vector expressing an anti-BCMA CAR and a DHFR mutein gene under control of an EF1a promoter along with the absence (No GES control) or presence of an NF-KB inducible expression system driving GFP expression in either the forward (pNFKB-GFP forward) or reverse orientation (pNFKB-GFP reverse). Cells were cultured in the presence of methotrexate selection until the cells were almost completely resting (Day 19) and GFP expression was assessed at Day 5 and Day 19. At Day 5, all T cells are proliferating and highly stimulated, with cells harboring the NF-KB inducible expression cassette producing high levels of GFP due to strong NFκB activity. The No GES control cells did not express detectable levels of GFP. By Day 19, the GES T cells were almost fully resting and GFP expression was significantly lower than Day 5 (˜⅛ MFI), since NFκB activity is lower. GFP expression is still observed at Day 19, which may due to the long half-life of GFP protein (˜30 hr), or, basal level of NFκB activity through, for example, a TCR, a CAR, a cytokine receptor, or a growth factor receptor signal.

[0103] FIG. 18 is a series of graphs depicting anti-BCMA CAR-mediated activation of NF-KB inducible expression of GFP in presence of BCMA+ tumor cells. T cells were either unmodified (Mock T cells) or nucleofected with a piggyBac vector expressing an anti-BCMA CAR and a DHFR mutein gene under control of an EF1a promoter along with the absence (No GES control) or presence of an NF-KB inducible expression system driving GFP expression in either the forward (pNFKB-GFP forward) or reverse orientation (pNFKB-GFP reverse). All cells were cultured for 22 days, either with or without methotrexate selection (Mock T cells), until the cells were almost completely resting. Cells were then stimulated for 3 days in the absence (No stimulation) or presence of BCMA− (K562), BMCA+(RPMI 8226), or positive control anti-CD3 anti-CD28 activation reagent (CD3/28 stimulation). GFP expression was undetectable under all conditions with the No GES control or Mock T cells. However, while pNFKB-GFP forward- and reverse-transposed cells exhibited little GFP expression over the No stimulation control when cultured with BCMA− K562 cells, they both demonstrated dramatic upregulation of gene expression either in the presence of BCMA+ tumor cells or under positive control conditions. Little difference in GFP expression was observed between the pNFKB-GFP forward- and reverse-transposed cells that were cocultured with BCMA+ tumor cells.

[0104] FIG. 19 is a series of graphs demonstrating that the Expression level of inducible gene can be regulated by number of response elements preceding the promoter T cells were nucleofected with a piggyBac vector encoding an anti-BCMA CARTyrin followed by a selection gene, both under control of a human EF1a promoter. Further, vectors either additionally encoded the conditional NF-KB inducible gene expression system driving expression of a truncated CD19 protein (dCD19) and included a number of NFκB response elements (RE) varying from 0-5, no GES (No GES), or received an electroporation pulse but no piggyBac nucleic acid (Mock). Data are shown for only the GES in the reverse (opposite) direction/orientation. All cells were cultured for 18 days and included selection for piggyBac-modified T cells using methotrexate addition. Cells were then stimulated for 3 days using anti-CD3 anti-CD28 bead activation reagent and dCD19 surface expression was assessed by FACS at Days 0, 3 and 18, and data are shown as FACS histograms and MFI of target protein staining. The x-axes of each of the FACS histograms are depicted in logarithmic scale (0, 10³, 10⁴, 10⁵). The samples plotted each of the FACS histograms are NFKB-A08-DHFR_Rev002.fcs, NFKB-A08_DHFR_Rev-RE4X_12.fcs, NFKB-A08_DHFR_Rev-RE3X_011.fcs, NFKB-A08_DHFR_Rev-RE2X_010.fcs, NFKB-A08_DHFR_Rev-RE1X_009.fcs, NFKB-A08_DHFR_Rev-RE0X_008.fcs, NFKB-A08_DHFR_v5_013.fcs and NFKB-A08_DHFR_MOCK_014.fcs, from top to bottom. Surface dCD19 expression was detected at low levels at Day 0 in all T cells transposed with vectors encoding the GES. At 3 days post-stimulation, dramatic upregulation of dCD19 expression was observed for all T cells expressing the GES, with a greater fold increase in surface expression in those with higher numbers of REs. Thus, surface dCD19 expression was directly proportional with the number of REs encoded in the GES. No dCD19 was detected on the surface of T cells that did not harbor the GES: No GES and Mock controls.

[0105] FIG. 20 is a schematic depiction of the Csy4-T2A-Clo051-G4Slinker-dCas9 construct map (Embodiment 2).

[0106] FIG. 21 is a schematic depiction of the pRT1-Clo051-dCas9 Double NLS construct map (Embodiment 1).

[0107] FIG. 22 is a schematic diagram depicting the timeline of a study for the preclinical evaluation of lead P-PSMA-101 candidates in a prostate cancer bone metastasis Murine Xenograft Model. A murine xenograft model using a luciferase-expressing PC3 cell line engineered to express human PSMA protein (PC3.lucGFP.hPSMA) was injected peri-tibially (IT) into NSG mice and was utilized to assess in vivo anti-tumor efficacy of P-PSMA5-101 and P-PSMA8-101 at two different doses—a ‘stress’ dose of 4×10\hat{ }6 and standard dose of 12×10\hat{ }6 total CAR-T cells. As negative controls, T cells alone (not expressing a CAR; 12e6 dose) or P-BCMA-101 T cells (expressing an irrelevant anti-BCMA CAR; 12e6 dose) were also included. For these in vivo studies, all CAR-T cells were produced using PB delivery of either the P-PSMA5-101 or P-PSMA8-101 plasmid using the Poseida manufacturing process. Mice were injected peri-tibially with Pc3.lucGFP.hPSMA and treated with CAR-T cells four days later (all tumor-challenged mice had detectable tumors by bioluminescent imaging (BLI) ranging from 1-5×10\hat{ }6 in total luminescent flux (p/sec/m²)).

[0108] FIG. 23 is a graph showing dose efficacy of P-PSMA5-101 and P-PSMA8-101 at either a ‘stress’ dose or standard dose demonstrated anti-tumor efficacy in comparison to the T cells (no CAR) alone or P-BCMA-101 treated control mice against established IT PC3.lucGFP.hPSMA solid tumors in NSG mice.

[0109] FIG. 24 is a schematic diagram depicting a piggyBac P-PSMA-101 nanotransposon of the disclosure.

[0110] FIG. 25 is a graph showing electroporation (EP) delivery of either P-PSMA-101 piggyBac plasmid (light gray bars) or P-PSMA-101 piggyBac nanotransposon (dark gray bars) in combination with super piggyBac transposase enzyme resulted in high transposition efficiency in human pan T cells (5 days post-EP) as measured by surface expression of PSMA CARTyrin (Percent Transposition (%)).

[0111] FIG. 26 is a series of graphs showing that human CAR-T cells produced using anti-PSMA CAR nanotransposons (NT) were capable of killing target tumor cells. Anti-PSMA CAR T cells produced using either full-sized piggyBac plasmids (FP) or piggyBac nanotransposon (NT) were produced using the standard Poseida process. Killing of K562 cells engineered to express PSMA (K562.PSMA) by CAR-T cells at the indicated effector to target ratios. These data show that all CAR-T cells, whether produced using FP or NT, were capable of killing target tumor cells in an antigen-dependent manner. This was true for CAR-T cells that were produced from human pan T cells from two different normal donors.

[0112] FIG. 27 is a series of graphs showing that human CAR-T cells produced using anti-PSMA CAR nanotransposons (NT) were comparable in phenotypic composition. Anti-PSMA CAR T cells produced using either full-sized piggyBac plasmids (FP) or piggyBac nanotransposon (NT) were manufactured using the standard Poseida process. Phenotypic analysis of memory T cell markers and activation/exhaustion markers (data not shown) was performed. These data show that all CAR-T cells, whether produced using FP or NT, exhibited a similar phenotypic composition of CD45RA+CD62L+ (Tscm), CD45RA− CD62L+ (Tcm), CD45RA−CD62L− (Tem), and CD45RA+CD62L− (Teff) cells. In addition, comparable levels of expression of CCR7 (CD197), CD127, CD27, LAGS, TIM3, CXCR3, PD-1, and CD25 was observed (data not shown). This was true for CAR-T cells that were produced from human pan T cells from two different normal donors.

[0113] FIG. 28 is a series of graphs showing that human CAR-T cells produced using anti-PSMA CAR nanotransposons (NT) have similar integrated copy number. Anti-PSMA CAR T cells produced using either full-sized piggyBac plasmids (FP) or piggyBac nanotransposon (NT) were manufactured using the standard Poseida process. Average copy number of integrated transposons was measured by quantitative PCR. These data show that in two different donors, all CAR-T cells, whether produced using FP or NT, exhibited a similar integrated copy number of transposons.

[0114] FIG. 29A is a schematic diagram showing preclinical evaluation of the P-PSMA-101 transposon when delivered by a full-length plasmid (FLP) versus a nanotransposon (NT) at ‘stress’ doses using the murine xenograft model. The murine xenograft model using a luciferase-expressing LNCaP cell line (LNCaP.luc) injected subcutaneously (SC) into NSG mice was utilized to assess in vivo anti-tumor efficacy of the P-PSMA-101 transposon as delivered by a full-length plasmid (FLP) or a nanotransposon (NT) at two different ‘stress’ doses (2.5×10\hat{ }6 or 4×10\hat{ }6) of total CAR-T cells from two different normal donors. All CAR-T cells were produced using piggyBac (PB) delivery of P-PSMA-101 transposon using either FLP or NT delivery. Mice were injected in the axilla with LNCaP and treated when tumors were established (100-200 mm³ by caliper measurement). Mice were treated with two different ‘stress’ doses (2.5×10\hat{ }6 or 4×10\hat{ }6) of P-PSMA-101 CAR-Ts by IV injection for greater resolution in detecting possible functional differences in efficacy between transposon delivery by the FLP and the NT.

[0115] FIG. 29B are a series of graphs showing the tumor volume assessment of mice treated as described in FIG. 29A. Tumor volume assessment by caliper measurement for control mice (black), Donor #1 FLP mice (red), Donor #1 NT mice (blue), Donor #2 FLP mice (orange), and Donor #2 NT mice (green) as displayed as group averages with error bars (top) and individual mice (bottom). The y-axis shows the tumor volume (mm³) assessed by caliper measurement. The x-axis shows the number of days post T cell treatment. Delivered by NT, P-PSMA-101 transposon at a ‘stress’ dose demonstrated enhanced anti-tumor efficacy as measured by caliper in comparison to the FLP and control mice against established SC LNCaP.luc solid tumors.

[0116] FIG. 30 is a schematic diagram depicting a T-cell receptor (TCR) and co-receptors CD28 and CD2.

[0117] FIG. 31 is a schematic diagram depicting primary and secondary co-stimulation is delivered to T-cell via binding of agonist mAbs (anti-CD3, anti-CD28, and anti-CD2). Full T-cell activation critically depends on TCR engagement in conjunction with a second signal by co-stimulatory receptors that boost the immune response. Primary and secondary co-stimulation can be delivered to T-cell via treatment and engagement of surface receptors with reagents displaying agonist mAbs (E.g. anti-CD3, anti-CD28, anti-CD2, beads conjugated with these mAbs, multimeric complexes of these mAbs, etc. . . . ).

[0118] FIG. 32 is a schematic diagram showing that, in absence of TCR, stimulation is enhanced with expression of Chimeric Stimulatory Receptors (CSRs). In the presence of surface-expressed CSR/s, either transiently or stably expressed, enhanced primary and secondary co-stimulatory signals are delivered when T cell is treated with reagents displaying agonist mAbs. Since a fuller T-cell activation is achieved via CSR-mediated stimulatory signals, T cell activation and expansion is enhanced.

[0119] FIG. 33A is a schematic diagram depicting an exemplary CSR CD28z of the disclosure.

[0120] FIG. 33B is an amino sequence encoding the CSR CD28z shown in FIG. 33A.

[0121] FIG. 33C is a nucleotide sequence encoding the CSR CD28z shown in FIG. 33A.

[0122] FIG. 34A is a schematic diagram depicting an exemplary CSR CD2z of the disclosure.

[0123] FIG. 34B is an amino sequence encoding the CSR CD2z shown in FIG. 34A.

[0124] FIG. 34C is a nucleotide sequence encoding the CSR CD2z shown in FIG. 34A.

[0125] FIG. 35 is a series of graphs showing that CSRs are expressed on the surface of T cells and do not lead to cellular activation in the absence of exogenous stimulation. Pan T cells from normal blood donors were stimulated with anti-CD3/anti-CD28 beads in standard T cell culture media, then rested. These cells were then electroporated (BTX ECM 830 electroporator @ 500V for 700 μs) with 10 μg of mRNA encoding either CD28 CSR, CD2 CSR, or wild-type CD19 control. Two days later the electroporated cells were examined by flow cytometry for surface-expression of each molecule and data are shown as stacked histograms. In addition, cell size (FSC-A) and CD69 expression was evaluated as a possible indication of cellular activation above the Mock electroporated control cells. Increased surface expression of CD28, CD2, and CD19 were detected in T cells electroporated either with CD28z CSR, CD2z CSR or CD19, respectively. Expression of these molecules on the surface of T cells did not intrinsically activate the cells in the absence of exogenous stimulation.

[0126] FIG. 36 is a graph showing that delivery of CSR enhances the expansion of CAR-T cells. CSRs were delivered to CAR-T cells either transiently by mRNA or stably by piggyBac™. Pan T cells isolated from the blood of a normal donor were genetically modified using the piggyBac™ DNA modification system and the standard Poseida process. Cells were co-electroporated in a single reaction with mRNA encoding the Super piggyBac transposase enzyme (SPB), a transposon encoding a BCMA CAR and selection gene, along with an additional mRNA encoding a CSR (either CD28z or CD2z; resulting in transient expression) or a CD19 mRNA control, or, with a transposon encoding a BCMA CAR, selection gene and a CSR (either CD28z or CD2z; resulting in stable expression). The cells were subsequently stimulated with agonist mAbs anti-CD2, anti-CD3 and anti-CD28, and were later selected for genetic modification over the course of a 19 day culture period. At the end of the initial culture period all T cells expressed the CAR, indicating successful selection for genetically-modified cells (data not shown). Bars represent total live CAR-T cells in well and numbers indicate fold-enhancement of expansion above CAR-T cells produced in the absence of a CSR or a CD19 mRNA control. In the samples expressing either CD2z or CD28z CSR, either transiently or stably, a greater degree of expansion of the CAR-T cells.

[0127] FIG. 37 is a series of bar graphs showing that expression of CSRs does not significantly affect CAR-T cell cytotoxicity. CSRs were delivered to CAR-T cells either transiently by mRNA or stably by piggyBac™. Pan T cells isolated from the blood of a normal donor were genetically modified using the piggyBac™ DNA modification system and the standard Poseida process. Cells were co-electroporated in a single reaction with mRNA encoding the Super piggyBac transposase enzyme (SPB), a transposon encoding a BCMA CAR and selection gene, along with an additional mRNA encoding a CSR (either CD28z or CD2z; resulting in transient expression), or, with a transposon encoding a BCMA CAR, selection gene and a CSR (either CD28z or CD2z; resulting in stable expression). The cells were subsequently stimulated with agonist mAbs anti-CD2, anti-CD3 and anti-CD28, and were later selected for genetic modification over the course of a 19 day culture period. At the end of the initial culture period all T cells expressed the CAR, indicating successful selection for genetically-modified cells (data not shown). To assess CAR-T cell ability to kill, cells were co-cultured with engineered K562-BCMA-Luciferase (eK562-Luc.BCMA) or negative control line K562-Luciferase (eK562-Luc) for 48 hours at 10:1, 3:1, or 1:1 E:T ratios. Luciferase signal was measured to determine cytotoxicity. Killing of eK562-Luc is shown in bar graph on left, while killing of eK562-Luc.BCMA is shown in bar graph on right. All CAR⁺ T cells expressed an anti-BCMA specific CAR and exhibited similar in vitro cytotoxicity against BCMA+ target cells. In summary, this activity was not significantly affected by transient or stable CSR co-expression.

### DETAILED DESCRIPTION

[0128] The disclosure provides chimeric antigen receptors (CARs) comprising at least one Centyrin (CARTyrin). Chimeric antigen receptors of the disclosure may comprise more than one Centyrin. For example, a bi-specific CARTyrin may comprise two Centyrins that specifically bind two distinct antigens. In preferred embodiments, CARTyrins of the disclosure comprise at least one Centryrin that specifically binds a sequence of PSMA, and, therefore, are referred to as PSMA-specific Centryins. CARTyrins of the disclosure that comprise at least one PSMA-specific Centryrin are referred to herein as anti-PSMA CARTyrins for specifically binding a sequence of PSMA.

[0129] Centyrins of the disclosure specifically bind to an antigen. Chimeric antigen receptors of the disclosure comprising one or more Centyrins that specifically bind an antigen may be used to direct the specificity of a cell, (e.g. a cytotoxic immune cell) towards the specific antigen.

[0130] Centyrins of the disclosure may comprise a consensus sequence comprising

(SEQ ID NO: 18018)
LPAPKNLVVSEVTEDSLRLSWTAPDAAFDSFLIQYQESEKVGEAINLTVP
GSERSYDLTGLKPGTEYTVSIYGVKGGHRSNPLSAEFTT.

[0131] Chimeric antigen receptors of the disclosure may comprise a signal peptide of human CD2, CD3δ, CD3ε, CD3γ, CD3ζ, CD4, CD8α, CD19, CD28, 4-1BBor GM-CSFR. A hinge/spacer domain of the disclosure may comprise a hinge/spacer/stalk of human CD8α, IgG4, and/or CD4. An intracellular domain or endodomain of the disclosure may comprise an intracellular signaling domain of human CD3ζ and may further comprise human 4-1BB, CD28, CD40, ICOS, MyD88, OX-40 intracellular segment, or any combination thereof. Exemplary transmembrane domains include, but are not limited to a human CD2, CD3δ, CD3ε, CD3γ, CD3ζ, CD4, CD8α, CD19, CD28, 4-1BBor GM-CSFR transmembrane domain.

[0132] The disclosure provides genetically modified cells, such as T cells, NK cells, hematopoietic progenitor cells, peripheral blood (PB) derived T cells (including T cells from G-CSF-mobilized peripheral blood), umbilical cord blood (UCB) derived T cells rendered specific for one or more antigens by introducing to these cells a CARTyrin of the disclosure. Cells of the disclosure may be modified by electrotransfer of a transposon encoding a CARTyrin of the disclosure and a plasmid comprising a sequence encoding a transposase of the disclosure (preferably, the sequence encoding a transposase of the disclosure is an mRNA sequence).

### Further Modifications of Cell Compositions

[0133] The disclosure provides a chimeric stimulatory receptor (CSR) comprising: (a) an ectodomain comprising an activation component and (b) a transmembrane domain or a cell-membrane attachment region, wherein the combination of (a) and (b) is non-naturally occurring. In some embodiments, this CSR binds a component of the environment and changes the cellular consequence of that signaling by competing with full-length or transmembrane versions of the receptor to reduce the intracellular signal resulting from binding of the component of the environment to the activation component.

[0134] The disclosure provides a chimeric stimulatory receptor (CSR) comprising: (a) an ectodomain comprising a activation component; (b) a transmembrane domain; and (c) an endodomain comprising at least one signal transduction domain; wherein the combination of (a), (b) and (c) is non-naturally occurring.

[0135] In some embodiments of the CSRs of the disclosure, the activation component of (a) is isolated or derived from a first protein. In some embodiments, the signal transduction domain of (c) is isolated or derived from a second protein. In some embodiments, the first protein and the second protein are not identical.

[0136] In some embodiments of the CSRs of the disclosure, the CSR is a switch receptor that translates binding of the activation component extracellularly with either suppressing a signal or transducing a qualitatively different signal than would be transduced by a wild type, full-length or transmembrane version of the first protein. Because a CSR switch receptor is chimeric with respect to the extracellular and intracellular domains, the CSR can switch the consequence of binding the extracellular activation component from the naturally-occurring scenario to an engineered, non-naturally occurring, scenario.

[0137] In some embodiments of the CSRs of the disclosure, the activation component comprises one or more of a component of a human transmembrane receptor, a human cell-surface receptor, a T-cell Receptor (TCR), a component of a TCR complex, a component of a TCR co-receptor, a component of a TCR co-stimulatory protein, a component of a TCR inhibitory protein, a cytokine receptor, and a chemokine receptor. In some embodiments, the Activation component comprises a portion of one or more of a component of a human transmembrane receptor, a human cell-surface receptor, a T-cell Receptor (TCR), a component of a TCR complex, a component of a TCR co-receptor, a component of a TCR co-stimulatory protein, a component of a TCR inhibitory protein, a cytokine receptor, and a chemokine receptor to which an agonist of the activation component binds.

[0138] In some embodiments of the CSRs of the disclosure, the agonist comprises one or more of a small organic or inorganic molecule, a nucleic acid, an amino acid, an antibody or a fragment thereof, an antibody mimetic, an aptamer, a scaffold protein, a ligand, a receptor, a naturally occurring biomolecule, and a non-naturally occurring molecule (organic or inorganic).

[0139] In some embodiments of the CSRs of the disclosure, the Activation component comprises a CD2 protein or a portion thereof to which an agonist binds.

[0140] In some embodiments of the CSRs of the disclosure, the signal transduction domain comprises one or more of a component of human signal transduction domain, a T-cell Receptor (TCR), a component of a TCR complex, a component of a TCR co-receptor, a component of a TCR co-stimulatory protein, a component of a TCR inhibitory protein, a cytokine receptor, and a chemokine receptor. In some embodiments, the signal transduction domain comprises a CD3 protein. In some embodiments, the CD3 protein comprises a CD3ζ protein.

[0141] In some embodiments of the CSRs of the disclosure, the endodomain further comprises a cytoplasmic domain. In some embodiments, the sequence encoding the cytoplasmic domain comprises a sequence encoding a co-stimulatory protein. In some embodiments, the cytoplasmic domain is isolated or derived from a third protein. In some embodiments, the first protein and the third protein are identical.

[0142] In some embodiments of the CSRs of the disclosure, the ectodomain further comprises a signal peptide. In some embodiments, the signal peptide is derived from a fourth protein. In some embodiments, the first protein and the fourth protein are identical.

[0143] In some embodiments of the CSRs of the disclosure, the transmembrane domain is isolated or derived from a fifth protein. In some embodiments, the first protein and the fifth protein are identical.

[0144] In some embodiments of the CSRs of the disclosure, the CSR comprises an ectodomain comprising a signal peptide having a sequence isolated or derived from a CD2 protein and a Activation component comprising a sequence isolated or derived from a CD2 protein or a portion thereof to which an agonist binds, a transmembrane domain comprising a sequence isolated or derived from a CD2 protein, and an endodomain comprising a cytoplasmic domain comprising a sequence isolated or derived from a CD2 protein and a signal transduction domain comprising a sequence isolated or derived form a CD3ζ protein.

[0145] In some embodiments of the CSRs of the disclosure, the Activation component does not bind a naturally-occurring molecule.

[0146] In some embodiments of the CSRs of the disclosure, the CSR does not transduce a signal upon binding of the Activation component to a naturally-occurring molecule. In some embodiments, the ectodomain comprises a modification. In some embodiments, the modification comprises a mutation or a truncation of a sequence encoding the Activation component when compared to a wild type sequence of the first protein.

[0147] In some embodiments of the CSRs of the disclosure, the Activation component binds to a non-naturally occurring molecule.

[0148] In some embodiments of the CSRs of the disclosure, the CSR selectively transduces a signal upon binding of the Activation component to a non-naturally occurring molecule.

[0149] The disclosure provides a nucleic acid sequence encoding the CSR of the disclosure.

[0150] The disclosure provides a vector comprising the nucleic acid sequence encoding the CSR of the disclosure.

[0151] The disclosure provides a vector comprising the nucleic acid sequence encoding the CSR of the disclosure.

[0152] The disclosure provides a transposon comprising the nucleic acid sequence encoding the CSR of the disclosure.

[0153] The disclosure provides a cell comprising the CSR of the disclosure.

[0154] The disclosure provides a cell comprising the nucleic acid encoding the CSR of the disclosure.

[0155] The disclosure provides a cell comprising the vector comprising the nucleic acid sequence encoding the CSR of the disclosure.

[0156] The disclosure provides a cell comprising the transposon comprising the nucleic acid sequence encoding the CSR of the disclosure.

[0157] The disclosure provides a composition comprising the CSR of the disclosure.

[0158] The disclosure provides a composition comprising the nucleic acid encoding the CSR of the disclosure.

[0159] The disclosure provides a composition comprising the vector comprising the nucleic acid sequence encoding the CSR of the disclosure.

[0160] The disclosure provides a composition comprising the transposon comprising the nucleic acid sequence encoding the CSR of the disclosure.

[0161] The disclosure provides a composition comprising a cell of the disclosure, including those comprising a sequence encoding a CSR and/or expressing a CSR of the disclosure. The disclosure provides a composition comprising a plurality of cells of the disclosure, including those comprising a sequence encoding a CSR and/or expressing a CSR of the disclosure.

[0162] The disclosure provides a modified cell comprising: (a) a sequence encoding a CSR of the disclosure and (b) a sequence encoding an inducible proapoptotic polypeptide; and wherein the cell is a T-cell.

[0163] The disclosure provides a modified cell comprising: (a) a sequence encoding a CSR of the disclosure and (b) a sequence encoding an inducible proapoptotic polypeptide. In some embodiments of the modified cells of the disclosure, the modified cells further comprise a sequence encoding a non-naturally occurring antigen receptor, and/or a sequence encoding a therapeutic polypeptide.

[0164] In some embodiments of the modified cells of the disclosure, including those wherein the modified cell comprises a sequence encoding a non-naturally occurring antigen receptor, the non-naturally occurring antigen receptor comprises a chimeric antigen receptor (CAR). In some embodiments, the CAR comprises: (a) an ectodomain comprising an antigen recognition region, (b) a transmembrane domain, and (c) an endodomain comprising at least one costimulatory domain. In some embodiments, the ectodomain of (a) of the CAR further comprises a signal peptide. In some embodiments, the ectodomain of (a) of the CAR further comprises a hinge between the antigen recognition region and the transmembrane domain. In some embodiments, the endodomain comprises a human CD3ζ endodomain. In some embodiments, the at least one costimulatory domain comprises a human 4-1BB, CD28, CD40, ICOS, MyD88, OX-40 intracellular segment, or any combination thereof. In some embodiments, the at least one costimulatory domain comprises a human CD28 and/or a 4-1BB costimulatory domain.

[0165] In some embodiments of the modified cells of the disclosure, a transposon, a vector, a donor sequence or a donor plasmid comprises the sequence encoding the CSR and/or the sequence encoding the inducible proapoptotic polypeptide. In some embodiments, the transposon, the vector, the donor sequence or the donor plasmid further comprises a sequence encoding a non-naturally occurring antigen receptor or a sequence encoding a therapeutic protein. In some embodiments, the transposon, the vector, the donor sequence, or the donor plasmid further comprises the sequence encoding the selection marker. In some embodiments, the transposon is a piggyBac or a piggy-Bac like transposon.

[0166] In some embodiments of the modified cells of the disclosure, the sequence encoding the CSR is transiently expressed in the cell and wherein the sequence encoding the inducible proapoptotic polypeptide is stably expressed in the cell. In some embodiments, a sequence encoding a non-naturally occurring antigen receptor or a sequence encoding a therapeutic protein is stably expressed in the cell. In some embodiments, a first transposon, a first vector, a first donor sequence, or a first donor plasmid comprises the sequence encoding the CSR. In some embodiments, a second transposon, a second vector, a second donor sequence, or a second donor plasmid comprises one or more of the sequence encoding the inducible proapoptotic polypeptide, the sequence encoding a non-naturally occurring antigen receptor, the sequence encoding a therapeutic protein. In some embodiments, the first transposon, the first vector, the first donor sequence, or the first donor plasmid further comprises a sequence encoding a first selection marker. In some embodiments, the second transposon, the second vector, the second donor sequence, or the second donor plasmid further comprises a sequence encoding a second selection marker. In some embodiments, the first selection marker and the second selection marker are not identical.

[0167] In some embodiments of the modified cells of the disclosure, the selection marker is a cell surface marker. In some embodiments, the cell surface marker distinguishes cells when sorted by the marker or a detectable tag. In some embodiments, the detectable tag is fluorescent or magnetic.

[0168] In some embodiments of the modified cells of the disclosure, the selection marker comprises a protein that is active in dividing cells and not active in non-dividing cells. In some embodiments, the selection marker comprises a metabolic marker. In some embodiments, the selection marker comprises a dihydrofolate reductase (DHFR) mutein enzyme. In some embodiments, the DHFR mutein enzyme comprises or consists of the amino acid sequence of:

```
(SEQ ID NO: 17012)
    1 MVGSLNCIVA VSQNMGIGKN GDFPWPPLRN ESRYFQRMTT TSSVEGKQNL
  61 VIMGKKTWFS IPEKNRPLKG RINLVLSREL KEPPQGAHFL SRSLDDALKL
121 TEQPELANKV DMVWIVGGSS VYKEAMNHPG HLKLFVTRIM QDFESDTFFP
181 EIDLEKYKLL PEYPGVLSDV QEEKGIKYKF EVYEKND.
```

In some embodiments, the amino acid sequence of the DHFR mutein enzyme further comprises a mutation at one or more of positions 80, 113, or 153. In some embodiments, the amino acid sequence of the DHFR mutein enzyme comprises one or more of a substitution of a Phenylalanine (F) or a Leucine (L) at position 80, a substitution of a Leucine (L) or a Valine (V) at position 113, and a substitution of a Valine (V) or an Aspartic Acid (D) at position 153.

### Chimeric Stimulatory Receptors (CSRs)

[0169] The disclosure provides a Chimeric Stimulatory Receptor (CSR) to deliver CD3z primary stimulation to T cells (and, consequently, an endogenous CD3ζ) when stimulated using standard activation/stimulation reagents, including agonist anti-CD3 mAb.

[0170] Chimeric Stimulatory Receptors (CSRs) of the disclosure provide a CD3ζ stimulus to enhance activation and expansion of T cells. In some embodiments, CSRs of the disclosure comprise an agonist mAb epitope extracellularly and a CD3ζ stimulatory domain intracellularly and, functionally, convert an anti-CD28 or anti-CD2 binding event on the surface into a CD3z signaling event in an allogeneic T cell modified to express the CSR. In some embodiments, a CSR comprises a wild type CD28 or CD2 protein and a CD3z intracellular stimulation domain, to produce CD28z CSR and CD2z CSR, respectively. In preferred embodiments, CD28z CSR and/or CD2z CSR further express a non-naturally occurring antigen receptor and/or a therapeutic protein. In preferred embodiments, the non-naturally occurring antigen receptor comprises a Chimeric Antigen Receptor.

[0171] In certain embodiments, the CD28z CSR is encoded by an amino acid sequence comprising

(SEQ ID NO: 17910)
MLRLLLALNLFPSIQVTGNKILVKQSPMLVAYDNAVNLSCKYSYNLFSRE
FRASLHKGLDSAVEVCVVYGNYSQQLQVYSKTGFNCDGKLGNESVTFYLQ
NLYVNQTDIYFCKIEVMYPPPYLDNEKSNGTIIHVKGKHLCPSPLFPGPS
KPFWVLVVVGGVLACYSLLVTVAFIIFWVRSKRSRLLHSDYMNMTPRRPG
PTRKHYQPYAPPRDFAAYRSRVKFSRSADAPAYKQGQNQLYNELNLGRRE
EYDVLDKRRGRDPEMGGKPRRKNPQEGLYNELQKDKMAEAYSEIGMKGER
RRGKGHDGLYQGLSTATKDTYDALHMQALPPR.

[0172] In certain embodiments, the CD28z CSR is encoded by a nucleic acid sequence comprising

(SEQ ID NO: 17911)
atgctgagactgctgctggccctgaatctgttccccagcatccaagtgac
cggcaacaagatcctggtcaagcagagccctatgctggtggcctacgaca
acgccgtgaacctgagctgcaagtacagctacaacctgttcagcagagag
ttccgggccagcctgcacaaaggactggattctgctgtggaagtgtgcgt
ggtgtacggcaactacagccagcagctgcaggtctacagcaagaccggct
tcaactgcgacggcaagctgggcaatgagagcgtgaccttctacctgcaa
aacctgtacgtgaaccagaccgacatctatttctgcaagatcgaagtgat
gtacccgcctccttacctggacaacgagaagtccaacggcaccatcatcc
acgtgaagggcaagcacctgtgtccttctccactgttccccggacctagc
aagcctttctgggtgctcgttgttgttggcggcgtgctggcctgttatag
cctgctggttacagtggccttcatcatcttttgggtccgaagcaagcgga
gccggctgctgcacagcgactacatgaacatgacccctagacggcccgga
ccaaccagaaagcactaccagccttacgctcctcctagagacttcgccgc
ctaccggtccagagtgaagttctccagatccgccgatgctcccgcctata
agcagggccagaaccagctgtacaacgagctgaacctggggagaagagaa
gagtacgatgtgctggacaagcggagaggcagagatcctgagatgggcgg
caagcccagacggaagaatcctcaagagggcctgtacaatgaactgcaga
aagacaagatggccgaggcctacagcgagatcggaatgaagggcgagcgc
agaagaggcaagggacacgatggactgtaccagggcctgagcaccgccac
caaggatacctatgatgccctgcacatgcaggccctgcctccaaga.

[0173] In certain embodiments, the CD2z CSR is encoded by an amino acid sequence comprising

(SEQ ID NO: 17912)
MSFPCKFVASFLLIFNVSSKGAVSKEITNALETWGALGQDINLDIPSFQM
SDDIDDIKWEKTSDKKKIAQFRKEKETFKEKDTYKLFKNGTLKIKHLKTD
DQDIVKVSIVDTKGKNVLEKIFDLKIQERVSKPKISWTCINTTLTCEVMN
GTDPELNLYQDGKHLKLSQRVITHKWTTSLSAKFKCTAGNKVSKESSVEP
VSCPEKGLDIVLIIGICGGGSLLMVFVALLVFYITKRKKQRSRRNDEELE
TRAHRVATEERGRKPHQIPASTPQNPATSQHPPPPPGHRSQAPSHRPPPP
GHRVQHQPQKRPPAPSGTQVHQQKGPPLPRPRVQPKPPHGAAENSLSPSS
NRVKFSRSADAPAYKQGQNQLYNELNLGRREEYDVLDKRRGRDPEMGGKP
RRKNPQEGLYNELQKDKMAEAYSEIGMKGERRRGKGHDGLYQGLSTATKD
TYDALHMQALPPR

[0174] In certain embodiments, the CD2z CSR is encoded by a nucleic acid sequence comprising

(SEQ ID NO: 17913)
atgagcttcccttgcaagttcgtggccagcttcctgctgatcttcaacgt
gtcctctaagggcgccgtgtccaaagagatcacaaacgccctggaaacct
ggggagccctcggccaggatattaacctggacatccccagcttccagatg
agcgacgacatcgatgacatcaagtgggagaaaaccagcgacaagaagaa
gatcgcccagttccggaaagagaaagagacattcaaagagaaggacacct
acaagctgttcaagaacggcaccctgaagatcaagcacctgaaaaccgac
gaccaggacatctataaggtgtccatctacgacaccaagggcaagaacgt
gctggaaaagatcttcgacctcaagatccaagagcgggtgtccaagccta
agatcagctggacctgcatcaacaccacactgacctgcgaagtgatgaac
ggcacagaccccgagctgaacctgtaccaggatggcaaacacctgaagct
gagccagcgcgtgatcacccacaagtggacaacaagcctgagcgccaagt
tcaagtgcaccgccggaaacaaagtgtctaaagagtccagcgtcgagccc
gtgtcttgccctgaaaaaggactggacatctacctgatcatcggcatctg
tggcggcggaagcctgctgatggtgtttgtggctctgctggtgttctaca
tcaccaagcggaagaagcagcggagcagacggaacgacgaggaactggaa
acacgggcccatagagtggccaccgaggaaagaggcagaaagccccacca
gattccagccagcacaccccagaatcctgccacctctcaacaccctccac
ctccacctggacacagatctcaggccccatctcacagacctccaccacct
ggtcatcgggtgcagcaccagcctcagaaaagacctcctgctcctagcgg
cacacaggtgcaccagcaaaaaggacctccactgcctcggcctagagtgc
agcctaaacctcctcatggcgccgctgagaacagcctgtctccaagcagc
aacagagtgaagttcagccgcagcgccgatgctcctgcctataagcaggg
acagaaccagctgtacaacgagctgaatctggggcgcagagaagagtacg
atgtgctggacaagcggagaggcagagatcctgagatgggcggcaagccc
agacggaagaatcctcaagagggcctgtataatgagctgcagaaagacaa
gatggccgaggcctacagcgagatcggaatgaagggcgagcgcagaagag
gcaagggacacgatggactgtatcagggcctgagcaccgccaccaaggat
acctatgatgccctgcacatgcaggccctgcctccaaga.

[0175] Modified T cells of the disclosure comprising/expressing a CSR of the disclosure improve the expansion of T cells when compared to those cells that do not comprise/express a CSR of the disclosure.

### Immune and Immune Precursor Cells

[0176] In certain embodiments, immune cells of the disclosure comprise lymphoid progenitor cells, natural killer (NK) cells, T lymphocytes (T-cell), stem memory T cells (T_{SCM} cells), central memory T cells (T_{CM}), stem cell-like T cells, B lymphocytes (B-cells), myeloid progenitor cells, neutrophils, basophils, eosinophils, monocytes, macrophages, platelets, erythrocytes, red blood cells (RBCs), megakaryocytes or osteoclasts.

[0177] In certain embodiments, immune precursor cells comprise any cells which can differentiate into one or more types of immune cells. In certain embodiments, immune precursor cells comprise multipotent stem cells that can self renew and develop into immune cells. In certain embodiments, immune precursor cells comprise hematopoietic stem cells (HSCs) or descendants thereof. In certain embodiments, immune precursor cells comprise precursor cells that can develop into immune cells. In certain embodiments, the immune precursor cells comprise hematopoietic progenitor cells (HPCs).

### Hematopoietic Stem Cells (HSCs)

[0178] Hematopoietic stem cells (HSCs) are multipotent, self-renewing cells. All differentiated blood cells from the lymphoid and myeloid lineages arise from HSCs. HSCs can be found in adult bone marrow, peripheral blood, mobilized peripheral blood, peritoneal dialysis effluent and umbilical cord blood.

[0179] HSCs of the disclosure may be isolated or derived from a primary or cultured stem cell. HSCs of the disclosure may be isolated or derived from an embryonic stem cell, a multipotent stem cell, a pluripotent stem cell, an adult stem cell, or an induced pluripotent stem cell (iPSC).

[0180] Immune precursor cells of the disclosure may comprise an HSC or an HSC descendent cell. Exemplary HSC descendent cells of the disclosure include, but are not limited to, multipotent stem cells, lymphoid progenitor cells, natural killer (NK) cells, T lymphocyte cells (T-cells), B lymphocyte cells (B-cells), myeloid progenitor cells, neutrophils, basophils, eosinophils, monocytes, and macrophages.

[0181] HSCs produced by the methods of the disclosure may retain features of “primitive” stem cells that, while isolated or derived from an adult stem cell and while committed to a single lineage, share characteristics of embryonic stem cells. For example, the “primitive” HSCs produced by the methods of the disclosure retain their “stemness” following division and do not differentiate. Consequently, as an adoptive cell therapy, the “primitive” HSCs produced by the methods of the disclosure not only replenish their numbers, but expand in vivo. “Primitive” HSCs produced by the methods of the disclosure may be therapeutically-effective when administered as a single dose. In some embodiments, primitive HSCs of the disclosure are CD34+. In some embodiments, primitive HSCs of the disclosure are CD34+ and CD38−. In some embodiments, primitive HSCs of the disclosure are CD34+, CD38− and CD90+. In some embodiments, primitive HSCs of the disclosure are CD34+, CD38−, CD90+ and CD45RA−. In some embodiments, primitive HSCs of the disclosure are CD34+, CD38−, CD90+, CD45RA−, and CD49f+. In some embodiments, the most primitive HSCs of the disclosure are CD34+, CD38−, CD90+, CD45RA−, and CD49f+.

[0182] In some embodiments of the disclosure, primitive HSCs, HSCs, and/or HSC descendent cells may be modified according to the methods of the disclosure to express an exogenous sequence (e.g. a chimeric antigen receptor or therapeutic protein). In some embodiments of the disclosure, modified primitive HSCs, modified HSCs, and/or modified HSC descendent cells may be forward differentiated to produce a modified immune cell including, but not limited to, a modified T cell, a modified natural killer cell and/or a modified B-cell of the disclosure.

### T Cells

[0183] Modified T cells of the disclosure may be derived from modified hematopoietic stem and progenitor cells (HSPCs) or modified HSCs.

[0184] Unlike traditional biologics and chemotherapeutics, modified-T cells of the disclosure possess the capacity to rapidly reproduce upon antigen recognition, thereby potentially obviating the need for repeat treatments. To achieve this, in some embodiments, modified-T cells of the disclosure not only drive an initial response, but also persist in the patient as a stable population of viable memory T cells to prevent potential relapses. Alternatively, in some embodiments, when it is not desired, modified-T cells of the disclosure do not persist in the patient.

[0185] Intensive efforts have been focused on the development of antigen receptor molecules that do not cause T cell exhaustion through antigen-independent (tonic) signaling, as well as of a modified-T cell product containing early memory T cells, especially stem cell memory (T_{SCM}) or stem cell-like T cells. Stem cell-like modified-T cells of the disclosure exhibit the greatest capacity for self-renewal and multipotent capacity to derive central memory (T_{CM}) T cells or T_{CM} like cells, effector memory (T_{EM}) and effector T cells (T_{E}), thereby producing better tumor eradication and long-term modified-T cell engraftment. A linear pathway of differentiation may be responsible for generating these cells: Naïve T cells (T_{N})>T_{SCM}>T_{CM}>T_{EM}>T_{E}>T_{TE}, whereby T_{N} is the parent precursor cell that directly gives rise to T_{SCM}, which then, in turn, directly gives rise to T_{CM}, etc. Compositions of T cells of the disclosure may comprise one or more of each parental T cell subset with T_{SCM} cells being the most abundant (e.g. T_{SCM}>T_{CM}>T_{EM}>T_{E}>T_{TE}).

[0186] In some embodiments of the methods of the disclosure, the immune cell precursor is differentiated into or is capable of differentiating into an early memory T cell, a stem cell like T-cell, a Naïve T cells (T_{N}), a T_{SCM}, a T_{CM}, a T_{EM}, a T_{E}, or a T_{TE}. In some embodiments, the immune cell precursor is a primitive HSC, an HSC, or a HSC descendent cell of the disclosure.

[0187] In some embodiments of the methods of the disclosure, the immune cell is an early memory T cell, a stem cell like T-cell, a Naïve T cells (T_{N}), a T_{SCM}, a T_{CM}, a T_{EM}, a T_{E}, or a T_{TE}.

[0188] In some embodiments of the methods of the disclosure, the immune cell is an early memory T cell.

[0189] In some embodiments of the methods of the disclosure, the immune cell is a stem cell like T-cell.

[0190] In some embodiments of the methods of the disclosure, the immune cell is a T_{SCM}.

[0191] In some embodiments of the methods of the disclosure, the immune cell is a T_{CM}.

[0192] In some embodiments of the methods of the disclosure, the methods modify and/or the methods produce a plurality of modified T cells, wherein at least 2%, 5%, 10%, 15%, 20%, 25%, 30%, 35%, 40%, 45%, 50%, 60%, 65%, 70%, 75%, 80%, 85%, 90%, 95%, 99% or any percentage in between of the plurality of modified T cells expresses one or more cell-surface marker(s) of an early memory T cell. In certain embodiments, the plurality of modified early memory T cells comprises at least one modified stem cell-like T cell. In certain embodiments, the plurality of modified early memory T cells comprises at least one modified T_{SCM}. In certain embodiments, the plurality of modified early memory T cells comprises at least one modified T_{CM}.

[0193] In some embodiments of the methods of the disclosure, the methods modify and/or the methods produce a plurality of modified T cells, wherein at least 2%, 5%, 10%, 15%, 20%, 25%, 30%, 35%, 40%, 45%, 50%, 60%, 65%, 70%, 75%, 80%, 85%, 90%, 95%, 99% or any percentage in between of the plurality of modified T cells expresses one or more cell-surface marker(s) of a stem cell-like T cell. In certain embodiments, the plurality of modified stem cell-like T cells comprises at least one modified T_{SCM}. In certain embodiments, the plurality of modified stem cell-like T cells comprises at least one modified T_{CM}.

[0194] In some embodiments of the methods of the disclosure, the methods modify and/or the methods produce a plurality of modified T cells, wherein at least 2%, 5%, 10%, 15%, 20%, 25%, 30%, 35%, 40%, 45%, 50%, 60%, 65%, 70%, 75%, 80%, 85%, 90%, 95%, 99% or any percentage in between of the plurality of modified T cells expresses one or more cell-surface marker(s) of a stem memory T cell (T_{SCM}). In certain embodiments, the cell-surface markers comprise CD62L and CD45RA. In certain embodiments, the cell-surface markers comprise one or more of CD62L, CD45RA, CD28, CCR7, CD127, CD45RO, CD95, CD95 and IL-2Rβ. In certain embodiments, the cell-surface markers comprise one or more of CD45RA, CD95, CCR7, and CD62L.

[0195] In some embodiments of the methods of the disclosure, the methods modify and/or the methods produce a plurality of modified T cells, wherein at least 2%, 5%, 10%, 15%, 20%, 25%, 30%, 35%, 40%, 45%, 50%, 60%, 65%, 70%, 75%, 80%, 85%, 90%, 95%, 99% or any percentage in between of the plurality of modified T cells expresses one or more cell-surface marker(s) of a central memory T cell (T_{CM}). In certain embodiments, the cell-surface markers comprise one or more of CD45RO, CD95, IL-2Rβ, CCR7, and CD62L.

[0196] In some embodiments of the methods of the disclosure, the methods modify and/or the methods produce a plurality of modified T cells, wherein at least 2%, 5%, 10%, 15%, 20%, 25%, 30%, 35%, 40%, 45%, 50%, 60%, 65%, 70%, 75%, 80%, 85%, 90%, 95%, 99% or any percentage in between of the plurality of modified T cells expresses one or more cell-surface marker(s) of a naïve T cell (T_{N}). In certain embodiments, the cell-surface markers comprise one or more of CD45RA, CCR7 and CD62L.

[0197] In some embodiments of the methods of the disclosure, the methods modify and/or the methods produce a plurality of modified T cells, wherein at least 2%, 5%, 10%, 15%, 20%, 25%, 30%, 35%, 40%, 45%, 50%, 60%, 65%, 70%, 75%, 80%, 85%, 90%, 95%, 99% or any percentage in between of the plurality of modified T cells expresses one or more cell-surface marker(s) of an effector T-cell (modified TEFF). In certain embodiments, the cell-surface markers comprise one or more of CD45RA, CD95, and IL-2Rβ.

[0198] In some embodiments of the methods of the disclosure, the methods modify and/or the methods produce a plurality of modified T cells, wherein at least 2%, 5%, 10%, 15%, 20%, 25%, 30%, 35%, 40%, 45%, 50%, 60%, 65%, 70%, 75%, 80%, 85%, 90%, 95%, 99% or any percentage in between of the plurality of modified T cells expresses one or more cell-surface marker(s) of a stem cell-like T cell, a stem memory T cell (T_{SCM}) or a central memory T cell (T_{CM}).

[0199] In some embodiments of the methods of the disclosure, a buffer comprises the immune cell or precursor thereof. The buffer maintains or enhances a level of cell viability and/or a stem-like phenotype of the immune cell or precursor thereof, including T-cells. In certain embodiments, the buffer maintains or enhances a level of cell viability and/or a stem-like phenotype of the primary human T cells prior to the nucleofection. In certain embodiments, the buffer maintains or enhances a level of cell viability and/or a stem-like phenotype of the primary human T cells during the nucleofection. In certain embodiments, the buffer maintains or enhances a level of cell viability and/or a stem-like phenotype of the primary human T cells following the nucleofection. In certain embodiments, the buffer comprises one or more of KCl, MgCl₂, ClNa, Glucose and Ca(NO₃)₂ in any absolute or relative abundance or concentration, and, optionally, the buffer further comprises a supplement selected from the group consisting of HEPES, Tris/HCl, and a phosphate buffer. In certain embodiments, the buffer comprises 5 mM KCl, 15 mM MgCl₂, 90 mM ClNa, 10 mM Glucose and 0.4 mM Ca(NO₃)₂. In certain embodiments, the buffer comprises 5 mM KCl, 15 mM MgCl₂, 90 mM ClNa, 10 mM Glucose and 0.4 mM Ca(NO₃)₂ and a supplement comprising 20 mM HEPES and 75 mM Tris/HCl. In certain embodiments, the buffer comprises 5 mM KCl, 15 mM MgCl₂, 90 mM ClNa, 10 mM Glucose and 0.4 mM Ca(NO₃)₂ and a supplement comprising 40 mM Na₂HPO₄/NaH₂PO₄ at pH 7.2. In certain embodiments, the composition comprising primary human T cells comprises 100 μl of the buffer and between 5×10⁶ and 25×10⁶ cells. In certain embodiments, the composition comprises a scalable ratio of 250×10⁶ primary human T cells per milliliter of buffer or other media during the introduction step.

[0200] In some embodiments of the methods of the disclosure, the methods comprise contacting an immune cell of the disclosure, including a T cell of the disclosure, and a T-cell expansion composition. In some embodiments of the methods of the disclosure, the step of introducing a transposon and/or transposase of the disclosure into an immune cell of the disclosure may further comprise contacting the immune cell and a T-cell expansion composition. In some embodiments, including those in which the introducing step of the methods comprises an electroporation or a nucleofection step, the electroporation or a nucleofection step may be performed with the immune cell contacting T-cell expansion composition of the disclosure.

[0201] In some embodiments of the methods of the disclosure, the T-cell expansion composition comprises, consists essentially of or consists of phosphorus; one or more of an octanoic acid, a palmitic acid, a linoleic acid, and an oleic acid; a sterol; and an alkane.

[0202] In certain embodiments of the methods of producing a modified T cell of the disclosure, the expansion supplement comprises one or more cytokine(s). The one or more cytokine(s) may comprise any cytokine, including but not limited to, lymphokines. Exemplary lympokines include, but are not limited to, interleukin-2 (IL-2), interleukin-3 (IL-3), interleukin-4 (IL-4), interleukin-5 (IL-5), interleukin-6 (IL-6), interleukin-7 (IL-7), interleukin-15 (IL-15), interleukin-21 (IL-21), granulocyte-macrophage colony-stimulating factor (GM-CSF) and interferon-gamma (INFγ). The one or more cytokine(s) may comprise IL-2.

[0203] In some embodiments of the methods of the disclosure, the T-cell expansion composition comprises human serum albumin, recombinant human insulin, human transferrin, 2-Mercaptoethanol, and an expansion supplement. In certain embodiments of this method, the T-cell expansion composition further comprises one or more of octanoic acid, nicotinamide, 2,4,7,9-tetramethyl-5-decyn-4,7-diol (TMDD), diisopropyl adipate (DIPA), n-butyl-benzenesulfonamide, 1,2-benzenedicarboxylic acid, bis(2-methylpropyl) ester, palmitic acid, linoleic acid, oleic acid, stearic acid hydrazide, oleamide, a sterol and an alkane. In certain embodiments of this method, the T-cell expansion composition further comprises one or more of octanoic acid, palmitic acid, linoleic acid, oleic acid and a sterol. In certain embodiments of this method, the T-cell expansion composition further comprises one or more of octanoic acid at a concentration of between 0.9 mg/kg to 90 mg/kg, inclusive of the endpoints; palmitic acid at a concentration of between 0.2 mg/kg to 20 mg/kg, inclusive of the endpoints; linoleic acid at a concentration of between 0.2 mg/kg to 20 mg/kg, inclusive of the endpoints; oleic acid at a concentration of 0.2 mg/kg to 20 mg/kg, inclusive of the endpoints; and a sterol at a concentration of about 0.1 mg/kg to 10 mg/kg, inclusive of the endpoints. In certain embodiments of this method, the T-cell expansion composition further comprises one or more of octanoic acid at a concentration of about 9 mg/kg, palmitic acid at a concentration of about 2 mg/kg, linoleic acid at a concentration of about 2 mg/kg, oleic acid at a concentration of about 2 mg/kg and a sterol at a concentration of about 1 mg/kg. In certain embodiments of this method, the T-cell expansion composition further comprises one or more of octanoic acid at a concentration of between 6.4 μmol/kg and 640 μmol/kg, inclusive of the endpoints; palmitic acid at a concentration of between 0.7 μmol/kg and 70 μmol/kg, inclusive of the endpoints; linoleic acid at a concentration of between 0.75 μmol/kg and 75 μmol/kg, inclusive of the endpoints; oleic acid at a concentration of between 0.75 μmol/kg and 75 μmol/kg, inclusive of the endpoints; and a sterol at a concentration of between 0.25 μmol/kg and 25 μmol/kg, inclusive of the endpoints. In certain embodiments of this method, the T-cell expansion composition further comprises one or more of octanoic acid at a concentration of about 64 μmol/kg, palmitic acid at a concentration of about 7 μmol/kg, linoleic acid at a concentration of about 7.5 μmol/kg, oleic acid at a concentration of about 7.5 μmol/kg and a sterol at a concentration of about 2.5 μmol/kg.

[0204] In certain embodiments, the T-cell expansion composition comprises one or more of human serum albumin, recombinant human insulin, human transferrin, 2-Mercaptoethanol, and an expansion supplement to produce a plurality of expanded modified T-cells, wherein at least 2% of the plurality of modified T-cells expresses one or more cell-surface marker(s) of an early memory T cell, a stem cell-like T cell, a stem memory T cell (T_{SCM}) and/or a central memory T cell (T_{CM}). In certain embodiments, the T-cell expansion composition comprises or further comprises one or more of octanoic acid, nicotinamide, 2,4,7,9-tetramethyl-5-decyn-4,7-diol (TMDD), diisopropyl adipate (DIPA), n-butyl-benzenesulfonamide, 1,2-benzenedicarboxylic acid, bis(2-methylpropyl) ester, palmitic acid, linoleic acid, oleic acid, stearic acid hydrazide, oleamide, a sterol and an alkane. In certain embodiments, the T-cell expansion composition comprises one or more of octanoic acid, palmitic acid, linoleic acid, oleic acid and a sterol (e.g. cholesterol). In certain embodiments, the T-cell expansion composition comprises one or more of octanoic acid at a concentration of between 0.9 mg/kg to 90 mg/kg, inclusive of the endpoints; palmitic acid at a concentration of between 0.2 mg/kg to 20 mg/kg, inclusive of the endpoints; linoleic acid at a concentration of between 0.2 mg/kg to 20 mg/kg, inclusive of the endpoints; oleic acid at a concentration of 0.2 mg/kg to 20 mg/kg, inclusive of the endpoints; and a sterol at a concentration of about 0.1 mg/kg to 10 mg/kg, inclusive of the endpoints (wherein mg/kg=parts per million). In certain embodiments, the T-cell expansion composition comprises one or more of octanoic acid at a concentration of about 9 mg/kg, palmitic acid at a concentration of about 2 mg/kg, linoleic acid at a concentration of about 2 mg/kg, oleic acid at a concentration of about 2 mg/kg, and a sterol at a concentration of about 1 mg/kg (wherein mg/kg=parts per million). In certain embodiments, the T-cell expansion composition comprises one or more of octanoic acid at a concentration of 9.19 mg/kg, palmitic acid at a concentration of 1.86 mg/kg, linoleic acid at a concentration of about 2.12 mg/kg, oleic acid at a concentration of about 2.13 mg/kg, and a sterol at a concentration of about 1.01 mg/kg (wherein mg/kg=parts per million). In certain embodiments, the T-cell expansion composition comprises octanoic acid at a concentration of 9.19 mg/kg, palmitic acid at a concentration of 1.86 mg/kg, linoleic acid at a concentration of 2.12 mg/kg, oleic acid at a concentration of about 2.13 mg/kg, and a sterol at a concentration of 1.01 mg/kg (wherein mg/kg=parts per million). In certain embodiments, the T-cell expansion composition comprises one or more of octanoic acid at a concentration of between 6.4 μmol/kg and 640 μmol/kg, inclusive of the endpoints; palmitic acid at a concentration of between 0.7 μmol/kg and 70 μmol/kg, inclusive of the endpoints; linoleic acid at a concentration of between 0.75 μmol/kg and 75 μmol/kg, inclusive of the endpoints; oleic acid at a concentration of between 0.75 μmol/kg and 75 μmol/kg, inclusive of the endpoints; and a sterol at a concentration of between 0.25 μmol/kg and 25 μmol/kg, inclusive of the endpoints. In certain embodiments, the T-cell expansion composition comprises one or more of octanoic acid at a concentration of about 64 μmol/kg, palmitic acid at a concentration of about 7 μmol/kg, linoleic acid at a concentration of about 7.5 μmol/kg, oleic acid at a concentration of about 7.5 μmol/kg and a sterol at a concentration of about 2.5 μmol/kg. In certain embodiments, the T-cell expansion composition comprises one or more of octanoic acid at a concentration of about 63.75 μmol/kg, palmitic acid at a concentration of about 7.27 μmol/kg, linoleic acid at a concentration of about 7.57 μmol/kg, oleic acid at a concentration of about 7.56 μmol/kg and a sterol at a concentration of about 2.61 μmol/kg. In certain embodiments, the T-cell expansion composition comprises octanoic acid at a concentration of about 63.75 μmol/kg, palmitic acid at a concentration of about 7.27 μmol/kg, linoleic acid at a concentration of about 7.57 μmol/kg, oleic acid at a concentration of 7.56 μmol/kg and a sterol at a concentration of 2.61 μmol/kg.

[0205] As used herein, the terms “supplemented T-cell expansion composition” or “T-cell expansion composition” may be used interchangeably with a media comprising one or more of human serum albumin, recombinant human insulin, human transferrin, 2-Mercaptoethanol, and an expansion supplement at 37° C. Alternatively, or in addition, the terms “supplemented T-cell expansion composition” or “T-cell expansion composition” may be used interchangeably with a media comprising one or more of phosphorus, an octanoic fatty acid, a palmitic fatty acid, a linoleic fatty acid and an oleic acid. In certain embodiments, the media comprises an amount of phosphorus that is 10-fold higher than may be found in, for example, Iscove's Modified Dulbecco's Medium ((IMDM); available at ThermoFisher Scientific as Catalog number 12440053).

[0206] As used herein, the terms “supplemented T-cell expansion composition” or “T-cell expansion composition” may be used interchangeably with a media comprising one or more of human serum albumin, recombinant human insulin, human transferrin, 2-Mercaptoethanol, Iscove's MDM, and an expansion supplement at 37° C. Alternatively, or in addition, the terms “supplemented T-cell expansion composition” or “T-cell expansion composition” may be used interchangeably with a media comprising one or more of the following elements: boron, sodium, magnesium, phosphorus, potassium, and calcium. In certain embodiments, the terms “supplemented T-cell expansion composition” or “T-cell expansion composition” may be used interchangeably with a media comprising one or more of the following elements present in the corresponding average concentrations: boron at 3.7 mg/L, sodium at 3000 mg/L, magnesium at 18 mg/L, phosphorus at 29 mg/L, potassium at 15 mg/L and calcium at 4 mg/L.

[0207] As used herein, the terms “supplemented T-cell expansion composition” or “T-cell expansion composition” may be used interchangeably with a media comprising one or more of human serum albumin, recombinant human insulin, human transferrin, 2-Mercaptoethanol, and an expansion supplement at 37° C. Alternatively, or in addition, the terms “supplemented T-cell expansion composition” or “T-cell expansion composition” may be used interchangeably with a media comprising one or more of the following components: octanoic acid (CAS No. 124-07-2), nicotinamide (CAS No. 98-92-0), 2,4,7,9-tetramethyl-5-decyn-4,7-diol (TMDD) (CAS No. 126-86-3), diisopropyl adipate (DIPA) (CAS No. 6938-94-9), n-butyl-benzenesulfonamide (CAS No. 3622-84-2), 1,2-benzenedicarboxylic acid, bis(2-methylpropyl) ester (CAS No. 84-69-5), palmitic acid (CAS No. 57-10-3), linoleic acid (CAS No. 60-33-3), oleic acid (CAS No. 112-80-1), stearic acid hydrazide (CAS No. 4130-54-5), oleamide (CAS No. 3322-62-1), sterol (e.g., cholesterol) (CAS No. 57-88-5), and alkanes (e.g., nonadecane) (CAS No. 629-92-5). In certain embodiments, the terms “supplemented T-cell expansion composition” or “T-cell expansion composition” may be used interchangeably with a media comprising one or more of the following components: octanoic acid (CAS No. 124-07-2), nicotinamide (CAS No. 98-92-0), 2,4,7,9-tetramethyl-5-decyn-4,7-diol (TMDD) (CAS No. 126-86-3), diisopropyl adipate (DIPA) (CAS No. 6938-94-9), n-butyl-benzenesulfonamide (CAS No. 3622-84-2), 1,2-benzenedicarboxylic acid, bis(2-methylpropyl) ester (CAS No. 84-69-5), palmitic acid (CAS No. 57-10-3), linoleic acid (CAS No. 60-33-3), oleic acid (CAS No. 112-80-1), stearic acid hydrazide (CAS No. 4130-54-5), oleamide (CAS No. 3322-62-1), sterol (e.g., cholesterol) (CAS No. 57-88-5), alkanes (e.g., nonadecane) (CAS No. 629-92-5), and phenol red (CAS No. 143-74-8). In certain embodiments, the terms “supplemented T-cell expansion composition” or “T-cell expansion composition” may be used interchangeably with a media comprising one or more of the following components: octanoic acid (CAS No. 124-07-2), nicotinamide (CAS No. 98-92-0), 2,4,7,9-tetramethyl-5-decyn-4,7-diol (TMDD) (CAS No. 126-86-3), diisopropyl adipate (DIPA) (CAS No. 6938-94-9), n-butyl-benzenesulfonamide (CAS No. 3622-84-2), 1,2-benzenedicarboxylic acid, bis(2-methylpropyl) ester (CAS No. 84-69-5), palmitic acid (CAS No. 57-10-3), linoleic acid (CAS No. 60-33-3), oleic acid (CAS No. 112-80-1), stearic acid hydrazide (CAS No. 4130-54-5), oleamide (CAS No. 3322-62-1), phenol red (CAS No. 143-74-8) and lanolin alcohol.

[0208] In certain embodiments, the terms “supplemented T-cell expansion composition” or “T-cell expansion composition” may be used interchangeably with a media comprising one or more of human serum albumin, recombinant human insulin, human transferrin, 2-Mercaptoethanol, and an expansion supplement at 37° C. Alternatively, or in addition, the terms “supplemented T-cell expansion composition” or “T-cell expansion composition” may be used interchangeably with a media comprising one or more of the following ions: sodium, ammonium, potassium, magnesium, calcium, chloride, sulfate and phosphate.

[0209] As used herein, the terms “supplemented T-cell expansion composition” or “T-cell expansion composition” may be used interchangeably with a media comprising one or more of human serum albumin, recombinant human insulin, human transferrin, 2-Mercaptoethanol, and an expansion supplement at 37° C. Alternatively, or in addition, the terms “supplemented T-cell expansion composition” or “T-cell expansion composition” may be used interchangeably with a media comprising one or more of the following free amino acids: histidine, asparagine, serine, glutamate, arginine, glycine, aspartic acid, glutamic acid, threonine, alanine, proline, cysteine, lysine, tyrosine, methionine, valine, isoleucine, leucine, phenylalanine and tryptophan. In certain embodiments, the terms “supplemented T-cell expansion composition” or “T-cell expansion composition” may be used interchangeably with a media comprising one or more of the following free amino acids in the corresponding average mole percentages: histidine (about 1%), asparagine (about 0.5%), serine (about 1.5%), glutamine (about 67%), arginine (about 1.5%), glycine (about 1.5%), aspartic acid (about 1%), glutamic acid (about 2%), threonine (about 2%), alanine (about 1%), proline (about 1.5%), cysteine (about 1.5%), lysine (about 3%), tyrosine (about 1.5%), methionine (about 1%), valine (about 3.5%), isoleucine (about 3%), leucine (about 3.5%), phenylalanine (about 1.5%) and tryptophan (about 0.5%). In certain embodiments, the terms “supplemented T-cell expansion composition” or “T-cell expansion composition” may be used interchangeably with a media comprising one or more of the following free amino acids in the corresponding average mole percentages: histidine (about 0.78%), asparagine (about 0.4%), serine (about 1.6%), glutamine (about 67.01%), arginine (about 1.67%), glycine (about 1.72%), aspartic acid (about 1.00%), glutamic acid (about 1.93%), threonine (about 2.38%), alanine (about 1.11%), proline (about 1.49%), cysteine (about 1.65%), lysine (about 2.84%), tyrosine (about 1.62%), methionine (about 0.85%), valine (about 3.45%), isoleucine (about 3.14%), leucine (about 3.3%), phenylalanine (about 1.64%) and tryptophan (about 0.37%).

[0210] As used herein, the terms “supplemented T-cell expansion composition” or “T-cell expansion composition” may be used interchangeably with a media comprising one or more of human serum albumin, recombinant human insulin, human transferrin, 2-Mercaptoethanol, Iscove's MDM, and an expansion supplement at 37° C. Alternatively, or in addition, the terms “supplemented T-cell expansion composition” or “T-cell expansion composition” may be used interchangeably with a media comprising one or more of phosphorus, an octanoic fatty acid, a palmitic fatty acid, a linoleic fatty acid and an oleic acid. In certain embodiments, the media comprises an amount of phosphorus that is 10-fold higher than may be found in, for example, Iscove's Modified Dulbecco's Medium ((IMDM); available at ThermoFisher Scientific as Catalog number 12440053).

[0211] In certain embodiments, the terms “supplemented T-cell expansion composition” or “T-cell expansion composition” may be used interchangeably with a media comprising one or more of octanoic acid, palmitic acid, linoleic acid, oleic acid and a sterol (e.g. cholesterol). In certain embodiments, the terms “supplemented T-cell expansion composition” or “T-cell expansion composition” may be used interchangeably with a media comprising one or more of octanoic acid at a concentration of between 0.9 mg/kg to 90 mg/kg, inclusive of the endpoints; palmitic acid at a concentration of between 0.2 mg/kg to 20 mg/kg, inclusive of the endpoints; linoleic acid at a concentration of between 0.2 mg/kg to 20 mg/kg, inclusive of the endpoints; oleic acid at a concentration of 0.2 mg/kg to 20 mg/kg, inclusive of the endpoints; and a sterol at a concentration of about 0.1 mg/kg to 10 mg/kg, inclusive of the endpoints (wherein mg/kg=parts per million). In certain embodiments, the terms “supplemented T-cell expansion composition” or “T-cell expansion composition” may be used interchangeably with a media comprising one or more of octanoic acid at a concentration of about 9 mg/kg, palmitic acid at a concentration of about 2 mg/kg, linoleic acid at a concentration of about 2 mg/kg, oleic acid at a concentration of about 2 mg/kg, and a sterol at a concentration of about 1 mg/kg (wherein mg/kg=parts per million). In certain embodiments, the terms “supplemented T-cell expansion composition” or “T-cell expansion composition” may be used interchangeably with a media comprising one or more of octanoic acid at a concentration of 9.19 mg/kg, palmitic acid at a concentration of 1.86 mg/kg, linoleic acid at a concentration of about 2.12 mg/kg, oleic acid at a concentration of about 2.13 mg/kg, and a sterol at a concentration of about 1.01 mg/kg (wherein mg/kg=parts per million). In certain embodiments, the terms “supplemented T-cell expansion composition” or “T-cell expansion composition” may be used interchangeably with a media comprising one or more of octanoic acid at a concentration of 9.19 mg/kg, palmitic acid at a concentration of 1.86 mg/kg, linoleic acid at a concentration of 2.12 mg/kg, oleic acid at a concentration of about 2.13 mg/kg, and a sterol at a concentration of 1.01 mg/kg (wherein mg/kg=parts per million). In certain embodiments, the terms “supplemented T-cell expansion composition” or “T-cell expansion composition” may be used interchangeably with a media comprising one or more of octanoic acid at a concentration of between 6.4 μmol/kg and 640 μmol/kg, inclusive of the endpoints; palmitic acid at a concentration of between 0.7 μmol/kg and 70 μmol/kg, inclusive of the endpoints; linoleic acid at a concentration of between 0.75 μmol/kg and 75 μmol/kg, inclusive of the endpoints; oleic acid at a concentration of between 0.75 μmol/kg and 75 μmol/kg, inclusive of the endpoints; and a sterol at a concentration of between 0.25 μmol/kg and 25 μmol/kg, inclusive of the endpoints. In certain embodiments, the terms “supplemented T-cell expansion composition” or “T-cell expansion composition” may be used interchangeably with a media comprising one or more of octanoic acid at a concentration of about 64 μmol/kg, palmitic acid at a concentration of about 7 μmol/kg, linoleic acid at a concentration of about 7.5 μmol/kg, oleic acid at a concentration of about 7.5 μmol/kg and a sterol at a concentration of about 2.5 μmol/kg.

[0212] In certain embodiments, the terms “supplemented T-cell expansion composition” or “T-cell expansion composition” may be used interchangeably with a media comprising one or more of octanoic acid at a concentration of about 63.75 μmol/kg, palmitic acid at a concentration of about 7.27 μmol/kg, linoleic acid at a concentration of about 7.57 μmol/kg, oleic acid at a concentration of about 7.56 μmol/kg and a sterol at a concentration of about 2.61 μmol/kg. In certain embodiments, the terms “supplemented T-cell expansion composition” or “T-cell expansion composition” may be used interchangeably with a media comprising one or more of octanoic acid at a concentration of about 63.75 μmol/kg, palmitic acid at a concentration of about 7.27 μmol/kg, linoleic acid at a concentration of about 7.57 μmol/kg, oleic acid at a concentration of 7.56 μmol/kg and a sterol at a concentration of 2.61 μmol/kg.

[0213] In certain embodiments of the methods of producing a modified T cell (e.g. a stem cell-like T cell, a T_{SCM} and/or a T_{CM}) of the disclosure, the method comprises contacting a modified T cell and an inhibitor of the P13K-Akt-mTOR pathway. Modified T-cells of the disclosure, including modified stem cell-like T cells, T_{SCM} and/or T_{CM} of the disclosure, may be incubated, cultured, grown, stored, or otherwise, combined at any step in the methods of the procedure with a growth medium comprising one or more inhibitors a component of a PI3K pathway. Exemplary inhibitors a component of a PI3K pathway include, but are not limited to, an inhibitor of GSK3β such as TWS119 (also known as GSK 3B inhibitor XII; CAS Number 601514-19-6 having a chemical formula C₁₈H₁₄N₄O₂). Exemplary inhibitors of a component of a PI3K pathway include, but are not limited to, bb007 (BLUEBIRDBIO™). Additional Exemplary inhibitors of a component of a PI3K pathway include, but are not limited to, an allosteric Akt inhibitor VIII (also referred to as Akti-1/2 having Compound number 10196499), ATP competitive inhibitors (Orthosteric inhibitors targeting the ATP-binding pocket of the protein kinase B (Akt)), Isoquinoline-5-sulfonamides (H-8, H-89, and NL-71-101), Azepane derivatives (A series of structures derived from (−)-balanol), Aminofurazans (GSK690693), Heterocyclic rings (7-azaindole, 6-phenylpurine derivatives, pyrrolo[2,3-d]pyrimidine derivatives, CCT128930, 3-aminopyrrolidine, anilinotriazole derivatives, spiroindoline derivatives, AZD5363, ipatasertib (GDC-0068, RG7440), A-674563, and A-443654), Phenylpyrazole derivatives (AT7867 and AT13148), Thiophenecarboxamide derivatives (Afuresertib (GSK2110183), 2-pyrimidyl-5-amidothiophene derivative (DC120), uprosertib (GSK2141795)), Allosteric inhibitors (Superior to orthosteric inhibitors providing greater specificity, reduced side-effects and less toxicity), 2,3-diphenylquinoxaline analogues (2,3-diphenylquinoxaline derivatives, triazolo[3,4-f][1,6]naphthyridin-3(2H)-one derivative (MK-2206)), Alkylphospholipids (Edelfosine (1-O-octadecyl-2-O-methyl-rac-glycero-3-phosphocholine, ET-18-OCH₃) ilmofosine (BM 41.440), miltefosine (hexadecylphosphocholine, HePC), perifosine (D-21266), erucylphosphocholine (ErPC), erufosine (ErPC3, erucylphosphohomocholine), Indole-3-carbinol analogues (Indole-3-carbinol, 3-chloroacetylindole, diindolylmethane, diethyl 6-methoxy-5,7-dihydroindolo [2,3-b]carbazole-2,10-dicarboxylate (SR13668), OSU-A9), Sulfonamide derivatives (PH-316 and PHT-427), Thiourea derivatives (PIT-1, PIT-2, DM-PIT-1, N-[(1-methyl-1H-pyrazol-4-yl)carbonyl]-N-(3-bromophenyl)-thiourea), Purine derivatives (Triciribine (TCN, NSC 154020), triciribine mono-phosphate active analogue (TCN-P), 4-amino-pyrido[2,3-d]pyrimidine derivative API-1, 3-phenyl-3H-imidazo[4,5-b]pyridine derivatives, ARQ 092), BAY 1125976, 3-methyl-xanthine, quinoline-4-carboxamide and 2-[4-(cyclohexa-1,3-dien-1-yl)-1H-pyrazol-3-yl]phenol, 3-oxo-tirucallic acid, 3σ- and 3β-acetoxy-tirucallic acids, acetoxy-tirucallic acid, and irreversible inhibitors (antibiotics, Lactoquinomycin, Frenolicin B, kalafungin, medermycin, Boc-Phe-vinyl ketone, 4-hydroxynonenal (4-HNE), 1,6-naphthyridinone derivatives, and imidazo-1,2-pyridine derivatives).

[0214] In certain embodiments of the methods of producing a modified T cell (e.g. a stem cell-like T cell, a T_{SCM} and/or a T_{CM}) of the disclosure, the method comprises contacting a modified T cell and an inhibitor of T cell effector differentiation. Exemplary inhibitors of T cell effector differentiation include, but are not limited to, a BET inhibitor (e.g. JQ1, a hienotriazolodiazepine) and/or an inhibitor of the BET family of proteins (e.g. BRD2, BRD3, BRD4, and BRDT).

[0215] In certain embodiments of the methods of producing a modified T cell (e.g. a stem cell-like T cell, a T_{SCM} and/or a T_{CM}) of the disclosure, the method comprises contacting a modified T cell and an agent that reduces nucleo-cytoplasmic Acetyl-CoA. Exemplary agents that reduce nucleo-cytoplasmic Acetyl-CoA include, but are not limited to, 2-hydroxy-citrate (2-HC) as well as agents that increase expression of Acss1.

[0216] In certain embodiments of the methods of producing a modified T cell (e.g. a stem cell-like T cell, a TSCM and/or a TCM) of the disclosure, the method comprises contacting a modified T cell and a composition comprising a histone deacetylase (HDAC) inhibitor. In some embodiments, the composition comprising an HDAC inhibitor comprises or consists of valproic acid, Sodium Phenylbutyrate (NaPB) or a combination thereof. In some embodiments, the composition comprising an HDAC inhibitor comprises or consists of valproic acid. In some embodiments, the composition comprising an HDAC inhibitor comprises or consists of Sodium Phenylbutyrate (NaPB).

[0217] In certain embodiments of the methods of producing a modified T cell (e.g. a stem cell-like T cell, a T_{SCM} and/or a T_{CM}) of the disclosure, the activation supplement may comprise one or more cytokine(s). The one or more cytokine(s) may comprise any cytokine, including but not limited to, lymphokines. Exemplary lympokines include, but are not limited to, interleukin-2 (IL-2), interleukin-3 (IL-3), interleukin-4 (IL-4), interleukin-5 (IL-5), interleukin-6 (IL-6), interleukin-7 (IL-7), interleukin-15 (IL-15), interleukin-21 (IL-21), granulocyte-macrophage colony-stimulating factor (GM-CSF) and interferon-gamma (INFγ). The one or more cytokine(s) may comprise IL-2.

[0218] In certain embodiments of the methods of producing a modified T cell (e.g. a stem cell-like T cell, a T_{SCM} and/or a T_{CM}) of the disclosure, the activation supplement may comprise one or more activator complexes. Exemplary and nonlimiting activator complexes may comprise a monomeric, dimeric, trimeric or tetrameric antibody complex that binds one or more of CD3, CD28, and CD2. In some embodiments, the activation supplement comprises or consists of an activator complex that comprises a human, a humanized or a recombinant or a chimeric antibody. In some embodiments, the activation supplement comprises or consists of an activator complex that binds CD3 and CD28. In some embodiments, the activation supplement comprises or consists of an activator complex that binds CD3, CD28 and CD2.

### Natural Killer (NK) Cells

[0219] In certain embodiments, the modified immune or immune precursor cells of the disclosure are natural killer (NK) cells. In certain embodiments, NK cells are cytotoxic lymphocytes that differentiate from lymphoid progenitor cells.

[0220] Modified NK cells of the disclosure may be derived from modified hematopoietic stem and progenitor cells (HSPCs) or modified HSCs.

[0221] In certain embodiments, non-activated NK cells are derived from CD3-depleted leukopheresis (containing CD14/CD19/CD56+ cells).

[0222] In certain embodiments, NK cells are electroporated using a Lonza 4D nucleofector or BTX ECM 830 (500V, 700 usec pulse length, 0.2 mm electrode gap, one pulse). All Lonza 4D nucleofector programs are contemplated as within the scope of the methods of the disclosure.

[0223] In certain embodiments, 5×10E6 cells were electroporated per electroporation in 100 μL P3 buffer in cuvettes. However, this ratio of cells per volume is scalable for commercial manufacturing methods.

[0224] In certain embodiments, NK cells were stimulated by co-culture with an additional cell line. In certain embodiments, the additional cell line comprises artificial antigen presenting cells (aAPCs). In certain embodiments, stimulation occurs at day 1, 2, 3, 4, 5, 6, or 7 following electroporation. In certain embodiments, stimulation occurs at day 2 following electroporation.

[0225] In certain embodiments, NK cells express CD56.

### B Cells

[0226] In certain embodiments, the modified immune or immune precursor cells of the disclosure are B cells. B cells are a type of lymphocyte that express B cell receptors on the cell surface. B cell receptors bind to specific antigens.

[0227] Modified B cells of the disclosure may be derived from modified hematopoietic stem and progenitor cells (HSPCs) or modified HSCs.

[0228] In certain embodiments, HSPCs are modified using the methods of the disclosure, and then primed for B cell differentiation in presence of human IL-3, Flt3L, TPO, SCF, and G-CSF for at least 3 days, at least 4 days, at least 5 days, at least 6 days or at least 7 days. In certain embodiments, HSPCs are modified using the methods of the disclosure, and then primed for B cell differentiation in presence of human IL-3, Flt3L, TPO, SCF, and G-CSF for 5 days.

[0229] In certain embodiments, following priming, modified HSPC cells are transferred to a layer of feeder cells and fed bi-weekly, along with transfer to a fresh layer of feeders once per week. In certain embodiments, the feeder cells are MS-5 feeder cells.

[0230] In certain embodiments, modified HSPC cells are cultured with MS-5 feeder cells for at least 7, 14, 21, 28, 30, 33, 35, 42 or 48 days. In certain embodiments, modified HSPC cells were cultured with MS-5 feeder cells for 33 days.

### Transposition Systems

[0231] Exemplary transposon/transposase systems of the disclosure include, but are not limited to, piggyBac transposons and transposases, Sleeping Beauty transposons and transposases, Helraiser transposons and transposases, Tol2 transposons and transposases and TcBuster transposons and transposases.

[0232] The piggyBac transposase recognizes transposon-specific inverted terminal repeat sequences (ITRs) on the ends of the transposon, and moves the contents between the ITRs into TTAA chromosomal sites. The piggyBac transposon system has no payload limit for the genes of interest that can be included between the ITRs. In certain embodiments, and, in particular, those embodiments wherein the transposon is a piggyBac transposon, the transposase is a piggyBac™ or a Super piggyBac™ (SPB) transposase. In certain embodiments, and, in particular, those embodiments wherein the transposase is a Super piggyBac™ (SPB) transposase, the sequence encoding the transposase is an mRNA sequence.

[0233] In certain embodiments of the methods of the disclosure, the transposase enzyme is a piggyBac™ (PB) transposase enzyme. The piggyBac (PB) transposase enzyme may comprise or consist of an amino acid sequence at least 75%, 80%, 85%, 90%, 95%, 99% or any percentage in between identical to:

```
(SEQ ID NO: 14487)
    1 MGSSLDDEHI LSALLQSDDE LVGEDSDSEI SDHVSEDDVQ SDTEEAFIDE VHEVQPTSSG
  61 SEILDEQNVI EQPGSSLASN RILTLPQRTI RGKNKHCWST SKSTRRSRVS ALNIVRSQRG
121 PTRMCRNIYD PLLCFKLFFT DEIISEIVKW TNAEISLKRR ESMTGATFRD TNEDEIYAFF
181 GILVMTAVRK DNHMSTDDLF DRSLSMVYVS VMSRDRFDFL IRCLRMDDKS IRPTLRENDV
241 FTPVRKIWDL FIHQCIQNYT PGAHLTIDEQ LLGFRGRCPF RMYIPNKPSK YGIKILMMCD
301 SGTKYMINGM PYLGRGTQTN GVPLGEYYVK ELSKPVHGSC RNITCDNWFT SIPLAKNLLQ
361 EPYKLTIVGT VRSNKREIPE VLKNSRSRPV GTSMFCFDGP LTLVSYKPKP AKMVYLLSSC
421 DEDASINEST GKPQMVMYYN QTKGGVDTLD QMCSVMTCSR KTNRWPMALL YGMINIACIN
481 SFIIYSHNVS SKGEKVQSRK KFMRNLYMSL TSSFMRKRLE APTLKRYLRD NISNILPNEV
541 PGTSDDSTEE PVMKKRTYCT YCPSKIRRKA NASCKKCKKV ICREHNIDMC QSCF.
```

[0234] In certain embodiments of the methods of the disclosure, the transposase enzyme is a piggyBac™ (PB) transposase enzyme that comprises or consists of an amino acid sequence having an amino acid substitution at one or more of positions 30, 165, 282, or 538 of the sequence:

```
(SEQ ID NO: 14487)
    1 MGSSLDDEHI LSALLQSDDE LVGEDSDSEI SDHVSEDDVQ SDTEEAFIDE VHEVQPTSSG
  61 SEILDEQNVI EQPGSSLASN RILTLPQRTI RGKNKHCWST SKSTRRSRVS ALNIVRSQRG
121 PTRMCRNIYD PLLCFKLFFT DEIISEIVKW TNAEISLKRR ESMTGATFRD TNEDEIYAFF
181 GILVMTAVRK DNHMSTDDLF DRSLSMVYVS VMSRDRFDFL IRCLRMDDKS IRPTLRENDV
241 FTPVRKIWDL FIHQCIQNYT PGAHLTIDEQ LLGFRGRCPF RMYIPNKPSK YGIKILMMCD
301 SGTKYMINGM PYLGRGTQTN GVPLGEYYVK ELSKPVHGSC RNITCDNWFT SIPLAKNLLQ
361 EPYKLTIVGT VRSNKREIPE VLKNSRSRPV GTSMFCFDGP LTLVSYKPKP AKMVYLLSSC
421 DEDASINEST GKPQMVMYYN QTKGGVDTLD QMCSVMTCSR KTNRWPMALL YGMINIACIN
481 SFIIYSHNVS SKGEKVQSRK KFMRNLYMSL TSSFMRKRLE APTLKRYLRD NISNILPNEV
541 PGTSDDSTEE PVMKKRTYCT YCPSKIRRKA NASCKKCKKV ICREHNIDMC QSCF.
```

[0235] In certain embodiments, the transposase enzyme is a piggyBac™ (PB) transposase enzyme that comprises or consists of an amino acid sequence having an amino acid substitution at two or more of positions 30, 165, 282, or 538 of the sequence of SEQ ID NO: 14487. In certain embodiments, the transposase enzyme is a piggyBac™ (PB) transposase enzyme that comprises or consists of an amino acid sequence having an amino acid substitution at three or more of positions 30, 165, 282, or 538 of the sequence of SEQ ID NO: 14487. In certain embodiments, the transposase enzyme is a piggyBac™ (PB) transposase enzyme that comprises or consists of an amino acid sequence having an amino acid substitution at each of the following positions 30, 165, 282, and 538 of the sequence of SEQ ID NO: 14487. In certain embodiments, the amino acid substitution at position 30 of the sequence of SEQ ID NO: 14487 is a substitution of a valine (V) for an isoleucine (I). In certain embodiments, the amino acid substitution at position 165 of the sequence of SEQ ID NO: 14487 is a substitution of a serine (S) for a glycine (G). In certain embodiments, the amino acid substitution at position 282 of the sequence of SEQ ID NO: 14487 is a substitution of a valine (V) for a methionine (M). In certain embodiments, the amino acid substitution at position 538 of the sequence of SEQ ID NO: 14487 is a substitution of a lysine (K) for an asparagine (N).

[0236] In certain embodiments of the methods of the disclosure, the transposase enzyme is a Super piggyBac™ (SPB) transposase enzyme. In certain embodiments, the Super piggyBac™ (SPB) transposase enzymes of the disclosure may comprise or consist of the amino acid sequence of the sequence of SEQ ID NO: 14487 wherein the amino acid substitution at position 30 is a substitution of a valine (V) for an isoleucine (I), the amino acid substitution at position 165 is a substitution of a serine (S) for a glycine (G), the amino acid substitution at position 282 is a substitution of a valine (V) for a methionine (M), and the amino acid substitution at position 538 is a substitution of a lysine (K) for an asparagine (N). In certain embodiments, the Super piggyBac™ (SPB) transposase enzyme may comprise or consist of an amino acid sequence at least 75%, 80%, 85%, 90%, 95%, 99% or any percentage in between identical to:

```
(SEQ ID NO: 14484)
    1 MGSSLDDEHI LSALLQSDDE LVGEDSDSEV SDHVSEDDVQ SDTEEAFIDE VHEVQPTSSG
  61 SEILDEQNVI EQPGSSLASN RILTLPQRTI RGKNKHCWST SKSTRRSRVS ALNIVRSQRG
121 PTRMCRNIYD PLLCFKLFFT DEIISEIVKW TNAEISLKRR ESMTSATFRD TNEDEIYAFF
181 GILVMTAVRK DNHMSTDDLF DRSLSMVYVS VMSRDRFDFL IRCLRMDDKS IRPTLRENDV
241 FTPVRKIWDL FIHQCIQNYT PGAHLTIDEQ LLGFRGRCPF RVYIPNKPSK YGIKILMMCD
301 SGTKYMINGM PYLGRGTQTN GVPLGEYYVK ELSKPVHGSC RNITCDNWFT SIPLAKNLLQ
361 EPYKLTIVGT VRSNKREIPE VLKNSRSRPV GTSMFCFDGP LTLVSYKPKP AKMVYLLSSC
421 DEDASINEST GKPQMVMYYN QTKGGVDTLD QMCSVMTCSR KTNRWPMALL YGMINIACIN
481 SFIIYSHNVS SKGEKVQSRK KFMRNLYMSL TSSFMRKRLE APTLKRYLRD NISNILPKEV
541 PGTSDDSTEE PVMKKRTYCT YCPSKIRRKA NASCKKCKKV ICREHNIDMC QSCF.
```

[0237] In certain embodiments of the methods of the disclosure, including those embodiments wherein the transposase comprises the above-described mutations at positions 30, 165, 282 and/or 538, the piggyBac™ or Super piggyBac™ transposase enzyme may further comprise an amino acid substitution at one or more of positions 3, 46, 82, 103, 119, 125, 177, 180, 185, 187, 200, 207, 209, 226, 235, 240, 241, 243, 258, 296, 298, 311, 315, 319, 327, 328, 340, 421, 436, 456, 470, 486, 503, 552, 570 and 591 of the sequence of SEQ ID NO: 14487 or SEQ ID NO: 14484. In certain embodiments, including those embodiments wherein the transposase comprises the above-described mutations at positions 30, 165, 282 and/or 538, the piggyBac™ or Super piggyBac™ transposase enzyme may further comprise an amino acid substitution at one or more of positions 46, 119, 125, 177, 180, 185, 187, 200, 207, 209, 226, 235, 240, 241, 243, 296, 298, 311, 315, 319, 327, 328, 340, 421, 436, 456, 470, 485, 503, 552 and 570. In certain embodiments, the amino acid substitution at position 3 of SEQ ID NO: 14487 or SEQ ID NO: 14484 is a substitution of an asparagine (N) for a serine (S). In certain embodiments, the amino acid substitution at position 46 of SEQ ID NO: 14487 or SEQ ID NO: 14484 is a substitution of a serine (S) for an alanine (A). In certain embodiments, the amino acid substitution at position 46 of SEQ ID NO: 14487 or SEQ ID NO: 14484 is a substitution of a threonine (T) for an alanine (A). In certain embodiments, the amino acid substitution at position 82 of SEQ ID NO: 14487 or SEQ ID NO: 14484 is a substitution of a tryptophan (W) for an isoleucine (I). In certain embodiments, the amino acid substitution at position 103 of SEQ ID NO: 14487 or SEQ ID NO: 14484 is a substitution of a proline (P) for a serine (S). In certain embodiments, the amino acid substitution at position 119 of SEQ ID NO: 14487 or SEQ ID NO: 14484 is a substitution of a proline (P) for an arginine (R). In certain embodiments, the amino acid substitution at position 125 of SEQ ID NO: 14487 or SEQ ID NO: 14484 is a substitution of an alanine (A) a cysteine (C). In certain embodiments, the amino acid substitution at position 125 of SEQ ID NO: 14487 or SEQ ID NO: 14484 is a substitution of a leucine (L) for a cysteine (C). In certain embodiments, the amino acid substitution at position 177 of SEQ ID NO: 14487 or SEQ ID NO: 14484 is a substitution of a lysine (K) for a tyrosine (Y). In certain embodiments, the amino acid substitution at position 177 of SEQ ID NO: 14487 or SEQ ID NO: 14484 is a substitution of a histidine (H) for a tyrosine (Y). In certain embodiments, the amino acid substitution at position 180 of SEQ ID NO: 14487 or SEQ ID NO: 14484 is a substitution of a leucine (L) for a phenylalanine (F). In certain embodiments, the amino acid substitution at position 180 of SEQ ID NO: 14487 or SEQ ID NO: 14484 is a substitution of an isoleucine (I) for a phenylalanine (F). In certain embodiments, the amino acid substitution at position 180 of SEQ ID NO: 14487 or SEQ ID NO: 14484 is a substitution of a valine (V) for a phenylalanine (F). In certain embodiments, the amino acid substitution at position 185 of SEQ ID NO: 14487 or SEQ ID NO: 14484 is a substitution of a leucine (L) for a methionine (M). In certain embodiments, the amino acid substitution at position 187 of SEQ ID NO: 14487 or SEQ ID NO: 14484 is a substitution of a glycine (G) for an alanine (A). In certain embodiments, the amino acid substitution at position 200 of SEQ ID NO: 14487 or SEQ ID NO: 14484 is a substitution of a tryptophan (W) for a phenylalanine (F). In certain embodiments, the amino acid substitution at position 207 of SEQ ID NO: 14487 or SEQ ID NO: 14484 is a substitution of a proline (P) for a valine (V). In certain embodiments, the amino acid substitution at position 209 of SEQ ID NO: 14487 or SEQ ID NO: 14484 is a substitution of a phenylalanine (F) for a valine (V). In certain embodiments, the amino acid substitution at position 226 of SEQ ID NO: 14487 or SEQ ID NO: 14484 is a substitution of a phenylalanine (F) for a methionine (M). In certain embodiments, the amino acid substitution at position 235 of SEQ ID NO: 14487 or SEQ ID NO: 14484 is a substitution of an arginine (R) for a leucine (L). In certain embodiments, the amino acid substitution at position 240 of SEQ ID NO: 14487 or SEQ ID NO: 14484 is a substitution of a lysine (K) for a valine (V). In certain embodiments, the amino acid substitution at position 241 of SEQ ID NO: 14487 or SEQ ID NO: 14484 is a substitution of a leucine (L) for a phenylalanine (F). In certain embodiments, the amino acid substitution at position 243 of SEQ ID NO: 14487 or SEQ ID NO: 14484 is a substitution of a lysine (K) for a proline (P). In certain embodiments, the amino acid substitution at position 258 of SEQ ID NO: 14487 or SEQ ID NO: 14484 is a substitution of a serine (S) for an asparagine (N). In certain embodiments, the amino acid substitution at position 296 of SEQ ID NO: 14487 or SEQ ID NO: 14484 is a substitution of a tryptophan (W) for a leucine (L). In certain embodiments, the amino acid substitution at position 296 of SEQ ID NO: 14487 or SEQ ID NO: 14484 is a substitution of a tyrosine (Y) for a leucine (L). In certain embodiments, the amino acid substitution at position 296 of SEQ ID NO: 14487 or SEQ ID NO: 14484 is a substitution of a phenylalanine (F) for a leucine (L). In certain embodiments, the amino acid substitution at position 298 of SEQ ID NO: 14487 or SEQ ID NO: 14484 is a substitution of a leucine (L) for a methionine (M). In certain embodiments, the amino acid substitution at position 298 of SEQ ID NO: 14487 or SEQ ID NO: 14484 is a substitution of an alanine (A) for a methionine (M). In certain embodiments, the amino acid substitution at position 298 of SEQ ID NO: 14487 or SEQ ID NO: 14484 is a substitution of a valine (V) for a methionine (M). In certain embodiments, the amino acid substitution at position 311 of SEQ ID NO: 14487 or SEQ ID NO: 14484 is a substitution of an isoleucine (I) for a proline (P). In certain embodiments, the amino acid substitution at position 311 of SEQ ID NO: 14487 or SEQ ID NO: 14484 is a substitution of a valine for a proline (P). In certain embodiments, the amino acid substitution at position 315 of SEQ ID NO: 14487 or SEQ ID NO: 14484 is a substitution of a lysine (K) for an arginine (R). In certain embodiments, the amino acid substitution at position 319 of SEQ ID NO: 14487 or SEQ ID NO: 14484 is a substitution of a glycine (G) for a threonine (T). In certain embodiments, the amino acid substitution at position 327 of SEQ ID NO: 14487 or SEQ ID NO: 14484 is a substitution of an arginine (R) for a tyrosine (Y). In certain embodiments, the amino acid substitution at position 328 of SEQ ID NO: 14487 or SEQ ID NO: 14484 is a substitution of a valine (V) for a tyrosine (Y). In certain embodiments, the amino acid substitution at position 340 of SEQ ID NO: 14487 or SEQ ID NO: 14484 is a substitution of a glycine (G) for a cysteine (C). In certain embodiments, the amino acid substitution at position 340 of SEQ ID NO: 14487 or SEQ ID NO: 14484 is a substitution of a leucine (L) for a cysteine (C). In certain embodiments, the amino acid substitution at position 421 of SEQ ID NO: 14487 or SEQ ID NO: 14484 is a substitution of a histidine (H) for the aspartic acid (D). In certain embodiments, the amino acid substitution at position 436 of SEQ ID NO: 14487 or SEQ ID NO: 14484 is a substitution of an isoleucine (I) for a valine (V). In certain embodiments, the amino acid substitution at position 456 of SEQ ID NO: 14487 or SEQ ID NO: 14484 is a substitution of a tyrosine (Y) for a methionine (M). In certain embodiments, the amino acid substitution at position 470 of SEQ ID NO: 14487 or SEQ ID NO: 14484 is a substitution of a phenylalanine (F) for a leucine (L). In certain embodiments, the amino acid substitution at position 485 of SEQ ID NO: 14487 or SEQ ID NO: 14484 is a substitution of a lysine (K) for a serine (S). In certain embodiments, the amino acid substitution at position 503 of SEQ ID NO: 14487 or SEQ ID NO: 14484 is a substitution of a leucine (L) for a methionine (M). In certain embodiments, the amino acid substitution at position 503 of SEQ ID NO: 14487 or SEQ ID NO: 14484 is a substitution of an isoleucine (I) for a methionine (M). In certain embodiments, the amino acid substitution at position 552 of SEQ ID NO: 14487 or SEQ ID NO: 14484 is a substitution of a lysine (K) for a valine (V). In certain embodiments, the amino acid substitution at position 570 of SEQ ID NO: 14487 or SEQ ID NO: 14484 is a substitution of a threonine (T) for an alanine (A). In certain embodiments, the amino acid substitution at position 591 of SEQ ID NO: 14487 or SEQ ID NO: 14484 is a substitution of a proline (P) for a glutamine (Q). In certain embodiments, the amino acid substitution at position 591 of SEQ ID NO: 14487 or SEQ ID NO: 14484 is a substitution of an arginine (R) for a glutamine (Q).

[0238] In certain embodiments of the methods of the disclosure, including those embodiments wherein the transposase comprises the above-described mutations at positions 30, 165, 282 and/or 538, the piggyBac™ transposase enzyme may comprise or the Super piggyBac™ transposase enzyme may further comprise an amino acid substitution at one or more of positions 103, 194, 372, 375, 450, 509 and 570 of the sequence of SEQ ID NO: 14487 or SEQ ID NO: 14484. In certain embodiments of the methods of the disclosure, including those embodiments wherein the transposase comprises the above-described mutations at positions 30, 165, 282 and/or 538, the piggyBac™ transposase enzyme may comprise or the Super piggyBac™ transposase enzyme may further comprise an amino acid substitution at two, three, four, five, six or more of positions 103, 194, 372, 375, 450, 509 and 570 of the sequence of SEQ ID NO: 14487 or SEQ ID NO: 14484. In certain embodiments, including those embodiments wherein the transposase comprises the above-described mutations at positions 30, 165, 282 and/or 538, the piggyBac™ transposase enzyme may comprise or the Super piggyBac™ transposase enzyme may further comprise an amino acid substitution at positions 103, 194, 372, 375, 450, 509 and 570 of the sequence of SEQ ID NO: 14487 or SEQ ID NO: 14484. In certain embodiments, the amino acid substitution at position 103 of SEQ ID NO: 14487 or SEQ ID NO: 14484 is a substitution of a proline (P) for a serine (S). In certain embodiments, the amino acid substitution at position 194 of SEQ ID NO: 14487 or SEQ ID NO: 14484 is a substitution of a valine (V) for a methionine (M). In certain embodiments, the amino acid substitution at position 372 of SEQ ID NO: 14487 or SEQ ID NO: 14484 is a substitution of an alanine (A) for an arginine (R). In certain embodiments, the amino acid substitution at position 375 of SEQ ID NO: 14487 or SEQ ID NO: 14484 is a substitution of an alanine (A) for a lysine (K). In certain embodiments, the amino acid substitution at position 450 of SEQ ID NO: 14487 or SEQ ID NO: 14484 is a substitution of an asparagine (N) for an aspartic acid (D). In certain embodiments, the amino acid substitution at position 509 of SEQ ID NO: 14487 or SEQ ID NO: 14484 is a substitution of a glycine (G) for a serine (S). In certain embodiments, the amino acid substitution at position 570 of SEQ ID NO: 14487 or SEQ ID NO: 14484 is a substitution of a serine (S) for an asparagine (N). In certain embodiments, the piggyBac™ transposase enzyme may comprise a substitution of a valine (V) for a methionine (M) at position 194 of SEQ ID NO: 14487. In certain embodiments, including those embodiments wherein the piggyBac™ transposase enzyme may comprise a substitution of a valine (V) for a methionine (M) at position 194 of SEQ ID NO: 14487, the piggyBac™ transposase enzyme may further comprise an amino acid substitution at positions 372, 375 and 450 of the sequence of SEQ ID NO: 14487 or SEQ ID NO: 14484. In certain embodiments, the piggyBac™ transposase enzyme may comprise a substitution of a valine (V) for a methionine (M) at position 194 of SEQ ID NO: 14487, a substitution of an alanine (A) for an arginine (R) at position 372 of SEQ ID NO: 14487, and a substitution of an alanine (A) for a lysine (K) at position 375 of SEQ ID NO: 14487. In certain embodiments, the piggyBac™ transposase enzyme may comprise a substitution of a valine (V) for a methionine (M) at position 194 of SEQ ID NO: 14487, a substitution of an alanine (A) for an arginine (R) at position 372 of SEQ ID NO: 14487, a substitution of an alanine (A) for a lysine (K) at position 375 of SEQ ID NO: 14487 and a substitution of an asparagine (N) for an aspartic acid (D) at position 450 of SEQ ID NO: 14487.

[0239] The sleeping beauty transposon is transposed into the target genome by the Sleeping Beauty transposase that recognizes ITRs, and moves the contents between the ITRs into TA chromosomal sites. In various embodiments, SB transposon-mediated gene transfer, or gene transfer using any of a number of similar transposons, may be used in the compositions and methods of the disclosure.

[0240] In certain embodiments, and, in particular, those embodiments wherein the transposon is a Sleeping Beauty transposon, the transposase is a Sleeping Beauty transposase or a hyperactive Sleeping Beauty transposase (SB100X).

[0241] In certain embodiments of the methods of the disclosure, the Sleeping Beauty transposase enzyme comprises an amino acid sequence at least 75%, 80%, 85%, 90%, 95%, 99% or any percentage in between identical to:

```
(SEQ ID NO: 14485)
    1 MGKSKEISQD LRKKIVDLHK SGSSLGAISK RLKVPRSSVQ TIVRKYKHHG TTQPSYRSGR
  61 RRVLSPRDER TLVRKVQINP RTTAKDLVKM LEETGTKVSI STVKRVLYRH NLKGRSARKK
121 PLLQNRHKKA RLRFATAHGD KDRTFWRNVL WSDETKIELF GHNDHRYVWR KKGEACKPKN
181 TIPTVKHGGG SIMLWGCFAA GGTGALHKID GIMRKENYVD ILKQHLKTSV RKLKLGRKWV
241 FQMDNDPKHT SKVVAKWLKD NKVKVLEWPS QSPDLNPIEN LWAELKKRVR ARRPTNLTQL
301 HQLCQEEWAK IHPTYCGKLV EGYPKRLTQV KQFKGNATKY.
```

[0242] In certain embodiments of the methods of the disclosure, the hyperactive Sleeping Beauty (SB100X) transposase enzyme comprises an amino acid sequence at least 75%, 80%, 85%, 90%, 95%, 99% or any percentage in between identical to:

```
(SEQ ID NO: 14486)
    1 MGKSKEISQD LRKRIVDLHK SGSSLGAISK RLAVPRSSVQ TIVRKYKHHG TTQPSYRSGR
  61 RRVLSPRDER TLVRKVQINP RTTAKDLVKM LEETGTKVSI STVKRVLYRH NLKGHSARKK
121 PLLQNRHKKA RLRFATAHGD KDRTFWRNVL WSDETKIELF GHNDHRYVWR KKGEACKPKN
181 TIPTVKHGGG SIMLWGCFAA GGTGALHKID GIMDAVQYVD ILKQHLKTSV RKLKLGRKWV
241 FQHDNDPKHT SKVVAKWLKD NKVKVLEWPS QSPDLNPIEN LWAELKKRVR ARRPTNLTQL
301 HQLCQEEWAK IHPNYCGKLV EGYPKRLTQV KQFKGNATKY.
```

[0243] The Helraiser transposon is transposed by the Helitron transposase. Helitron transposases mobilize the Helraiser transposon, an ancient element from the bat genome that was active about 30 to 36 million years ago. An exemplary Helraiser transposon of the disclosure includes Helibatl, which comprises a nucleic acid sequence comprising:

```
(SEQ ID NO: 18061)
      1 TCCTATATAA TAAAAGAGAA ACATGCAAAT TGACCATCCC TCCGCTACGC TCAAGCCACG
    61 CCCACCAGCC AATCAGAAGT GACTATGCAA ATTAACCCAA CAAAGATGGC AGTTAAATTT
  121 GCATACGCAG GTGTCAAGCG CCCCAGGAGG CAACGGCGGC CGCGGGCTCC CAGGACCTTC
  181 GCTGGCCCCG GGAGGCGAGG CCGGCCGCGC CTAGCCACAC CCGCGGGCTC CCGGGACCTT
  241 CGCCAGCAGA GAGCAGAGCG GGAGAGCGGG CGGAGAGCGG GAGGTTTGGA GGACTTGGCA
  301 GAGCAGGAGG CCGCTGGACA TAGAGCAGAG CGAGAGAGAG GGTGGCTTGG AGGGCGTGGC
  361 TCCCTCTGTC ACCCCAGCTT CCTCATCACA GCTGTGGAAA CTGACAGCAG GGAGGAGGAA
  421 GTCCCACCCC CACAGAATCA GCCAGAATCA GCCGTTGGTC AGACAGCTCT CAGCGGCCTG
  481 ACAGCCAGGA CTCTCATTCA CCTGCATCTC AGACCGTGAC AGTAGAGAGG TGGGACTATG
  541 TCTAAAGAAC AACTGTTGAT ACAACGTAGC TCTGCAGCCG AAAGATGCCG GCGTTATCGA
  601 CAGAAAATGT CTGCAGAGCA ACGTGCGTCT GATCTTGAAA GAAGGCGGCG CCTGCAACAG
  661 AATGTATCTG AAGAGCAGCT ACTGGAAAAA CGTCGCTCTG AAGCCGAAAA ACAGCGGCGT
  721 CATCGACAGA AAATGTCTAA AGACCAACGT GCCTTTGAAG TTGAAAGAAG GCGGTGGCGA
  781 CGACAGAATA TGTCTAGAGA ACAGTCATCA ACAAGTACTA CCAATACCGG TAGGAACTGC
  841 CTTCTCAGCA AAAATGGAGT ACATGAGGAT GCAATTCTCG AACATAGTTG TGGTGGAATG
  901 ACTGTTCGAT GTGAATTTTG CCTATCACTA AATTTCTCTG ATGAAAAACC ATCCGATGGG
  961 AAATTTACTC GATGTTGTAG CAAAGGGAAA GTCTGTCCAA ATGATATACA TTTTCCAGAT
1021 TACCCGGCAT ATTTAAAAAG ATTAATGACA AACGAAGATT CTGACAGTAA AAATTTCATG
1081 GAAAATATTC GTTCCATAAA TAGTTCTTTT GCTTTTGCTT CCATGGGTGC AAATATTGCA
1141 TCGCCATCAG GATATGGGCC ATACTGTTTT AGAATACACG GACAAGTTTA TCACCGTACT
1201 GGAACTTTAC ATCCTTCGGA TGGTGTTTCT CGGAAGTTTG CTCAACTCTA TATTTTGGAT
1261 ACAGCCGAAG CTACAAGTAA AAGATTAGCA ATGCCAGAAA ACCAGGGCTG CTCAGAAAGA
1321 CTCATGATCA ACATCAACAA CCTCATGCAT GAAATAAATG AATTAACAAA ATCGTACAAG
1381 ATGCTACATG AGGTAGAAAA GGAAGCCCAA TCTGAAGCAG CAGCAAAAGG TATTGCTCCC
1441 ACAGAAGTAA CAATGGCGAT TAAATACGAT CGTAACAGTG ACCCAGGTAG ATATAATTCT
1501 CCCCGTGTAA CCGAGGTTGC TGTCATATTC AGAAACGAAG ATGGAGAACC TCCTTTTGAA
1561 AGGGACTTGC TCATTCATTG TAAACCAGAT CCCAATAATC CAAATGCCAC TAAAATGAAA
1621 CAAATCAGTA TCCTGTTTCC TACATTAGAT GCAATGACAT ATCCTATTCT TTTTCCACAT
1681 GGTGAAAAAG GCTGGGGAAC AGATATTGCA TTAAGACTCA GAGACAACAG TGTAATCGAC
1741 AATAATACTA GACAAAATGT AAGGACACGA GTCACACAAA TGCAGTATTA TGGATTTCAT
1801 CTCTCTGTGC GGGACACGTT CAATCCTATT TTAAATGCAG GAAAATTAAC TCAACAGTTT
1861 ATTGTGGATT CATATTCAAA AATGGAGGCC AATCGGATAA ATTTCATCAA AGCAAACCAA
1921 TCTAAGTTGA GAGTTGAAAA ATATAGTGGT TTGATGGATT ATCTCAAATC TAGATCTGAA
1981 AATGACAATG TGCCGATTGG TAAAATGATA ATACTTCCAT CATCTTTTGA GGGTAGTCCC
2041 AGAAATATGC AGCAGCGATA TCAGGATGCT ATGGCAATTG TAACGAAGTA TGGCAAGCCC
2101 GATTTATTCA TAACCATGAC ATGCAACCCC AAATGGGCAG ATATTACAAA CAATTTACAA
2161 CGCTGGCAAA AAGTTGAAAA CAGACCTGAC TTGGTAGCCA GAGTTTTTAA TATTAAGCTG
2221 AATGCTCTTT TAAATGATAT ATGTAAATTC CATTTATTTG GCAAAGTAAT AGCTAAAATT
2281 CATGTCATTG AATTTCAGAA ACGCGGACTG CCTCACGCTC ACATATTATT GATATTAGAT
2341 AGTGAGTCCA AATTACGTTC AGAAGATGAC ATTGACCGTA TAGTTAAGGC AGAAATTCCA
2401 GATGAAGACC AGTGTCCTCG ACTTTTTCAA ATTGTAAAAT CAAATATGGT ACATGGACCA
2461 TGTGGAATAC AAAATCCAAA TAGTCCATGT ATGGAAAATG GAAAATGTTC AAAGGGATAT
2521 CCAAAAGAAT TTCAAAATGC GACCATTGGA AATATTGATG GATATCCCAA ATACAAACGA
2581 AGATCTGGTA GCACCATGTC TATTGGAAAT AAAGTTGTCG ATAACACTTG GATTGTCCCT
2641 TATAACCCGT ATTTGTGCCT TAAATATAAC TGTCATATAA ATGTTGAAGT CTGTGCATCA
2701 ATTAAAAGTG TCAAATATTT ATTTAAATAC ATCTATAAAG GGCACGATTG TGCAAATATT
2761 CAAATTTCTG AAAAAAATAT TATCAATCAT GACGAAGTAC AGGACTTCAT TGACTCCAGG
2821 TATGTGAGCG CTCCTGAGGC TGTTTGGAGA CTTTTTGCAA TGCGAATGCA TGACCAATCT
2881 CATGCAATCA CAAGATTAGC TATTCATTTG CCAAATGATC AGAATTTGTA TTTTCATACC
2941 GATGATTTTG CTGAAGTTTT AGATAGGGCT AAAAGGCATA ACTCGACTTT GATGGCTTGG
3001 TTCTTATTGA ATAGAGAAGA TTCTGATGCA CGTAATTATT ATTATTGGGA GATTCCACAG
3061 CATTATGTGT TTAATAATTC TTTGTGGACA AAACGCCGAA AGGGTGGGAA TAAAGTATTA
3121 GGTAGACTGT TCACTGTGAG CTTTAGAGAA CCAGAACGAT ATTACCTTAG ACTTTTGCTT
3181 CTGCATGTAA AAGGTGCGAT AAGTTTTGAG GATCTGCGAA CTGTAGGAGG TGTAACTTAT
3241 GATACATTTC ATGAAGCTGC TAAACACCGA GGATTATTAC TTGATGACAC TATCTGGAAA
3301 GATACGATTG ACGATGCAAT CATCCTTAAT ATGCCCAAAC AACTACGGCA ACTTTTTGCA
3361 TATATATGTG TGTTTGGATG TCCTTCTGCT GCAGACAAAT TATGGGATGA GAATAAATCT
3421 CATTTTATTG AAGATTTCTG TTGGAAATTA CACCGAAGAG AAGGTGCCTG TGTGAACTGT
3481 GAAATGCATG CCCTTAACGA AATTCAGGAG GTATTCACAT TGCATGGAAT GAAATGTTCA
3541 CATTTCAAAC TTCCGGACTA TCCTTTATTA ATGAATGCAA ATACATGTGA TCAATTGTAC
3601 GAGCAACAAC AGGCAGAGGT TTTGATAAAT TCTCTGAATG ATGAACAGTT GGCAGCCTTT
3661 CAGACTATAA CTTCAGCCAT CGAAGATCAA ACTGTACACC CCAAATGCTT TTTCTTGGAT
3721 GGTCCAGGTG GTAGTGGAAA AACATATCTG TATAAAGTTT TAACACATTA TATTAGAGGT
3781 CGTGGTGGTA CTGTTTTACC CACAGCATCT ACAGGAATTG CTGCAAATTT ACTTCTTGGT
3841 GGAAGAACCT TTCATTCCCA ATATAAATTA CCAATTCCAT TAAATGAAAC TTCAATTTCT
3901 AGACTCGATA TAAAGAGTGA AGTTGCTAAA ACCATTAAAA AGGCCCAACT TCTCATTATT
3961 GATGAATGCA CCATGGCATC CAGTCATGCT ATAAACGCCA TAGATAGATT ACTAAGAGAA
4021 ATTATGAATT TGAATGTTGC ATTTGGTGGG AAAGTTCTCC TTCTCGGAGG GGATTTTCGA
4081 CAATGTCTCA GTATTGTACC ACATGCTATG CGATCGGCCA TAGTACAAAC GAGTTTAAAG
4141 TACTGTAATG TTTGGGGATG TTTCAGAAAG TTGTCTCTTA AAACAAATAT GAGATCAGAG
4201 GATTCTGCTT ATAGTGAATG GTTAGTAAAA CTTGGAGATG GCAAACTTGA TAGCAGTTTT
4261 CATTTAGGAA TGGATATTAT TGAAATCCCC CATGAAATGA TTTGTAACGG ATCTATTATT
4321 GAAGCTACCT TTGGAAATAG TATATCTATA GATAATATTA AAAATATATC TAAACGTGCA
4381 ATTCTTTGTC CAAAAAATGA GCATGTTCAA AAATTAAATG AAGAAATTTT GGATATACTT
4441 GATGGAGATT TTCACACATA TTTGAGTGAT GATTCCATTG ATTCAACAGA TGATGCTGAA
4501 AAGGAAAATT TTCCCATCGA ATTTCTTAAT AGTATTACTC CTTCGGGAAT GCCGTGTCAT
4561 AAATTAAAAT TGAAAGTGGG TGCAATCATC ATGCTATTGA GAAATCTTAA TAGTAAATGG
4621 GGTCTTTGTA ATGGTACTAG ATTTATTATC AAAAGATTAC GACCTAACAT TATCGAAGCT
4681 GAAGTATTAA CAGGATCTGC AGAGGGAGAG GTTGTTCTGA TTCCAAGAAT TGATTTGTCC
4741 CCATCTGACA CTGGCCTCCC ATTTAAATTA ATTCGAAGAC AGTTTCCCGT GATGCCAGCA
4801 TTTGCGATGA CTATTAATAA ATCACAAGGA CAAACTCTAG ACAGAGTAGG AATATTCCTA
4861 CCTGAACCCG TTTTCGCACA TGGTCAGTTA TATGTTGCTT TCTCTCGAGT TCGAAGAGCA
4921 TGTGACGTTA AAGTTAAAGT TGTAAATACT TCATCACAAG GGAAATTAGT CAAGCACTCT
4981 GAAAGTGTTT TTACTCTTAA TGTGGTATAC AGGGAGATAT TAGAATAAGT TTAATCACTT
5041 TATCAGTCAT TGTTTGCATC AATGTTGTTT TTATATCATG TTTTTGTTGT TTTTATATCA
5101 TGTCTTTGTT GTTGTTATAT CATGTTGTTA TTGTTTATTT ATTAATAAAT TTATGTATTA
5161 TTTTCATATA CATTTTACTC ATTTCCTTTC ATCTCTCACA CTTCTATTAT AGAGAAAGGG
5221 CAAATAGCAA TATTAAAATA TTTCCTCTAA TTAATTCCCT TTCAATGTGC ACGAATTTCG
5281 TGCACCGGGC CACTAG.
```

[0244] Unlike other transposases, the Helitron transposase does not contain an RNase-H like catalytic domain, but instead comprises a RepHel motif made up of a replication initiator domain (Rep) and a DNA helicase domain. The Rep domain is a nuclease domain of the HUH superfamily of nucleases.

[0245] An exemplary Helitron transposase of the disclosure comprises an amino acid sequence comprising:

```
(SEQ ID NO: 14501)
      1 MSKEQLLIQR SSAAERCRRY RQKMSAEQRA SDLERRRRLQ QNVSEEQLLE KRRSEAEKQR
    61 RHRQKMSKDQ RAFEVERRRW RRQNMSREQS STSTTNTGRN CLLSKNGVHE DAILEHSCGG
  121 MTVRCEFCLS LNFSDEKPSD GKFTRCCSKG KVCPNDIHFP DYPAYLKRLM TNEDSDSKNF
  181 MENIRSINSS FAFASMGANI ASPSGYGPYC FRIHGQVYHR TGTLHPSDGV SRKFAQLYIL
  241 DTAEATSKRL AMPENQGCSE RLMININNLM HEINELTKSY KMLHEVEKEA QSEAAAKGIA
  301 PTEVIMAIKY DRNSDPGRYN SPRVTEVAVI FRNEDGEPPF ERDLLIHCKP DPNNPNATKM
  361 KQISILFPTL DAMTYPILFP HGEKGWGTDI ALRLRDNSVI DNNTRQNVRT RVTQMQYYGF
  421 HLSVRDTFNP ILNAGKLTQQ FIVDSYSKME ANRINFIKAN QSKLRVEKYS GLMDYLKSRS
  481 ENDNVPIGKM IILPSSFEGS PRNMQQRYQD AMAIVTKYGK PDLFITMTCN PKWADITNNL
  541 QRWQKVENRP DLVARVFNIK LNALLNDICK FHLFGKVIAK IHVIEFQKRG LPHAHILLIL
  601 DSESKLRSED DIDRIVKAEI PDEDQCPRLF QIVKSNMVHG PCGIQNPNSP CMENGKCSKG
  661 YPKEFQNATI GNIDGYPKYK RRSGSTMSIG NKVVDNTWIV PYNPYLCLKY NCHINVEVCA
  721 SIKSVKYLFK YIYKGHDCAN IQISEKNIIN HDEVQDFIDS RYVSAPEAVW RLFAMRMHDQ
  781 SHAITRLAIH LPNDQNLYFH TDDFAEVLDR AKRHNSTLMA WFLLNREDSD ARNYYYWEIP
  841 QHYVFNNSLW TKRRKGGNKV LGRLFTVSFR EPERYYLRLL LLHVKGAISF EDLRTVGGVT
  901 YDTFHEAAKH RGLLLDDTIW KDTIDDAIIL NMPKQLRQLF AYICVFGCPS AADKLWDENK
  961 SHFIEDFCWK LHRREGACVN CEMHALNEIQ EVFTLHGMKC SHFKLPDYPL LMNANTCDQL
1021 YEQQQAEVLI NSLNDEQLAA FQTITSAIED QTVHPKCFFL DGPGGSGKTY LYKVLTHYIR
1081 GRGGTVLPTA STGIAANLLL GGRTFHSQYK LPIPLNETSI SRLDIKSEVA KTIKKAQLLI
1141 IDECTMASSH AINAIDRLLR EIMNLNVAFG GKVLLLGGDF RQCLSIVPHA MRSAIVQTSL
1201 KYCNVWGCFR KLSLKTNMRS EDSAYSEWLV KLGDGKLDSS FHLGMDIIEI PHEMICNGSI
1261 IEATFGNSIS IDNIKNISKR AILCPKNEHV QKLNEEILDI LDGDFHTYLS DDSIDSTDDA
1321 EKENFPIEFL NSITPSGMPC HKLKLKVGAI IMLLRNLNSK WGLCNGTRFI IKRLRPNIIE
1381 AEVLTGSAEG EVVLIPRIDL SPSDTGLPFK LIRRQFPVMP AFAMTINKSQ GQTLDRVGIF
1441 LPEPVFAHGQ LYVAFSRVRR ACDVKVKVVN TSSQGKLVKH SESVFTLNVV YREILE.
```

[0246] In Helitron transpositions, a hairpin close to the 3′ end of the transposon functions as a terminator. However, this hairpin can be bypassed by the transposase, resulting in the transduction of flanking sequences. In addition, Helraiser transposition generates covalently closed circular intermediates. Furthermore, Helitron transpositions can lack target site duplications. In the Helraiser sequence, the transposase is flanked by 5′ and 3′ terminal sequences termed LTS and RTS. These sequences terminate with a conserved 5′-TC/CTAG-3′ motif. A 19 bp palindromic sequence with the potential to form the hairpin termination structure is located 11 nucleotides upstream of the RTS and consists of the sequence

(SEQ ID NO: 14500)
GTGCACGAATTTCGTGCACCGGGCCACTAG.

[0247] Tol2 transposons may be isolated or derived from the genome of the medaka fish, and may be similar to transposons of the hAT family. Exemplary Tol2 transposons of the disclosure are encoded by a sequence comprising about 4.7 kilobases and contain a gene encoding the Tol2 transposase, which contains four exons. An exemplary Tol2 transposase of the disclosure comprises an amino acid sequence comprising the following:

```
(SEQ ID NO: 14502)
    1 MEEVCDSSAA ASSTVQNQPQ DQEHPWPYLR EFFSLSGVNK DSFKMKCVLC LPLNKEISAF
  61 KSSPSNLRKH IERMHPNYLK NYSKLTAQKR KIGTSTHASS SKQLKVDSVF PVKHVSPVTV
121 NKAILRYIIQ GLHPFSTVDL PSFKELISTL QPGISVITRP TLRSKIAEAA LIMKQKVTAA
181 MSEVEWIATT TDCWTARRKS FIGVTAHWIN PGSLERHSAA LACKRLMGSH TFEVLASAMN
241 DIHSEYEIRD KVVCTTTDSG SNFMKAFRVF GVENNDIETE ARRCESDDTD SEGCGEGSDG
301 VEFQDASRVL DQDDGFEFQL PKHQKCACHL LNLVSSVDAQ KALSNEHYKK LYRSVFGKCQ
361 ALWNKSSRSA LAAEAVESES RLQLLRPNQT RWNSTFMAVD RILQICKEAG EGALRNICTS
421 LEVPMFNPAE MLFLTEWANT MRPVAKVLDI LQAETNTQLG WLLPSVHQLS LKLQRLHHSL
481 RYCDPLVDAL QQGIQTRFKH MFEDPEITAA AILLPKFRTS WTNDETIIKR GMDYIRVHLE
541 PLDHKKELAN SSSDDEDFFA SLKPTTHEAS KELDGYLACV SDTRESLLTF PAICSLSIKT
601 NTPLPASAAC ERLFSTAGLL FSPKRARLDT NNFENQLLLK LNLRFYNFE.
```

[0248] An exemplary Tol2 transposon of the disclosure, including inverted repeats, subterminal sequences and the Tol2 transposase, is encoded by a nucleic acid sequence comprising the following:

```
(SEQ ID NO: 18062)
      1 CAGAGGTGTA AAGTACTTGA GTAATTTTAC TTGATTACTG TACTTAAGTA TTATTTTTGG
    61 GGATTTTTAC TTTACTTGAG TACAATTAAA AATCAATACT TTTACTTTTA CTTAATTACA
  121 TTTTTTTAGA AAAAAAAGTA CTTTTTACTC CTTACAATTT TATTTACAGT CAAAAAGTAC
  181 TTATTTTTTG GAGATCACTT CATTCTATTT TCCCTTGCTA TTACCAAACC AATTGAATTG
  241 CGCTGATGCC CAGTTTAATT TAAATGTTAT TTATTCTGCC TATGAAAATC GTTTTCACAT
  301 TATATGAAAT TGGTCAGACA TGTTCATTGG TCCTTTGGAA GTGACGTCAT GTCACATCTA
  361 TTACCACAAT GCACAGCACC TTGACCTGGA AATTAGGGAA ATTATAACAG TCAATCAGTG
  421 GAAGAAAATG GAGGAAGTAT GTGATTCATC AGCAGCTGCG AGCAGCACAG TCCAAAATCA
  481 GCCACAGGAT CAAGAGCACC CGTGGCCGTA TCTTCGCGAA TTCTTTTCTT TAAGTGGTGT
  541 AAATAAAGAT TCATTCAAGA TGAAATGTGT CCTCTGTCTC CCGCTTAATA AAGAAATATC
  601 GGCCTTCAAA AGTTCGCCAT CAAACCTAAG GAAGCATATT GAGGTAAGTA CATTAAGTAT
  661 TTTGTTTTAC TGATAGTTTT TTTTTTTTTT TTTTTTTTTT TTTTTGGGTG TGCATGTTTT
  721 GACGTTGATG GCGCGCCTTT TATATGTGTA GTAGGCCTAT TTTCACTAAT GCATGCGATT
  781 GACAATATAA GGCTCACGTA ATAAAATGCT AAAATGCATT TGTAATTGGT AACGTTAGGT
  841 CCACGGGAAA TTTGGCGCCT ATTGCAGCTT TGAATAATCA TTATCATTCC GTGCTCTCAT
  901 TGTGTTTGAA TTCATGCAAA ACACAAGAAA ACCAAGCGAG AAATTTTTTT CCAAACATGT
  961 TGTATTGTCA AAACGGTAAC ACTTTACAAT GAGGTTGATT AGTTCATGTA TTAACTAACA
1021 TTAAATAACC ATGAGCAATA CATTTGTTAC TGTATCTGTT AATCTTTGTT AACGTTAGTT
1081 AATAGAAATA CAGATGTTCA TTGTTTGTTC ATGTTAGTTC ACAGTGCATT AACTAATGTT
1141 AACAAGATAT AAAGTATTAG TAAATGTTGA AATTAACATG TATACGTGCA GTTCATTATT
1201 AGTTCATGTT AACTAATGTA GTTAACTAAC GAACCTTATT GTAAAAGTGT TACCATCAAA
1261 ACTAATGTAA TGAAATCAAT TCACCCTGTC ATGTCAGCCT TACAGTCCTG TGTTTTTGTC
1321 AATATAATCA GAAATAAAAT TAATGTTTGA TTGTCACTAA ATGCTACTGT ATTTCTAAAA
1381 TCAACAAGTA TTTAACATTA TAAAGTGTGC AATTGGCTGC AAATGTCAGT TTTATTAAAG
1441 GGTTAGTTCA CCCAAAAATG AAAATAATGT CATTAATGAC TCGCCCTCAT GTCGTTCCAA
1501 GCCCGTAAGA CCTCCGTTCA TCTTCAGAAC ACAGTTTAAG ATATTTTAGA TTTAGTCCGA
1561 GAGCTTTCTG TGCCTCCATT GAGAATGTAT GTACGGTATA CTGTCCATGT CCAGAAAGGT
1621 AATAAAAACA TCAAAGTAGT CCATGTGACA TCAGTGGGTT AGTTAGAATT TTTTGAAGCA
1681 TCGAATACAT TTTGGTCCAA AAATAACAAA ACCTACGACT TTATTCGGCA TTGTATTCTC
1741 TTCCGGGTCT GTTGTCAATC CGCGTTCACG ACTTCGCAGT GACGCTACAA TGCTGAATAA
1801 AGTCGTAGGT TTTGTTATTT TTGGACCAAA ATGTATTTTC GATGCTTCAA ATAATTCTAC
1861 CTAACCCACT GATGTCACAT GGACTACTTT GATGTTTTTA TTACCTTTCT GGACATGGAC
1921 AGTATACCGT ACATACATTT TCAGTGGAGG GACAGAAAGC TCTCGGACTA AATCTAAAAT
1981 ATCTTAAACT GTGTTCCGAA GATGAACGGA GGTGTTACGG GCTTGGAACG ACATGAGGGT
2041 GAGTCATTAA TGACATCTTT TCATTTTTGG GTGAACTAAC CCTTTAATGC TGTAATCAGA
2101 GAGTGTATGT GTAATTGTTA CATTTATTGC ATACAATATA AATATTTATT TGTTGTTTTT
2161 ACAGAGAATG CACCCAAATT ACCTCAAAAA CTACTCTAAA TTGACAGCAC AGAAGAGAAA
2221 GATCGGGACC TCCACCCATG CTTCCAGCAG TAAGCAACTG AAAGTTGACT CAGTTTTCCC
2281 AGTCAAACAT GTGTCTCCAG TCACTGTGAA CAAAGCTATA TTAAGGTACA TCATTCAAGG
2341 ACTTCATCCT TTCAGCACTG TTGATCTGCC ATCATTTAAA GAGCTGATTA GTACACTGCA
2401 GCCTGGCATT TCTGTCATTA CAAGGCCTAC TTTACGCTCC AAGATAGCTG AAGCTGCTCT
2461 GATCATGAAA CAGAAAGTGA CTGCTGCCAT GAGTGAAGTT GAATGGATTG CAACCACAAC
2521 GGATTGTTGG ACTGCACGTA GAAAGTCATT CATTGGTGTA ACTGCTCACT GGATCAACCC
2581 TGGAAGTCTT GAAAGACATT CCGCTGCACT TGCCTGCAAA AGATTAATGG GCTCTCATAC
2641 TTTTGAGGTA CTGGCCAGTG CCATGAATGA TATCCACTCA GAGTATGAAA TACGTGACAA
2701 GGTTGTTTGC ACAACCACAG ACAGTGGTTC CAACTTTATG AAGGCTTTCA GAGTTTTTGG
2761 TGTGGAAAAC AATGATATCG AGACTGAGGC AAGAAGGTGT GAAAGTGATG ACACTGATTC
2821 TGAAGGCTGT GGTGAGGGAA GTGATGGTGT GGAATTCCAA GATGCCTCAC GAGTCCTGGA
2881 CCAAGACGAT GGCTTCGAAT TCCAGCTACC AAAACATCAA AAGTGTGCCT GTCACTTACT
2941 TAACCTAGTC TCAAGCGTTG ATGCCCAAAA AGCTCTCTCA AATGAACACT ACAAGAAACT
3001 CTACAGATCT GTCTTTGGCA AATGCCAAGC TTTATGGAAT AAAAGCAGCC GATCGGCTCT
3061 AGCAGCTGAA GCTGTTGAAT CAGAAAGCCG GCTTCAGCTT TTAAGGCCAA ACCAAACGCG
3121 GTGGAATTCA ACTTTTATGG CTGTTGACAG AATTCTTCAA ATTTGCAAAG AAGCAGGAGA
3181 AGGCGCACTT CGGAATATAT GCACCTCTCT TGAGGTTCCA ATGTAAGTGT TTTTCCCCTC
3241 TATCGATGTA AACAAATGTG GGTTGTTTTT GTTTAATACT CTTTGATTAT GCTGATTTCT
3301 CCTGTAGGTT TAATCCAGCA GAAATGCTGT TCTTGACAGA GTGGGCCAAC ACAATGCGTC
3361 CAGTTGCAAA AGTACTCGAC ATCTTGCAAG CGGAAACGAA TACACAGCTG GGGTGGCTGC
3421 TGCCTAGTGT CCATCAGTTA AGCTTGAAAC TTCAGCGACT CCACCATTCT CTCAGGTACT
3481 GTGACCCACT TGTGGATGCC CTACAACAAG GAATCCAAAC ACGATTCAAG CATATGTTTG
3541 AAGATCCTGA GATCATAGCA GCTGCCATCC TTCTCCCTAA ATTTCGGACC TCTTGGACAA
3601 ATGATGAAAC CATCATAAAA CGAGGTAAAT GAATGCAAGC AACATACACT TGACGAATTC
3661 TAATCTGGGC AACCTTTGAG CCATACCAAA ATTATTCTTT TATTTATTTA TTTTTGCACT
3721 TTTTAGGAAT GTTATATCCC ATCTTTGGCT GTGATCTCAA TATGAATATT GATGTAAAGT
3781 ATTCTTGCAG CAGGTTGTAG TTATCCCTCA GTGTTTCTTG AAACCAAACT CATATGTATC
3841 ATATGTGGTT TGGAAATGCA GTTAGATTTT ATGCTAAAAT AAGGGATTTG CATGATTTTA
3901 GATGTAGATG ACTGCACGTA AATGTAGTTA ATGACAAAAT CCATAAAATT TGTTCCCAGT
3961 CAGAAGCCCC TCAACCAAAC TTTTCTTTGT GTCTGCTCAC TGTGCTTGTA GGCATGGACT
4021 ACATCAGAGT GCATCTGGAG CCTTTGGACC ACAAGAAGGA ATTGGCCAAC AGTTCATCTG
4081 ATGATGAAGA TTTTTTCGCT TCTTTGAAAC CGACAACACA TGAAGCCAGC AAAGAGTTGG
4141 ATGGATATCT GGCCTGTGTT TCAGACACCA GGGAGTCTCT GCTCACGTTT CCTGCTATTT
4201 GCAGCCTCTC TATCAAGACT AATACACCTC TTCCCGCATC GGCTGCCTGT GAGAGGCTTT
4261 TCAGCACTGC AGGATTGCTT TTCAGCCCCA AAAGAGCTAG GCTTGACACT AACAATTTTG
4321 AGAATCAGCT TCTACTGAAG TTAAATCTGA GGTTTTACAA CTTTGAGTAG CGTGTACTGG
4381 CATTAGATTG TCTGTCTTAT AGTTTGATAA TTAAATACAA ACAGTTCTAA AGCAGGATAA
4441 AACCTTGTAT GCATTTCATT TAATGTTTTT TGAGATTAAA AGCTTAAACA AGAATCTCTA
4501 GTTTTCTTTC TTGCTTTTAC TTTTACTTCC TTAATACTCA AGTACAATTT TAATGGAGTA
4561 CTTTTTTACT TTTACTCAAG TAAGATTCTA GCCAGATACT TTTACTTTTA ATTGAGTAAA
4621 ATTTTCCCTA AGTACTTGTA CTTTCACTTG AGTAAAATTT TTGAGTACTT TTTACACCTC
4681 TG.
```

[0249] Exemplary transposon/transposase systems of the disclosure include, but are not limited to, piggyBac and piggyBac-like transposons and transposases.

[0250] PiggyBac and piggyBac-like transposases recognizes transposon-specific inverted terminal repeat sequences (ITRs) on the ends of the transposon, and moves the contents between the ITRs into TTAA or TTAT chromosomal sites. The piggyBac or piggyBac-like transposon system has no payload limit for the genes of interest that can be included between the ITRs.

[0251] In certain embodiments, and, in particular, those embodiments wherein the transposon is a piggyBac transposon, the transposase is a piggyBac™, Super piggyBac™ (SPB) transposase. In certain embodiments, and, in particular, those embodiments wherein the transposase is a piggyBac™, Super piggyBac™ (SPB), the sequence encoding the transposase is an mRNA sequence.

[0252] In certain embodiments of the methods of the disclosure, the transposase enzyme is a piggyBac or piggyBac-like transposase enzyme.

[0253] In certain embodiments of the methods of the disclosure, the transposase enzyme is a piggyBac or a piggyBac-like transposase enzyme. The piggyBac (PB) or piggyBac-like transposase enzyme may comprise or consist of an amino acid sequence at least 5%, 10%, 15%, 20%, 25%, 30%, 35%, 40%, 45%, 50%, 55%, 60%, 65%, 70%, 75%, 80%, 85%, 90%, 95%, 99% or any percentage in between identical to:

```
(SEQ ID NO: 14487)
    1 MGSSLDDEHI LSALLQSDDE LVGEDSDSEI SDHVSEDDVQ SDTEEAFIDE VHEVQPTSSG
  61 SEILDEQNVI EQPGSSLASN RILTLPQRTI RGKNKHCWST SKSTRRSRVS ALNIVRSQRG
121 PTRMCRNIYD PLLCFKLFFT DEIISEIVKW TNAEISLKRR ESMTGATFRD TNEDEIYAFF
181 GILVMTAVRK DNHMSTDDLF DRSLSMVYVS VMSRDRFDFL IRCLRMDDKS IRPTLRENDV
241 FTPVRKIWDL FIHQCIQNYT PGAHLTIDEQ LLGFRGRCPF RMYIPNKPSK YGIKILMMCD
301 SGTKYMINGM PYLGRGTQTN GVPLGEYYVK ELSKPVHGSC RNITCDNWFT SIPLAKNLLQ
361 EPYKLTIVGT VRSNKREIPE VLKNSRSRPV GTSMFCFDGP LTLVSYKPKP AKMVYLLSSC
421 DEDASINEST GKPQMVMYYN QTKGGVDTLD QMCSVMTCSR KTNRWPMALL YGMINIACIN
481 SFIIYSHNVS SKGEKVQSRK KFMRNLYMSL TSSFMRKRLE APTLKRYLRD NISNILPNEV
541 PGTSDDSTEE PVMKKRTYCT YCPSKIRRKA NASCKKCKKV ICREHNIDMC QSCF.
```

[0254] In certain embodiments of the methods of the disclosure, the transposase enzyme is a piggyBac or piggyBac-like transposase enzyme that comprises or consists of an amino acid sequence having an amino acid substitution at one or more of positions 30, 165, 282, or 538 of the sequence:

```
(SEQ ID NO: 14487)
    1 MGSSLDDEHI LSALLQSDDE LVGEDSDSEI SDHVSEDDVQ SDTEEAFIDE VHEVQPTSSG
  61 SEILDEQNVI EQPGSSLASN RILTLPQRTI RGKNKHCWST SKSTRRSRVS ALNIVRSQRG
121 PTRMCRNIYD PLLCFKLFFT DEIISEIVKW TNAEISLKRR ESMTGATFRD TNEDEIYAFF
181 GILVMTAVRK DNHMSTDDLF DRSLSMVYVS VMSRDRFDFL IRCLRMDDKS IRPTLRENDV
241 FTPVRKIWDL FIHQCIQNYT PGAHLTIDEQ LLGFRGRCPF RMYIPNKPSK YGIKILMMCD
301 SGTKYMINGM PYLGRGTQTN GVPLGEYYVK ELSKPVHGSC RNITCDNWFT SIPLAKNLLQ
361 EPYKLTIVGT VRSNKREIPE VLKNSRSRPV GTSMFCFDGP LTLVSYKPKP AKMVYLLSSC
421 DEDASINEST GKPQMVMYYN QTKGGVDTLD QMCSVMTCSR KTNRWPMALL YGMINIACIN
481 SFIIYSHNVS SKGEKVQSRK KFMRNLYMSL TSSFMRKRLE APTLKRYLRD NISNILPNEV
541 PGTSDDSTEE PVMKKRTYCT YCPSKIRRKA NASCKKCKKV ICREHNIDMC QSCF.
```

[0255] In certain embodiments, the transposase enzyme is a piggyBac or piggyBac-like transposase enzyme that comprises or consists of an amino acid sequence having an amino acid substitution at two or more of positions 30, 165, 282, or 538 of the sequence of SEQ ID NO: 14487. In certain embodiments, the transposase enzyme is a piggyBac or piggyBac-like transposase enzyme that comprises or consists of an amino acid sequence having an amino acid substitution at three or more of positions 30, 165, 282, or 538 of the sequence of SEQ ID NO: 14487. In certain embodiments, the transposase enzyme is a piggyBac or piggyBac-like transposase enzyme that comprises or consists of an amino acid sequence having an amino acid substitution at each of the following positions 30, 165, 282, and 538 of the sequence of SEQ ID NO: 14487. In certain embodiments, the amino acid substitution at position 30 of the sequence of SEQ ID NO: 14487 is a substitution of a valine (V) for an isoleucine (I). In certain embodiments, the amino acid substitution at position 165 of the sequence of SEQ ID NO: 14487 is a substitution of a serine (S) for a glycine (G). In certain embodiments, the amino acid substitution at position 282 of the sequence of SEQ ID NO: 14487 is a substitution of a valine (V) for a methionine (M). In certain embodiments, the amino acid substitution at position 538 of the sequence of SEQ ID NO: 14487 is a substitution of a lysine (K) for an asparagine (N).

[0256] In certain embodiments of the methods of the disclosure, the transposase enzyme is a Super piggyBac™ (SPB) or piggyBac-like transposase enzyme. In certain embodiments, the Super piggyBac™ (SPB) or piggyBac-like transposase enzyme of the disclosure may comprise or consist of the amino acid sequence of the sequence of SEQ ID NO: 14487 wherein the amino acid substitution at position 30 is a substitution of a valine (V) for an isoleucine (I), the amino acid substitution at position 165 is a substitution of a serine (S) for a glycine (G), the amino acid substitution at position 282 is a substitution of a valine (V) for a methionine (M), and the amino acid substitution at position 538 is a substitution of a lysine (K) for an asparagine (N). In certain embodiments, the Super piggyBac™ (SPB) or piggyBac-like transposase enzyme may comprise or consist of an amino acid sequence at least 5%, 10%, 15%, 20%, 25%, 30%, 35%, 40%, 45%, 50%, 55%, 60%, 65%, 70%, 75%, 80%, 85%, 90%, 95%, 99% or any percentage in between identical to:

```
(SEQ ID NO: 14484)
    1 MGSSLDDEHI LSALLQSDDE LVGEDSDSEV SDHVSEDDVQ SDTEEAFIDE VHEVQPTSSG
  61 SEILDEQNVI EQPGSSLASN RILTLPQRTI RGKNKHCWST SKSTRRSRVS ALNIVRSQRG
121 PTRMCRNIYD PLLCFKLFFT DEIISEIVKW TNAEISLKRR ESMTSATFRD TNEDEIYAFF
181 GILVMTAVRK DNHMSTDDLF DRSLSMVYVS VMSRDRFDFL IRCLRMDDKS IRPTLRENDV
241 FTPVRKIWDL FIHQCIQNYT PGAHLTIDEQ LLGFRGRCPF RVYIPNKPSK YGIKILMMCD
301 SGTKYMINGM PYLGRGTQTN GVPLGEYYVK ELSKPVHGSC RNITCDNWFT SIPLAKNLLQ
361 EPYKLTIVGT VRSNKREIPE VLKNSRSRPV GTSMFCFDGP LTLVSYKPKP AKMVYLLSSC
421 DEDASINEST GKPQMVMYYN QTKGGVDTLD QMCSVMTCSR KTNRWPMALL YGMINIACIN
481 SFIIYSHNVS SKGEKVQSRK KFMRNLYMSL TSSFMRKRLE APTLKRYLRD NISNILPKEV
541 PGTSDDSTEE PVMKKRTYCT YCPSKIRRKA NASCKKCKKV ICREHNIDMC QSCF.
```

[0257] In certain embodiments of the methods of the disclosure, including those embodiments wherein the transposase comprises the above-described mutations at positions 30, 165, 282 and/or 538, the piggyBac™, Super piggyBac™ or piggyBac-like transposase enzyme may further comprise an amino acid substitution at one or more of positions 3, 46, 82, 103, 119, 125, 177, 180, 185, 187, 200, 207, 209, 226, 235, 240, 241, 243, 258, 296, 298, 311, 315, 319, 327, 328, 340, 421, 436, 456, 470, 486, 503, 552, 570 and 591 of the sequence of SEQ ID NO: 14487 or SEQ ID NO: 14484. In certain embodiments, including those embodiments wherein the transposase comprises the above-described mutations at positions 30, 165, 282 and/or 538, the piggyBac™, Super piggyBac™ or piggyBac-like transposase enzyme may further comprise an amino acid substitution at one or more of positions 46, 119, 125, 177, 180, 185, 187, 200, 207, 209, 226, 235, 240, 241, 243, 296, 298, 311, 315, 319, 327, 328, 340, 421, 436, 456, 470, 485, 503, 552 and 570. In certain embodiments, the amino acid substitution at position 3 of SEQ ID NO: 14487 or SEQ ID NO: 14484 is a substitution of an asparagine (N) for a serine (S). In certain embodiments, the amino acid substitution at position 46 of SEQ ID NO: 14487 or SEQ ID NO: 14484 is a substitution of a serine (S) for an alanine (A). In certain embodiments, the amino acid substitution at position 46 of SEQ ID NO: 14487 or SEQ ID NO: 14484 is a substitution of a threonine (T) for an alanine (A). In certain embodiments, the amino acid substitution at position 82 of SEQ ID NO: 14487 or SEQ ID NO: 14484 is a substitution of a tryptophan (W) for an isoleucine (I). In certain embodiments, the amino acid substitution at position 103 of SEQ ID NO: 14487 or SEQ ID NO: 14484 is a substitution of a proline (P) for a serine (S). In certain embodiments, the amino acid substitution at position 119 of SEQ ID NO: 14487 or SEQ ID NO: 14484 is a substitution of a proline (P) for an arginine (R). In certain embodiments, the amino acid substitution at position 125 of SEQ ID NO: 14487 or SEQ ID NO: 14484 is a substitution of an alanine (A) a cysteine (C). In certain embodiments, the amino acid substitution at position 125 of SEQ ID NO: 14487 or SEQ ID NO: 14484 is a substitution of a leucine (L) for a cysteine (C). In certain embodiments, the amino acid substitution at position 177 of SEQ ID NO: 14487 or SEQ ID NO: 14484 is a substitution of a lysine (K) for a tyrosine (Y). In certain embodiments, the amino acid substitution at position 177 of SEQ ID NO: 14487 or SEQ ID NO: 14484 is a substitution of a histidine (H) for a tyrosine (Y). In certain embodiments, the amino acid substitution at position 180 of SEQ ID NO: 14487 or SEQ ID NO: 14484 is a substitution of a leucine (L) for a phenylalanine (F). In certain embodiments, the amino acid substitution at position 180 of SEQ ID NO: 14487 or SEQ ID NO: 14484 is a substitution of an isoleucine (I) for a phenylalanine (F). In certain embodiments, the amino acid substitution at position 180 of SEQ ID NO: 14487 or SEQ ID NO: 14484 is a substitution of a valine (V) for a phenylalanine (F). In certain embodiments, the amino acid substitution at position 185 of SEQ ID NO: 14487 or SEQ ID NO: 14484 is a substitution of a leucine (L) for a methionine (M). In certain embodiments, the amino acid substitution at position 187 of SEQ ID NO: 14487 or SEQ ID NO: 14484 is a substitution of a glycine (G) for an alanine (A). In certain embodiments, the amino acid substitution at position 200 of SEQ ID NO: 14487 or SEQ ID NO: 14484 is a substitution of a tryptophan (W) for a phenylalanine (F). In certain embodiments, the amino acid substitution at position 207 of SEQ ID NO: 14487 or SEQ ID NO: 14484 is a substitution of a proline (P) for a valine (V). In certain embodiments, the amino acid substitution at position 209 of SEQ ID NO: 14487 or SEQ ID NO: 14484 is a substitution of a phenylalanine (F) for a valine (V). In certain embodiments, the amino acid substitution at position 226 of SEQ ID NO: 14487 or SEQ ID NO: 14484 is a substitution of a phenylalanine (F) for a methionine (M). In certain embodiments, the amino acid substitution at position 235 of SEQ ID NO: 14487 or SEQ ID NO: 14484 is a substitution of an arginine (R) for a leucine (L). In certain embodiments, the amino acid substitution at position 240 of SEQ ID NO: 14487 or SEQ ID NO: 14484 is a substitution of a lysine (K) for a valine (V). In certain embodiments, the amino acid substitution at position 241 of SEQ ID NO: 14487 or SEQ ID NO: 14484 is a substitution of a leucine (L) for a phenylalanine (F). In certain embodiments, the amino acid substitution at position 243 of SEQ ID NO: 14487 or SEQ ID NO: 14484 is a substitution of a lysine (K) for a proline (P). In certain embodiments, the amino acid substitution at position 258 of SEQ ID NO: 14487 or SEQ ID NO: 14484 is a substitution of a serine (S) for an asparagine (N). In certain embodiments, the amino acid substitution at position 296 of SEQ ID NO: 14487 or SEQ ID NO: 14484 is a substitution of a tryptophan (W) for a leucine (L). In certain embodiments, the amino acid substitution at position 296 of SEQ ID NO: 14487 or SEQ ID NO: 14484 is a substitution of a tyrosine (Y) for a leucine (L). In certain embodiments, the amino acid substitution at position 296 of SEQ ID NO: 14487 or SEQ ID NO: 14484 is a substitution of a phenylalanine (F) for a leucine (L). In certain embodiments, the amino acid substitution at position 298 of SEQ ID NO: 14487 or SEQ ID NO: 14484 is a substitution of a leucine (L) for a methionine (M). In certain embodiments, the amino acid substitution at position 298 of SEQ ID NO: 14487 or SEQ ID NO: 14484 is a substitution of an alanine (A) for a methionine (M). In certain embodiments, the amino acid substitution at position 298 of SEQ ID NO: 14487 or SEQ ID NO: 14484 is a substitution of a valine (V) for a methionine (M). In certain embodiments, the amino acid substitution at position 311 of SEQ ID NO: 14487 or SEQ ID NO: 14484 is a substitution of an isoleucine (I) for a proline (P). In certain embodiments, the amino acid substitution at position 311 of SEQ ID NO: 14487 or SEQ ID NO: 14484 is a substitution of a valine for a proline (P). In certain embodiments, the amino acid substitution at position 315 of SEQ ID NO: 14487 or SEQ ID NO: 14484 is a substitution of a lysine (K) for an arginine (R). In certain embodiments, the amino acid substitution at position 319 of SEQ ID NO: 14487 or SEQ ID NO: 14484 is a substitution of a glycine (G) for a threonine (T). In certain embodiments, the amino acid substitution at position 327 of SEQ ID NO: 14487 or SEQ ID NO: 14484 is a substitution of an arginine (R) for a tyrosine (Y). In certain embodiments, the amino acid substitution at position 328 of SEQ ID NO: 14487 or SEQ ID NO: 14484 is a substitution of a valine (V) for a tyrosine (Y). In certain embodiments, the amino acid substitution at position 340 of SEQ ID NO: 14487 or SEQ ID NO: 14484 is a substitution of a glycine (G) for a cysteine (C). In certain embodiments, the amino acid substitution at position 340 of SEQ ID NO: 14487 or SEQ ID NO: 14484 is a substitution of a leucine (L) for a cysteine (C). In certain embodiments, the amino acid substitution at position 421 of SEQ ID NO: 14487 or SEQ ID NO: 14484 is a substitution of a histidine (H) for the aspartic acid (D). In certain embodiments, the amino acid substitution at position 436 of SEQ ID NO: 14487 or SEQ ID NO: 14484 is a substitution of an isoleucine (I) for a valine (V). In certain embodiments, the amino acid substitution at position 456 of SEQ ID NO: 14487 or SEQ ID NO: 14484 is a substitution of a tyrosine (Y) for a methionine (M). In certain embodiments, the amino acid substitution at position 470 of SEQ ID NO: 14487 or SEQ ID NO: 14484 is a substitution of a phenylalanine (F) for a leucine (L). In certain embodiments, the amino acid substitution at position 485 of SEQ ID NO: 14487 or SEQ ID NO: 14484 is a substitution of a lysine (K) for a serine (S). In certain embodiments, the amino acid substitution at position 503 of SEQ ID NO: 14487 or SEQ ID NO: 14484 is a substitution of a leucine (L) for a methionine (M). In certain embodiments, the amino acid substitution at position 503 of SEQ ID NO: 14487 or SEQ ID NO: 14484 is a substitution of an isoleucine (I) for a methionine (M). In certain embodiments, the amino acid substitution at position 552 of SEQ ID NO: 14487 or SEQ ID NO: 14484 is a substitution of a lysine (K) for a valine (V). In certain embodiments, the amino acid substitution at position 570 of SEQ ID NO: 14487 or SEQ ID NO: 14484 is a substitution of a threonine (T) for an alanine (A). In certain embodiments, the amino acid substitution at position 591 of SEQ ID NO: 14487 or SEQ ID NO: 14484 is a substitution of a proline (P) for a glutamine (Q). In certain embodiments, the amino acid substitution at position 591 of SEQ ID NO: 14487 or SEQ ID NO: 14484 is a substitution of an arginine (R) for a glutamine (Q).

[0258] In certain embodiments of the methods of the disclosure, including those embodiments wherein the transposase comprises the above-described mutations at positions 30, 165, 282 and/or 538, the piggyBac™ or piggyBac-like transposase enzyme or may comprise or the Super piggyBac™ transposase enzyme may further comprise an amino acid substitution at one or more of positions 103, 194, 372, 375, 450, 509 and 570 of the sequence of SEQ ID NO: 14487 or SEQ ID NO: 14484. In certain embodiments of the methods of the disclosure, including those embodiments wherein the transposase comprises the above-described mutations at positions 30, 165, 282 and/or 538, the piggyBac™ or piggyBac-like transposase enzyme may comprise or the Super piggyBac™ transposase enzyme may further comprise an amino acid substitution at two, three, four, five, six or more of positions 103, 194, 372, 375, 450, 509 and 570 of the sequence of SEQ ID NO: 14487 or SEQ ID NO: 14484. In certain embodiments, including those embodiments wherein the transposase comprises the above-described mutations at positions 30, 165, 282 and/or 538, the piggyBac™ or piggyBac-like transposase enzyme may comprise or the Super piggyBac™ transposase enzyme may further comprise an amino acid substitution at positions 103, 194, 372, 375, 450, 509 and 570 of the sequence of SEQ ID NO: 14487 or SEQ ID NO: 14484. In certain embodiments, the amino acid substitution at position 103 of SEQ ID NO: 14487 or SEQ ID NO: 14484 is a substitution of a proline (P) for a serine (S). In certain embodiments, the amino acid substitution at position 194 of SEQ ID NO: 14487 or SEQ ID NO: 14484 is a substitution of a valine (V) for a methionine (M). In certain embodiments, the amino acid substitution at position 372 of SEQ ID NO: 14487 or SEQ ID NO: 14484 is a substitution of an alanine (A) for an arginine (R). In certain embodiments, the amino acid substitution at position 375 of SEQ ID NO: 14487 or SEQ ID NO: 14484 is a substitution of an alanine (A) for a lysine (K). In certain embodiments, the amino acid substitution at position 450 of SEQ ID NO: 14487 or SEQ ID NO: 14484 is a substitution of an asparagine (N) for an aspartic acid (D). In certain embodiments, the amino acid substitution at position 509 of SEQ ID NO: 14487 or SEQ ID NO: 14484 is a substitution of a glycine (G) for a serine (S). In certain embodiments, the amino acid substitution at position 570 of SEQ ID NO: 14487 or SEQ ID NO: 14484 is a substitution of a serine (S) for an asparagine (N). In certain embodiments, the piggyBac™ or piggyBac-like transposase enzyme may comprise a substitution of a valine (V) for a methionine (M) at position 194 of SEQ ID NO: 14487. In certain embodiments, including those embodiments wherein the piggyBac™ or piggyBac-like transposase enzyme may comprise a substitution of a valine (V) for a methionine (M) at position 194 of SEQ ID NO: 14487, the piggyBac™ or piggyBac-like transposase enzyme may further comprise an amino acid substitution at positions 372, 375 and 450 of the sequence of SEQ ID NO: 14487 or SEQ ID NO: 14484. In certain embodiments, the piggyBac™ or piggyBac-like transposase enzyme may comprise a substitution of a valine (V) for a methionine (M) at position 194 of SEQ ID NO: 14487, a substitution of an alanine (A) for an arginine (R) at position 372 of SEQ ID NO: 14487, and a substitution of an alanine (A) for a lysine (K) at position 375 of SEQ ID NO: 14487. In certain embodiments, the piggyBac™ or piggyBac-like transposase enzyme may comprise a substitution of a valine (V) for a methionine (M) at position 194 of SEQ ID NO: 14487, a substitution of an alanine (A) for an arginine (R) at position 372 of SEQ ID NO: 14487, a substitution of an alanine (A) for a lysine (K) at position 375 of SEQ ID NO: 14487 and a substitution of an asparagine (N) for an aspartic acid (D) at position 450 of SEQ ID NO: 14487.

[0259] In certain embodiments, the piggyBac or piggyBac-like transposase enzyme is isolated or derived from an insect. In certain embodiments, the insect is Trichoplusia ni (GenBank Accession No. AAA87375; SEQ ID NO: 16796), Argyrogramma agnata (GenBank Accession No. GU477713; SEQ ID NO: 14534, SEQ ID NO: 16797), Anopheles gambiae (GenBank Accession No. XP_312615 (SEQ ID NO: 16798); GenBank Accession No. XP_320414 (SEQ ID NO: 16799); GenBank Accession No. XP_310729 (SEQ ID NO: 16800)), Aphis gossypii (GenBank Accession No. GU329918; SEQ ID NO: 16801, SEQ ID NO: 16802), Acyrthosiphon pisum (GenBank Accession No. XP_001948139; SEQ ID NO: 16803), Agrotis Ipsilon (GenBank Accession No. GU477714; SEQ ID NO: 14537, SEQ ID NO: 16804), Bombyx mori (GenBank Accession No. BAD11135; SEQ ID NO: 14505), Chilo suppressalis (GenBank Accession No. JX294476; SEQ ID NO: 16805, SEQ ID NO: 16806), Drosophila melanogaster (GenBank Accession No. AAL39784; SEQ ID NO: 16807), Helicoverpa armigera (GenBank Accession No. ABS18391; SEQ ID NO: 14525), Heliothis virescens (GenBank Accession No. ABD76335; SEQ ID NO: 16808), Macdunnoughia crassisigna (GenBank Accession No. EU287451; SEQ ID NO: 16809, SEQ ID NO: 16810), Pectinophora gossypiella (GenBank Accession No. GU270322; SEQ ID NO: 14530, SEQ ID NO: 16811), Tribolium castaneum (GenBank Accession No. XP_001814566; SEQ ID NO: 16812), Ctenoplusia agnata (also called Argyrogramma agnata), Messour bouvieri, Megachile rotundata, Bombus impatiens, Mamestra brassicae, Mayetiola destructor or Apis mellifera.

[0260] In certain embodiments, the piggyBac or piggyBac-like transposase enzyme is isolated or derived from an insect. In certain embodiments, the insect is Trichoplusia ni (AAA87375).

[0261] In certain embodiments, the piggyBac or piggyBac-like transposase enzyme is isolated or derived from an insect. In certain embodiments, the insect is Bombyx mori (BAD11135).

[0262] In certain embodiments, the piggyBac or piggyBac-like transposase enzyme is isolated or derived from a crustacean. In certain embodiments, the crustacean is Daphnia pulicaria (AAM76342, SEQ ID NO: 16813).

[0263] In certain embodiments, the piggyBac or piggyBac-like transposase enzyme is isolated or derived from a vertebrate. In certain embodiments, the vertebrate is Xenopus tropicalis (GenBank Accession No. BAF82026; SEQ ID NO: 14518), Homo sapiens (GenBank Accession No. NP_689808; SEQ ID NO: 16814), Mus musculus (GenBank Accession No. NP_741958; SEQ ID NO: 16815), Macaca fascicularis (GenBank Accession No. AB179012; SEQ ID NO: 16816, SEQ ID NO: 16817), Rattus norvegicus (GenBank Accession No. XP_220453; SEQ ID NO: 16818) or Myotis lucifugus.

[0264] In certain embodiments, the piggyBac or piggyBac-like transposase enzyme is isolated or derived from a urochordate. In certain embodiments, the urochordate is Ciona intestinalis (GenBank Accession No. XP_002123602; SEQ ID NO: 16819).

[0265] In certain embodiments, the piggyBac or piggyBac-like transposase inserts a transposon at the sequence 5′-TTAT-3′ within a chromosomal site (a TTAT target sequence).

[0266] In certain embodiments, the piggyBac or piggyBac-like transposase inserts a transposon at the sequence 5′-TTAA-3′ within a chromosomal site (a TTAA target sequence).

[0267] In certain embodiments, the target sequence of the piggyBac or piggyBac-like transposon comprises or consists of 5′-CTAA-3′, 5′-TTAG-3′, 5′-ATAA-3′, 5′-TCAA-3′, 5′AGTT-3′, 5′-ATTA-3′, 5′-GTTA-3′, 5′-TTGA-3′, 5′-TTTA-3′, 5′-TTAC-3′, 5′-ACTA-3′, 5′-AGGG-3′, 5′-CTAG-3′, 5′-TGAA-3′, 5′-AGGT-3′, 5′-ATCA-3′, 5′-CTCC-3′, 5′-TAAA-3′, 5′-TCTC-3′, 5′TGAA-3′, 5′-AAAT-3′, 5′-AATC-3′, 5′-ACAA-3′, 5′-ACAT-3′, 5′-ACTC-3′, 5′-AGTG-3′, 5′-ATAG-3′, 5′-CAAA-3′, 5′-CACA-3′, 5′-CATA-3′, 5′-CCAG-3′, 5′-CCCA-3′, 5′-CGTA-3′, 5′-GTCC-3′, 5′-TAAG-3′, 5′-TCTA-3′, 5′-TGAG-3′, 5′-TGTT-3′, 5′-TTCA-3′5′-TTCT-3′ and 5′-TTTT-3′.

[0268] In certain embodiments of the methods of the disclosure, the transposase enzyme is a piggyBac or piggyBac-like transposase enzyme. In certain embodiments, the piggyBac or piggyBac-like transposase enzyme is isolated or derived from Bombyx mori. The piggyBac or piggyBac-like transposase enzyme may comprise or consist of an amino acid sequence at least 5%, 10%, 15%, 20%, 25%, 30%, 35%, 40%, 45%, 50%, 55%, 60%, 65%, 70%, 75%, 80%, 85%, 90%, 95%, 99% or any percentage in between identical to:

```
(SEQ ID NO: 14504)
    1 MDIERQEERI RAMLEEELSD YSDESSSEDE TDHCSEHEVN YDTEEERIDS VDVPSNSRQE
  61 EANAIIANES DSDPDDDLPL SLVRQRASAS RQVSGPFYTS KDGTKWYKNC QRPNVRLRSE
121 NIVTEQAQVK NIARDASTEY ECWNIFVTSD MLQEILTHTN SSIRHRQTKT AAENSSAETS
181 FYMQETTLCE LKALIALLYL AGLIKSNRQS LKDLWRTDGT GVDIFRTTMS LQRFQFLQNN
241 IRFDDKSTRD ERKQTDNMAA FRSIFDQFVQ CCQNAYSPSE FLTIDEMLLS FRGRCLFRVY
301 IPNKPAKYGI KILALVDAKN FDVVNLEVYA GKQPSGPYAV SNRPFEVVER LIQPVARSHR
361 NVTFDNWFTG YELMLHLLNE YRLTSVGTVR KNKRQIPESF IRTDRQPNSS VFGFQKDITL
421 VSYAPKKNKV VVVMSTMHHD NSIDESTGEK QKPEMITFYN STKAGVDVVD ELSANYNVSR
481 NSKRWPMTLF YGVLNMAAIN ACIIYRANKN VTIKRTEFIR SLGLSMIYEH LHSRNKKKNI
541 PTYLRQRIEK QLGEPSPRHV NVPGRYVRCQ DCPYKKDRKT KHSCNACAKP ICMEHAKFLC
601 ENCAELDSSL.
```

[0269] The piggyBac (PB) or piggyBac-like transposase enzyme may comprise or consist of an amino acid sequence at least 5%, 10%, 15%, 20%, 25%, 30%, 35%, 40%, 45%, 50%, 55%, 60%, 65%, 70%, 75%, 80%, 85%, 90%, 95%, 99% or any percentage in between identical to:

```
(SEQ ID NO: 14505)
    1 MDIERQEERI RAMLEEELSD YSDESSSEDE TDHCSEHEVN YDTEEERIDS VDVPSNSRQE
  61 EANAIIANES DSDPDDDLPL SLVRQRASAS RQVSGPFYTS KDGTKWYKNC QRPNVRLRSE
121 NIVTEQAQVK NIARDASTEY ECWNIFVTSD MLQEILTHTN SSIRHRQTKT AAENSSAETS
181 FYMQETTLCE LKALIALLYL AGLIKSNRQS LKDLWRTDGT GVDIFRTTMS LQRFQFLQNN
241 IRFDDKSTRD ERKQTDNMAA FRSIFDQFVQ CCQNAYSPSE FLTIDEMLLS FRGRCLFRVY
301 IPNKPAKYGI KILALVDAKN FYVVNLEVYA GKQPSGPYAV SNRPFEVVER LIQPVARSHR
361 NVTFDNWFTG YELMLHLLNE YRLTSVGTVR KNKRQIPESF IRTDRQPNSS VFGFQKDITL
421 VSYAPKKNKV VVVMSTMHHD NSIDESTGEK QKPEMITFYN STKAGVDVVD ELCANYNVSR
481 NSKRWPMTLF YGVLNMAAIN ACIIYRTNKN VTIKRTEFIR SLGLSMIYEH LHSRNKKKNI
541 PTYLRQRIEK QLGEPSPRHV NVPGRYVRCQ DCPYKKDRKT KRSCNACAKP ICMEHAKFLC
601 ENCAELDSSL.
```

[0270] In certain embodiments, the piggyBac or piggyBac-like transposase is fused to a nuclear localization signal. In certain embodiments, the amino acid sequence of the piggyBac or piggyBac-like transposase fused to a nuclear localization signal is encoded by a polynucleotide sequence comprising:

```
(SEQ ID NO: 14629)
      1 atggcaccca aaaagaaacg taaagtgatg gacattgaaa gacaggaaga aagaatcagg
    61 gcgatgctcg aagaagaact gagcgactac tccgacgaat cgtcatcaga ggatgaaacc
  121 gaccactgta gcgagcatga ggttaactac gacaccgagg aggagagaat cgactctgtg
  181 gatgtgccct ccaactcacg ccaagaagag gccaatgcaa ttatcgcaaa cgaatcggac
  241 agcgatccag acgatgatct gccactgtcc ctcgtgcgcc agcgggccag cgcttcgaga
  301 caagtgtcag gtccattcta cacttcgaag gacggcacta agtggtacaa gaattgccag
  361 cgacctaacg tcagactccg ctccgagaat atcgtgaccg aacaggctca ggtcaagaat
  421 atcgcccgcg acgcctcgac tgagtacgag tgttggaata tcttcgtgac ttcggacatg
  481 ctgcaagaaa ttctgacgca caccaacagc tcgattaggc atcgccagac caagactgca
  541 gcggagaact catcggccga aacctccttc tatatgcaag agactactct gtgcgaactg
  601 aaggcgctga ttgcactgct gtacttggcc ggcctcatca aatcaaatag gcagagcctc
  661 aaagatctct ggagaacgga tggaactgga gtggatatct ttcggacgac tatgagcttg
  721 cagcggttcc agtttctgca aaacaatatc agattcgacg acaagtccac ccgggacgaa
  781 aggaaacaga ctgacaacat ggctgcgttc cggtcaatat tcgatcagtt tgtgcagtgc
  841 tgccaaaacg cttatagccc atcggaattc ctgaccatcg acgaaatgct tctctccttc
  901 cgggggcgct gcctgttccg agtgtacatc ccgaacaagc cggctaaata cggaatcaaa
  961 atcctggccc tggtggacgc caagaatttc tacgtcgtga atctcgaagt gtacgcagga
1021 aagcaaccgt cgggaccgta cgctgtttcg aaccgcccgt ttgaagtcgt cgagcggctt
1081 attcagccgg tggccagatc ccaccgcaat gttaccttcg acaattggtt caccggctac
1141 gagctgatgc ttcaccttct gaacgagtac cggctcacta gcgtggggac tgtcaggaag
1201 aacaagcggc agatcccaga atccttcatc cgcaccgacc gccagcctaa ctcgtccgtg
1261 ttcggatttc aaaaggatat cacgcttgtc tcgtacgccc ccaagaaaaa caaggtcgtg
1321 gtcgtgatga gcaccatgca tcacgacaac agcatcgacg agtcaaccgg agaaaagcaa
1381 aagcccgaga tgatcacctt ctacaattca actaaggccg gcgtcgacgt cgtggatgaa
1441 ctgtgcgcga actataacgt gtcccggaac tctaagcggt ggcctatgac tctcttctac
1501 ggagtgctga atatggccgc aatcaacgcg tgcatcatct accgcaccaa caagaacgtg
1561 accatcaagc gcaccgagtt catcagatcg ctgggtttga gcatgatcta cgagcacctc
1621 cattcacgga acaagaagaa gaatatccct acttacctga ggcagcgtat cgagaagcag
1681 ttgggagaac caagcccgcg ccacgtgaac gtgccggggc gctacgtgcg gtgccaagat
1741 tgcccgtaca aaaaggaccg caaaaccaaa agatcgtgta acgcgtgcgc caaacctatc
1801 tgcatggagc atgccaaatt tctgtgtgaa aattgtgctg aactcgattc ctccctg.
```

[0271] In certain embodiments, the piggyBac or piggyBac-like transposase is hyperactive. A hyperactive piggyBac or piggyBac-like transposase is a transposase that is more active than the naturally occurring variant from which it is derived. In certain embodiments, the hyperactive piggyBac or piggyBac-like transposase enzyme is isolated or derived from Bombyx mori. In certain embodiments, the piggyBac or piggyBac-like transposase is a hyperactive variant of SEQ ID NO: 14505. In certain embodiments, the hyperactive piggyBac or piggyBac-like transposase comprises a sequence that is at least 90% identical to:

```
(SEQ ID NO: 14576)
    1 MDIERQEERI RAMLEEELSD YSDESSSEDE TDHCSEHEVN YDTEEERIDS VDVPSNSRQE
  61 EANAIIANES DSDPDDDLPL SLVRQRASAS RQMSGPHYTS KDGTKWYKNC QRPNVRLRSE
121 NIVTEQAQVK NIARDASTEY ECWNIFVTSD MLQEILTHTN SSIRWRQTKT AAENSSASTS
181 FYMQETTLCE LKALIGLLYI AGLIKSNRQS LKDLWRTDGT GVDIFRTTMS LQRFQFLQNN
241 IRFDDKSTRD ERKQTDNMAA FRSIFDQFVQ SCQNAYSPSE FLTIDEMLLS FRGRCLFRVY
301 IPNKPAKYGI KILALVDAKN FYVKNLEVYA GKQPSGPYAV SNRPFEVVER LIQPVARSHR
361 NVTFDNWFTG YELMLHLLNE YRLTSVGTVR KNKRQIPESF IRTDRQPNSS VFGFQKDITL
421 VSYAPKKNKV VVVMSTMHHD NSIDESTGEK QKPEMITFYN STKAGVDVVD ELCANYNVSR
481 NSKRWPMTLF YGVLNMAAIN ACIIYRTNKN VTIKRTEFIR SLGLSMIYEH LHSRNKKKNI
541 PTYLRQRIEK QLGEPSPRHV NVPGRYVRCQ DCPYKKDRKT KRSCNACAKP ICMEHAKFLC
601 ENCAELDSHL.
```

[0272] In certain embodiments, the hyperactive piggyBac or piggyBac-like transposase comprises SEQ ID NO: 14576. In certain embodiments, the hyperactive piggyBac or piggyBac-like transposase comprises a sequence of:

```
(SEQ ID NO: 14630)
    1 MDIERQEERI RAMLEEELSD YSDESSSEDE TDHCSEHEVN YDTEEERIDS VDVPSNSRQE
  61 EANAIIANES DSDPDDDLPL SLVRQRASAS RQVSGPFYTS KDGTKWYKNC QRPNVRLRSE
121 NIVTEQAQVK NIARDASTEY ECWNIFVTSD MLQEILTHTN SSIRWRQTKT AAENSSAETS
181 FYMQETTLCE LKALIGLLYI AGLIKSNRQS LKDLWRTDGT GVDIFRTTMS LQRFQFLLNN
241 IRFDDKSTRD ERKQTDNMAA FRSIFDQFVQ SCQNAYSPSE FLTIDEMLLS FRGRCLFRVY
301 IPNKPAKYGI KILALVDAKN FYVHNLEVYA GKQPSGPYAV SNRPFEVVER LIQPVARSHR
361 NVTFDNWFTG YEVMLHLLNE YRLTSVGTVR KNKRQIPESF IRTDRQPNSS VFGFQKDITL
421 VSYAPKKNKV VVVMSTMHHD NSIDESTGEK QKPEMITFYN STKAGVDVVD ELCANYNVSR
481 NSKRWPMTLF YGVLNMAAIN ACIIYRTNKN VTIKRTEFIR SLGLSMIYEH LHSRNKKKNI
541 PTYLRQRIEK QLGEPSPRHV NVPGRYVRCQ DCPYKKDRKT KRSCNACAKP ICMEHAKFLC
601 ENCAHLDS.
```

[0273] In certain embodiments, the hyperactive piggyBac or piggyBac-like transposase comprises a sequence of:

```
(SEQ ID NO: 14631)
    1 MDIERQEERI RAMLEEELSD YSDESSSEDE TDHCSEHEVN YDTEEERIDS VDVPSNSRQE
  61 EANAIIANES DSDPDDDLPL SLVRQRASAS RQVSGPFYTS KDGTKWYKNC QRPNVRLRSE
121 NIVTEQAQVK NIARDASTEY ECWNIFVTSD MLQEILTHTN SSIRWRQTKT AAENSSASTS
181 FYMQETTLCE LKALIGLLYI AGLIKSNRQS LKDLWRTDGT GVDIFRTTMS LQRFQFLLNN
241 IRFDDKSTRD ERKQTDNMAA FRSIFDQFVQ SCQNAYSPSE FLTIDEMLLS FRGRCLFRVY
301 IPNKPAKYGI KILALVDAKN FYVKNLEVYA GKQPSGPYAV SNRPFEVVER LIQPVARSHR
361 NVTFDNWFTG YELMLHLLNE YRLTSVGTVR KNKRQIPESF IRTDRQPNSS VFGFQKDITL
421 VSYAPKKNKV VVVMSTMHHD NSIDESTGEK QKPEMITFYN STKAGVDVVD ELCANYNVSR
481 NSKRWPMTLF YGVLNMAAIN ACIIYRTNKN VTIKRTEFIR SLGLSMIYEH LHSRNKKKNI
541 PTYLRQRIAM QLGEPSPRHV NVPGRYVRCQ DCPYKKDRKT KRSCNACAKP ICMEHAKFLC
601 ENCAELDSSL.
```

[0274] In certain embodiments, the hyperactive piggyBac or piggyBac-like transposase comprises a sequence of:

```
(SEQ ID NO: 14632)
    1 MDIERQEERI RAMLEEELSD YSDESSSEDE TDHCSEHEVN YDTEEERIDS VDVPSNSRQE
  61 EANAIIANES DSDPDDDLPL SLVRQRASAS RQVSGPFYTS KDGTKWYKNC QRPNVRLRSE
121 NIVTEQAQVK NIARDASTEY ECWNIFVTSD MLQEILTHTN SSIRWRQTKT AAENSSAETS
181 FYMQETTLCE LKALIGLLYI AGLIKSNRQS LKDLWRTDGT GVDIFRTTMS LQRFQFLLNN
241 IRFDDKSTRD ERKQTDNMAA FRSIFDQFVQ SCQNAYSPSE FLTIDEMLLS FRGRCLFRVY
301 IPNKPAKYGI KILALVDAKN FYVKNLEVYA GKQPSGPYAV SNRPFEVVER LIQPVARSHR
361 NVTFDNWFTG YELMLHLLNE YRLTSVGTVR KNKTQIPENF IRTDRQPNSS VFGFQKDITL
421 VSYAPKKNKV VVVMSTMHHD NSIDESTGEK QKPEMITFYN STKAGVDVVD ELQANYNVSR
481 NSKRWPMTLF YGVLNMAAIN ACIIYRTNKN VTIKRTEFIR SLGLSMIYEH LHSRNKKKNI
541 PTYLRQRIEK QLGEPSPRHV NVPGRYVRCQ DCPYKKDRKT KRSCNACAKP ICMEHAKFLC
601 ENCAELDSSL.
```

[0275] In certain embodiments, the hyperactive piggyBac or piggyBac-like transposase comprises a sequence of:

```
(SEQ ID NO: 14633)
    1 MDIERQEERI RAMLEEELSD YSDESSSEDE TDHCSEHEVN YDTEEERIDS VDVPSNSRQE
  61 EANAIIANES DSDPDDDLPL SLVRQRASAS RQVSGPFYTS KDGTKWYKNC QRPNVRLRSE
121 NIVTEQAQVK NIARDASTEY ECWNIFVTSD MLQEILTHTN SSIRWRQTKT AAENSSAETS
181 FYMQETTLCE LKALIGLLYI AGLIKSNRQS LKDLWRTDGT GVDIFRTTMS LQRFQFLQNN
241 IRFDDKSTRD ERKQTDNMAA FRSIFDQFVQ SCQNAYSPSE FLTIDEMLLS FRGRCLFRVY
301 IPNKPAKYGI KILALVDAKN FYVKNLEVYA GKQPSGPYAV SNRPFEVVER LIQPVARSHR
361 NVTFDNWFTG YELMLHLLNE YRLTSVGTVR KNKRQIPESF IRTDRQPNSS VFGFQKDITL
421 VSYAPKKNKV VVVMSTMHHD NSIDESTGEK QKPEMITFYN STKAGVDVVD ELCANYNVSR
481 NSKRWPMTLF YGVLNMAAIN ACIIYRTNKN VTIKRTEFIR SLGLSMIYEH LHSRNKKKNI
541 PTYLRQRIEK QLGEPSPRHV NVPGRYVRCQ DCPYKKDRKT KRSCNACAKP ICMEHAKFLC
601 ENCAELDSSL.
```

[0276] In certain embodiments, the hyperactive piggyBac or piggyBac-like transposase comprises a sequence of:

```
(SEQ ID NO: 14634)
    1 MDIERQEERI RAMLEEELSD YSDESSSEDE TDHCSEHEVN YDTEEERIDS VDVPSNSRQE
  61 EANAIIANES DSDPDDDLPL SLVRQRASAS RQVSGPFYTS KDGTKWYKNC QRPNVRLRSE
121 NIVTEQAQVK NIARDASTEY ECWNIFVTSD MLQEILTHTN SSIRHRQTKT AAENSSAETS
181 FYMQETTLCE LKALIALLYL AGLIKSNRQS LKDLWRTDGT GVDIFRTTMS LQRFQFLQNN
241 IRFDDKSTRD ERKQTDNMAA FRSIFDQFVQ CCQNAYSPSE FLTIDEMLLS FRGRCLFRVY
301 IPNKPAKYGI KILALVDAKN DYVVNLEVYA GKQPSGPYAV SNRPFEVVER LIQPVARSHR
361 NVTFDNWFTG YELMLHLLNE YRLTSVGTVR KNKRQIPESF IRTDRQPNSS VFGFQKDITL
421 VSYAPKKNKV VVVMSTMHHD NSIDESTGEK QKPEMITFYN STKAGVDVVD ELCANYNVSR
481 NSKRWPMTLF YGVLNMAAIN ACIIYRTNKN VTIKRTEFIR SLGLSMIYEH LHSRNKKKNI
541 PTYLRQRIEK QLGEPSSRHV NVKGRYVRCQ DCPYKKDRKT KRSCNACAKP ICMEHAKFLC
601 ENCAELDSSL.
```

[0277] In certain embodiments, the hyperactive piggyBac or piggyBac-like transposase is more active than the transposase of SEQ ID NO: 14505. In certain embodiments, the hyperactive piggyBac or piggyBac-like transposase is at least 90%, at least 95%, at least 96%, at least 97%, at least 98%, or at least 99% or any percentage in between identical to SEQ ID NO: 14505.

[0278] In certain embodiments, the hyperactive piggyBac or piggyBac-like transposase comprises an amino acid substitution at a position selected from 92, 93, 96, 97, 165, 178, 189, 196, 200, 201, 211, 215, 235, 238, 246, 253, 258, 261, 263, 271, 303, 321, 324, 330, 373, 389, 399, 402, 403, 404, 448, 473, 484, 507, 523, 527, 528, 543, 549, 550, 557, 601, 605, 607, 609, 610 or a combination thereof (relative to SEQ ID NO: 14505). In certain embodiments, the hyperactive piggyBac or piggyBac-like transposase comprises an amino acid substitution of Q92A, V93L, V93M, P96G, F97H, F97C, H165E, H165W, E178S, E178H, C189P, A196G, L200I, A201Q, L211A, W215Y, G2195, Q235Y, Q235G, Q238L, K246I, K253V, M258V, F261L, S263K, C271S, N303R, F321W, F321D, V324K, V324H, A330V, L373C, L373V, V389L, S399N, R402K, T403L, D404Q, D4045, D404M, N441R, G448W, E449A, V469T, C473Q, R484K T507C, G523A, I527M, Y528K Y543I, E549A, K550M, P5575, E601V, E605H, E605W, D607H, 5609H, L610I or any combination thereof. In certain embodiments, the hyperactive piggyBac or piggyBac-like transposase comprises an amino acid substitution of Q92A, V93L, V93M, P96G, F97H, F97C, H165E, H165W, E178S, E178H, C189P, A196G, L200I, A201Q, L211A, W215Y, G2195, Q235Y, Q235G, Q238L, K246I, K253V, M258V, F261L, S263K, C271S, N303R, F321W, F321D, V324K, V324H, A330V, L373C, L373V, V389L, S399N, R402K, T403L, D404Q, D4045, D404M, N441R, G448W, E449A, V469T, C473Q, R484K T507C, G523A, I527M, Y528K Y543I, E549A, K550M, P5575, E601V, E605H, E605W, D607H, 5609H and L610I.

[0279] In certain embodiments, the hyperactive piggyBac or piggyBac-like transposase comprises one or more substitutions of an amino acid that is not wild type, wherein the one or more substitutions a for wild type amino acid comprises a substitution of E4X, A12X, M13X, L14X, E15X, D20X, E24X, S25X, S26X, S27X, D32X, H33X, E36X, E44X, E45X, E46X, I48X, D49X, R58X, A62X, N63X, A64X, I65X, I66X, N68X, E69X, D71X, S72X, D76X, P79X, R84X, Q85X, A87X, S88X, Q92X, V93X, S94X, G95X, P96X, F97X, Y98X, T99X, I145X, S149X, D150X, L152X, E154X, T157X, N160X, S161X, S162X, H165X, R166X, T168X, K169X, T170X, A171X, E173X, S175X, S176X, E178X, T179X, M183X, Q184X, T186X, T187X, L188X, C189X, L194X, I195X, A196X, L198X, L200X, A201X, L203X, I204X, K205X, A206X, N207X, Q209X, S210X, L211X, K212X, D213X, L214X, W215X, R216X, T217X, G219X, V222X, D223X, I224X, T227X, M229X, Q235X, L237X, Q238X, N239X, N240X, P302X, N303X, P305X, A306X, K307X, Y308X, 1310X, K311X, I312X, L313X, A314X, L315X, V316X, D317X, A318X, K319X, N320X, F321X, Y322X, V323X, V324X, L326X, E327X, V328X, A330X, Q333X, P334X, S335X, G336X, P337X, A339X, V340X, S341X, N342X, R343X, P344X, F345X, E346X, V347X, E349X, I352X, Q353X, V355X, A356X, R357X, N361X, D365X, W367X, T369X, G370X, L373X, M374X, L375X, H376X, N379X, E380X, R382X, V386X, V389X, N392X, R394X, Q395X, S399X, F400X, I401X, R402XT403X, D404X, R405X, Q406X, P407X, N408X, S409X, S410X, V411X, F412X, F414X, Q415X, I418X, T419X, L420X, N428XV432X, M434X, D440X, N441X, S442X, I443X, D444X, E445X, G448X, E449X, Q451X, K452X, M455X, I456X, T457X, F458X, S461X, A464X, V466X, Q468X, V469X, E471X, L472X, C473X, A474X, K483X, W485X, T488X, L489X, Y491X, G492X, V493X, M496X, I499X, C502X, I503X, I507X, K509X, N510X, V511X, T512X, I513X, R515X, E517X, S521X, G523X, L524X, S525X, I527X, Y528X, E529X, H532X, S533X, N535X, K536X, K537X, N539X, I540X, T542X, Y543X, Q546X, E549X, K550X, Q551X, G553X, E554X, P555X, S556X, P557X, R558X, H559X, V560X, N561X, V562X, P563X, G564X, R565X, Y566X, V567X, Q570X, D571X, P573X, Y574X, K576X, K581X, S583X, A586X, A588X, E594X, F598X, L599X, E601X, N602X, C603X, A604X, E605X, L606X, D607X, S608X, S609X or L610X (relative to SEQ ID NO: 14505). A list of hyperactive amino acid substitutions can be found in U.S. Pat. No. 10,041,077, the contents of which are incorporated herein by reference in their entirety.

[0280] In certain embodiments, the piggyBac or piggyBac-like transposase is integration deficient. In certain embodiments, an integration deficient piggyBac or piggyBac-like transposase is a transposase that can excise its corresponding transposon, but that integrates the excised transposon at a lower frequency than a corresponding wild type transposase. In certain embodiments, the piggyBac or piggyBac-like transposase is an integration deficient variant of SEQ ID NO: 14505.

[0281] In certain embodiments, the excision competent, integration deficient piggyBac or piggyBac-like transposase comprises one or more substitutions of an amino acid that is not wild type, wherein the one or more substitutions a for wild type amino acid comprises a substitution of R9X, A12X, M13X, D20X, Y21K, D23X, E24X, S25X, S26X, S27X, E28X, E30X, D32X, H33X, E36X, H37X, A39X, Y41X, D42X, T43X, E44X, E45X, E46X, R47X, D49X, S50X, S55X, A62X, N63X, A64X, I66X, A67X, N68X, E69X, D70X, D71X, S72X, D73X, P74X, D75X, D76X, D77X, I78X, S81X, V83X, R84X, Q85X, A87X, S88X, A89X, S90X, R91X, Q92X, V93X, S94X, G95X, P96X, F97X, Y98X, T99X, W012X, G103X, Y107X, K108X, L117X, I122X, Q128X, I312X, D135X, S137X, E139X, Y140X, I145X, S149X, D150X, Q153X, E154X, T157X, S161X, S162X, R164X, H165X, R166X, Q167X, T168X, K169X, T170X, A171X, A172X, E173X, R174X, S175X, S176X, A177X, E178X, T179X, S180X, Y182X, Q184X, E185X, T187X, L188X, C189X, L194X, I195X, A196X, L198X, L200X, A201X, L203X, I204X, K205X, N207X, Q209X, L211X, D213X, L214X, W215X, R216X, T217X, G219X, T220X, V222X, D223X, I224X, T227X, T228X, F234X, Q235X, L237X, Q238X, N239X, N240X, N303X, K304X, I310X, I312X, L313X, A314X, L315X, V316X, D317X, A318X, K319X, N320X, F321X, Y322X, V323X, V324X, N325X, L326X, E327X, V328X, A330X, G331X, K332X, Q333X, S335X, P337X, P344X, F345X, E349X, H359X, N361X, V362X, D365X, F368X, Y371X, E372X, L373X, H376X, E380X, R382X, R382X, V386X, G387X, T388X, V389X, K391X, N392X, R394X, Q395X, E398X, S399X, F400X, I401X, R402XT403X, D404X, R405X, Q406X, P407X, N408X, 5409X, S410X, Q415X, K416X, A424X, K426X, N428X, V430X, V432X, V433X, M434X, D436X, D440X, N441X, S442X, I443X, D444X, E445X, S446X, T447X, G448X, E449X, K450X, Q451X, E454X, M455X, I456X, T457X, F458X, S461X, A464X, V466X, Q468X, V469X, C473X, A474X, N475X, N477X, K483X, R484X, P486X, T488X, L489X, G492X, V493X, M496X, I499X, I503X, Y505X, T507X, N510X, V511X, T512X, I513X, K514X, T516X, E517X, S521X, G523X, L524X, S525X, I527X, Y528X, L531X, H532X, S533X, N535X, 1540X, T542X, Y543X, R545X, Q546X, E549X, L552X, G553X, E554X, P555X, S556X, P557X, R558X, H559X, V560X, N561X, V562X, P563X, G564X, V567X, Q570X, D571X, P573X, Y574X, K575X, K576X, N585X, A586X, M593X, K596X, E601X, N602X, A604X, E605X, L606X, D607X, S608X, S609X or L610X (relative to SEQ ID NO: 14505). A list of integration deficient amino acid substitutions can be found in U.S. Pat. No. 10,041,077, the contents of which are incorporated by reference in their entirety.

[0282] In certain embodiments, the integration deficient piggyBac or piggyBac-like transposase comprises a sequence of:

```
(SEQ ID NO: 14606)
    1 MDIERQEERI RAMLEEELSD YSDESSSEDE TDHCSEHEVN YDTEEERIDS VDVPSNSRQE
  61 EANAIIANES DSDPDDDLPL SLVRQRASAS RQVSGPFYTS KDGTKWYKNC QRPNVRLRSE
121 NIVTEQAQVK NIARDASTEY ECWNIFVTSD MLQEILTHTN SSIRHRQTKT AAENSSAETS
181 FYMQETTLCE LKALIALLYL AGLIKSNRQS LKDLWRKDGT GVDIFRTTMS LQRFQFLLNN
241 IRFDDISTRD ERKQTDNMAA FRSIFDQFVQ CCQNAYSPSE FLTIDEMLLS FRGRCLFRVY
301 IPNKPAKYGI KILALVDAKN FYVVNLEVYA GKQPSGPYAV SNRPFEVVER LIQPVARSHR
361 NVTFDNWFTG YELMLHLLNE YRLTSVGTVR KNKRQIPESF IRTDRQPNSS VFGFQKDITL
421 VSYAPKKNKV VVVMSTMHHD NSIDESTGEK QKPEMITFYN STKAGVDVVD ELCANYNVSR
481 NSKKWPMTLF YGVLNMAAIN ACIIYRTNKN VTIKRTEFIR SLGLSMMYEH LHSRNKKKNI
541 PTYLRQRIEK QLGEPVPRHV NVPGRYVRCQ DCPYKKDRKT KRSCNACAKP ICMEHAKFLC
601 ENCAELDSSL.
```

In certain embodiments, the integration deficient piggyBac or piggyBac-like transposase comprises a sequence of:

```
(SEQ ID NO: 14607)
    1 MDIERQEERI RAMLEEELSD YSDESSSEDE TDHCSEHEVN YDTEEERIDS VDVPSNSRQE
  61 EANAIIANES DSDPDDDLPL SLVRQRASAS RQVSGPFYTS KDGTKWYKNC QRPNVRLRSE
121 NIVTEQAQVK NIARDASTEY ECWNIFVTSD MLQEILTHTN SSIRHRQTKT AAENSSAETS
181 FYMQETTLCE LKALIGLLYL AGLIKSNRQS LKDLWRTDGT GVDIFRTTMS LQRFYFLQNN
241 IRFDDKSTLD ERKQTDNMAA FRSIFDQFVQ SCQNAYSPSE FLTIDEMLLS FRGRCLFRVY
301 IPNKPAKYGI KILALVDAKN FYVVNLEVYA GKQPSGPYAV SNRPFEVVER LIQPVARSHR
361 NVTFDNWFTG YELMLHLLNE YRLTSVGTVR KNKRQIPESF IRTDRQPNSS VFGFQKDITL
421 VSYAPKKNKV VVVMSTMHHD NSIDESTGEK QKPEMITFYN STKAGVDVVD ELCANYNVSR
481 NSKRWPMTLF YGVLNMAAIN ACIIYRTNKN VTIKRTEFIR SLGLSMIYEH LHSRNKKKNI
541 PTYLRQRIEK QLGEPSPRHV NYPGRYVRCQ DCPYKKDRKT KRSCNACAKP ICMEHAKFLC
601 VNCAELDSSL.
```

In certain embodiments, the piggyBac or piggyBac-like transposase that is integration deficient comprises a sequence of:

```
(SEQ ID NO: 14608)
    1 MDIERQEERI RAMLEEELSD YSDESSSEDE TDHCSEHEVN YDTEEERIDS VDVPSNSRQE
  61 EANAIIANES DSDPDDDLPL SLVRQRASAS RQVSGPFYTS KDGTKWYKNC QRPNVRLRSE
121 NIVTEQAQVK NIARDASTEY ECWNIFVTSD MLQEILTHTN SSIRHRQTKT AAENSSAETS
181 FYMQETTLCE LKALIALLYL AGLIKSNRQS LKDLWRKDGT GVDIFRTTMS LQRFQFLLNN
241 IRFDDKSTRD ERKQTDNMAA FRSIFDQFVQ CCQNAYSPSE FLTIDEMLLS FRGRCLFRVY
301 IPNKPAKYGI KILALVDAKN DYVVNLEVYA GKQPSGPYAV SNRPFEVVER LIQPVARSHR
361 NVTFDNWFTG YECMLHLLNE YRLTSVGTVR KNKRQIPESF IRTDRQPNSS VFGFQKDITL
421 VSYAPKKNKV VVVMSTMHHD NSIDESTGEK QKPEMITFYN STKAGVDVVD ELCANYNVSR
481 NSKKWPMTLF YGVLNMAAIN ACIIYRTNKN VTIKRTEFIR SLGLSMIKEH LHSRNKKKNI
541 PTYLRQRIEK QLGEPSPRHV NVPGRYVRCQ DCPYKKDRKT KRSCNACAKP ICMEHAKFLC
601 ENCAELDSSL.
```

In certain embodiments, the integration deficient transposase comprises a sequence that is at least 90% identical to SEQ ID NO: 14608.

[0283] In certain embodiments, the piggyBac or piggyBac-like transposon is isolated or derived from Bombyx mori. In certain embodiments, the piggyBac or piggyBac-like transposon comprises a sequence of:

```
(SEQ ID NO: 14506)
    1 ttatcccggc gagcatgagg cagggtatct cataccctgg taaaatttta aagttgtgta
  61 ttttataaaa ttttcgtctg acaacactag cgcgctcagt agctggaggc aggagcgtgc
121 gggaggggat agtggcgtga tcgcagtgtg gcacgggaca ccggcgagat attcgtgtgc
181 aaacctgttt cgggtatgtt ataccctgcc tcattgttga cgtatttttt ttatgtaatt
241 tttccgatta ttaatttcaa ctgttttatt ggtattttta tgttatccat tgttcttttt
301 ttatgattta ctgtatcggt tgtctttcgt tcctttagtt gagttttttt ttattatttt
361 cagtttttga tcaaa.
```

In certain embodiments, the piggyBac or piggyBac-like transposon comprises a sequence of:

```
(SEQ ID NO: 14507)
    1 tcatattttt agtttaaaaa aataattata tgttttataa tgaaaagaat ctcattatct
  61 ttcagtatta ggttgattta tattccaaag aataatattt ttgttaaatt gttgattttt
121 gtaaacctct aaatgtttgt tgctaaaatt actgtgttta agaaaaagat taataaataa
181 taataatttc ataattaaaa acttctttca ttgaatgcca ttaaataaac cattatttta
241 caaaataaga tcaacataat tgagtaaata ataataagaa caatattata gtacaacaaa
301 atatgggtat gtcataccct gccacattct tgatgtaact ttttttcacc tcatgctcgc
361 cgggttat.
```

In certain embodiments, the piggyBac or piggyBac-like transposon comprises a sequence of:

```
(SEQ ID NO: 14508)
    1 ttatcccggc gagcatgagg cagggtatct cataccctgg taaaatttta aagttgtgta
  61 ttttataaaa ttttcgtctg acaacactag cgcgctcagt agctggaggc aggagcgtgc
121 gggaggggat agtggcgtga tcgcagtgtg gcacgggaca ccggcgagat attcgtgtgc
181 aaacctgttt cgggtatgtt ataccctgcc tcat.
```

In certain embodiments, the piggyBac™ (PB) or piggyBac-like transposon comprises a sequence of:

```
(SEQ ID NO: 14509)
    1 taaataataa taatttcata attaaaaact tctttcattg aatgccatta aataaaccat
  61 tattttacaa aataagatca acataattga gtaaataata ataagaacaa tattatagta
121 caacaaaata tgggtatgtc ataccctgcc acattcttga tgtaactttt tttcacctca
181 tgctcgccgg gttat.
```

[0284] In certain embodiments, the piggyBac or piggyBac-like transposon comprises a 5′ sequence corresponding to SEQ ID NO: 14506 and a 3′ sequence corresponding to SEQ ID NO: 14507. In certain embodiments, one piggyBac or piggyBac-like transposon end is at least 85%, at least 90%, at least 95%, at least 98%, at least 99% identical or any percentage in between identical to SEQ ID NO: 14506 and the other piggyBac or piggyBac-like transposon end is at least 85%, at least 90%, at least 95%, at least 98%, at least 99% or any percentage in between identical to SEQ ID NO: 14507. In certain embodiments, the piggyBac or piggyBac-like transposon comprises SEQ ID NO: 14506 and SEQ ID NO: 14507 or SEQ ID NO: 14509. In certain embodiments, the piggyBac or piggyBac-like transposon comprises SEQ ID NO: 14508 and SEQ ID NO: 14507 or SEQ ID NO: 14509. In certain embodiments, the 5′ and 3′ transposon ends share a 16 bp repeat sequence at their ends of CCCGGCGAGCATGAGG (SEQ ID NO: 14510) immediately adjacent to the 5′-TTAT-3 target insertion site, which is inverted in the orientation in the two ends. In certain embodiments, 5′ transposon end begins with a sequence comprising 5′-TTATCCCGGCGAGCATGAGG-3 (SEQ ID NO: 14511), and the 3′ transposon ends with a sequence comprising the reverse complement of this sequence: 5′-CCTCATGCTCGCCGGGTTAT-3′ (SEQ ID NO: 14512).

[0285] In certain embodiments, the piggyBac or piggyBac-like transposon comprises one end comprising at least 14, 16, 18, 20, 30 or 40 contiguous nucleotides of SEQ ID NO: 14506 or SEQ ID NO: 14508. In certain embodiments, the piggyBac or piggyBac-like transposon comprises one end comprising at least 14, 16, 18, 20, 30 or 40 contiguous nucleotides of SEQ ID NO: 14507 or SEQ ID NO: 14509. In certain embodiments, the piggyBac or piggyBac-like transposon comprises one end with at least 90% identity to SEQ ID NO: 14506 or SEQ ID NO: 14508. In certain embodiments, the piggyBac or piggyBac-like transposon comprises one end with at least 90% identity to SEQ ID NO: 14507 or SEQ ID NO: 14509.

[0286] In certain embodiments, the piggyBac or piggyBac-like transposon comprises a sequence of:

```
(SEQ ID NO: 14515)
    1 ttaacccggc gagcatgagg cagggtatct cataccctgg taaaatttta aagttgtgta
  61 ttttataaaa ttttcgtctg acaacactag cgcgctcagt agctggaggc aggagcgtgc
121 gggaggggat agtggcgtga tcgcagtgtg gcacgggaca ccggcgagat attcgtgtgc
181 aaacctgttt cgggtatgtt ataccctgcc tcattgttga cgtatttttt ttatgtaatt
241 tttccgatta ttaatttcaa ctgttttatt ggtattttta tgttatccat tgttcttttt
301 ttatgattta ctgtatcggt tgtctttcgt tcctttagtt gagttttttt ttattatttt
361 cagtttttga tcaaa.
```

[0287] In certain embodiments, the piggyBac or piggyBac-like transposon comprises a sequence of:

```
(SEQ ID NO: 14516)
    1 tcatattttt agtttaaaaa aataattata tgttttataa tgaaaagaat ctcattatct
  61 ttcagtatta ggttgattta tattccaaag aataatattt ttgttaaatt gttgattttt
121 gtaaacctct aaatgtttgt tgctaaaatt actgtgttta agaaaaagat taataaataa
181 taataatttc ataattaaaa acttctttca ttgaatgcca ttaaataatt cattatttta
241 caaaataaga tcaacataat tgagtaaata ataataagaa caatattata gtacaacaaa
301 atatgggtat gtcataccct tttttttttt tttttttttt ttttttcggg tagagggccg
361 aacctcctac gaggtccccg cgcaaaaggg gcgcgcgggg tatgtgagac tcaacgatct
421 gcatggtgtt gtgagcagac cgcgggccca aggattttag agcccaccca ctaaacgact
481 cctctgcact cttacacccg acgtccgatc ccctccgagg tcagaacccg gatgaggtag
541 gggggctacc gcggtcaaca ctacaaccag acggcgcggc tcaccccaag gacgcccagc
601 cgacggagcc ttcgaggcga atcgaaggct ctgaaacgtc ggccgtctcg gtacggcagc
661 ccgtcgggcc gcccagacgg tgccgctggt gtcccggaat accccgctgg accagaacca
721 gcctgccggg tcgggacgcg atacaccgtc gaccggtcgc tctaatcact ccacggcagc
781 gcgctagagt gctggta.
```

[0288] In certain embodiments, the piggyBac or piggyBac-like transposon comprises a sequence of CCCGGCGAGCATGAGG (SEQ ID NO: 14510). In certain embodiments, the piggyBac or piggyBac-like transposon comprises an ITR sequence of SEQ ID NO: 14510. In certain embodiments, the piggyBac or piggyBac-like transposon comprises a sequence of TTATCCCGGCGAGCATGAGG (SEQ ID NO: 14511). In certain embodiments, the piggyBac or piggyBac-like transposon comprises at least 16 contiguous nucleotides from SEQ ID NO: 14511. In certain embodiments, the piggyBac or piggyBac-like transposon comprises a sequence of CCTCATGCTCGCCGGGTTAT (SEQ ID NO: 14512). In certain embodiments, the piggyBac or piggyBac-like transposon comprises at least 16 contiguous nucleotides from SEQ ID NO: 14512. In certain embodiments, the piggyBac or piggyBac-like transposon comprises one end comprising at least 16 contiguous nucleotides from SEQ ID NO: 14511 and one end comprising at least 16 contiguous nucleotides from SEQ ID NO: 14512. In certain embodiments, the piggyBac or piggyBac-like transposon comprises SEQ ID NO: 14511 and SEQ ID NO: 14512. In certain embodiments, the piggyBac or piggyBac-like transposon comprises a sequence of TTAACCCGGCGAGCATGAGG (SEQ ID NO: 14513). In certain embodiments, the piggyBac or piggyBac-like transposon comprises a sequence of CCTCATGCTCGCCGGGTTAA (SEQ ID NO: 14514).

[0289] In certain embodiments, the piggyBac or piggyBac-like transposon may have ends comprising SEQ ID NO: 14506 and SEQ ID NO: 14507, or a variant of either or both of these having at least 90% sequence identity to SEQ ID NO: 14506 or SEQ ID NO: 14507, and the piggyBac or piggyBac-like transposase has the sequence of SEQ ID NO: 14504 or SEQ ID NO: 14505, or a sequence at least 5%, 10%, 15%, 20%, 25%, 30%, 35%, 40%, 45%, 50%, 55%, 60%, 65%, 70%, 75%, 80%, 85%, 90%, 95%, 99% or any percentage in between identity to SEQ ID NO: 14504 or SEQ ID NO: 14505. In certain embodiments, the piggyBac or piggyBac-like transposon comprises a heterologous polynucleotide inserted between a pair of inverted repeats, where the transposon is capable of transposition by a piggyBac or piggyBac-like transposase having at least 5%, 10%, 15%, 20%, 25%, 30%, 35%, 40%, 45%, 50%, 55%, 60%, 65%, 70%, 75%, 80%, 85%, 90%, 95%, 99% or any percentage in between identity to SEQ ID NO: 14504 or SEQ ID NO: 14505. In certain embodiments, the transposon comprises two transposon ends, each of which comprises SEQ ID NO: 14510 in inverted orientations in the two transposon ends. In certain embodiments, each inverted terminal repeat (ITR) is at least 90% identical to SEQ ID NO: 14510.

[0290] In certain embodiments, the piggyBac or piggyBac-like transposon is capable of insertion by a piggyBac or piggyBac-like transposase at the sequence 5′-TTAT-3 within a target nucleic acid. In certain embodiments, one end of the piggyBac or piggyBac-like transposon comprises at least 16 contiguous nucleotides from SEQ ID NO: 14506 and the other transposon end comprises at least 16 contiguous nucleotides from SEQ ID NO: 14507. In certain embodiments, one end of the piggyBac or piggyBac-like transposon comprises at least 17, at least 18, at least 19, at least 20, at least 22, at least 25, at least 30 contiguous nucleotides from SEQ ID NO: 14506 and the other transposon end comprises at least 17, at least 18, at least 19, at least 20, at least 22, at least 25, at least 30 contiguous nucleotides from SEQ ID NO: 14507.

[0291] In certain embodiments, the piggyBac or piggyBac-like transposon comprises transposon ends (each end comprising an ITR) corresponding to SEQ ID NO: 14506 and SEQ ID NO: 14507, and has a target sequence corresponding to 5′-TTAT3′. In certain embodiments, the piggyBac or piggyBac-like transposon also comprises a sequence encoding a transposase (e.g. SEQ ID NO: 14505). In certain embodiments, the piggyBac or piggyBac-like transposon comprises one transposon end corresponding to SEQ ID NO: 14506 and a second transposon end corresponding to SEQ ID NO: 14516. SEQ ID NO: 14516 is very similar to SEQ ID NO: 14507, but has a large insertion shortly before the ITR. Although the ITR sequences for the two transposon ends are identical (they are both identical to SEQ ID NO: 14510), they have different target sequences: the second transposon has a target sequence corresponding to 5′-TTAA-3′, providing evidence that no change in ITR sequence is necessary to modify the target sequence specificity. The piggyBac or piggyBac-like transposase (SEQ ID NO: 14504), which is associated with the 5′-TTAA-3′ target site differs from the 5′-TTAT-3′-associated transposase (SEQ ID NO: 14505) by only 4 amino acid changes (D322Y, S473C, A507T, H582R). In certain embodiments, the piggyBac or piggyBac-like transposase (SEQ ID NO: 14504), which is associated with the 5′-TTAA-3′ target site is less active than the 5′-TTAT-3′-associated piggyBac or piggyBac-like transposase (SEQ ID NO: 14505) on the transposon with 5′-TTAT-3′ ends. In certain embodiments, piggyBac or piggyBac-like transposons with 5′-TTAA-3′ target sites can be converted to piggyBac or piggyBac-like transposases with 5′-TTAT-3 target sites by replacing 5′-TTAA-3′ target sites with 5′-TTAT-3′. Such transposons can be used either with a piggyBac or piggyBac-like transposase such as SEQ ID NO: 14504 which recognizes the 5′-TTAT-3′ target sequence, or with a variant of a transposase originally associated with the 5′-TTAA-3′ transposon. In certain embodiments, the high similarity between the 5′-TTAA-3′ and 5′-TTAT-3′ piggyBac or piggyBac-like transposases demonstrates that very few changes to the amino acid sequence of a piggyBac or piggyBac-like transposase alter target sequence specificity. In certain embodiments, modification of any piggyBac or piggyBac-like transposon-transposase gene transfer system, in which 5′-TTAA-3′ target sequences are replaced with 5′-TTAT-3′-target sequences, the ITRs remain the same, and the transposase is the original piggyBac or piggyBac-like transposase or a variant thereof resulting from using a low-level mutagenesis to introduce mutations into the transposase. In certain embodiments, piggyBac or piggyBac-like transposon transposase transfer systems can be formed by the modification of a 5′-TTAT-3′-active piggyBac or piggyBac-like transposon-transposase gene transfer systems in which 5′-TTAT-3′ target sequences are replaced with 5′-TTAA-3′-target sequences, the ITRs remain the same, and the piggyBac or piggyBac-like transposase is the original transposase or a variant thereof.

[0292] In certain embodiments, the piggyBac or piggyBac-like transposon is isolated or derived from Bombyx mori. In certain embodiments, the piggyBac or piggyBac-like transposon comprises a sequence of:

```
(SEQ ID NO: 14577)
    1 cccggcgagc atgaggcagg gtatctcata ccctggtaaa attttaaagt tgtgtatttt
  61 ataaaatttt cgtctgacaa cactagcgcg ctcagtagct ggaggcagga gcgtgcggga
121 ggggatagtg gcgtgatcgc agtgtggcac gggacaccgg cgagatattc gtgtgcaaac
181 ctgtttcggg tatgttatac cctgcctcat tgttgacgta t.
```

In certain embodiments, the piggyBac or piggyBac-like transposon comprises a sequence of:

```
(SEQ ID NO: 14578)
    1 tttaagaaaa agattaataa ataataataa tttcataatt aaaaacttct ttcattgaat
  61 gccattaaat aaaccattat tttacaaaat aagatcaaca taattgagta aataataata
121 agaacaatat tatagtacaa caaaatatgg gtatgtcata ccctgccaca ttcttgatgt
181 aacttttttt cacctcatgc tcgccggg.
```

In certain embodiments, the transposon comprises at least 16 contiguous bases from SEQ ID NO: 14577 and at least 16 contiguous bases from SEQ ID NO: 14578, and inverted terminal repeats that are at least 87% identical to CCCGGCGAGCATGAGG (SEQ ID NO: 14510). In certain embodiments, the piggyBac or piggyBac-like transposon comprises a sequence of:

```
(SEQ ID NO: 14595)
    1 cccggcgagc atgaggcagg gtatctcata ccctggtaaa attttaaagt tgtgtatttt
  61 ataaaatttt cgtctgacaa cactagcgcg ctcagtagct ggaggcagga gcgtgcggga
121 ggggatagtg gcgtgatcgc agtgtggcac gggacaccgg cgagatattc gtgtgcaaac
181 ctgtttcggg tatgttatac cctgcctcat tgttgacgta ttttttttat gtaatttttc
241 cgattattaa tttcaactgt tttattggta tttttatgtt atccattgtt ctttttttat
301 gatttactgt atcggttgtc tttcgttcct ttagttgagt ttttttttat tattttcagt
361 ttttgatcaa a.
```

In certain embodiments, the piggyBac or piggyBac-like transposon comprises a sequence of:

```
(SEQ ID NO: 14596)
    1 tcatattttt agtttaaaaa aataattata tgttttataa tgaaaagaat ctcattatct
  61 ttcagtatta ggttgattta tattccaaag aataatattt ttgttaaatt gttgattttt
121 gtaaacctct aaatgtttgt tgctaaaatt actgtgttta agaaaaagat taataaataa
181 taataatttc ataattaaaa acttctttca ttgaatgcca ttaaataaac cattatttta
241 caaaataaga tcaacataat tgagtaaata ataataagaa caatattata gtacaacaaa
301 atatgggtat gtcataccct gccacattct tgatgtaact ttttttcacc tcatgctcgc
361 cggg.
```

[0293] In certain embodiments, the piggyBac or piggyBac-like transposon comprises SEQ ID NO: 14595 and SEQ ID NO: 14596, and is transposed by the piggyBac or piggyBac-like transposase of SEQ ID NO: 14505. In certain embodiments, the ITRs of SEQ ID NO: 14595 and SEQ ID: 14596 are not flanked by a 5′-TTAA-3′ sequence. In certain embodiments, the ITRs of SEQ ID NO: 14595 and SEQ ID: 14596 are flanked by a 5′-TTAT-3′ sequence.

[0294] In certain embodiments, the piggyBac or piggyBac-like transposon comprises a sequence of:

```
(SEQ ID NO: 14597)
    1 cccggcgagc atgaggcagg gtatctcata ccctggtaaa attttaaagt tgtgtatttt
  61 ataaaatttt cgtctgacaa cactagcgcg ctcagtagct ggaggcagga gcgtgcggga
121 ggggatagtg gcgtgatcgc agtgtggcac gggacaccgg cgagatattc gtgtgcaaac
181 ctgtttcggg tatgttatac cctgcctcat tgttgacgta ttttttttat gtaatttttc
241 cgattattaa tttcaactgt tttattggta tttttatgtt atccattgtt ctttttttat
301 g.
```

In certain embodiments, the piggyBac or piggyBac-like transposon comprises a sequence of:

```
(SEQ ID NO: 14598)
    1 cagggtatct cataccctgg taaaatttta aagttgtgta ttttataaaa ttttcgtctg
  61 acaacactag cgcgctcagt agctggaggc aggagcgtgc gggaggggat agtggcgtga
121 tcgcagtgtg gcacgggaca ccggcgagat attcgtgtgc aaacctgttt cgggtatgtt
181 ataccctgcc tcattgttga cgtatttttt ttatgtaatt tttccgatta ttaatttcaa
241 ctgttttatt ggtattttta tgttatccat tgttcttttt ttatg.
```

In certain embodiments, the piggyBac or piggyBac-like transposon comprises a sequence of:

```
(SEQ ID NO: 14599)
    1 cagggtatct cataccctgg taaaatttta aagttgtgta ttttataaaa ttttcgtctg
  61 acaacactag cgcgctcagt agctggaggc aggagcgtgc gggaggggat agtggcgtga
121 tcgcagtgtg gcacgggaca ccggcgagat attcgtgtgc aaacctgttt cgggtatgtt
181 ataccctgcc tcattgttga cgtat.
```

In certain embodiments, the 5′ end of the piggyBac or piggyBac-like transposon comprises a sequence of SEQ ID NO: 14577, SEQ ID NO: 14595, or SEQ ID NOs: 14597-14599. In certain embodiments, the 5′ end of the piggyBac or piggyBac-like transposon is preceded by a 5′ target sequence.
In certain embodiments, the piggyBac or piggyBac-like transposon comprises a sequence of:

```
(SEQ ID NO: 14600)
    1 tcatattttt agtttaaaaa aataattata tgttttataa tgaaaagaat ctcattatct
  61 ttcagtatta ggttgattta tattccaaag aataatattt ttgttaaatt gttgattttt
121 gtaaacctct aaatgtttgt tgctaaaatt actgtgttta agaaaaagat taataaataa
181 taataatttc ataattaaaa acttctttca ttgaatgcca ttaaataaac cattatttta
241 caaaataaga tcaacataat tgagtaaata ataataagaa caatattata gtacaacaaa
301 atatgggtat gtcataccct gccacattct tgatgtaact ttttttcacc tcatgctcgc
361 cggg.
```

In certain embodiments, the piggyBac or piggyBac-like transposon comprises a sequence of:

```
(SEQ ID NO: 14601)
    1 tttaagaaaa agattaataa ataataataa tttcataatt aaaaacttct ttcattgaat
  61 gccattaaat aaaccattat tttacaaaat aagatcaaca taattgagta aataataata
121 agaacaatat tatagtacaa caaaatatgg gtatgtcata ccctgccaca ttcttgatgt
181 aacttttttt ca.
```

In certain embodiments, the piggyBac or piggyBac-like transposon comprises a sequence of:

```
(SEQ ID NO: 14602)
    1 cccggcgagc atgaggcagg gtatctcata ccctggtaaa attttaaagt tgtgtatttt
  61 ataaaatttt cgtctgacaa cactagcgcg ctcagtagct ggaggcagga gcgtgcggga
121 ggggatagtg gcgtgatcgc agtgtggcac gggacaccgg cgagatattc gtgtgcaaac
181 ctgtttcggg tatgttatac cctgcctcat tgttgacgta ttttttttat gtaatttttc
241 cgattattaa tttcaactgt tttattggta tttttatgtt atccattgtt ctttttttat
301 gatttactgt atcggttgtc tttcgttcct ttagttgagt ttttttttat tattttcagt
361 ttttgatcaa a.
```

[0295] In certain embodiments, the 3′ end of the piggyBac or piggyBac-like transposon comprises a sequence of SEQ ID NO: 14578, SEQ ID NO: 14596, or SEQ ID NOs: 14600-14601. In certain embodiments, the 3′ end of the piggyBac or piggyBac-like transposon is followed by a 3′ target sequence. In certain embodiments, the transposon is transposed by the transposase of SEQ ID NO: 14505. In certain embodiments, the 5′ and 3′ ends of the piggyBac or piggyBac-like transposon share a 16 bp repeat sequence of SEQ ID NO: 14510 in inverted orientation and immediately adjacent to the target sequence. In certain embodiments, the 5′ transposon end begins with SEQ ID NO: 14510, and the 3′ transposon end ends with the reverse complement of SEQ ID NO: 14510, 5′-CCTCATGCTCGCCGGG-3′ (SEQ ID NO: 14603). In certain embodiments, the piggyBac or piggyBac-like transposon comprises an ITR with at least 93%, at least 87%, or at least 81% or any percentage in between identity to SEQ ID NO: 14510 or SEQ ID NO: 14603. In certain embodiments, the piggyBac or piggyBac-like transposon comprises a target sequence followed by a 5′ transposon end comprising a sequence selected from SEQ ID NOs: 14577, 14595 or 14597 and a 3′ transposon end comprising SEQ ID NO: 14578 or 14596 followed by a target sequence. In certain embodiments, the piggyBac or piggyBac like transposon comprises one end that comprises a sequence that is at least 90%, at least 95% or at least 99% or any percentage in between identical to SEQ ID NO: 14577 and one end that comprises a sequence that is at least 90%, at least 95% or at least 99% or any percentage in between identical to SEQ ID NO: 14578. In certain embodiments, one transposon end comprises at least 14, at least 16, at least 18 or at least 20 contiguous bases from SEQ ID NO: 14577 and one transposon end comprises at least 14, at least 16, at least 18 or at least 20 contiguous bases from SEQ ID NO: 14578.

[0296] In certain embodiments, the piggyBac or piggyBac-like transposon comprises two transposon ends wherein each transposon ends comprises a sequence that is at least 81% identical, at least 87% identical or at least 93% identical or any percentage in between identical to SEQ ID NO: 14510 in inverted orientation in the two transposon ends. One end may further comprise at least 14, at least 16, at least 18 or at least 20 contiguous bases from SEQ ID NO: 14599, and the other end may further comprise at least 14, at least 16, at least 18 or at least 20 contiguous bases from SEQ ID NO: 14601. The piggyBac or piggyBac-like transposon may be transposed by the transposase of SEQ ID NO: 14505, and the transposase may optionally be fused to a nuclear localization signal.

[0297] In certain embodiments, the piggyBac or piggyBac-like transposon comprises SEQ ID NO: 14595 and SEQ ID NO: 14596 and the piggyBac or piggyBac-like transposase comprises SEQ ID NO: 14504 or SEQ ID NO: 14505. In certain embodiments, the piggyBac or piggyBac-like transposon comprises SEQ ID NO: 14597 and SEQ ID NO: 14596 and the piggyBac or piggyBac-like transposase comprises SEQ ID NO: 14504 or SEQ ID NO: 14505. In certain embodiments, the piggyBac or piggyBac-like transposon comprises SEQ ID NO: 14595 and SEQ ID NO: 14578 and the piggyBac or piggyBac-like transposase comprises SEQ ID NO: 14504 or SEQ ID NO: 14505. In certain embodiments, the piggyBac or piggyBac-like transposon comprises SEQ ID NO: 14602 and SEQ ID NO: 14600 and the piggyBac or piggyBac-like transposase comprises SEQ ID NO: 14504 or SEQ ID NO: 14505.

[0298] In certain embodiments, the piggyBac or piggyBac-like transposon comprises a 5′ end comprising 1, 2, 3, 4, 5, 6, or 7 sequences selected from ATGAGGCAGGGTAT (SEQ ID NO: 14614), ATACCCTGCCTCAT (SEQ ID NO: 14615), GGCAGGGTAT (SEQ ID NO: 14616), ATACCCTGCC (SEQ ID NO: 14617), TAAAATTTTA (SEQ ID NO: 14618), ATTTTATAAAAT (SEQ ID NO: 14619), TCATACCCTG (SEQ ID NO: 14620) and TAAATAATAATAA (SEQ ID NO: 14621). In certain embodiments, the piggyBac or piggyBac-like transposon comprises a 3′ end comprising 1, 2 or 3 sequences selected from SEQ ID NO: 14617, SEQ ID NO: 14620 and SEQ ID NO: 14621.

[0299] In certain embodiments of the methods of the disclosure, the transposase enzyme is a piggyBac or piggyBac-like transposase enzyme. In certain embodiments, the piggyBac or piggyBac-like transposase enzyme is isolated or derived from Xenopus tropicalis. The piggyBac or piggyBac-like transposase enzyme may comprise or consist of an amino acid sequence at least 5%, 10%, 15%, 20%, 25%, 30%, 35%, 40%, 45%, 50%, 55%, 60%, 65%, 70%, 75%, 80%, 85%, 90%, 95%, 99% or any percentage in between identical to:

```
(SEQ ID NO: 14517)
    1 MAKRFYSAEE AAAHCMASSS EEFSGSDSEY VPPASESDSS TEESWCSSST VSALEEPMEV
  61 DEDVDDLEDQ EAGDRADAAA GGEPAWGPPC NFPPEIPPFT TVPGVKVDTS NFEPINFFQL
121 FMTEAILQDM VLYTNVYAEQ YLTQNPLPRY ARAHAWHPTD IAEMKRFVGL TLAMGLIKAN
181 SLESYWDTTT VLSIPVFSAT MSRNRYQLLL RFLHFNNNAT AVPPDQPGHD RLHKLRPLID
241 SLSERFAAVY TPCQNICIDE SLLLFKGRLQ FRQYIPSKRA RYGIKFYKLC ESSSGYTSYF
301 LIYEGKDSKL DPPGCPPDLT VSGKIVWELI SPLLGQGFHL YVDNFYSSIP LFTALYCLDT
361 PACGTINRNR KGLPRALLDK KLNRGETYAL RKNELLAIKF FDKKNVFMLT SIHDESVIRE
421 QRVGRPPKNK PLCSKEYSKY MGGVDRTDQL QHYYNATRKT RAWYKKVGIY LIQMALRNSY
481 IVYKAAVPGP KLSYYKYQLQ ILPALLFGGV EEQTVPEMPP SDNVARLIGK HFIDTLPPTP
541 GKQRPQKGCK VCRKRGIRRD TRYYCPKCPR NPGLCFKPCF EIYHTQLHY.
```

[0300] In some embodiments, the piggyBac or piggyBac-like transposase is a hyperactive variant of SEQ ID NO: 14517. In certain embodiments, the piggyBac or piggyBac-like transposase is an integration defective variant of SEQ ID NO: 14517. The piggyBac or piggyBac-like transposase enzyme may comprise or consist of an amino acid sequence at least 5%, 10%, 15%, 20%, 25%, 30%, 35%, 40%, 45%, 50%, 55%, 60%, 65%, 70%, 75%, 80%, 85%, 90%, 95%, 99% or any percentage in between identical to:

```
(SEQ ID NO: 14518)
    1 MAKRFYSAEE AAAHCMAPSS EEFSGSDSEY VPPASESDSS TEESWCSSST VSALEEPMEV
  61 DEDVDDLEDQ EAGDRADAAA GGEPAWGPPC NFPPEIPPFT TVPGVKVDTS NFEPINFFQL
121 FMTEAILQDM VLYTNVYAEQ YLTQNPLPRY ARAHAWHPTD IAEMKRFVGL TLAMGLIKAN
181 SLESYWNTTT VLSIPVFSAT MSRNRYQLLL RFLHFNNNAT AVPPDQPDHD RLHKLRPLID
241 SLSERFAAVY TPCQNICIDE SLLLFKGRLR FRQYIPSKRA RYGIKFYKLC ESSSGYTSYF
301 LIYEGKDSKL DPPGCPPDLT VSGKIVWELI SPLLGQGFHL YVDNFYSSIP LFTALYCLDT
361 PACGTINRTR KGLPRALLDK KLNRGETYAL RKNELLAIKF FDKKNVFMLT SIHDESVIRE
421 QRVGRPPKNK PLCSKEYSKY MGGVDRTDQL QHYYNATRKT SAWYKKVGIY LIQMALRNSY
481 IVYKAAVPGP KLSYYKYQLQ ILPALLFGGV EEQTVPEMLP SDNVARLIGK HFIDTLPPTP
541 GKQRPQKGCK VCRKRGIRRD TRYYCPKCPR NPGLCFKPCF EIYHTQLHY.
```

[0301] In certain embodiments, the piggyBac or piggyBac-like transposase is isolated or derived from Xenopus tropicalis. In certain embodiments, the piggyBac or piggyBac-like transposase is a hyperactive piggyBac or piggyBac-like transposase. In certain embodiments, the hyperactive piggyBac or piggyBac-like transposase comprises a sequence at least 90% identical to:

```
(SEQ ID NO: 14572)
    1 MAKRFYSAEE AAAHCSASSS EEFSGSDSEY VPPASESDSS TEESWCSSST VSALEEPMEV
  61 DEDVDDLEDQ EAGDRADAAA GGEPAWGPPC NFPPEIPPFT TVPGVKVDTS NFEPINFFQL
121 FMTEAILQDM VLYTNVYAEQ YLTQNPLTRG ARAHAWHPTD IAEMKRFVGL TLAMGLIKAN
181 SIESYWDTTT VLSIPVFGAT MSRNRYQLLL RFLHFNNNAT AVPPDQPGHD RLHKLRPLID
241 SLSERFANVY TPCQNICIDE SLMLFKGRLQ FRQYIPSKRA RYGIKFYKLC ESSTGYTSYF
301 LIYEGKDSKL DPPGCPPDLT VSGKIVWELI SPLLGQGFHL YVDNFYSSIP LFTALYCLNT
361 PACGTINRNR KGLPRALLDK KLNRGETYAL RKNELLAIKF FDKKNVFMLT SIHDESVIRE
421 QRVGRPPKNK PLCSKEYSKY MGGVDRTDQL QHYYNATRKT RHWYKKVGIY LIQMALRNSY
481 IVYKAAVPGP KLSYYKYQLQ ILPALLFGGV EEQTVPEMPD SDNVARLIGK HFIDTLPPTP
541 GKQRPQKGCK VCRKRGIRRD TRYYCPKCPR NPGLCRKPCF EIYHTQLHY.
```

[0302] In certain embodiments, piggyBac or piggyBac-like transposase is a hyperactive piggyBac or piggyBac-like transposase. A hyperactive piggyBac or piggyBac-like transposase is a transposase that is more active than the naturally occurring variant from which it is derived. In certain embodiments, a hyperactive piggyBac or piggyBac-like transposase is more active than the transposase of SEQ ID NO: 14517. In certain embodiments, the hyperactive piggyBac or piggyBac-like transposase comprises a sequence of:

```
(SEQ ID NO: 14572)
    1 MAKRFYSAEE AAAHCSASSS EEFSGSDSEY VPPASESDSS TEESWCSSST VSALEEPMEV
  61 DEDVDDLEDQ EAGDRADAAA GGEPAWGPPC NFPPEIPPFT TVPGVKVDTS NFEPINFFQL
121 FMTEAILQDM VLYTNVYAEQ YLTQNPLTRG ARAHAWHPTD IAEMKRFVGL TLAMGLIKAN
181 SIESYWDTTT VLSIPVFGAT MSRNRYQLLL RFLHFNNNAT AVPPDQPGHD RLHKLRPLID
241 SLSERFANVY TPCQNICIDE SLMLFKGRLQ FRQYIPSKRA RYGIKFYKLC ESSTGYTSYF
301 LIYEGKDSKL DPPGCPPDLT VSGKIVWELI SPLLGQGFHL YVDNFYSSIP LFTALYCLNT
361 PACGTINRNR KGLPRALLDK KLNRGETYAL RKNELLAIKF FDKKNVFMLT SIHDESVIRE
421 QRVGRPPKNK PLCSKEYSKY MGGVDRTDQL QHYYNATRKT RHWYKKVGIY LIQMALRNSY
481 IVYKAAVPGP KLSYYKYQLQ ILPALLFGGV EEQTVPEMPD SDNVARLIGK HFIDTLPPTP
541 GKQRPQKGCK VCRKRGIRRD TRYYCPKCPR NPGLCRKPCF EIYHTQLHY.
```

[0303] In certain embodiments, the hyperactive piggyBac or piggyBac-like transposase comprises a sequence of:

```
(SEQ ID NO: 14624)
    1 MAKRFYSAEE AAAHCMASSS EEFSGSDSEY VPPASESDSS TEESWCSSST VSALEEPMEV
  61 DEDVDDLEDQ EAGDRADAAA GGEPAWGPPC NFPPEIPPFT TVPGVKVDTS NFEPINFFQL
121 FMTEAILQDM VLYTNVYAEQ YLTQNPLTRY ARAHAWHPTD IAEMKRFVGL TLAMGLIKAN
181 SLESYWDTTT VLSIPVFSAT MSRNRYQLLL RFLHFNNNAT AVPPDQPGHD RLHKLRPLID
241 SLSERFAAVY TPCQNICIDE SLLLFKGRLQ FRQYIPSKRA RYGIKFYKLC ESSSGYTSYF
301 LIYEGKDSKL DPPGCPPDLT VSGKIVWELI SPLLGQGFHL YVDNFYSSIP LFTALYCLNT
361 PACGTINRNR KGLPRALLDK KLNRGETYAL RKNELLAIKF FDKKNVFMLT SIHDESVIRE
421 QRVGRPPKNK PLCSKEYSKY MGGVDRTDQL QHYYNATRKT RHWYKKVGIY LIQMALRNSY
481 IVYKAAVPGP KLSYYKYQLQ ILPALLFGGV EEQTVPEMPP SDNVARLIGK HFIDTLPPTP
541 GKQRPQKGCK VCRKRGIRRD TRYYCPKCPR NPGLCRKPCF EIYHTQLHY.
```

[0304] In certain embodiments, the hyperactive piggyBac or piggyBac-like transposase comprises a sequence of:

```
(SEQ ID NO: 14625)
    1 MAKRFYSAEE AAAHCMASSS EEFSGSDSEY VPPASESDSS TEESWCSSST VSALEEPMEV
  61 DEDVDDLEDQ EAGDRADAAA GGEPAWGPPC NFPPEIPPFT TVPGVKVDTS NFEPINFFQL
121 FMTEAILQDM VLYTNVYAEQ YLTQNPLPRY ARAHAWHPTD IAEMKRFVGL TLAMGLIKAN
181 SLESYWDTTT VLKIPVFSAT MSRNRYQLLL RFLHFNNNAT AVPPDQPGHD RLHKLRPLID
241 SLSERFAAVY TPCQNICIDE SLLLFKGRLQ FRQYIPSKRA RYGIKFYKLC ESSSGYTSYF
301 LIYEGKDSKL DPPGCPPDLT VSGKIVWELI SPLLGQGFHL YVDNFYSSIP LFTALYCLNT
361 PACGTINRNR KGLPRALLDK KLNRGETYAL RKNELLAIKF FDKKNVFMLT SIHDESVIRE
421 QRVGRPPKNK PLCSKEYSKY MGGVDRTDQL QHYYNATRKT RHWYKKVGIY LIQMALRNSY
481 IVYKAAVPGP KLSYYKYQLQ ILPALLFGGV EEQTVPEMPP SDNVARLIGK HFIDTLPPTP
541 GKQRPQKGCK VCRKRGIRRD TRYYCPKCPR NPGLCFKPCF EIYHTQLHY.
```

[0305] In certain embodiments, the hyperactive piggyBac or piggyBac-like transposase comprises a sequence of:

```
(SEQ ID NO: 14627)
    1 MAKRFYSAEE AAAHCMASSS EQTSGSDSEY VPPASESDSS TEESWCSSST VSALEEPMEV
  61 DEDVDDLEDQ EAGDRADAAA GGEPAWGPPC NFPPEIPPFT TVPGVKVDTS NFEPINFFQL
121 FMTEAILQDM VLYTNVYAEQ YLTQNPLTRY ARAHAWHPTD IAEMKRFVGL TLAMGLIKAN
181 SIESYWDTTT VLSIPVFGAT MSRNRYQLLL RFLHFNNNAT AVPPDQPGHD RLHKLRPLID
241 SLSERFANVY TPCQNICIDE SLLLFKGRLQ FRQYIPSKRA RYGIKFYKLC ESSSGYTSYF
301 LIYEGKDSKL DPPGCPPDLT VSGKIVWELI SPLLGQGFHL YVDNFYSSIP LFTALYCLNT
361 PACGTINRNR KGLPRALLDK KLNRGETYAL RKNELLAIKF FDKKNVFMLT SIHDESVIRE
421 QRVGRKPKNK PLCSKEYSKY MGGVDRTDQL QHYYNATRKT RHWYKKVGIY LIQMALRNSY
481 IVYKAAVPGP KLSYYKYQLQ ILPALLFGGV EEQTVPEMPP SDNVARLIGK HFIDTLPPTP
541 GKQRPQKGCK VCRKRGIRRD TRYYCPKCPR NPGLCRKPCF EIYHTQLHY.
```

[0306] In certain embodiments, the hyperactive piggyBac or piggyBac-like transposase comprises a sequence of:

```
(SEQ ID NO: 14628)
    1 MAKRFYSAEE AAAHCSASSS EEFSGSDSEY VPPASESDSS TEESWCSSST VSALEEPMEV
  61 DEDVDDLEDQ EAGDRADAAA GGEPAWGPPC NFPPEIPPFT TVPGVKVDTS NFEPINFFQL
121 FMTEAILQDM VLYTNVYAEQ YLTQNPLTRG ARAHAWHPTD IAEMKRFVGL TLAMGLIKAN
181 SLESYWDTTT VLSIPVFGAT MSRNRYQLLL RFLHFNNNAT AVPPDQPGHD RLHKLRPLID
241 SLSERFANVY TPCQNICIDE SLMLFKGRLQ FRQYIPSKRA RYGIKFYKLC ESSTGYTSYF
301 LIYEGKDSKL DPPGCPPDLT VSGKIVWELI SPLLGQGFHL YVDNFYSSIP LFTALYCLNT
361 PACGTINRNR KGLPRALLDK KLNRGETYAL RKNELLAIKF FDKKNVFMLT SIHDESVIRE
421 QRVGRPPKNK PLCSKEYSKY MGGVDRTDQL QHYYNATRKT RHWYKKVGIY LIQMALRNSY
481 IVYKAAVPGP KLSYYKYQLQ ILPALLFGGV EEQTVPEMPP SDNVARLIGK HFIDTLPPTP
541 GKQRPQKGCK VCRKRGIRRD TRYYCPKCPR NPGLCRKPCF EIYHTQLHY.
```

[0307] In certain embodiments, the hyperactive piggyBac or piggyBac-like transposase comprises a sequence of:

```
(SEQ ID NO: 16820)
    1 MAKRFYSAEE AAAHCMASSS EEFSGSDSEY VPPASESDSS TEESWCSSST VSALEEPMEV
  61 DEDVDDLEDQ EAGDRADAAA GGEPAWGPPC NFPPEIPPFT TVPGVKVDTS NFEPINFFQL
121 FMTEAILQDM VLYTNVYAEQ YLTQNPLTRY ARAHAWHPTD IAEMKRFVGL TLAMGLIKAN
181 SLESYWDTTT VLSIPVFGAT MSRNRYQLLL RFLHFNNNAT AVPPDQPGHD RLHKLRPLID
241 SLSERFANVY TPCQNICIDE SLLLFKGRLQ FRQYIPSKRA RYGIKFYKLC ESSSGYTSYF
301 LIYEGKDSKL DPPGCPPDLT VSGKIVWELI SPLLGQGFHL YVDNFYSSIP LFTALYCLNT
361 PACGTINRNR KGLPRALLDK KLNRGETYAL RKNELLAIKF FDKKNVFMLT SIHDESVIRE
421 QRVGRPPKNK PLCSKEYSKY MGGVDRTDQL QHYYNATRKT RHWYKKVGIY LIQMALRNSY
481 IVYKAAVPGP KLSYYKYQLQ ILPALLFGGV EEQTVPEMPP SDNVARLIGK HFIDTLPPTP
541 GKQRPQKGCK VCRKRGIRRD TRYYCPKCPR NPGLCRKPCF EIYHTQLHY.
```

[0308] In certain embodiments, the hyperactive piggyBac or piggyBac-like transposase comprises an amino acid substitution at a position selected from amino acid 6, 7, 16, 19, 20, 21, 22, 23, 24, 26, 28, 31, 34, 67, 73, 76, 77, 88, 91, 141, 145, 146, 148, 150, 157, 162, 179, 182, 189, 192, 193, 196, 198, 200, 210, 212, 218, 248, 263, 270, 294, 297, 308, 310, 333, 336, 354, 357, 358, 359, 377, 423, 426, 428, 438, 447, 450, 462, 469, 472, 498, 502, 517, 520, 523, 533, 534, 576, 577, 582, 583 or 587 (relative to SEQ ID NO: 14517). In certain embodiments, the hyperactive piggyBac or piggyBac-like transposase comprises an amino acid substitution of Y6C, S7G, M16S, S19G, S20Q, S20G, S20D, E21D, E22Q, F23T, F23P, S24Y, S26V, S28Q, V31K, A34E, L67A, G73H, A76V, D77N, P88A, N91D, Y141Q, Y141A, N145E, N145V, P146T, P146V, P146K, P148T, P148H, Y150G, Y150S, Y150C, H157Y, A162C, A179K, L182I, L182V, T189G, L192H, S193N, S193K, V196I, S198G, T200W, L210H, F212N, N218E, A248N, L263M, Q270L, S294T, T297M, S308R, L310R, L333M, Q336M, A354H, C357V, L358F, D359N, L377I, V 423H, P426K, K428R, S438A, T447G, T447A, L450V, A462H, A462Q, I469V, I472L, Q498M, L502V, E517I, P520D, P520G, N523S, 1533E, D534A, F576R, F576E, K577I, I582R, Y583F, L587Y or L587W, or any combination thereof including at least 1, 2, 3, 4, 5, 6, 7, 8, 9, 10 or all of these mutations (relative to SEQ ID NO: 14517).

[0309] In certain embodiments, the hyperactive piggyBac or piggyBac-like transposase comprises one or more substitutions of an amino acid that is not wild type, wherein the one or more substitutions a for wild type amino acid comprises a substitution of A2X, K3X, R4X, F5X, Y6X, S7X, A11X, A13X, C15X, M16X, A17X, S18X, S19X, S20X, E21X, E22X, F23X, S24X, G25X, 26X, D27X, S28X, E29X, E42X, E43X, S44X, C46X, S47X, S48X, S49X, T50X, V51X, S52X, A53X, L54X, E55X, E56X, P57X, M58X, E59X, E62X, D63X, V64X, D65X, D66X, L67X, E68X, D69X, Q70X, E71X, A72X, G73X, D74X, R75X, A76X, D77X, A78X, A79X, A80X, G81X, G82X, E83X, P84X, A85X, W86X, G87X, P88X, P89X, C90X, N91X, F92X, P93X, E95X, I96X, P97X, P98X, F99X, T100X, T101X, P103X, G104X, V105X, K106X, V107X, D108X, T109X, N111X, P114X, I115X, N116X, F117X, F118X, Q119X, M122X, T123X, E124X, A125X, I126X, L127X, Q128X, D129X, M130X, L132X, Y133X, V126X, Y127X, A138X, E139X, Q140X, Y141X, L142X, Q144X, N145X, P146X, L147X, P148X, Y150X, A151X, A155X, H157X, P158X, I161X, A162X, V168X, T171X, L172X, A173X, M174X, I177X, A179X, L182X, D187X, T188X, T189X, T190X, L192X, S193X, I194X, P195X, V196X, S198X, A199X, T200X, S202X, L208X, L209X, L210X, R211X, F212X, F215X, N217X, N218X, A219X, T220X, A221X, V222X, P224X, D225X, Q226X, P227X, H229X, R231X, H233X, L235X, P237X, I239X, D240X, L242X, S243X, E244X, R244X, F246X, A247X, A248X, V249X, Y250X, T251X, P252X, C253X, Q254X, I256X, C257X, I258X, D259X, E260X, S261X, L262X, L263X, L264X, F265X, K266X, G267X, R268X, L269X, Q270X, F271X, R272X, Q273X, Y274X, I275X, P276X, S277X, K278X, R279X, A280X, R281X, Y282X, G283X, I284X, K285X, F286X, Y287X, K288X, L289X, C290X, E291X, S292X, S293XS294X, G295X, Y296X, T297X, S298X, Y299X, F300X, E304X, L310X, P313X, G314X, P316X, P317X, D318X, L319X, T320X, V321X, K324X, E328X, I330X, S331X, P332X, L333X, L334X, G335X, Q336X, F338X, L340X, D343X, N344X, F345X, Y346X, S347X, L351X, F352X, A354X, L355X, Y356X, C357X, L358X, D359X, T360X, R422X, Y423X, G424X, P426X, K428X, N429X, K430X, P431X, L432X, S434X, K435X, E436X, S438X, K439X, Y440X, G443X, R446X, T447X, L450X, Q451X, N455X, T460X, R461X, A462X, K465X, V467X, G468X, I469X, Y470X, L471X, I472X, M474X, A475X, L476X, R477X, S479X, Y480X, V482XY483X, K484X, A485X, A486X, V487X, P488X, P490X, K491X, S493X, Y494X, Y495X, K496X, Y497T, Q498X, L499X, Q500X, I501X, L502X, P503X, A504X, L505X, L506X, F507X, G508X, G509X, V510X, E511X, E512X, Q513X, T514X, V515X, E517X, M518X, P519X, P520X, S521X, D522X, N523X, V524X, A525X, L527X, I528X, K530X, H531X, F532X, I533X, D534X, T535X, L536X, T539X, P540X, Q546X, K550X, R553X, K554X, R555X, G556X, I557X, R558X, R559X, D560X, T561X, Y564X, P566X, K567X, P569X, R570X, N571X, L574X, C575X, F576X, K577X, P578X, F580X, E581X, I582X, Y583X, T585X, Q586X, L587X, H588X or Y589X (relative to SEQ ID NO: 14517). A list of hyperactive amino acid substitutions can be found in U.S. Pat. No. 10,041,077, the contents of which are incorporated by reference in their entirety.

[0310] In certain embodiments, the piggyBac or piggyBac-like transposase is integration deficient. In certain embodiments, an integration deficient piggyBac or piggyBac-like transposase is a transposase that can excise its corresponding transposon, but that integrates the excised transposon at a lower frequency than a corresponding naturally occurring transposase. In certain embodiments, the piggyBac or piggyBac-like transposase is an integration deficient variant of SEQ ID NO: 14517. In certain embodiments, the integration deficient piggyBac or piggyBac-like transposase is deficient relative to SEQ ID NO: 14517.

[0311] In certain embodiments, the piggyBac or piggyBac-like transposase is active for excision but deficient in integration. In certain embodiments, the integration deficient piggyBac or piggyBac-like transposase comprises a sequence that is at least 90% identical to a sequence of:

```
(SEQ ID NO: 14605)
    1 MAKRFYSAEE AAAHCMASSS EEFSGSDSEY VPPASESDSS TEESWCSSST VSALEEPMEV
  61 DEDVDDLEDQ EAGDRVDAAA GGEPAWGPPC NFPPEIPPFT TVPGVKVDTS NFEPINFFQL
121 FMTEAILQDM VLYTNVYAEQ YLTQNPLPRY ARAHAWHPTD IAEMKRFVGL TLAMGLIKAN
181 SLESYWDTTT VLSIPVFSAT MSRNRYQLLL KFLHFNNEAT AVPPDQPGHD RLHKLRPLID
241 SLSERFAAVY TPCQNICIDE SLLLFKGRLQ FRQYIPSKRA RYGIKFYKLC ESSSGYTSYF
301 LIYEGKDSKL DPPGCPPDLT VSGKIVWELI SPLLGQGFHL YVDNFYSSIP LFTALYCLDT
361 PACGTINRNR KGLPRALLDK KLNRGETYAL RKNELLAIKF FDKKNVFMLT SIHDESVIRE
421 QRVGRPPKNK PLCSKEYSKY MGGVDRTDQL QHYYNATRKT RAWYKKVGIY LIQMALRNSY
481 IVYKAAVPGP KLSYYKYQLQ ILPALLFGGV EEQTVPEMPP SDNVARLIGK HFIDTLPPTP
541 GKQRPQKGCK VCRKRGIRRD TRYYCPKCPR NPGLCFKPCF EIYHTQLHYG RR.
```

[0312] In certain embodiments, the integration deficient piggyBac or piggyBac-like transposase comprises a sequence that is at least 90% identical to a sequence of:

```
(SEQ ID NO: 14604)
    1 MAKRFYSAEE AAAHCMASSS EEFSGSDSEY VPPASESDSS TEESWCSSST VSALEEPMEV
  61 DEDVDDLEDQ EAGDRADAAA GGEPAWGPPC NFPPEIPPFT TVPGVKVDTS NFEPINFFQL
121 FMTEAILQDM VLYTNVYAEQ YLTQVPLPRY ARAHAWHPTD IAEMKRFVGL TLAMGLIKAN
181 SLESYWDTTT VLNIPVFSAT MSRNRYQLLL RFLEFNNEAT AVPPDQPGHD RLHKLRPLID
241 SLSERFAAVY TPCQNICIDE SLLLFKGRLQ FRQYIPSKRA RYGIKFYKLC ESSSGYTSYF
301 LIYEGKDSKL DPPGCPPDLT VSGKIVWELI SPLLGQGFHL YVDNFYSSIP LFTALYCLDT
361 PACGTINRNR KGLPRALLDK KLNRGETYAL RKNELLAIKF FDKKNVFMLT SIHDESVIRE
421 QRVGRPPKNK PLCSKEYSKY MGGVDRTDQL QHYYNATRKT RAWYKKVGIY LIQMALRNSY
481 IVYKAAVPGP KLSYYKYQLQ ILPALLFGGV EEQTVPEMPP SDNVARLIGK HFIDTLPPTP
541 GKQRPQKGCK VCRKRGIRRD TRYYCPKCPR NPGLCFKPCF EIYHTQLHY.
```

[0313] In certain embodiments, the integration deficient piggyBac or piggyBac-like transposase comprises a sequence that is at least 90% identical to a sequence of:

```
(SEQ ID NO: 14611)
    1 MAKRFYSAEE AAAHCMASSS EEFSGSDSEY VPPASESDSS TEESWCSSST VSALEEPMEV
  61 DEDVDDLEDQ EAGDRADAAA GGEPAWGPPC NFPPEIPPFT TVPGVKVDTS NFEPINFFQL
121 FMTEAILQDM VLYTNVYAEQ YLTQNVLPRY ARAHAWHPTD IAEMKRFVGL TLAMGLIKAN
181 SLESYWDTTT VLSIPVFSAT MSRNRYQLLL RFLHFNNDAT AVPPDQPGHD RLHKLRPLID
241 SLTERFAAVY TPCQNICIDE SLLLFKGRLQ FRQYIPSKRA RYGIKFYKLC ESSSGYTSYF
301 LIYEGKDSKL DPPGCPPDLT VSGKIVWELI SPLLGQGFHL YVDNFYSSIP LFTALYCLDT
361 PACGTINRNR KGLPRALLDK KLNRGETYAL RKNELLAIKF FDKKNVFMLT SIHDESVIRE
421 QRVGRPPKNK PLCSKEYSKY MGGVDRTDQL QHYYNATRKT RAWYKKVGIY LIQMALRNSY
481 IVYKAAVPGP KLSYYKYQLQ ILPALLFGGV EEQTVPEMPP SDNVARLIGK HFIDTLPPTP
541 GKQRPQKGCK VCRKRGIRRD TRYYCPKCPR NPGLCFKPCF EIYHTQLHYG RR.
```

[0314] In certain embodiments, the integration deficient piggyBac or piggyBac-like transposase comprises SEQ ID NO: 14611. In certain embodiments, the integration deficient piggyBac or piggyBac-like transposase comprises a sequence that is at least 90% identical to a sequence of:

```
(SEQ ID NO: 14612)
    1 MAKRFYSAEE AAAHCMASSS EEFSGSDSEY VPPASESDSS TEESWCSSST VSALEEPMEV
  61 DEDVDDLEDQ EAGDRADAAP GGEPAWGPPC NFPPEIPPFT TVPGVKVDTS NFEPINFFQL
121 FMTEAILQDM VLYTNVYAEQ YLTQVPLPRY ARAHAWHPTD IAEMKRFVGL TLAMGLIKAN
181 SLESYWDTTT VLSIPVFSAT MSRNRYQLLL RFLHFNNEAT AVPPDQPGHD RLHKLRPLID
241 SLSERFAAVY TPCQNICIDE SLLLFKGRLQ FRQYIPSKRA RYGIKFYKLC ESSSGYTSYF
301 LIYEGKDSKL DPPGCPPDLT VSGKIVWELI SPLLGQGFHL YVDNFYSSIP LFTALYCLDT
361 PACGTINRNR KGLPRALLDK KLNRGETYAL RKNELLAIKF FDKKNVFMLT SIHDESVIRE
421 QRVGRPPKNK PLCSKEYSKY MGGVDRTDQL QHYYNATRKT RAWYKKVGIY LIQMALRNSY
481 IVYKAAVPGP KLSYYKYQLQ ILPALLFGGV EEQTVPEMPP SDNVARLIGK HFIDTLPPTP
541 GKQRPQKGCK VCRKRGIRRD TRYYCPKCPR NPGLCFKPCF EIYHTQLHYG RR.
```

[0315] In certain embodiments, the integration deficient piggyBac or piggyBac-like transposase comprises SEQ ID NO: 14612. In certain embodiments, the integration deficient piggyBac or piggyBac-like transposase comprises a sequence that is at least 90% identical to a sequence of:

```
(SEQ ID NO: 14613)
    1 MAKRFYSAEE AAAHCMASSS EEFSGSDSEY VPPASESDSS TEESWCSSST VSALEEPMEV
  61 DEDVDDLEDQ EAGDRADAAA GGEPAWGPPC NFPPEIPPFT TVPGVKVDTS NFEPINFFQL
121 FMTEAILQDM VLYTNVYAEQ YLTQVPLPRY ARAHAWHPTD IAEMKRFVGL TLAMGLIKAN
181 SLESYWDTTT VLNIPVFSAT MSRNRYQLLL RFLEFNNNAT AVPPDQPGHD RLHKLRPLID
241 SLSERFAAVY TPCQNICIDE SLLLFKGRLQ FRQYIPSKRA RYGIKFYKLC ESSSGYTSYF
301 LIYEGKDSKL DPPGCPPDLT VSGKIVWELI SPLLGQGFHL YVDNFYSSIP LFTALYCLDT
361 PACGTINRNR KGLPRALLDK KLNRGETYAL RKNELLAIKF FDKKNVFMLT SIHDESVIRE
421 QRVGRPPKNK PLCSKEYSKY MGGVDRTDQL QHYYNATRKT RAWYKKVGIY LIQMALRNSY
481 IVYKAAVPGP KLSYYKYQLQ ILPALLFGGV EEQTVPEMPP SDNVARLIGK HFIDTLPPTP
541 GKQRPQKGCK VCRKRGIRRD TRYYCPKCPR NPGLCFKPCF EIYHTQLHYG RR.
```

[0316] In certain embodiments, the integration deficient piggyBac or piggyBac-like transposase comprises SEQ ID NO: 14613. In certain embodiments, the integration deficient piggyBac or piggyBac-like transposase comprises an amino acid substitution wherein the Asn at position 218 is replaced by a Glu or an Asp (N218D or N218E) (relative to SEQ ID NO: 14517).

[0317] In certain embodiments, the excision competent, integration deficient piggyBac or piggyBac-like transposase comprises one or more substitutions of an amino acid that is not wild type, wherein the one or more substitutions a for wild type amino acid comprises a substitution of A2X, K3X, R4X, F5X, Y6X, S7X, ABX, E9X, E10X, A11X, A12X, A13X, H14X, C15X, M16X, A17X, S18X, S19X, S20X, E21X, E22X, F23X, S24X, G25X, 26X, D27X, S28X, E29X, V31X, P32X, P33X, A34X, S35X, E36X, S37X, D38X, S39X, S40X, T41X, E42X, E43X, S44X, W45X, C46X, S47X, S48X, S49X, T50X, V51X, S52X, A53X, L54X, E55X, E56X, P57X, M58X, E59X, V60X, M122X, T123X, E124X, A125X, L127X, Q128X, D129X, L132X, Y133X, V126X, Y127X, E139X, Q140X, Y141X, L142X, T143X, Q144X, N145X, P146X, L147X, P148X, R149X, Y150X, A151X, H154X, H157X, P158X, T159X, D160X, I161X, A162X, E163X, M164X, K165X, R166X, F167X, V168X, G169X, L170X, T171X, L172X, A173X, M174X, G175X, L176X, I177X, K178X, A179X, N180X, S181X, L182X, S184X, Y185X, D187X, T188X, T189X, T190X, V191X, L192X, S193X, I194X, P195X, V196X, F197X, S198X, A199X, T200X, M201X, S202X, R203X, N204X, R205X, Y206X, Q207X, L208X, L209X, L210X, R211X, F212X, L213X, H241X, F215X, N216X, N217X, N218X, A219X, T220X, A221X, V222X, P223X, P224X, D225X, Q226X, P227X, G228X, H229X, D230X, R231X, H233X, K234X, L235X, R236X, L238X, I239X, D240X, L242X, S243X, E244X, R244X, F246X, A247X, A248X, V249X, Y250X, T251X, P252X, C253X, Q254X, N255X, I256X, C257X, I258X, D259X, E260X, S261X, L262X, L263X, L264X, F265X, K266X, G267X, R268X, L269X, Q270X, F271X, R272X, Q273X, Y274X, I275X, P276X, S277X, K278X, R279X, A280X, R281X, Y282X, G283X, I284X, K285X, F286X, Y287X, K288X, L289X, C290X, E291X, S292X, S293X, S294X, G295X, Y296X, T297X, S298X, Y299X, F300X, I302X, E304X, G305X, K306X, D307X, S308X, K309X, L310X, D311X, P312X, P313X, G314X, C315X, P316X, P317X, D318X, L319X, T320X, V321X, S322X, G323X, K324X, I325X, V326X, W327X, E328X, L329X, I330X, S331X, P332X, L333X, L334X, G335X, Q336X, F338X, H339X, L340X, V342X, N344X, F345X, Y346X, S347X, S348X, I349X, L351X, T353X, A354X, Y356X, C357X, L358X, D359X, T360X, P361X, A362X, C363X, G364X, I366X, N367X, R368X, D369X, K371X, G372X, L373X, R375X, A376X, L377X, L378X, D379X, K380X, K381X, L382X, N383X, R384XG385X, T387X, Y388X, A389X, L390X, K392X, N393X, E394X, A397X, K399X, F400X, F401X, D402X, N405X, L406X, L409X, R422X, Y423X, G424X, E425X, P426X, K428X, N429X, K430X, P431X, L432X, S434X, K435X, E436X, S438X, K439X, Y440X, G442X, G443X, V444X, R446X, T447X, L450X, Q451X, H452X, N455X, T457X, R458X, T460X, R461X, A462X, Y464X, K465X, V467X, G468X, I469X, L471X, I472X, Q473X, M474X, L476X, R477X, N478X, S479X, Y480X, V482XY483X, K484X, A485X, A486X, V487X, P488X, G489X, P490X, K491X, L492X, S493X, Y494X, Y495X, K496X, Q498X, L499X, Q500X, I501X, L502X, P503X, A504X, L505X, L506X, F507X, G508X, G509X, V510X, E511X, E512X, Q513X, T514X, V515X, E517X, M518X, P519X, P520X, S521X, D522X, N523X, V524X, A525X, L527X, I528X, G529X, K530X, F532X, I533X, D534X, T535X, L536X, P537X, P538X, T539X, P540X, G541X, F542X, Q543X, R544X, P545X, Q546X, K547X, G548X, C549X, K550X, V551X, C552X, R553X, K554X, R555X, G556X, I557X, R558X, R559X, D560X, T561X, R562X, Y563X, Y564X, C565X, P566X, K567X, C568X, P569X, R570X, N571X, P572X, G573X, L574X, C575X, F576X, K577X, P578X, C579X, F580X, E581X, I582X, Y583X, H584X, T585X, Q586X, L587X, H588X or Y589X (relative to SEQ ID NO: 14517). A list of excision competent, integration deficient amino acid substitutions can be found in U.S. Pat. No. 10,041,077, the contents of which are incorporated by reference in their entirety.

[0318] In certain embodiments, the piggyBac or piggyBac-like transposase is fused to a nuclear localization signal. In certain embodiments, SEQ ID NO: 14517 or SEQ ID NO: 14518 is fused to a nuclear localization signal. In certain embodiments, the amino acid sequence of the piggyBac or piggyBac like transposase fused to a nuclear localization signal is encoded by a polynucleotide sequence comprising:

```
(SEQ ID NO: 14626)
      1 atggcaccca aaaagaaacg taaagtgatg gccaaaagat tttacagcgc cgaagaagca
    61 gcagcacatt gcatggcatc gtcatccgaa gaattctcgg ggagcgattc cgaatatgtc
  121 ccaccggcct cggaaagcga ttcgagcact gaggagtcgt ggtgttcctc ctcaactgtc
  181 tcggctcttg aggagccgat ggaagtggat gaggatgtgg acgacttgga ggaccaggaa
  241 gccggagaca gggccgacgc tgccgcggga ggggagccgg cgtggggacc tccatgcaat
  301 tttcctcccg aaatcccacc gttcactact gtgccgggag tgaaggtcga cacgtccaac
  361 ttcgaaccga tcaatttctt tcaactcttc atgactgaag cgatcctgca agatatggtg
  421 ctctacacta atgtgtacgc cgagcagtac ctgactcaaa acccgctgcc tcgctacgcg
  481 agagcgcatg cgtggcaccc gaccgatatc gcggagatga agcggttcgt gggactgacc
  541 ctcgcaatgg gcctgatcaa ggccaacagc ctcgagtcat actgggatac cacgactgtg
  601 cttagcattc cggtgttctc cgctaccatg tcccgtaacc gctaccaact cctgctgcgg
  661 ttcctccact tcaacaacaa tgcgaccgct gtgccacctg accagccagg acacgacaga
  721 ctccacaagc tgcggccatt gatcgactcg ctgagcgagc gattcgccgc ggtgtacacc
  781 ccttgccaaa acatttgcat cgacgagtcg cttctgctgt ttaaaggccg gcttcagttc
  841 cgccagtaca tcccatcgaa gcgcgctcgc tatggtatca aattctacaa actctgcgag
  901 tcgtccagcg gctacacgtc atacttcttg atctacgagg ggaaggactc taagctggac
  961 ccaccggggt gtccaccgga tcttactgtc tccggaaaaa tcgtgtggga actcatctca
1021 cctctcctcg gacaaggctt tcatctctac gtcgacaatt tctactcatc gatccctctg
1081 ttcaccgccc tctactgcct ggatactcca gcctgtggga ccattaacag aaaccggaag
1141 ggtctgccga gagcactgct ggataagaag ttgaacaggg gagagactta cgcgctgaga
1201 aagaacgaac tcctcgccat caaattcttc gacaagaaaa atgtgtttat gctcacctcc
1261 atccacgacg aatccgtcat ccgggagcag cgcgtgggca ggccgccgaa aaacaagccg
1321 ctgtgctcta aggaatactc caagtacatg gggggtgtcg accggaccga tcagctgcag
1381 cattactaca acgccactag aaagacccgg gcctggtaca agaaagtcgg catctacctg
1441 atccaaatgg cactgaggaa ttcgtatatt gtctacaagg ctgccgttcc gggcccgaaa
1501 ctgtcatact acaagtacca gcttcaaatc ctgccggcgc tgctgttcgg tggagtggaa
1561 gaacagactg tgcccgagat gccgccatcc gacaacgtgg cccggttgat cggaaagcac
1621 ttcattgata ccctgcctcc gacgcctgga aagcagcggc cacagaaggg atgcaaagtt
1681 tgccgcaagc gcggaatacg gcgcgatacc cgctactatt gcccgaagtg cccccgcaat
1741 cccggactgt gtttcaagcc ctgttttgaa atctaccaca cccagttgca ttac.
```

[0319] In certain embodiments, the piggyBac or piggyBac-like transposon is isolated or derived from Xenopus tropicalis. In certain embodiments, the piggyBac or piggyBac-like transposon comprises a sequence of:

```
(SEQ ID NO: 14519)
    1 ttaacctttt tactgccaat gacgcatggg atacgtcgtg gcagtaaaag ggcttaaatg
  61 ccaacgacgc gtcccatacg ttgttggcat tttaagtctt ctctctgcag cggcagcatg
121 tgccgccgct gcagagagtt tctagcgatg acagcccctc tgggcaacga gccggggggg
181 ctgtc.
```

[0320] In certain embodiments, the piggyBac or piggyBac-like transposon comprises a sequence of:

```
(SEQ ID NO: 14520)
    1 tttgcatttt tagacattta gaagcctata tcttgttaca gaattggaat tacacaaaaa
  61 ttctaccata ttttgaaagc ttaggttgtt ctgaaaaaaa caatatattg ttttcctggg
121 taaactaaaa gtcccctcga ggaaaggccc ctaaagtgaa acagtgcaaa acgttcaaaa
181 actgtctggc aatacaagtt ccactttgac caaaacggct ggcagtaaaa gggttaa.
```

[0321] In certain embodiments, the piggyBac or piggyBac-like transposon comprises SEQ ID NO: 14519 and SEQ ID NO: 14520. In certain embodiments, the piggyBac or piggyBac-like transposon comprises a sequence of:

```
(SEQ ID NO: 14521)
    1 ttaacccttt gcctgccaat cacgcatggg atacgtcgtg gcagtaaaag ggcttaaatg
  61 ccaacgacgc gtcccatacg ttgttggcat tttaagtctt ctctctgcag cggcagcatg
121 tgccgccgct gcagagagtt tctagcgatg acagcccctc tgggcaacga gccggggggg
181 ctgtc.
```

[0322] In certain embodiments, the piggyBac or piggyBac-like transposon comprises a sequence of:

```
(SEQ ID NO: 14522)
    1 tttgcatttt tagacattta gaagcctata tcttgttaca gaattggaat tacacaaaaa
  61 ttctaccata ttttgaaagc ttaggttgtt ctgaaaaaaa caatatattg ttttcctggg
121 taaactaaaa gtcccctcga ggaaaggccc ctaaagtgaa acagtgcaaa acgttcaaaa
181 actgtctggc aatacaagtt ccactttggg acaaatcggc tggcagtgaa agggttaa.
```

[0323] In certain embodiments, the piggyBac or piggyBac-like transposon comprises a sequence of:

```
(SEQ ID NO: 14523)
    1 ttaacctttt tactgccaat gacgcatggg atacgtcgtg gcagtaaaag ggcttaaatg
  61 ccaacgacgc gtcccatacg ttgttggcat tttaattctt ctctctgcag cggcagcatg
121 tgccgccgct gcagagagtt tctagcgatg acagcccctc tgggcaacga gccggggggg
181 ctgtc.
```

[0324] In certain embodiments, the piggyBac or piggyBac-like transposon comprises SEQ ID NO: 14520 and SEQ ID NO: 14519, SEQ ID NO: 14521 or SEQ ID NO: 14523. In certain embodiments, the piggyBac or piggyBac-like transposon comprises SEQ ID NO: 14522 and SEQ ID NO: 14519, SEQ ID NO: 14521 or SEQ ID NO: 14523. In certain embodiments, the piggyBac or piggyBac-like transposon comprises one end comprising at least 14, 16, 18, 20, 30 or 40 contiguous nucleotides from SEQ ID NO: 14519, SEQ ID NO: 14521 or SEQ ID NO: 14523. In certain embodiments, the piggyBac or piggyBac-like transposon comprises one end comprising at least 14, 16, 18, 20, 30 or 40 contiguous nucleotides from SEQ ID NO: 14520 or SEQ ID NO: 14522. In certain embodiments, the piggyBac or piggyBac-like transposon comprises one end with at least 90% identity to SEQ ID NO: 14519, SEQ ID NO: 14521 or SEQ ID NO: 14523. In certain embodiments, the piggyBac or piggyBac-like transposon comprises one end with at least 90% identity to SEQ ID NO: 14520 or SEQ ID NO: 14522. In one embodiment, one transposon end is at least 90% identical to SEQ ID NO: 14519 and the other transposon end is at least 90% identical to SEQ ID NO: 14520.

[0325] In certain embodiments, the piggyBac or piggyBac-like transposon comprises a sequence of TTAACCTTTTTACTGCCA (SEQ ID NO: 14524). In certain embodiments, the piggyBac or piggyBac-like transposon comprises a sequence of TTAACCCTTTGCCTGCCA (SEQ ID NO: 14526). In certain embodiments, the piggyBac or piggyBac-like transposon comprises a sequence of TTAACCYTTTTACTGCCA (SEQ ID NO: 14527). In certain embodiments, the piggyBac or piggyBac-like transposon comprises a sequence of TGGCAGTAAAAGGGTTAA (SEQ ID NO: 14529). In certain embodiments, the piggyBac or piggyBac-like transposon comprises a sequence of TGGCAGTGAAAGGGTTAA (SEQ ID NO: 14531). In certain embodiments, the piggyBac or piggyBac-like transposon comprises a sequence of TTAACCYTTTKMCTGCCA (SEQ ID NO: 14533). In certain embodiments, one end of the piggyBac or piggyBac-like transposon comprises a sequence selected from SEQ ID NO: 14524, SEQ ID NO: 14526 and SEQ ID NO: 14527. In certain embodiments, one end of the piggyBac™ (PB) or piggyBac-like transposon comprises a sequence selected from SEQ ID NO: 14529 and SEQ ID NO: 14531. In certain embodiments, each inverted terminal repeat of the piggyBac or piggyBac-like transposon comprises a sequence of ITR sequence of CCYTTTKMCTGCCA (SEQ ID NO: 14563). In certain embodiments, each end of the piggyBac™ (PB) or piggyBac-like transposon comprises SEQ ID NO: 14563 in inverted orientations. In certain embodiments, one ITR of the piggyBac or piggyBac-like transposon comprises a sequence selected from SEQ ID NO: 14524, SEQ ID NO: 14526 and SEQ ID NO: 14527. In certain embodiments, one ITR of the piggyBac or piggyBac-like transposon comprises a sequence selected from SEQ ID NO: 14529 and SEQ ID NO: 14531. In certain embodiments, the piggyBac or piggyBac like transposon comprises SEQ ID NO: 14533 in inverted orientation in the two transposon ends.

[0326] In certain embodiments, The piggyBac or piggyBac-like transposon may have ends comprising SEQ ID NO: 14519 and SEQ ID NO: 14520 or a variant of either or both of these having at least 90% sequence identity to SEQ ID NO: 14519 or SEQ ID NO: 14520, and the piggyBac or piggyBac-like transposase has the sequence of SEQ ID NO: 14517 or a variant showing at least %, 10%, 15%, 20%, 25%, 30%, 35%, 40%, 45%, 50%, 55%, 60%, 65%, 70%, 75%, 80%, 85%, 90%, 95%, 99% or any percentage in between sequence identity to SEQ ID NO: 14517 or SEQ ID NO: 14518. In certain embodiments, one piggyBac or piggyBac-like transposon end comprises at least 14 contiguous nucleotides from SEQ ID NO: 14519, SEQ ID NO: 14521 or SEQ ID NO: 14523, and the other transposon end comprises at least 14 contiguous nucleotides from SEQ ID NO: 14520 or SEQ ID NO: 14522. In certain embodiments, one transposon end comprises at least 15, at least 16, at least 17, at least 18, at least 19, at least 20, at least 22, at least 25, at least 30 contiguous nucleotides from SEQ ID NO: 14519, SEQ ID NO: 14521 or SEQ ID NO: 14523, and the other transposon end comprises at least 15, at least 16, at least 17, at least 18, at least 19, at least 20, at least 22, at least 25 or at least 30 contiguous nucleotides from SEQ ID NO: 14520 or SEQ ID NO: 14522.

[0327] In certain embodiments, the piggyBac or piggyBac-like transposase recognizes a transposon end with a 5′ sequence corresponding to SEQ ID NO: 14519, and a 3′ sequence corresponding to SEQ ID NO: 14520. It will excise the transposon from one DNA molecule by cutting the DNA at the 5′-TTAA-3′ sequence at the 5′ end of one transposon end to the 5′-TTAA-3′ at the 3′ end of the second transposon end, including any heterologous DNA that is placed between them, and insert the excised sequence into a second DNA molecule. In certain embodiments, truncated and modified versions of the 5′ and 3′ transposon ends will also function as part of a transposon that can be transposed by the piggyBac or piggyBac-like transposase. For example, the 5′ transposon end can be replaced by a sequence corresponding to SEQ ID NO: 14521 or SEQ ID NO: 14523, the 3′ transposon end can be replaced by a shorter sequence corresponding to SEQ ID NO: 14522. In certain embodiments, the 5′ and 3′ transposon ends share an 18 bp almost perfectly repeated sequence at their ends (5′-TTAACCYTTTKMCTGCCA: SEQ ID NO: 14533) that includes the 5′-TTAA-3′ insertion site, which sequence is inverted in the orientation in the two ends. That is in SEQ ID NO: 14519 and SEQ ID NO: 14523 the 5′ transposon end begins with the sequence 5′-TTAACCTTTTTACTGCCA-3′ (SEQ ID NO: 14524), or in SEQ ID NO: 14521 the 5′ transposon end begins with the sequence 5′-TTAACCCTTTGCCTGCCA-3′ (SEQ ID NO: 14526); the 3′ transposon ends with approximately the reverse complement of this sequence: in SEQ ID NO: 14520 it ends 5′ TGGCAGTAAAAGGGTTAA-3′ (SEQ ID NO: 14529), in SEQ ID NO: 14522 it ends 5′-TGGCAGTGAAAGGGTTAA-3′ (SEQ ID NO: 14531.) One embodiment of the invention is a transposon that comprises a heterologous polynucleotide inserted between two transposon ends each comprising SEQ ID NO: 14533 in inverted orientations in the two transposon ends. In certain embodiments, one transposon end comprises a sequence selected from SEQ ID NOS: 14524, SEQ ID NO: 14526 and SEQ ID NO: 14527. In some embodiments, one transposon end comprises a sequence selected from SEQ ID NO: 14529 and SEQ ID NO: 14531.

[0328] In certain embodiments, the piggyBac™ (PB) or piggyBac-like transposon is isolated or derived from Xenopus tropicalis. In certain embodiments, the piggyBac or piggyBac-like transposon comprises at a sequence of:

(SEQ ID NO: 14573)
1 ccctttgcct gccaatcacg catgggatac gtcgtggcag taaaagggct taaatgccaa
61 cgacgcgtcc catacgtt.

[0329] In certain embodiments, the piggyBac or piggyBac-like transposon comprises at a sequence of:

(SEQ ID NO: 14574)
1 cctgggtaaa ctaaaagtcc cctcgaggaa aggcccctaa agtgaaacag tgcaaaacgt
61 tcaaaaactg tctggcaata caagttccac tttgggacaa atcggctggc agtgaaaggg.

[0330] In certain embodiments, the piggyBac or piggyBac-like transposon comprises at least 16 contiguous bases from SEQ ID NO: 14573 or SEQ ID NO: 14574, and inverted terminal repeat of

(SEQ ID NO: 14575)
CCYTTTBMCTGCCA.

[0331] In certain embodiments, the piggyBac or piggyBac-like transposon comprises at a sequence of:

```
(SEQ ID NO: 14579)
    1 ccctttgcct gccaatcacg catgggatac gtcgtggcag taaaagggct taaatgccaa
  61 cgacgcgtcc catacgttgt tggcatttta agtcttctct ctgcagcggc agcatgtgcc
121 gccgctgcag agagtttcta gcgatgacag cccctctggg caacgagccg ggggggctgt
181 c.
```

[0332] In certain embodiments, the piggyBac or piggyBac-like transposon comprises at a sequence of:

```
(SEQ ID NO: 14580)
    1 cctttttact gccaatgacg catgggatac gtcgtggcag taaaagggct taaatgccaa
  61 cgacgcgtcc catacgttgt tggcatttta attcttctct ctgcagcggc agcatgtgcc
121 gccgctgcag agagtttcta gcgatgacag cccctctggg caacgagccg ggggggctgt
181 c.
```

[0333] In certain embodiments, the piggyBac or piggyBac-like transposon comprises at a sequence of:

```
(SEQ ID NO: 14581)
    1 cctttttact gccaatgacg catgggatac gtcgtggcag taaaagggct taaatgccaa
  61 cgacgcgtcc catacgttgt tggcatttta agtcttctct ctgcagcggc agcatgtgcc
121 gccgctgcag agagtttcta gcgatgacag cccctctggg caacgagccg ggggggctgt
181 c.
```

[0334] In certain embodiments, the piggyBac or piggyBac-like transposon comprises at a sequence of:

```
(SEQ ID NO: 14582)
    1 cctttttact gccaatgacg catgggatac gtcgtggcag taaaagggct taaatgccaa
  61 cgacgcgtcc catacgttgt tggcatttta agtcttctct ctgcagcggc agcatgtgcc
121 gccgctgcag agag.
```

[0335] In certain embodiments, the piggyBac or piggyBac-like transposon comprises at a sequence of:

(SEQ ID NO: 14583)
1 cctttttact gccaatgacg catgggatac gtcgtggcag taaaagggct taaatgccaa
61 cgacgcgtcc catacgttgt tggcatttta agtctt.

[0336] In certain embodiments, the piggyBac or piggyBac-like transposon comprises at a sequence of:

(SEQ ID NO: 14584)
1 ccctttgcct gccaatcacg catgggatac gtcgtggcag taaaagggct taaatgccaa
61 cgacgcgtcc catacgttgt tggcatttta agtctt.

[0337] In certain embodiments, the piggyBac or piggyBac-like transposon comprises at a sequence of:

```
(SEQ ID NO: 14585)
    1 ttatcctttt tactgccaat gacgcatggg atacgtcgtg gcagtaaaag ggcttaaatg
  61 ccaacgacgc gtcccatacg ttgttggcat tttaagtctt ctctctgcag cggcagcatg
121 tgccgccgct gcagagagtt tctagcgatg acagcccctc tgggcaacga gccggggggg
181 ctgtc.
```

[0338] In certain embodiments, the piggyBac or piggyBac-like transposon comprises at a sequence of:

```
(SEQ ID NO: 14586)
    1 tttgcatttt tagacattta gaagcctata tcttgttaca gaattggaat tacacaaaaa
  61 ttctaccata ttttgaaagc ttaggttgtt ctgaaaaaaa caatatattg ttttcctggg
121 taaactaaaa gtcccctcga ggaaaggccc ctaaagtgaa acagtgcaaa acgttcaaaa
181 actgtctggc aatacaagtt ccactttggg acaaatcggc tggcagtgaa aggg.
```

[0339] In certain embodiments, the piggyBac or piggyBac-like transposon comprises a 5′ transposon end sequence selected from SEQ ID NO: 14573 and SEQ ID NOs: 14579-14585. In certain embodiments, the 5′ transposon end sequence is preceded by a 5′ target sequence. In certain embodiments, the piggyBac or piggyBac-like transposon comprises at a sequence of:

```
(SEQ ID NO: 14587)
    1 tttgcatttt tagacattta gaagcctata tcttgttaca gaattggaat tacacaaaaa
  61 ttctaccata ttttgaaagc ttaggttgtt ctgaaaaaaa caatatattg ttttcctggg
121 taaactaaaa gtcccctcga ggaaaggccc ctaaagtgaa acagtgcaaa acgttcaaaa
181 actgtctggc aatacaagtt ccactttgac caaaacggct ggcagtaaaa ggg.
```

[0340] In certain embodiments, the piggyBac or piggyBac-like transposon comprises at a sequence of:

```
(SEQ ID NO: 14588)
    1 ttgttctgaa aaaaacaata tattgttttc ctgggtaaac taaaagtccc ctcgaggaaa
  61 ggcccctaaa gtgaaacagt gcaaaacgtt caaaaactgt ctggcaatac aagttccact
121 ttgaccaaaa cggctggcag taaaaggg.
```

[0341] In certain embodiments, the piggyBac or piggyBac-like transposon comprises at a sequence of:

```
(SEQ ID NO: 14589)
    1 tttgcatttt tagacattta gaagcctata tcttgttaca gaattggaat tacacaaaaa
  61 ttctaccata ttttgaaagc ttaggttgtt ctgaaaaaaa caatatattg ttttcctggg
121 taaactaaaa gtcccctcga ggaaaggccc ctaaagtgaa acagtgcaaa acgttcaaaa
181 actgtctggc aatacaagtt ccactttgac caaaacggct ggcagtaaaa gggttat.
```

[0342] In certain embodiments, the piggyBac or piggyBac-like transposon comprises at a sequence of:

```
(SEQ ID NO: 14590)
    1 ttgttctgaa aaaaacaata tattgttttc ctgggtaaac taaaagtccc ctcgaggaaa
  61 ggcccctaaa gtgaaacagt gcaaaacgtt caaaaactgt ctggcaatac aagttccact
121 ttgggacaaa tcggctggca gtgaaaggg.
```

[0343] In certain embodiments, the piggyBac or piggyBac-like transposon comprises a 3′ transposon end sequence selected from SEQ ID NO: 14574 and SEQ ID NOs: 14587-14590. In certain embodiments, the 3′ transposon end sequence is followed by a 3′ target sequence. In certain embodiments, the 5′ and 3′ transposon ends share a 14 repeated sequence inverted in orientation in the two ends (SEQ ID NO: 14575) adjacent to the target sequence. In certain embodiments, the piggyBac or piggyBac-like transposon comprises a 5′ transposon end comprising a target sequence and a sequence that is selected from SEQ ID NOs: 14582-14584 and 14573, and a 3′ transposon end comprising a sequence selected from SEQ ID NOs: 14588-14590 and 14574 followed by a 3′ target sequence.

[0344] In certain embodiments, the 5′ transposon end of the piggyBac or piggyBac-like transposon comprises

1 atcacgcatg ggatacgtcg tggcagtaaa agggcttaaa tgccaacgac gcgtcccata
61 cgtt

(SEQ ID NO: 14591), and an ITR. In certain embodiments, the 5′ transposon end comprises

1 atgacgcatg ggatacgtcg tggcagtaaa agggcttaaa tgccaacgac gcgtcccata
61 cgttgttggc attttaagtc tt

(SEQ ID NO: 14592) and an ITR. In certain embodiments, the 3′ transposon end of the piggyBac or piggyBac-like transposon comprises

1 cctgggtaaa ctaaaagtcc cctcgaggaa aggcccctaa agtgaaacag tgcaaaacgt
61 tcaaaaactg tctggcaata caagttccac tttgggacaa atcggc

(SEQ ID NO: 14593) and an ITR. In certain embodiments, the 3′ transposon end comprises

```
    1 ttgttctgaa aaaaacaata tattgttttc ctgggtaaac taaaagtccc ctcgaggaaa
  61 ggcccctaaa gtgaaacagt gcaaaacgtt caaaaactgt ctggcaatac aagttccact
121 ttgaccaaaa cggc
```

### (SEQ ID NO: 14594) and an ITR.

[0345] In certain embodiments, one transposon end comprises a sequence that is at least 90%, at least 95%, at least 99% or any percentage in between identical to SEQ ID NO: 14573 and the other transposon end comprises a sequence that is at least 90%, at least 95%, at least 99% or any percentage in between identical to SEQ ID NO: 14574. In certain embodiments, one transposon end comprises at least 14, at least 16, at least 18, at least 20 or at least 25 contiguous nucleotides from SEQ ID NO: 14573 and one transposon end comprises at least 14, at least 16, at least 18, at least 20 or at least 25 contiguous nucleotides from SEQ ID NO: 14574. In certain embodiments, one transposon end comprises at least 14, at least 16, at least 18, at least 20 from SEQ ID NO: 14591, and the other end comprises at least 14, at least 16, at least 18, at least 20 from SEQ ID NO: 14593. In certain embodiments, each transposon end comprises SEQ ID NO: 14575 in inverted orientations.

[0346] In certain embodiments, the piggyBac or piggyBac-like transposon comprises a sequence selected from of SEQ ID NO: 14573, SEQ ID NO: 14579, SEQ ID NO: 14581, SEQ ID NO: 14582, SEQ ID NO: 14583, and SEQ ID NO: 14588, and a sequence selected from SEQ ID NO: 14587, SEQ ID NO: 14588, SEQ ID NO: 14589 and SEQ ID NO: 14586 and the piggyBac or piggyBac-like transposase comprises SEQ ID NO: 14517 or SEQ ID NO: 14518.

[0347] In certain embodiments, the piggyBac or piggyBac-like transposon comprises ITRs of CCCTTTGCCTGCCA (SEQ ID NO: 14622) (5′ ITR) and TGGCAGTGAAAGGG (SEQ ID NO: 14623) (3′ ITR) adjacent to the target sequences.

[0348] In certain embodiments of the methods of the disclosure, the transposase enzyme is a piggyBac or piggyBac-like transposase enzyme. In certain embodiments, the piggyBac or piggyBac-like transposase enzyme is isolated or derived from Helicoverpa armigera. The piggyBac or piggyBac-like transposase enzyme may comprise or consist of an amino acid sequence at least 5%, 10%, 15%, 20%, 25%, 30%, 35%, 40%, 45%, 50%, 55%, 60%, 65%, 70%, 75%, 80%, 85%, 90%, 95%, 99% or any percentage in between identical to:

```
(SEQ ID NO: 14525)
    1 MASRQRLNHD EIATILENDD DYSPLDSESE KEDCVVEDDV WSDNEDAIVD FVEDTSAQED
  61 PDNNIASRES PNLEVTSLTS HRIITLPQRS IRGKNNHVWS TTKGRTTGRT SAINIIRTNR
121 GPTRMCRNIV DPLLCFQLFI TDEIIHEIVK WTNVEIIVKR QNLKDISASY RDINTMEIWA
181 LVGILTLTAV MKDNHLSTDE LFDATFSGTR YVSVMSRERF EFLIRCIRMD DKTLRPTLRS
241 DDAFLPVRKI WEIFINQCRQ NHVPGSNLTV DEQLLGFRGR CPFRMYIPNK PDKYGIKFPM
301 MCAAATKYMI DAIPYLGKST KTNGLPLGEF YVKDLTKTVH GTNRNITCDN WFTSIPLAKN
361 MLQAPYNLTI VGTIRSNKRE MPEEIKNSRS RPVGSSMFCF DGPLTLVSYK PKPSKMVFLL
421 SSCDENAVIN ESNGKPDMIL FYNQTKGGVD SFDQMCKSMS ANRKTNRWPM AVFYGMLNMA
481 FVNSYIIYCH NKINKQEKPI SRKEFMKKLS IQLTTPWMQE RLQAPTLKRT LRDNITNVLK
541 NVVPASSENI SNEPEPKKRR YCGVCSYKKR RMTKAQCCKC KKAICGEHNI DVCQDCI.
```

[0349] In certain embodiments, the piggyBac or piggyBac-like transposon is isolated or derived from Helicoverpa armigera. In certain embodiments, the piggyBac or piggyBac-like transposon comprises a sequence of:

```
(SEQ ID NO: 14570)
    1 ttaaccctag aagcccaatc tacgtaaatt tgacgtatac cgcggcgaaa tatctctgtc
  61 tctttcatgt ttaccgtcgg atcgccgcta acttctgaac caactcagta gccattggga
121 cctcgcagga cacagttgcg tcatctcggt aagtgccgcc attttgttgt actctctatt
181 acaacacacg tcacgtcacg tcgttgcacg tcattttgac gtataattgg gctttgtgta
241 acttttgaat ttgtttcaaa ttttttatgt ttgtgattta tttgagttaa tcgtattgtt
301 tcgttacatt tttcatataa taataatatt ttcaggttga gtacaaa.
```

[0350] In certain embodiments, the piggyBac or piggyBac-like transposon comprises a sequence of:

```
(SEQ ID NO: 14528)
    1 agactgtttt tttctaagag acttctaaaa tattattacg agttgattta attttatgaa
  61 aacatttaaa actagttgat tttttttata attacataat tttaagaaaa agtgttagag
121 gcttgatttt tttgttgatt ttttctaaga tttgattaaa gtgccataat agtattaata
181 aagagtattt tttaacttaa aatgtatttt atttattaat taaaacttca attatgataa
241 ctcatgcaaa aatatagttc attaacagaa aaaaatagga aaactttgaa gttttgtttt
301 tacacgtcat ttttacgtat gattgggctt tatagctagt taaatatgat tgggcttcta
361 gggttaa.
```

[0351] In certain embodiments of the methods of the disclosure, the transposase enzyme is a piggyBac or piggyBac-like transposase enzyme. In certain embodiments, the piggyBac or piggyBac-like transposase enzyme is isolated or derived from Pectinophora gossypiella. The piggyBac or piggyBac-like transposase enzyme may comprise or consist of an amino acid sequence at least 5%, 10%, 15%, 20%, 25%, 30%, 35%, 40%, 45%, 50%, 55%, 60%, 65%, 70%, 75%, 80%, 85%, 90%, 95%, 99% or any percentage in between identical to:

```
(SEQ ID NO: 14530)
    1 MDLRKQDEKI RQWLEQDIEE DSKGESDNSS SETEDIVEME VHKNTSSESE VSSESDYEPV
  61 CPSKRQRTQI IESEESDNSE SIRPSRRQTS RVIDSDETDE DVMSSTPQNI PRNPNVIQPS
121 SRFLYGKNKH KWSSAAKPSS VRTSRRNIIH FIPGPKERAR EVSEPIDIFS LFISEDMLQQ
181 VVTFTNAEML IRKNKYKTET FTVSPTNLEE IRALLGLLFN AAAMKSNHLP TRMLFNTHRS
241 GTIFKACMSA ERLNFLIKCL RFDDKLTRNV RQRDDRFAPI RDLWQALISN FQKWYTPGSY
301 ITVDEQLVGF RGRCSFRMYI PNKPNKYGIK LVMAADVNSK YIVNAIPYLG KGTDPQNQPL
361 ATFFIKEITS TLHGTNRNIT MDNWFTSVPL ANELLMAPYN LTLVGTLRSN KREIPEKLKN
421 SKSRAIGTSM FCYDGDKTLV SYKAKSNKVV FILSTIHDQP DINQETGKPE MIHFYNSTKG
481 AVDTVDQMCS SISTNRKTQR WPLCVFYNML NLSIINAYVV YVYNNVRNNK KPMSRRDFVI
541 KLGDQLMEPW LRQRLQTVTL RRDIKVMIQD ILGESSDLEA PVPSVSNVRK IYYLCPSKAR
601 RMTKHRCIKC KQAICGPHNI DICSRCIE.
```

[0352] In certain embodiments, the piggyBac or piggyBac-like transposon is isolated or derived from Pectinophora gossypiella. In certain embodiments, the piggyBac or piggyBac-like transposon comprises a sequence of:

```
(SEQ ID NO: 14532)
    1 ttaaccctag ataactaaac attcgtccgc tcgacgacgc gctatgccgc gaaattgaag
  61 tttacctatt attccgcgtc ccccgccccc gccgcttttt ctagcttcct gatttgcaaa
121 atagtgcatc gcgtgacacg ctcgaggtca cacgacaatt aggtcgaaag ttacaggaat
181 ttcgtcgtcc gctcgacgaa agtttagtaa ttacgtaagt ttggcaaagg taagtgaatg
241 aagtattttt ttataattat tttttaattc tttatagtga taacgtaagg tttatttaaa
301 tttattactt ttatagttat ttagccaatt gttataaatt ccttgttatt gctgaaaaat
361 ttgcctgttt tagtcaaaat ttattaactt ttcgatcgtt ttttag.
```

In certain embodiments, the piggyBac or piggyBac-like transposon comprises a sequence of:

```
(SEQ ID NO: 14571)
    1 tttcactaag taattttgtt cctatttagt agataagtaa cacataatta ttgtgatatt
  61 caaaacttaa gaggtttaat aaataataat aaaaaaaaaa tggtttttat ttcgtagtct
121 gctcgacgaa tgtttagtta ttacgtaacc gtgaatatag tttagtagtc tagggttaa.
```

[0353] In certain embodiments of the methods of the disclosure, the transposase enzyme is a piggyBac or piggyBac-like transposase enzyme. In certain embodiments, the piggyBac or piggyBac-like transposase enzyme is isolated or derived from Ctenoplusia agnata. The piggyBac or piggyBac-like transposase enzyme may comprise or consist of an amino acid sequence at least 5%, 10%, 15%, 20%, 25%, 30%, 35%, 40%, 45%, 50%, 55%, 60%, 65%, 70%, 75%, 80%, 85%, 90%, 95%, 99% or any percentage in between identical to:

```
(SEQ ID NO: 14534)
    1 MASRQHLYQD EIAAILENED DYSPHDTDSE MEDCVTQDDV RSDVEDEMVD NIGNGTSPAS
  61 RHEDPETPDP SSEASNLEVT LSSHRIIILP QRSIREKNNH IWSTTKGQSS GRTAAINIVR
121 TNRGPTRMCR NIVDPLLCFQ LFIKEEIVEE IVKWTNVEMV QKRVNLKDIS ASYRDTNEME
181 IWAIISMLTL SAVMKDNHLS TDELFNVSYG TRYVSVMSRE RFEFLLRLLR MGDKLLRPNL
241 RQEDAFTPVR KIWEIFINQC RLNYVPGTNL TVDEQLLGFR GRCPFRMYIP NKPDKYGIKF
301 PMVCDAATKY MVDAIPYLGK STKTQGLPLG EFYVKELTQT VHGTNRNVTC DNWFTSVPLA
361 KSLLNSPYNL TLVGTIRSNK REIPEEVKNS RSRQVGSSMF CFDGPLTLVS YKPKPSKMVF
421 LLSSCNEDAV VNQSNGKPDM ILFYNQTKGG VDSFDQMCSS MSTNRKTNRW PMAVFYGMLN
481 MAFVNSYIIY CHNMLAKKEK PLSRKDFMKK LSTDLTTPSM QKRLEAPTLK RSLRDNITNV
541 LKIVPQAAID TSFDEPEPKK RRYCGFCSYK KKRMTKTQCF KCKKPVCGEH NIDVCQDCI.
```

[0354] In certain embodiments, the piggyBac or piggyBac-like transposon is isolated or derived from Ctenoplusia agnata. In certain embodiments, the piggyBac or piggyBac-like transposon comprises a sequence of:

```
(SEQ ID NO: 14535)
    1 ttaaccctag aagcccaatc tacgtcattc tgacgtgtat gtcgccgaaa atactctgtc
  61 tctttctcct gcacgatcgg attgccgcga acgctcgatt caacccagtt ggcgccgaga
121 tctattggag gactgcggcg ttgattcggt aagtcccgcc attttgtcat agtaacagta
181 ttgcacgtca gcttgacgta tatttgggct ttgtgttatt tttgtaaatt ttcaacgtta
241 gtttattatt gcatcttttt gttacattac tggtttattt gcatgtatta ctcaaatatt
301 atttttattt tagcgtagaa aataca.
```

In certain embodiments, the piggyBac or piggyBac-like transposon comprises a sequence of:

```
(SEQ ID NO: 14536)
    1 agactgtttt ttttgtattt gcattatata ttatattcta aagttgattt aattctaaga
  61 aaaacattaa aataagtttc tttttgtaaa atttaattaa ttataagaaa aagtttaagt
121 tgatctcatt ttttataaaa atttgcaatg tttccaaagt tattattgta aaagaataaa
181 taaaagtaaa ctgagtttta attgatgttt tattatatca ttatactata tattacttaa
241 ataaaacaat aactgaatgt atttctaaaa ggaatcacta gaaaatatag tgatcaaaaa
301 tttacacgtc atttttgcgt atgattgggc tttataggtt ctaaaaatat gattgggcct
361 ctagggttaa.
```

In certain embodiments, the piggyBac or piggyBac-like transposon comprises an ITR sequence of CCCTAGAAGCCCAATC (SEQ ID NO: 14564).

[0355] In certain embodiments of the methods of the disclosure, the transposase enzyme is a piggyBac or piggyBac-like transposase enzyme. In certain embodiments, the piggyBac or piggyBac-like transposase enzyme is isolated or derived from Agrotis ipsilon. The piggyBac (PB) or piggyBac-like transposase enzyme may comprise or consist of an amino acid sequence at least 5%, 10%, 15%, 20%, 25%, 30%, 35%, 40%, 45%, 50%, 55%, 60%, 65%, 70%, 75%, 80%, 85%, 90%, 95%, 99% or any percentage in between identical to:

```
(SEQ ID NO: 14537)
    1 MESRQRLNQD EIATILENDD DYSPLDSDSE AEDRVVEDDV WSDNEDAMID YVEDTSRQED
  61 PDNNIASQES ANLEVTSLTS HRIISLPQRS ICGKNNHVWS TTKGRTTGRT SAINIIRTNR
121 GPTRMCRNIV DPLLCFQLFI TDEIIHEIVK WTNVEMIVKR QNLIDISASY RDTNTMEMWA
181 LVGILTLTAV MKDNHLSTDE LFDATFSGTR YVSVMSRERF EFLIRCMRMD DKTLRPTLRS
241 DDAFIPVRKL WEIFINQCRL NYVPGGNLTV DEQLLGFRGR CPFRMYIPNK PDKYGIRFPM
301 MCDAATKYMI DAIPYLGKST KTNGLPLGEF YVKELTKTVH GTNRNVTCDN WFTSIPLAKN
361 MLQAPYNLTI VGTIRSNKRE IPEEIKNSRS RPVGSSMFCF DGPLTLVSYK PKPSRMVFLL
421 SSCDENAVIN ESNGKPDMIL FYNQTKGGVD SFDQMCKSMS ANRKTNRWPM AVFYGMLNMA
481 FVNSYIIYCH NKINKQKKPI NRKEFMKNLS TDLTTPWMQE RLKAPTLKRT LRDNITNVLK
541 NVVPPSPANN SEEPGPKKRS YCGFCSYKKR RMTKTQFYKC KKAICGEHNI DVCQDCV.
```

[0356] In certain embodiments, the piggyBac or piggyBac-like transposon is isolated or derived from Agrotis ipsilon. In certain embodiments, the piggyBac or piggyBac-like transposon comprises a sequence of:

```
(SEQ ID NO: 14538)
    1 ttaaccctag aagcccaatc tacgtaaatt tgacgtatac cgcggcgaaa tatatctgtc
  61 tctttcacgt ttaccgtcgg attcccgcta acttcggaac caactcagta gccattgaga
121 actcccagga cacagttgcg tcatctcggt aagtgccgcc attttgttgt aatagacagg
181 ttgcacgtca ttttgacgta taattgggct ttgtgtaact tttgaaatta tttataattt
241 ttattgatgt gatttatttg agttaatcgt attgtttcgt tacatttttc atatgatatt
301 aatattttca gattgaatat aaa.
```

In certain embodiments, the piggyBac or piggyBac-like transposon comprises a sequence of:

```
(SEQ ID NO: 14539)
    1 agactgtttt ttttaaaagg cttataaagt attactattg cgtgatttaa ttttataaaa
  61 atatttaaaa ccagttgatt tttttaataa ttacctaatt ttaagaaaaa atgttagaag
121 cttgatattt ttgttgattt ttttctaaga tttgattaaa aggccataat tgtattaata
181 aagagtattt ttaacttcaa atttatttta tttattaatt aaaacttcaa ttatgataat
241 acatgcaaaa atatagttca tcaacagaaa aatataggaa aactctaata gttttatttt
301 tacacgtcat ttttacgtat gattgggctt tatagctagt caaatatgat tgggcttcta
361 gggttaa.
```

[0357] In certain embodiments of the methods of the disclosure, the transposase enzyme is a piggyBac or piggyBac-like transposase enzyme. In certain embodiments, the piggyBac or piggyBac-like transposase enzyme is isolated or derived from Megachile rotundata. The piggyBac (PB) or piggyBac-like transposase enzyme may comprise or consist of an amino acid sequence at least 5%, 10%, 15%, 20%, 25%, 30%, 35%, 40%, 45%, 50%, 55%, 60%, 65%. 70%. 75%. 80%. 85%. 90%. 95%. 99% or any percentage in between identical to:

```
(SEQ ID NO: 14540)
    1 MNGKDSLGEF YLDDLSDCLD CRSASSTDDE SDSSNIAIRK RCPIPLIYSD SEDEDMNNNV
  61 EDNNHFVKES NRYHYQIVEK YKITSKTKKW KDVTVTEMKK FLGLIILMGQ VKKDVLYDYW
121 STDPSIETPF FSKVMSRNRF LQIMQSWHFY NNNDISPNSH RLVKIQPVID YFKEKFNNVY
181 KSDQQLSLDE CLIPWRGRLS IKTYNPAKIT KYGILVRVLS EARTGYVSNF CVYAADGKKI
241 EETVLSVIGP YKNMWHHVYQ DNYYNSVNIA KIFLKNKLRV CGTIRKNRSL PQILQTVKLS
301 RGQHQFLRNG HTLLEVWNNG KRNVNMISTI HSAQMAESRN RSRTSDCPIQ KPISIIDYNK
361 YMKGVDRADQ YLSYYSIFRK TKKWTKRVVM FFINCALFNS FKVYTTLNGQ KITYKNFLHK
421 AALSLIEDCG TEEQGTDLPN SEPTTTRTTS RVDHPGRLEN FGKHKLVNIV TSGQCKKPLR
481 QCRVCASKKK LSRTGFACKY CNVPLHKGDC FERYHSLKKY.
```

[0358] In certain embodiments, the piggyBac or piggyBac-like transposon is isolated or derived from Megachile rotundata. In certain embodiments, the piggyBac or piggyBac-like transposon comprises a sequence of:

```
(SEQ ID NO: 14541)
    1 ttaaataatg cccactctag atgaacttaa cactttaccg accggccgtc gattattcga
  61 cgtttgctcc ccagcgctta ccgaccggcc atcgattatt cgacgtttgc ttcccagcgc
121 ttaccgaccg gtcatcgact tttgatcttt ccgttagatt tggttaggtc agattgacaa
181 gtagcaagca tttcgcattc tttattcaaa taatcggtgc ttttttctaa gctttagccc
241 ttagaa.
```

In certain embodiments, the piggyBac or piggyBac-like transposon comprises a sequence of:

```
(SEQ ID NO: 14542)
    1 acaacttctt ttttcaacaa atattgttat atggattatt tatttattta tttatttatg
  61 gtatatttta tgtttattta tttatggtta ttatggtata ttttatgtaa ataataaact
121 gaaaacgatt gtaatagatg aaataaatat tgttttaaca ctaatataat taaagtaaaa
181 gattttaata aatttcgtta ccctacaata acacgaagcg tacaatttta ccagagttta
241 ttaa.
```

[0359] In certain embodiments of the methods of the disclosure, the transposase enzyme is a piggyBac or piggyBac-like transposase enzyme. In certain embodiments, the piggyBac or piggyBac-like transposase enzyme is isolated or derived from Bombus impatiens. The piggyBac (PB) or piggyBac-like transposase enzyme may comprise or consist of an amino acid sequence at least 5%, 10%, 15%, 20%, 25%, 30%, 35%, 40%, 45%, 50%, 55%, 60%, 65%, 70%, 75%, 80%, 85%, 90%, 95%, 99% or any percentage in between identical to:

```
(SEQ ID NO: 14543)
    1 MNEKNGIGEF YLDDLSDCPD SYSRSNSGDE SDGSDTIIRK RGSVLPPRYS DSEDDEINNV
  61 EDNANNVENN DDIWSTNDEA IILEPFEGSP GLKIMPSSAE SVTDNVNLFF GDDFFEHLVR
121 ESNRYHYQVM EKYKIPSKAK KWTDITVPEM KKFLGLIVLM GQIKKDVLYD YWSTDPSIET
181 PFFSQVMSRN RFVQIMQSWH FCNNDNIPHD SHRLAKIQPV IDYFRRKFND VYKPCQQLSL
241 DESIIPWRGR LSIKTYNPAK ITKYGILVRV LSEAVTGYVC NFDVYAADGK KLEDTAVIEP
301 YKNIWHQIYQ DNYYNSVKMA RILLKNKVRV CGTIRKNRGL PRSLKTIQLS RGQYEFRRNH
361 QILLEVWNNG RRNVNMISTI HSAQLMESRS KSKRSDVPIQ KPNSIIDYNK YMKGVDRADQ
421 YLAYYSIFRK TKKWTKRVVM FFINCALFNS FRVYTILNGK NITYKNFLHK VAVSWIEDGE
481 TNCTEQDDNL PNSEPTRRAP RLDHPGRLSN YGKHKLINIV TSGRSLKPQR QCRVCAVQKK
541 RSRTCFVCKF CNVPLHKGDC FERYHTLKKY.
```

[0360] In certain embodiments, the piggyBac or piggyBac-like transposon is isolated or derived from Bombus impatiens. In certain embodiments, the piggyBac or piggyBac-like transposon comprises a sequence of:

```
(SEQ ID NO: 14544)
    1 ttaatttttt aacattttac cgaccgatag ccgattaatc gggtttttgc cgctgacgct
  61 taccgaccga taacctatta atcggctttt tgtcgtcgaa gcttaccaac ctatagccta
121 cctatagtta atcggttgcc atggcgataa acaatctttc tcattatatg agcagtaatt
181 tgttatttag tactaaggta ccttgctcag ttgcgtcagt tgcgttgctt tgtaagctcc
241 cacagtttta taccaattcg aaaaacttac cgttcgcg.
```

In certain embodiments, the piggyBac or piggyBac-like transposon comprises a sequence of:

```
(SEQ ID NO: 14545)
    1 actatttcac atttgaacta aaaaccgttg taatagataa aataaatata atttagtatt
  61 aatattatgg aaacaaaaga ttttattcaa tttaattatc ctatagtaac aaaaagcggc
121 caattttatc tgagcatacg aaaagcacag atactcccgc ccgacagtct aaaccgaaac
181 agagccggcg ccagggagaa tctgcgcctg agcagccggt cggacgtgcg tttgctgttg
241 aaccgctagt ggtcagtaaa ccagaaccag tcagtaagcc agtaactgat cagttaacta
301 gattgtatag ttcaaattga acttaatcta gtttttaagc gtttgaatgt tgtctaactt
361 cgttatatat tatattcttt ttaa.
```

[0361] In certain embodiments of the methods of the disclosure, the transposase enzyme is a piggyBac or piggyBac-like transposase enzyme. In certain embodiments, the piggyBac or piggyBac-like transposase enzyme is isolated or derived from Mamestra brassicae. The piggyBac (PB) or piggyBac-like transposase enzyme may comprise or consist of an amino acid sequence at least 5%, 10%, 15%, 20%, 25%, 30%, 35%, 40%, 45%, 50%, 55%, 60%, 65%, 70%, 75%, 80%, 85%, 90%, 95%, 99% or any percentage in between identical to:

```
(SEQ ID NO: 14546)
    1 MFSFVPNKEQ TRTVLIFCFH LKTTAAESHR PLVEAFGEQV PTVKTCERWF QRFKSGDFDV
  61 DDKEHGKPPK RYEDAELQAL LDEDDAQTQK QLAEQLEVSQ QAVSNRLREG GKIQKVGRWV
121 PHELNERQRE RRKNTCEILL SRYKRKSFLH RIVTGEEKWI FFVNPKRKKS YVDPGQPATS
181 TARPNRFGKK TRLCVWWDQS GVIYYELLKP GETVNTARYQ QQLINLNRAL QRKRPEYQKR
241 QHRVIFLHDN APSHTARAVR DTLETLNWEV LPHAAYSPDL APSDYHLFAS MGHALAEQRF
301 DSYESVEEWL DEWFAAKDDE FYWRGIHKLP ERWDNCVASD GKYFE.
```

[0362] In certain embodiments, the piggyBac or piggyBac-like transposon is isolated or derived from Mamestra brassicae. In certain embodiments, the piggyBac or piggyBac-like transposon comprises a sequence of:

```
(SEQ ID NO: 14547)
    1 ttattgggtt gcccaaaaag taattgcgga tttttcatat acctgtcttt taaacgtaca
  61 tagggatcga actcagtaaa actttgacct tgtgaaataa caaacttgac tgtccaacca
121 ccatagtttg gcgcgaattg agcgtcataa ttgttttgac tttttgcagt caac.
```

In certain embodiments, the piggyBac or piggyBac-like transposon comprises a sequence of:

(SEQ ID NO: 14548)
1 atgatttttt ctttttaaac caattttaat tagttaattg atataaaaat ccgcaattac
61 tttttgggca acccaataa.

[0363] In certain embodiments of the methods of the disclosure, the transposase enzyme is a piggyBac or piggyBac-like transposase enzyme. In certain embodiments, the piggyBac or piggyBac-like transposase enzyme is isolated or derived from Mayetiola destructor. The piggyBac (PB) or piggyBac-like transposase enzyme may comprise or consist of an amino acid sequence at least 5%, 10%, 15%, 20%, 25%, 30%, 35%, 40%, 45%, 50%, 55%, 60%, 65%, 70%, 75%, 80%, 85%, 90%, 95%, 99% or any percentage in between identical to:

```
(SEQ ID NO: 14549)
    1 MENFENWRKR RHLREVLLGH FFAKKTAAES HRLLVEVYGE HALAKTQCFE WFQRFKSGDF
  61 DTEDKERPGQ PKKFEDEELE ALLDEDCCQT QEELAKSLGV TQQAISKRLK AAGYIQKQGN
121 WVPHELKPRD VERRFCMSEM LLQRHKKKSF LSRIITGDEK WIHYDNSKRK KSYVKRGGRA
181 KSTPKSNLHG AKVMLCIWWD QRGVLYYELL EPGQTITGDL YRTQLIRLKQ ALAEKRPEYA
241 KRHGAVIFHH DNARPHVALP VKNYLENSGW EVLPHPPYSP DLAPSDYHLF RSMQNDLAGK
301 RFTSEQGIRK WLDSFLAAKP AKFFEKGIHE LSERWEKVIA SDGQYFE.
```

[0364] In certain embodiments, the piggyBac or piggyBac-like transposon is isolated or derived from Mayetiola destructor. In certain embodiments, the piggyBac or piggyBac-like transposon comprises a sequence of:

```
(SEQ ID NO: 14550)
    1 taagacttcc aaaatttcca cccgaacttt accttccccg cgcattatgt ctctcttttc
  61 accctctgat ccctggtatt gttgtcgagc acgatttata ttgggtgtac aacttaaaaa
121 ccggaattgg acgctagatg tccacactaa cgaatagtgt aaaagcacaa atttcatata
181 tacgtcattt tgaaggtaca tttgacagct atcaaaatca gtcaataaaa ctattctatc
241 tgtgtgcatc atattttttt attaact.
```

In certain embodiments, the piggyBac or piggyBac-like transposon comprises a sequence of:

```
(SEQ ID NO: 14551)
    1 tgcattcatt cattttgtta tcgaaataaa gcattaattt tcactaaaaa attccggttt
  61 ttaagttgta cacccaatat catccttagt gacaattttc aaatggcttt cccattgagc
121 tgaaaccgtg gctctagtaa gaaaaacgcc caacccgtca tcatatgcct tttttttctc
181 aacatccg.
```

[0365] In certain embodiments of the methods of the disclosure, the transposase enzyme is a piggyBac or piggyBac-like transposase enzyme. In certain embodiments, the piggyBac or piggyBac-like transposase enzyme is isolated or derived from Apis mellifera. The piggyBac (PB) or piggyBac-like transposase enzyme may comprise or consist of an amino acid sequence at least 5%, 10%, 15%, 20%, 25%, 30%, 35%, 40%, 45%, 50%, 55%, 60%, 65%, 70%, 75%, 80%, 85%, 90%, 95%, 99% or any percentage in between identical to:

```
(SEQ ID NO: 14552)
    1 MENQKEHYRH ILLFYFRKGK NASQAHKKLC AVYGDEALKE RQCQNWFDKF RSGDFSLKDE
  61 KRSGRPVEVD DDLIKAIIDS DRHSTTREIA EKLHVSHTCI ENHLKQLGYV QKLDTWVPHE
121 LKEKHLTQRI NSCDLLKKRN ENDPFLKRLI TGDEKWVVYN NIKRKRSWSR PREPAQTTSK
181 AGIHRKKVLL SVWWDYKGIV YFELLPPNRT INSVVYIEQL TKLNNAVEEK RPELTNRKGV
241 VFHHDNARPH TSLVTRQKLL ELGWDVLPHP PYSPDLAPSD YFLFRSLQNS LNGKNFNNDD
301 DIKSYLIQFF ANKNQKFYER GIMMLPERWQ KVIDQNGQHI TE.
```

[0366] In certain embodiments, the piggyBac or piggyBac-like transposon is isolated or derived from Apis mellifera. In certain embodiments, the piggyBac or piggyBac-like transposon comprises a sequence of:

```
(SEQ ID NO: 14553)
    1 ttgggttggc aactaagtaa ttgcggattt cactcataga tggcttcagt tgaattttta
  61 ggtttgctgg cgtagtccaa atgtaaaaca cattttgtta tttgatagtt ggcaattcag
121 ctgtcaatca gtaaaaaaag ttttttgatc ggttgcgtag ttttcgtttg gcgttcgttg
181 aaaa.
```

In certain embodiments, the piggyBac or piggyBac-like transposon comprises a sequence of:

(SEQ ID NO: 14554)
1 agttatttag ttccatgaaa aaattgtctt tgattttcta aaaaaaatcc gcaattactt
61 agttgccaat ccaa.

[0367] In certain embodiments of the methods of the disclosure, the transposase enzyme is a piggyBac or piggyBac-like transposase enzyme. In certain embodiments, the piggyBac or piggyBac-like transposase enzyme is isolated or derived from Messor bouvieri. The piggyBac (PB) or piggyBac-like transposase enzyme may comprise or consist of an amino acid sequence at least 5%, 10%, 15%, 20%, 25%, 30%, 35%, 40%, 45%, 50%, 55%, 60%, 65%, 70%, 75%, 80%, 85%, 90%, 95%, 99% or any percentage in between identical to:

```
(SEQ ID NO: 14555)
    1 MSSFVPENVH LRHALLFLFH QKKRAAESHR LLVETYGEHA PTIRTCETWF RQFKCGDFNV
  61 QDKERPGRPK TFEDAELQEL LDEDSTQTQK QLAEKLNVSR VAICERLQAM GKIQKMGRWV
121 PHELNDRQME NRKIVSEMLL QRYERKSFLH RIVTGDEKWI YFENPKRKKS WLSPGEAGPS
181 TARPNRFGRK TMLCVWWDQI GVVYYELLKP GETVNTDRYR QQMINLNCAL IEKRPQYAQR
241 HDKVILQHDN APSHTAKPVK EMLKSLGWEV LSHPPYSPDL APSDYHLFAS MGHALAEQHF
301 ADFEEVKKWL DEWFSSKEKL FFWNGIHKLS ERWTKCIESN GQYFE.
```

[0368] In certain embodiments, the piggyBac or piggyBac-like transposon is isolated or derived from Messor bouvieri. In certain embodiments, the piggyBac or piggyBac-like transposon comprises a sequence of:

```
(SEQ ID NO: 14556)
    1 agtcagaaat gacacctcga tcgacgacta atcgacgtct aatcgacgtc gattttatgt
  61 caacatgtta ccaggtgtgt cggtaattcc tttccggttt ttccggcaga tgtcactagc
121 cataagtatg aaatgttatg atttgataca tatgtcattt tattctactg acattaacct
181 taaaactaca caagttacgt tccgccaaaa taacagcgtt atagatttat aattttttga
241 aa.
```

In certain embodiments, the piggyBac or piggyBac-like transposon comprises a sequence of:

```
(SEQ ID NO: 14557)
    1 ataaatttga actatccatt ctaagtaacg tgttttcttt aacgaaaaaa ccggaaaaga
  61 attaccgaca ctcctggtat gtcaacatgt tattttcgac attgaatcgc gtcgattcga
121 agtcgatcga ggtgtcattt ctgact.
```

[0369] In certain embodiments of the methods of the disclosure, the transposase enzyme is a piggyBac or piggyBac-like transposase enzyme. In certain embodiments, the piggyBac or piggyBac-like transposase enzyme is isolated or derived from Trichoplusia ni. The piggyBac (PB) or piggyBac-like transposase enzyme may comprise or consist of an amino acid sequence at least 5%, 10%, 15%, 20%, 25%, 30%, 35%, 40%, 45%, 50%, 55%, 60%, 65%, 70%, 75%, 80%, 85%, 90%, 95%, 99% or any percentage in between identical to:

```
(SEQ ID NO: 14558)
    1 MGSSLDDEHI LSALLQSDDE LVGEDSDSEV SDHVSEDDVQ SDTEEAFIDE VHEVQPTSSG
  61 SEILDEQNVI EQPGSSLASN RILTLPQRTI RGKNKHCWST SKSTRRSRVS ALNIVRSQRG
121 PTRMCRNIYD PLLCFKLFFT DEIISEIVKW TNAEISLKRR ESMTSATFRD TNEDEIYAFF
181 GILVMTAVRK DNHMSTDDLF DRSLSMVYVS VMSRDRFDFL IRCLRMDDKS IRPTLRENDV
241 FTPVRKIWDL FIHQCIQNYT PGAHLTIDEQ LLGFRGRCPF RVYIPNKPSK YGIKILMMCD
301 SGTKYMINGM PYLGRGTQTN GVPLGEYYVK ELSKPVHGSC RNITCDNWFT SIPLAKNLLQ
361 EPYKLTIVGT VRSNKREIPE VLKNSRSRPV GTSMFCFDGP LTLVSYKPKP AKMVYLLSSC
421 DEDASINEST GKPQMVMYYN QTKGGVDTLD QMCSVMTCSR KTNRWPMALL YGMINIACIN
481 SFIIYSHNVS SKGEKVQSRK KFMRNLYMSL TSSFMRKRLE APTLKRYLRD NISNILPKEV
541 PGTSDDSTEE PVMKKRTYCT YCPSKIRRKA NASCKKCKKV ICREHNIDMC QSCF.
```

[0370] In certain embodiments, the piggyBac or piggyBac-like transposon is isolated or derived from Trichoplusia ni. In certain embodiments, the piggyBac or piggyBac-like transposon comprises a sequence of:

```
(SEQ ID NO: 14559)
    1 ttaaccctag aaagatagtc tgcgtaaaat tgacgcatgc attcttgaaa tattgctctc
  61 tctttctaaa tagcgcgaat ccgtcgctgt gcatttagga catctcagtc gccgcttgga
121 gctcccgtga ggcgtgcttg tcaatgcggt aagtgtcact gattttgaac tataacgacc
181 gcgtgagtca aaatgacgca tgattatctt ttacgtgact tttaagattt aactcatacg
241 ataattatat tgttatttca tgttctactt acgtgataac ttattatata tatattttct
301 tgttatagat atc.
```

In certain embodiments, the piggyBac or piggyBac-like transposon comprises a sequence of:

```
(SEQ ID NO: 14560)
    1 tttgttactt tatagaagaa attttgagtt tttgtttttt tttaataaat aaataaacat
  61 aaataaattg tttgttgaat ttattattag tatgtaagtg taaatataat aaaacttaat
121 atctattcaa attaataaat aaacctcgat atacagaccg ataaaacaca tgcgtcaatt
181 ttacgcatga ttatctttaa cgtacgtcac aatatgatta tctttctagg gttaa.
```

In certain embodiments, the piggyBac or piggyBac-like transposon comprises a sequence of:

```
(SEQ ID NO: 14561)
    1 ccctagaaag atagtctgcg taaaattgac gcatgcattc ttgaaatatt gctctctctt
  61 tctaaatagc gcgaatccgt cgctgtgcat ttaggacatc tcagtcgccg cttggagctc
121 ccgtgaggcg tgcttgtcaa tgcggtaagt gtcactgatt ttgaactata acgaccgcgt
181 gagtcaaaat gacgcatgat tatcttttac gtgactttta agatttaact catacgataa
241 ttatattgtt atttcatgtt ctacttacgt gataacttat tatatatata ttttcttgtt
301 atagatatc.
```

In certain embodiments, the piggyBac or piggyBac-like transposon comprises a sequence of:

```
(SEQ ID NO: 14562)
    1 tttgttactt tatagaagaa attttgagtt tttgtttttt tttaataaat aaataaacat
  61 aaataaattg tttgttgaat ttattattag tatgtaagtg taaatataat aaaacttaat
121 atctattcaa attaataaat aaacctcgat atacagaccg ataaaacaca tgcgtcaatt
181 ttacgcatga ttatctttaa cgtacgtcac aatatgatta tctttctagg g.
```

In certain embodiments, the piggyBac or piggyBac-like transposon comprises a sequence of:

```
(SEQ ID NO: 14609)
    1 tctaaatagc gcgaatccgt cgctgtgcat ttaggacatc tcagtcgccg cttggagctc
  61 ccgtgaggcg tgcttgtcaa tgcggtaagt gtcactgatt ttgaactata acgaccgcgt
121 gagtcaaaat gacgcatgat tatcttttac gtgactttta agatttaact catacgataa
181 ttatattgtt atttcatgtt ctacttacgt gataacttat tatatatata ttttcttgtt
241 atagatatc.
```

In certain embodiments, the piggyBac or piggyBac-like transposon comprises a sequence of:

```
(SEQ ID NO: 14610)
    1 tttgttactt tatagaagaa attttgagtt tttgtttttt tttaataaat aaataaacat
  61 aaataaattg tttgttgaat ttattattag tatgtaagtg taaatataat aaaacttaat
121 atctattcaa attaataaat aaacctcgat atacagaccg ataaaacaca tgcgtcaatt
181 ttacgcatga ttatctttaa cgtacgtcac aatatgatta tctttctagg g.
```

[0371] In certain embodiments, the piggyBac or piggyBac-like transposon comprises SEQ ID NO: 14561 and SEQ ID NO: 14562, and the piggyBac or piggyBac-like transposase comprises SEQ ID NO: 14558. In certain embodiments, the piggyBac or piggyBac-like transposon comprises SEQ ID NO: 14609 and SEQ ID NO: 14610, and the piggyBac or piggyBac-like transposase comprises SEQ ID NO: 14558.

[0372] In certain embodiments, the piggyBac or piggyBac-like transposon is isolated or derived from Aphis gossypii. In certain embodiments, the piggyBac or piggyBac-like transposon comprises an ITR sequence of CCTTCCAGCGGGCGCGC (SEQ ID NO: 14565).

[0373] In certain embodiments, the piggyBac or piggyBac-like transposon is isolated or derived from Chilo suppressalis. In certain embodiments, the piggyBac or piggyBac-like transposon comprises an ITR sequence of CCCAGATTAGCCT (SEQ ID NO: 14566).

[0374] In certain embodiments, the piggyBac or piggyBac-like transposon is isolated or derived from Heliothis virescens. In certain embodiments, the piggyBac or piggyBac-like transposon comprises an ITR sequence of CCCTTAATTACTCGCG (SEQ ID NO: 14567).

[0375] In certain embodiments, the piggyBac or piggyBac-like transposon is isolated or derived from Pectinophora gossypiella. In certain embodiments, the piggyBac or piggyBac-like transposon comprises an ITR sequence of CCCTAGATAACTAAAC (SEQ ID NO: 14568).

[0376] In certain embodiments, the piggyBac or piggyBac-like transposon is isolated or derived from Anopheles stephensi. In certain embodiments, the piggyBac or piggyBac-like transposon comprises an ITR sequence of CCCTAGAAAGATA (SEQ ID NO: 14569).

[0377] DNA transposons in the hAT family are widespread in plants and animals. A number of active hAT transposon systems have been identified and found to be functional, including but not limited to, the Hermes transposon, Ac transposon, hobo transposon, and the Tol2 transposon. The hAT family is composed of two families that have been classified as the AC subfamily and the Buster subfamily, based on the primary sequence of their transposases. Members of the hAT family belong to Class II transposable elements. Class II mobile elements use a cut and paste mechanism of transposition. hAT elements share similar transposases, short terminal inverted repeats, and an eight base-pairs duplication of genomic target.

[0378] Compositions and methods of the disclosure may comprise a TcBuster transposon and/or a TcBuster transposase.

[0379] Compositions and methods of the disclosure may comprise a TcBuster transposon and/or a hyperactive TcBuster transposase. A hyperactive TcBuster transposase demonstrates an increased excision and/or increased insertion frequency when compared to an excision and/or insertion frequency of a wild type TcBuster transposase. A hyperactive TcBuster transposase demonstrates an increased transposition frequency when compared to a transposition frequency of a wild type TcBuster transposase.

[0380] In some embodiments of the compositions and methods of the disclosure, a wild type TcBuster transposase comprises or consists of the amino acid sequence of:

```
(GenBank Accession No. ABF20545 and SEQ ID NO: 17900)
    1 MMLNWLKSGK LESQSQEQSS CYLENSNCLP PTLDSTDIIG EENKAGTTSR KKRKYDEDYL
  61 NFGFTWTGDK DEPNGLCVIC EQVVNNSSLN PAKLKRHLDT KHPTLKGKSE YFKRKCNELN
121 QKKHTFERYV RDDNKNLLKA SYLVSLRIAK QGEAYTIAEK LIKPCTKDLT TCVFGEKFAS
181 KVDLVPLSDT TISRRIEDMS YFCEAVLVNR LENAKCGFTL QMDESTDVAG LAILLVFVRY
241 IHESSFELDM LFCKALPTQT TGEEIFNLLN AYFEKHSIPW NLCYHICTDG AKAMVGVIKG
301 VIARIKKLVP DIKASHCCLH RHALAVKRIP NALHEVLNDA VKMINEIKSR PLNARVFALL
361 CDDLGSLHKN LLLHTEVRWL SRGKVLTRFW ELRDEIRIFF NEREFAGKIN DTSWLQNLAY
421 IADIFSYLNE VNLSLQGPNS TIFKVNSRIN SIKSKLKLWE ECITKNNTEC FANLNDFLET
481 SNTALDPNLK SNILEHLNGL KNTELEYFPP TCNNISWVEN PFNECGNVDT LPIKEREQLI
541 DIRTDTTLKS SFVPDGIGPF WIKLMDEFPE ISKRAVKELM PFVTTYLCEK SFSVYVATKT
601 KYRNRLDAED DMRLQLTTIH PDIDNLCNNK QAQKSH.
```

[0381] In some embodiments of the compositions and methods of the disclosure, a TcBuster Transposase comprises or consists of a sequence having at least 20%, 25%, 30%, 35%, 40%, 45%, 50%, 55%, 60%, 65%, 70%, 75%, 80%, 85%, 90%, 95%, 97%, 99% or any percentage identity in between to a wild type TcBuster transposase comprising or consisting of the amino acid sequence of:

```
(GenBank Accession No. ABF20545 and SEQ ID NO: 17900)
    1 MMLNWLKSGK LESQSQEQSS CYLENSNCLP PTLDSTDIIG EENKAGTTSR KKRKYDEDYL
  61 NFGFTWTGDK DEPNGLCVIC EQVVNNSSLN PAKLKRHLDT KHPTLKGKSE YFKRKCNELN
121 QKKHTFERYV RDDNKNLLKA SYLVSLRIAK QGEAYTIAEK LIKPCTKDLT TCVFGEKFAS
181 KVDLVPLSDT TISRRIEDMS YFCEAVLVNR LENAKCGFTL QMDESTDVAG LAILLVFVRY
241 IHESSFEEDM LFCKALPTQT TGEEIFNLLN AYFEKHSIPW NLCYHICTDG AKAMVGVIKG
301 VIARIKKLVP DIKASHCCLH RHALAVKRIP NALHEVLNDA VKMINFIKSR PLNARVFALL
361 CDDLGSLHKN LLLHTEVRWL SRGKVLTRFW ELRDEIRIFF NEREFAGKLN DTSWLQNLAY
421 IADIFSYLNE VNLSLQGPNS TIFKYNSRIN SIKSKLKLWE ECITKNNTEC FANLNDFLET
481 SNTALDPNLK SNILEHLNGL KNTFLEYFPP TCNNISWVEN PFNECGNVDT LPIKEREQLI
541 DIRTDTTLKS SFVPDGIGPF WIKLMDEFPE ISKRAVRELM PFVTTYLCEK SFSVYVKTKT
601 KYRNRLDAED DMRLQLTTIH PDIDNLCNNK QAQKSH.
```

[0382] In some embodiments of the compositions and methods of the disclosure, a wild type TcBuster transposase is encoded by a nucleic acid sequence comprising or consisting of:

```
(GenBank Accession No. DQ481197 and SEQ ID NO: 17901)
      1 atgatgttga attggctgaa aagtggaaag cttgaaagtc aatcacagga acagagttcc
    61 tgctaccttg agaactctaa ctgcctgcca ccaacactcg attctacaga tattatcggt
  121 gaagagaaca aagctggtac cacctctcgc aagaagcgga aatatgacga ggactatctg
  181 aacttcggtt ttacatggac tggcgacaag gatgagccca acggactttg tgtgatttgc
  241 gagcaggtag tcaacaattc ctcacttaac ccggccaaac tgaaacgcca tttggacaca
  301 aagcatccga cgcttaaagg caagagcgaa tacttcaaaa gaaaatgtaa cgagctcaat
  361 caaaagaagc atacttttga gcgatacgta agggacgata acaagaacct cctgaaagct
  421 tattatctcg tcagtttgag aatagctaaa cagggcgagg catataccat agcggagaag
  481 ttgatcaagc cttgcaccaa ggatctgaca acttgcgtat ttggagaaaa attcgcgagc
  541 aaagttgatc tcatccccct gtccgacaca actatttcaa ggcaaatcga agacatgaat
  501 tacttctgtg aagccgtgct agtgaacagg ttgaaaaatg ctaaatgtgg atttacgctg
  661 cagatggacg agtcaacaga tgttgccgat cttgcaatcc tgcttgtatt tgttaggtac
  721 atacatgaaa gctcttttga ggaggatatg ttgttctgca aagcacttcc cactcagacg
  781 acaggggagg agattttcaa tcttctcaat gcctatttcg aaaagcactc catcccatgg
  841 aatctgtgtt accacatttg cacagacggt gccaaggcaa tggtaggagt tattaaagga
  901 gtcatagcga gaataaaaaa actcgtccct gatataaaag ctagccactg ttgcctgcat
  961 cgccacgctt tggctgtaaa gcgaataccg aatgcattgc acgaggtgct caatgacgct
1021 gttaaaatga tcaacttcat caagtctcgg ccgttgaatg cgcgcgtctt cgctttgctg
1081 tgtgacgatt tggagagcct gcataaaaat cttcttcttc ataccgaagt gaggtggctg
1141 tctagaagaa aggtgctgac ccgattttgg gaactaagag atgaaattag aattttcttc
1201 aacgaaaggg aatttgccgg gaaattgaac gacaccagtt gattgcaaaa tttggcatat
1261 atagctgaca tattcagtta tctgaatgaa gttaatcttt ccctgcaagg gccgaatagc
1321 acaatcttca aggtaaatag ccgcattaac agtattaaat caaagttgaa gttgtgggaa
1381 gagtgtataa cgaaaaataa cactgagtgt tttgcgaacc tcaacgdttt tttggaaact
1441 tcaaacactg cgttggatcc aaacctgaag tctaatattt tggaacatct caacggtctt
1501 aagaacacct ttctggagta ttttccacct acgtgtaata atatctcctg ggtggagaat
1561 cctttcaatg aatgcggtaa cgtcgataca ctcccaataa aagagaggga acaattgatt
1621 gacatacgga ctgatacgac attgaaatct tcattcgtgc ctgatggtat aggaccattc
1681 tggatcaaac tgatggacga atttccagaa attagcaaac gagctgtcaa agagctcatg
1741 ccatttgtaa ccacttacct ctgtgagaaa tcattttccg tctatgtagc cacaaaaaca
1801 aaatatcgaa atagacttga tgctgaagac gatatacgac tccaacttac tactatccat
1861 ccagacattg acaacctttg taacaacaag caggctcaga aatcccactg a.
```

[0383] In some embodiments of the compositions and methods of the disclosure, a TcBuster Transposase comprises or consists of a sequence having at least 20%, 25%, 30%, 35%, 40%, 45%, 50%, 55%, 60%, 65%, 70%, 75%, 80%, 85%, 90%, 95%, 97%, 99% or any percentage identity in between to a wild type TcBuster transposase encoded by a nucleic acid sequence comprising or consisting of:

```
(GenBank Accession No. DQ481197 and SEQ ID NO: 17901)
      1 atgatgttga attggctgaa aagtggaaag cttgaaagtc aatcacagga acagagttcc
    61 tgctaccttg agaactctaa ctgcctgcca ccaacgctcg attctacaga tattatcggt
  121 gaagagaaca aagctggtac cacctctcgc aagaagcgga aatatgacga ggactatctg
  181 aacttcggtt ttacatggac tggcgacaag gatgagccca acggactttg tgtgatttgc
  241 gagcaggtag tcaacaattc ctcacttaac ccggccaaac tgaaacgcca tttggacaca
  301 aagcatccga cgcttaaagg caagagcgaa tacttcaaaa gaaaatgtaa cgagctcaat
  361 caaaagaagc atacttttga gcgatacgta agggacgata acaagaacct cctgaaagct
  421 tcttatctcg tcagtttgag aatagctaaa cagggcgagg catataccat agcggagaag
  481 ttgatcaagc cttgcaccaa ggatctgaca acttgcgtat ttggagaaaa attcgcgagc
  541 aaagttgatc tcgtccccct gtccgacacg actatttcaa ggcgaatcga agacatgagt
  501 tacttctgtg aagccgtgct ggtgaacagg ttgaaaaatg ctaaatgtgg gtttacgctg
  661 cagatggacg agtcaacaga tgttgccggt cttgcaatcc tgcttgtgtt tgttaggtac
  721 atacatgaaa gctcttttga ggaggatatg ttgttctgca aagcacttcc cactcagacg
  781 acaggggagg agattttcaa tcttctcaat gcctatttcg aaaagcactc catcccatgg
  841 aatctgtgtt accacatttg cacagacggt gccaaggcaa tggtaggagt tattaaagga
  901 gtcatagcga gaataaaaaa actcgtccct gatataaaag ctaaccactg ttgcctgcat
  961 cgccacactt tggctgtaaa acgaataccg aatgcattgc acgaggtgct caatgacgct
1021 gttaaaatga tcaacttcat caagtctcgg ccgttgaatg cgcgcgtctt cgctttgctg
1081 tgtgacgatt tggggagcct gcataaaaat cttcttcttc ataccgaagt gaggtggctg
1141 tctagaggaa aggtgctgac ccgattttgg gaactgagag atgaaattag aattttcttc
1201 aacgaaaggg aatttgccgg gaaattgaac gacaccagtt ggttgcaaaa tttggcatat
1251 atagctgaca tattcagtta tctgaatgaa gttaatcttt ccctgcaagg gccgaatagc
1321 acaatcttca aggtaaatag ccgcattaac agtattaaat caaagttgaa gttgtgggaa
1381 gagtgtataa cgaaaaataa cactgagtgt tttgcgaacc tcaacgattt tttggaaact
1441 tcaaacactg cgttggatcc aaacctgaaa tctaatattt tgaaacatct caacggtctt
1501 aagaacacct ttctggagta ttttccacct acgtgtaata atatctcctg aatggagaat
1561 cctttcaatg aatacggtaa cgtcgataca ctcccaataa aaaagaggga acaattgatt
1621 gacatacgga ctgatacgac attgaaatct tcattcgtgc ctgatggtat aggaccattc
1681 tggatcaaac tgatggacga atttccagaa attagcaaac gagctgtcaa agagctcatg
1741 ccatttgtaa ccacttacct ctgtgagaaa tcattttccg tctatgtagc cacaaaaaca
1801 aaatatcgaa atagacttga tgctgaagac gatatgcgac tccaacttac tactatccat
1861 ccagacattg acaacctttg taacaacaag caggctcaga aatcccactg a.
```

[0384] In some embodiments of the compositions and methods of the disclosure, a TcBuster Transposase comprises or consists of a naturally occurring amino acid sequence.

[0385] In some embodiments of the compositions and methods of the disclosure, a TcBuster Transposase comprises or consists of a non-naturally occurring amino acid sequence.

[0386] In some embodiments of the compositions and methods of the disclosure, a TcBuster Transposase is encoded by a sequence comprising or consisting of a naturally occurring nucleic acid sequence.

[0387] In some embodiments of the compositions and methods of the disclosure, a TcBuster Transposase is encoded by a sequence comprising or consisting of a non-naturally occurring nucleic acid sequence.

[0388] In some embodiments of the compositions and methods of the disclosure, a mutant TcBuster Transposase comprises one or more sequence variations when compared to a wild type TcBuster Transposase. In some embodiments, the wild type TcBuster Transposase comprises or consists of the amino acid sequence of SEQ ID NO: 17900. In some embodiments, the wild type TcBuster Transposase is encoded by a sequence comprising or consisting of the nucleic acid sequence of SEQ ID NO: 17901. In some embodiments, the one or more sequence variations comprises one or more of a substitution, inversion, insertion, deletion, transposition, and frameshift. In some embodiments, the one or more sequence variations comprises a modified, synthetic, artificial or non-naturally occurring amino acid. In some embodiments, the one or more sequence variations comprises a modified, synthetic, artificial or non-naturally occurring nucleic acid.

[0389] In some embodiments of the compositions and methods of the disclosure, a mutant TcBuster Transposase comprises one or more sequence variations when compared to a wild type TcBuster Transposase. In some embodiments, the one or more sequence variations comprises an amino acid substitution in one or more of a DNA Binding and Oligomerization domain, an insertion domain and a Zn-BED domain.

[0390] In some embodiments of the compositions and methods of the disclosure, a mutant TcBuster Transposase comprises one or more sequence variations when compared to a wild type TcBuster Transposase. In some embodiments, the one or more sequence variations comprises an amino acid substitution that increases a net charge a neutral pH when compared to a wild type TcBuster Transposase. In some embodiments, the wild type TcBuster Transposase comprises or consists of the amino acid sequence of SEQ ID NO: 17900. In some embodiments, the wild type TcBuster Transposase is encoded by a sequence comprising or consisting of the nucleic acid sequence of SEQ ID NO: 17901. In some embodiments, the one or more sequence variations comprises an amino acid substitution of the aspartic acid (D) at position 223 (D223), the aspartic acid (D) at position 289 (D289) and the aspartic acid (E) at position 589 (E289) of SEQ ID NO: 17900. In some embodiments, the one or more sequence variations comprises an amino acid substitution within 5, 10, 15, 20, 25, 30, 35, 40, 45, 50, 55, 60, 65, 70, 75, 80, 85, 90, 95, 100 or any number of amino acids in between of position 223, 289 and/or 289 of SEQ ID NO: 17900. In some embodiments, the one or more sequence variations comprises an amino acid substitution within 70 amino acids of position 223, 289 and/or 289 of SEQ ID NO: 17900. In some embodiments, the one or more sequence variations comprises an amino acid substitution within 80 amino acids of position 223, 289 and/or 289 of SEQ ID NO: 17900. In some embodiments, the one or more sequence variations comprises an amino acid substitution of an aspartic acid (D) or a aspartic acid (E) to a neutral amino acid, a lysine (L) or an arginine (R) (e.g. D223L, D223R, D289L, D289R, E289L, E289R of SEQ ID NO: 17900).

[0391] In some embodiments of the compositions and methods of the disclosure, a mutant TcBuster Transposase comprises one or more sequence variations when compared to a wild type TcBuster Transposase. In some embodiments, the one or more sequence variations comprises one or more of Q82E, N85S, D99A, D132A, Q151S, Q151A, E153K, E153R, A154P, Y155H, E159A, T171K, T171R, K177E, D183K, D183R, D189A, T191E, S193K, S193R, Y201A, F202D, F202K, C2031, C203V, Q221T, M222L, I223Q, E224G, S225W, D227A, R239H, E243A, E247K, P257K, P257R, Q258T, E263A, E263K, E263R, E274K, E274R, S278K, N281E, L282K, L282R, K292P, V297K, K2995, A303T, H322E, A332S, A358E, A358K, A358S, D376A, V377T, L380N, I398D, I398S, I398K, F400L, V431L, S447E, N450K, N450R, I452F, E469K, K469K, P510D, P510N, E517R, R536S, V553S, P554T, P559D, P559S, P559K, K573E, E578L, K590T, Y595L, V596A, T598I, K599A, Q615A, T618K, T618K, T618R, D622K and D622R of SEQ ID NO: 17900. In some embodiments, the one or more sequence variations comprises an amino acid substitution within 5, 10, 15, 20, 25, 30, 35, 40, 45, 50, 55, 60, 65, 70, 75, 80, 85, 90, 95, 100 or any number of amino acids in between of position 154, 155, 159, 171, 177, 183, 189, 191, 193, 201, 202, 203, 221, 223, 224, 225, 227, 239, 243, 247, 257, 258, 263, 274, 278, 281, 282, 292, 297, 299, 303, 322, 332, 358, 376, 377, 380, 398, 400, 431, 447, 450, 452, 469, 510, 517, 536, 553, 554, 559, 573, 578, 590, 595, 596, 598, 599, 615, 618, and 622 of SEQ ID NO: 17900.

[0392] In some embodiments of the compositions and methods of the disclosure, a mutant TcBuster Transposase comprises one or more sequence variations when compared to a wild type TcBuster Transposase. In some embodiments, the one or more sequence variations comprises one or more of E247K, V297K, A358K, S278K, E247R, E274R, V297R, A358R, S278R, T171R, D183R, S193R, P257K, E263R, L282K, T618K, D622R, E153K, N450K, T171K, D183K, S193K, P257R, E263K, L282R, T618R, D622K, E153R and N450R of SEQ ID NO: 17900. In some embodiments, the one or more sequence variations comprises an amino acid substitution within 5, 10, 15, 20, 25, 30, 35, 40, 45, 50, 55, 60, 65, 70, 75, 80, 85, 90, 95, 100 or any number of amino acids in between of position 153, 171, 183, 193, 247, 257, 263, 274, 278, 282, 297, 358, 450, 618, 622 of SEQ ID NO: 17900.

[0393] In some embodiments of the compositions and methods of the disclosure, a mutant TcBuster Transposase comprises one or more sequence variations when compared to a wild type TcBuster Transposase. In some embodiments, the one or more sequence variations comprises one or more of V377T/E469K, V377T/E469K/R536S, A332S, V553S/P554T, E517R, K299S, Q615A/T618K, S278K, A303I, P510D, P510N, N281S, N281E, K590T, Q258T, E247K, S447E, N85S, V297K, A358K, I452F, V377T/E469K/D189A, K573E/E578L, I452FN377T/E469K/D189A, A358KN377T/E469K/D189A, K573E/E578L/V377T/E469K/D189A, T171R, D183R, S193R, P257K, E263R, L282K, T618K, D622R, E153K, N450K, T171K, D183K, S193K, P257R, E263K, L282R, T618R, D622K, E153R, N450R, E247K/E274KN297K/A358K of SEQ ID NO: 17900. In some embodiments, the one or more sequence variations comprises an amino acid substitution within 5, 10, 15, 20, 25, 30, 35, 40, 45, 50, 55, 60, 65, 70, 75, 80, 85, 90, 95, 100 or any number of amino acids in between of position 85, 153, 171, 189, 193, 247, 257, 258, 263, 274, 278, 281, 282, 297, 299, 303, 332, 358, 377, 450, 469, 447, 452, 469, 510, 517, 536, 553, 554, 573, 578, 590, 615, 618, 622 of SEQ ID NO: 17900.

[0394] In some embodiments of the compositions and methods of the disclosure, a mutant TcBuster Transposase comprises one or more sequence variations when compared to a wild type TcBuster Transposase. In some embodiments, the one or more sequence variations comprises one or more of V377T/E469K, V377T/E469K/R536S, V553S/P554T, Q615A/T618K, S278K, A303T, P510D, P510N, N281S, N281E, K590T, Q258T, E247K, S447E, N85S, V297K, A358K, I452F, V377T/E469K/D189A and K573E/E578L. In some embodiments, the one or more sequence variations comprises an amino acid substitution within 5, 10, 15, 20, 25, 30, 35, 40, 45, 50, 55, 60, 65, 70, 75, 80, 85, 90, 95, 100 or any number of amino acids in between of position 85, 189, 247, 258, 278, 281, 297, 303, 358, 377, 447, 452, 469, 510, 536, 553, 554, 573, 578, 590, 615, 618 of SEQ ID NO: 17900.

[0395] In some embodiments of the compositions and methods of the disclosure, a mutant TcBuster Transposase comprises one or more sequence variations when compared to a wild type TcBuster Transposase. In some embodiments, the one or more sequence variations comprises one or more of Q151S, Q151A, A154P, Q615A, V553S, Y155H, Y201A, F202D, F202K, C2031, C203V, F400L, I398D, I398S, I398K, V431L, P559D, P559S, P559K, M222L of SEQ ID NO: 17900. In some embodiments, the one or more sequence variations comprises an amino acid substitution within 5, 10, 15, 20, 25, 30, 35, 40, 45, 50, 55, 60, 65, 70, 75, 80, 85, 90, 95, 100 or any number of amino acids in between of position 151, 154, 615, 553, 155, 201, 202, 203, 400, 398, 431, 559, 222 of SEQ ID NO: 17900.

[0396] In some embodiments of the compositions and methods of the disclosure, a mutant TcBuster Transposase comprises one or more sequence variations when compared to a wild type TcBuster Transposase. In some embodiments, the one or more sequence variations comprises one or more of V377T, E469K, and D189A, when numbered in accordance with SEQ ID NO: 17900.

[0397] In some embodiments of the compositions and methods of the disclosure, a mutant TcBuster Transposase comprises one or more sequence variations when compared to a wild type TcBuster Transposase. In some embodiments, the one or more sequence variations comprises one or more of K573E and E578L, when numbered in accordance with SEQ ID NO: 17900.

[0398] In some embodiments, the mutant TcBuster transposase comprises amino acid substitution I452K, when numbered in accordance with SEQ ID NO: 17900.

[0399] In some embodiments of the compositions and methods of the disclosure, a mutant TcBuster Transposase comprises one or more sequence variations when compared to a wild type TcBuster Transposase. In some embodiments, the one or more sequence variations comprises one or more of A358K, when numbered in accordance with SEQ ID NO: 17900.

[0400] In some embodiments of the compositions and methods of the disclosure, a mutant TcBuster Transposase comprises one or more sequence variations when compared to a wild type TcBuster Transposase. In some embodiments, the one or more sequence variations comprises one or more of V297K, when numbered in accordance with SEQ ID NO: 17900.

[0401] In some embodiments of the compositions and methods of the disclosure, a mutant TcBuster Transposase comprises one or more sequence variations when compared to a wild type TcBuster Transposase. In some embodiments, the one or more sequence variations comprises one or more of N85S, when numbered in accordance with SEQ ID NO: 17900.

[0402] In some embodiments of the compositions and methods of the disclosure, a mutant TcBuster Transposase comprises one or more sequence variations when compared to a wild type TcBuster Transposase. In some embodiments, the one or more sequence variations comprises one or more of I452F, V377T, E469K, and D189A, when numbered in accordance with SEQ ID NO: 17900.

[0403] In some embodiments of the compositions and methods of the disclosure, a mutant TcBuster Transposase comprises one or more sequence variations when compared to a wild type TcBuster Transposase. In some embodiments, the one or more sequence variations comprises one or more of A358K, V377T, E469K, and D189A, when numbered in accordance with SEQ ID NO: 17900.

[0404] In some embodiments of the compositions and methods of the disclosure, a mutant TcBuster Transposase comprises one or more sequence variations when compared to a wild type TcBuster Transposase. In some embodiments, the one or more sequence variations comprises one or more of V377T, E469K, D189A, K573E and E578L, when numbered in accordance with SEQ ID NO: 17900.

[0405] In some embodiments of the compositions and methods of the disclosure, a TcBuster Transposase recognizes a 5′ inverted repeat comprising or consisting of the sequence of:

```
(SEQ NO: 17902)
    1 Cagtgttctt caacctttgc catccggcgg aaccctttgt cgagatattt ttttttatgg
  61 aacccttcat ttagtaatac acccagatga gattttaggg acagctgcgt tgacttgtta
121 cgaacaaggt gagcccgtgc tttggtctag ccaagaacat ggtaaagact atattcgcgg
181 cgttgtgaca atttaccgaa caactccgcg gccgggaagc cgatctcggc ttgaacgaat
241 tgttaggtgg cggtacttgg gtcgatatca aagtgcatca cttcttcccg tatgcccaac
301 tttgtataga gagccactgc gggatcgtca ccgtaatctg cttgcacgta gatcacataa
361 gcaccaagcg cgttggcctc atgcttgagg agattaatga gcgcggtggc aatgccctgc
421 ctccggtgct cgccggagac tgcgagatca tagatata
```

[0406] In some embodiments of the compositions and methods of the disclosure, a TcBuster Transposase recognizes a 3′ inverted repeat comprising or consisting of the sequence of:

```
(SEQ ID NO: 17903)
    1 gatatcaagc ttatcgatac cgtcgacctc gagatttctg aacaattcta ggttaggatc
  61 aaacaaaata caatttattt taaaactgta agttaactta cctttgcttg tctaaaccaa
121 aaacaacaac aaaactacga ccacaagtac agttacatat ttttgaaaat taaggttaag
181 tgcagtgtaa gtcaactatg cgaatggata acatgtttca acatgaaact ccgattgacg
241 catgtgcatt ctgaagagcg gcgcggccga cgtctctcga attgaagcaa tgactcgcgg
301 aaccccgaaa gcctttgggt ggaaccctag ggttccgcgg aacacaggtt gaagaacact
361 g
```

[0407] In some embodiments of the compositions and methods of the disclosure, a TcBuster Transposase recognizes a 5′ inverted repeat comprising or consisting of the sequence of SEQ ID NO: 17902 and a 3′ inverted repeat comprising or consisting of the sequence of SEQ ID NO: 17903.

[0408] In some embodiments of the compositions and methods of the disclosure, a TcBuster Transposase recognizes a 5′ inverted repeat comprising or consisting of the sequence of:

```
(SEQ ID NO: 17904)
    1 Cctgcaggag tgttcttcaa cctttgccat ccggcggaac cctttgtcga gatatttttt
  61 tttatggaac ccttcattta gtaatacacc cagatgagat tttagggaca gctgcgttga
121 cttgttacga acaaggtgag cccgtgcttt ggtaataaaa actctaaata agatttaaat
181 ttgcatttat ttaaacaaac tttaaacaaa aagataaata ttccaaataa aataatatat
241 aaaataaaaa ataaaaatta atgacttttt tgcgcttgct tattattgca caaattatca
301 atatcaagat ggatcgttgt ttttt.
```

[0409] In some embodiments of the compositions and methods of the disclosure, a TcBuster Transposase recognizes a 3′ inverted repeat comprising or consisting of the sequence of:

```
(SEQ ID NO: 17905)
    1 Gagccaattc agcatcatat ttctgaacga ttctaggtta ggatcaaaca aaatacaatt
  61 tattttaaaa ctgtaagtta acttaccttt gcttgtctaa acctaaaaca acaacaaaac
121 tacgaccaca agtacagtta catatttttg aaaattaagg ttaagtgcag tataagtcaa
181 ctatgcgaat ggataacatg tttcaacata aaactccgat tgacgcatgt gcattctgaa
241 gagcggcgcg gccgacgtct ctcgaattga agcaatgact cgcggaaccc cgaaagcctt
301 tgggtggaac cctagggttc cgcggaacac aggttgaaga acactg.
```

[0410] In some embodiments of the compositions and methods of the disclosure, a TcBuster Transposase recognizes a 5′ inverted repeat comprising or consisting of the sequence of SEQ ID NO: 17904 and a 3′ inverted repeat comprising or consisting of the sequence of SEQ ID NO: 17905.

[0411] In some embodiments of the compositions and methods of the disclosure, a TcBuster Transposase recognizes an inverted repeat comprising or consisting of a sequence having at least 5%, 10%, 15%, 20%, 25%, 30%, 35%, 40%, 45%, 50%, 55%, 60%, 65%, 70%, 75%, 80%, 85%, 90%, 95,% 97%, 99% or any percentage identify in between to one or more of SEQ ID NO: 17902, 17903, 17904 or 17905.

[0412] In some embodiments of the compositions and methods of the disclosure, a TcBuster Transposase recognizes an inverted repeat comprising or consisting of a sequence having at least In some embodiments of the compositions and methods of the disclosure, a TcBuster Transposase recognizes an inverted repeat comprising or consisting of a sequence having at least 5, 10, 15, 20, 25, 30, 35, 40, 45, 50, 55, 60, 65, 70, 75, 80, 85, 90, 95, 97, 99 or any number of contiguous nucleotides in between having between 90 and 100% identity to SEQ ID NO: 17902, 17903, 17904 or 17905 or any portion thereof.

[0413] In some embodiments of the compositions and methods of the disclosure, a TcBuster Transposase recognizes an inverted repeat comprising or consisting of a sequence having at least 5, 10, 15, 20, 25, 30, 35, 40, 45, 50, 55, 60, 65, 70, 75, 80, 85, 90, 95, 97, 99 or any number of discontinuous nucleotides in between having between 90 and 100% identity to SEQ ID NO: 17902, 17903, 17904 or 17905 or any portion thereof.

[0414] In some embodiments of the compositions and methods of the disclosure, a TcBuster transposon comprises a 3′ inverted repeat and a 5′ inverted repeat. In some embodiments of the compositions and methods of the disclosure, a TcBuster Transposase recognizes a TcBuster transposon comprising a 3′ inverted repeat and a 5′ inverted repeat comprising or consisting of a sequence having at least 5, 10, 15, 20, 25, 30, 35, 40, 45, 50, 55, 60, 65, 70, 75, 80 85, 90, 95, 97, 99 or any number of discontinuous nucleotides in between having between 90 and 100% identity to SEQ ID NO: 17902, 17903, 17904 or 17905 or any portion thereof

### Non-Transposition Based Methods of Genetic Modification

[0415] In some embodiments of the methods of the disclosure, a modified HSCor modified HSC descendent cell of the disclosure may be produced by introducing a transgene into an HSC or an HSC descendent cell of the disclosure. The introducing step may comprise delivery of a nucleic acid sequence and/or a genomic editing construct via a non-transposition delivery system.

[0416] In some embodiments of the methods of the disclosure, introducing a nucleic acid sequence and/or a genomic editing construct into an HSC or HSC descendent cell ex vivo, in vivo, in vitro or in situ comprises one or more of topical delivery, adsorption, absorption, electroporation, spin-fection, co-culture, transfection, mechanical delivery, sonic delivery, vibrational delivery, magnetofection or by nanoparticle-mediated delivery. In some embodiments of the methods of the disclosure, introducing a nucleic acid sequence and/or a genomic editing construct into an HSC or HSC descendent cell ex vivo, in vivo, in vitro or in situ comprises liposomal transfection, calcium phosphate transfection, fugene transfection, and dendrimer-mediated transfection. In some embodiments of the methods of the disclosure, introducing a nucleic acid sequence and/or a genomic editing construct into an HSC or HSC descendent cell ex vivo, in vivo, in vitro or in situ by mechanical transfection comprises cell squeezing, cell bombardment, or gene gun techniques. In some embodiments of the methods of the disclosure, introducing a nucleic acid sequence and/or a genomic editing construct into an HSC or HSC descendent cell ex vivo, in vivo, in vitro or in situ by nanoparticle-mediated transfection comprises liposomal delivery, delivery by micelles, and delivery by polymerosomes.

[0417] In some embodiments of the methods of the disclosure, introducing a nucleic acid sequence and/or a genomic editing construct into an HSC or HSC descendent cell ex vivo, in vivo, in vitro or in situ comprises a non-viral vector. In some embodiments, the non-viral vector comprises a nucleic acid. In some embodiments, the non-viral vector comprises plasmid DNA, linear double-stranded DNA (dsDNA), linear single-stranded DNA (ssDNA), DoggyBone™ DNA, nanoplasmids, minicircle DNA, single-stranded oligodeoxynucleotides (ssODN), DDNA oligonucleotides, single-stranded mRNA (ssRNA), and double-stranded mRNA (dsRNA). In some embodiments, the non-viral vector comprises a transposon of the disclosure.

[0418] In some embodiments of the methods of the disclosure, introducing a nucleic acid sequence and/or a genomic editing construct into an HSC or HSC descendent cell ex vivo, in vivo, in vitro or in situ comprises a viral vector. In some embodiments, the viral vector is a non-integrating non-chromosomal vector. Exemplary non-integrating non-chromosomal vectors include, but are not limited to, adeno-associated virus (AAV), adenovirus, and herpes viruses. In some embodiments, the viral vector is an integrating chromosomal vector. Integrating chromosomal vectors include, but are not limited to, adeno-associated vectors (AAV), Lentiviruses, and gamma-retroviruses.

[0419] In some embodiments of the methods of the disclosure, introducing a nucleic acid sequence and/or a genomic editing construct into an HSC or HSC descendent cell ex vivo, in vivo, in vitro or in situ comprises a combination of vectors. Exemplary, non-limiting vector combinations include: viral and non-viral vectors, a plurality of non-viral vectors, or a plurality of viral vectors. Exemplary but non-limiting vectors combinations include: a combination of a DNA-derived and an RNA-derived vector, a combination of an RNA and a reverse transcriptase, a combination of a transposon and a transposase, a combination of a non-viral vector and an endonuclease, and a combination of a viral vector and an endonuclease.

[0420] In some embodiments of the methods of the disclosure, genome modification comprising introducing a nucleic acid sequence and/or a genomic editing construct into an HSC or HSC descendent cell ex vivo, in vivo, in vitro or in situ stably integrates a nucleic acid sequence, transciently integrates a nucleic acid sequence, produces site-specific integration a nucleic acid sequence, or produces a biased integration of a nucleic acid sequence. In some embodiments, the nucleic acid sequence is a transgene.

[0421] In some embodiments of the methods of the disclosure, genome modification comprising introducing a nucleic acid sequence and/or a genomic editing construct into an HSC or HSC descendent cell ex vivo, in vivo, in vitro or in situ stably integrates a nucleic acid sequence. In some embodiments, the stable chromosomal integration can be a random integration, a site-specific integration, or a biased integration. In some embodiments, the site-specific integration can be non-assisted or assisted. In some embodiments, the assisted site-specific integration is co-delivered with a site-directed nuclease. In some embodiments, the site-directed nuclease comprises a transgene with 5′ and 3′ nucleotide sequence extensions that contain a percentage homology to upstream and downstream regions of the site of genomic integration. In some embodiments, the transgene with homologous nucleotide extensions enable genomic integration by homologous recombination, microhomology-mediated end joining, or nonhomologous end-joining. In some embodiments the site-specific integration occurs at a safe harbor site. Genomic safe harbor sites are able to accommodate the integration of new genetic material in a manner that ensures that the newly inserted genetic elements function reliably (for example, are expressed at a therapeutically effective level of expression) and do not cause deleterious alterations to the host genome that cause a risk to the host organism. Potential genomic safe harbors include, but are not limited to, intronic sequences of the human albumin gene, the adeno-associated virus site 1 (AAVS1), a naturally occurring site of integration of AAV virus on chromosome 19, the site of the chemokine (C-C motif) receptor 5 (CCRS) gene and the site of the human ortholog of the mouse Rosa26 locus.

[0422] In some embodiments, the site-specific transgene integration occurs at a site that disrupts expression of a target gene. In some embodiments, disruption of target gene expression occurs by site-specific integration at introns, exons, promoters, genetic elements, enhancers, suppressors, start codons, stop codons, and response elements. In some embodiments, exemplary target genes targeted by site-specific integration include but are not limited to TRAC, TRAB, PDI, any immunosuppressive gene, and genes involved in allo-rejection.

[0423] In some embodiments, the site-specific transgene integration occurs at a site that results in enhanced expression of a target gene. In some embodiments, enhancement of target gene expression occurs by site-specific integration at introns, exons, promoters, genetic elements, enhancers, suppressors, start codons, stop codons, and response elements.

[0424] In some embodiments of the methods of the disclosure, enzymes may be used to create strand breaks in the host genome to facilitate delivery or integration of the transgene. In some embodiments, enzymes create single-strand breaks. In some embodiments, enzymes create double-strand breaks. In some embodiments, examples of break-inducing enzymes include but are not limited to: transposases, integrases, endonucleases, CRISPR-Cas9, transcription activator-like effector nucleases (TALEN), zinc finger nucleases (ZFN), Cas-CLOVER™, and CPF1. In some embodiments, break-inducing enzymes can be delivered to the cell encoded in DNA, encoded in mRNA, as a protein, as a nucleoprotein complex with a guide RNA (gRNA).

[0425] In some embodiments of the methods of the disclosure, the site-specific transgene integration is controlled by a vector-mediated integration site bias. In some embodiments vector-mediated integration site bias is controlled by the chosen lentiviral vector. In some embodiments vector-mediated integration site bias is controlled by the chosen gamma-retroviral vector.

[0426] In some embodiments of the methods of the disclosure, the site-specific transgene integration site is a non-stable chromosomal insertion. In some embodiments, the integrated transgene may become silenced, removed, excised, or further modified.

[0427] In some embodiments of the methods of the disclosure, the genome modification is a non-stable integration of a transgene. In some embodiments, the non-stable integration can be a transient non-chromosomal integration, a semi-stable non chromosomal integration, a semi-persistent non-chromosomal insertion, or a non-stable chromosomal insertion. In some embodiments, the transient non-chromosomal insertion can be epi-chromosomal or cytoplasmic.

[0428] In some embodiments, the transient non-chromosomal insertion of a transgene does not integrate into a chromosome and the modified genetic material is not replicated during cell division.

[0429] In some embodiments of the methods of the disclosure, the genome modification is a semi-stable or persistent non-chromosomal integration of a transgene. In some embodiments, a DNA vector encodes a Scaffold/matrix attachment region (S-MAR) module that binds to nuclear matrix proteins for episomal retention of a non-viral vector allowing for autonomous replication in the nucleus of dividing cells.

[0430] In some embodiments of the methods of the disclosure, the genome modification is a non-stable chromosomal integration of a transgene. In some embodiments, the integrated transgene may become silenced, removed, excised, or further modified.

[0431] In some embodiments of the methods of the disclosure, the modification to the genome by transgene insertion can occur via host cell-directed double-strand breakage repair (homology-directed repair) by homologous recombination (HR), microhomology-mediated end joining (MMEJ), nonhomologous end joining (NHEJ), transposase enzyme-mediated modification, integrase enzyme-mediated modification, endonuclease enzyme-mediated modification, or recombinant enzyme-mediated modification. In some embodiments, the modification to the genome by transgene insertion can occur via CRISPR-Cas9, TALEN, ZFNs, Cas-CLOVER, and cpfl.

[0432] In gene editing systems that involve inserting new or existing nucleotides/nucleic acids, insertion tools (e.g. DNA template vectors, transposable elements (transposons or retrotransposons) must be delivered to the cell in addition to the cutting enzyme (e.g. a nuclease, recombinase, integrase or transposase). Examples of such insertion tools for a recombinase may include a DNA vector. Other gene editing systems require the delivery of an integrase along with an insertion vector, a transposase along with a transposon/retrotransposon, etc. In some embodiments, an example recombinase that may be used as a cutting enzyme is the CRE recombinase. In various embodiments, example integrases that may be used in insertion tools include viral based enzymes taken from any of a number of viruses including, but not limited to, AAV, gamma retrovirus, and lentivirus. Example transposons/retrotransposons that may be used in insertion tools include, but are not limited to, the piggyBac transposon, Sleeping Beauty transposon, and the L1 retrotransposon.

[0433] In certain embodiments of the methods of the disclosure, the transgene is delivered in vivo. In certain embodiments of the methods of the disclosure, in vivo transgene delivery can occur by: topical delivery, adsorption, absorption, electroporation, spin-fection, co-culture, transfection, mechanical delivery, sonic delivery, vibrational delivery, magnetofection or by nanoparticle-mediated delivery. In certain embodiments of the methods of the disclosure, in vivo transgene delivery by transfection can occur by liposomal transfection, calcium phosphate transfection, fugene transfection, and dendrimer-mediated transfection. In certain embodiments of the methods of the disclosure, in vivo mechanical transgene delivery can occur by cell squeezing, bombardment, and gene gun. In certain embodiments of the methods of the disclosure, in vivo nanoparticle-mediated transgene delivery can occur by liposomal delivery, delivery by micelles, and delivery by polymerosomes. In various embodiments, nucleases that may be used as cutting enzymes include, but are not limited to, Cas9, transcription activator-like effector nucleases (TALENs) and zinc finger nucleases.

[0434] In certain embodiments of the methods of the disclosure, non-viral vectors are used for transgene delivery. In certain embodiments, the non-viral vector is a nucleic acid. In certain embodiments, the nucleic acid non-viral vector is plasmid DNA, linear double-stranded DNA (dsDNA), linear single-stranded DNA (ssDNA), DoggyBone™ DNA, nanoplasmids, minicircle DNA, single-stranded oligodeoxynucleotides (ssODN), DDNA oligonucleotides, single-stranded mRNA (ssRNA), and double-stranded mRNA (dsRNA). In certain embodiments, the non-viral vector is a transposon. In certain embodiments, the transposon is piggyBac™.

[0435] In certain embodiments of the methods of the disclosure, transgene delivery can occur via viral vector. In certain embodiments, the viral vector is a non-integrating non-chromosomal vectors. Non-integrating non-chromosomal vectors can include adeno-associated virus (AAV), adenovirus, and herpes viruses. In certain embodiments, the viral vector is an integrating chromosomal vectors. Integrating chromosomal vectors can include adeno-associated vectors (AAV), Lentiviruses, and gamma-retroviruses.

[0436] In certain embodiments of the methods of the disclosure, transgene delivery can occur by a combination of vectors. Exemplary but non-limiting vector combinations can include: viral plus non-viral vectors, more than one non-viral vector, or more than one viral vector. Exemplary but non-limiting vectors combinations can include: DNA-derived plus RNA-derived vectors, RNA plus reverse transcriptase, a transposon and a transposase, a non-viral vectors plus an endonuclease, and a viral vector plus an endonuclease.

[0437] In certain embodiments of the methods of the disclosure, the genome modification can be a stable integration of a transgene, a transient integration of a transgene, a site-specific integration of a transgene, or a biased integration of a transgene.

[0438] In certain embodiments of the methods of the disclosure, the genome modification can be a stable chromosomal integration of a transgene. In certain embodiments, the stable chromosomal integration can be a random integration, a site-specific integration, or a biased integration. In certain embodiments, the site-specific integration can be non-assisted or assisted. In certain embodiments, the assisted site-specific integration is co-delivered with a site-directed nuclease. In certain embodiments, the site-directed nuclease comprises a transgene with 5′ and 3′ nucleotide sequence extensions that contain homology to upstream and downstream regions of the site of genomic integration. In certain embodiments, the transgene with homologous nucleotide extensions enable genomic integration by homologous recombination, microhomology-mediated end joining, or nonhomologous end-joining. In certain embodiments the site-specific integration occurs at a safe harbor site. Genomic safe harbor sites are able to accommodate the integration of new genetic material in a manner that ensures that the newly inserted genetic elements function reliably (for example, are expressed at a therapeutically effective level of expression) and do not cause deleterious alterations to the host genome that cause a risk to the host organism. Potential genomic safe harbors include, but are not limited to, intronic sequences of the human albumin gene, the adeno-associated virus site 1 (AAVS1), a naturally occurring site of integration of AAV virus on chromosome 19, the site of the chemokine (C-C motif) receptor 5 (CCRS) gene and the site of the human ortholog of the mouse Rosa26 locus.

[0439] In certain embodiments, the site-specific transgene integration occurs at a site that disrupts expression of a target gene. In certain embodiments, disruption of target gene expression occurs by site-specific integration at introns, exons, promoters, genetic elements, enhancers, suppressors, start codons, stop codons, and response elements. In certain embodiments, exemplary target genes targeted by site-specific integration include but are not limited to TRAC, TRAB, PDI, any immunosuppressive gene, and genes involved in allo-rejection.

[0440] In certain embodiments, the site-specific transgene integration occurs at a site that results in enhanced expression of a target gene. In certain embodiments, enhancement of target gene expression occurs by site-specific integration at introns, exons, promoters, genetic elements, enhancers, suppressors, start codons, stop codons, and response elements.

[0441] In certain embodiments of the methods of the disclosure, enzymes may be used to create strand breaks in the host genome to facilitate delivery or integration of the transgene. In certain embodiments, enzymes create single-strand breaks. In certain embodiments, enzymes create double-strand breaks. In certain embodiments, examples of break-inducing enzymes include but are not limited to: transposases, integrases, endonucleases, CRISPR-Cas9, transcription activator-like effector nucleases (TALEN), zinc finger nucleases (ZFN), Cas-CLOVER™, and cpfl. In certain embodiments, break-inducing enzymes can be delivered to the cell encoded in DNA, encoded in mRNA, as a protein, as a nucleoprotein complex with a guide RNA (gRNA).

[0442] In certain embodiments of the methods of the disclosure, the site-specific transgene integration is controlled by a vector-mediated integration site bias. In certain embodiments vector-mediated integration site bias is controlled by the chosen lentiviral vector. In certain embodiments vector-mediated integration site bias is controlled by the chosen gamma-retroviral vector.

[0443] In certain embodiments of the methods of the disclosure, the site-specific transgene integration site is a non-stable chromosomal insertion. In certain embodiments, the integrated transgene may become silenced, removed, excised, or further modified. In certain embodiments of the methods of the disclosure, the genome modification is a non-stable integration of a transgene. In certain embodiments, the non-stable integration can be a transient non-chromosomal integration, a semi-stable non chromosomal integration, a semi-persistent non-chromosomal insertion, or a non-stable chromosomal insertion. In certain embodiments, the transient non-chromosomal insertion can be epi-chromosomal or cytoplasmic. In certain embodiments, the transient non-chromosomal insertion of a transgene does not integrate into a chromosome and the modified genetic material is not replicated during cell division.

[0444] In certain embodiments of the methods of the disclosure, the genome modification is a semi-stable or persistent non-chromosomal integration of a transgene. In certain embodiments, a DNA vector encodes a Scaffold/matrix attachment region (S-MAR) module that binds to nuclear matrix proteins for episomal retention of a non-viral vector allowing for autonomous replication in the nucleus of dividing cells.

[0445] In certain embodiments of the methods of the disclosure, the genome modification is a non-stable chromosomal integration of a transgene. In certain embodiments, the integrated transgene may become silenced, removed, excised, or further modified.

[0446] In certain embodiments of the methods of the disclosure, the modification to the genome by transgene insertion can occur via host cell-directed double-strand breakage repair (homology-directed repair) by homologous recombination (HR), microhomology-mediated end joining (MMEJ), nonhomologous end joining (NHEJ), transposase enzyme-mediated modification, integrase enzyme-mediated modification, endonuclease enzyme-mediated modification, or recombinant enzyme-mediated modification. In certain embodiments, the modification to the genome by transgene insertion can occur via CRISPR-Cas9, TALEN, ZFNs, Cas-CLOVER, and cpfl.

[0447] In certain embodiments of the methods of the disclosure, a cell with an in vivo or ex vivo genomic modification can be a germline cell or a somatic cell. In certain embodiments the modified cell can be a human, non-human, mammalian, rat, mouse, or dog cell. In certain embodiments, the modified cell can be differentiated, undifferentiated, or immortalized. In certain embodiments, the modified undifferentiated cell can be a stem cell. In certain embodiments, the modified cell can be differentiated, undifferentiated, or immortalized. In certain embodiments, the modified undifferentiated cell can be an induced pluripotent stem cell. In certain embodiments, the modified cell can be a T cell, a hematopoietic stem cell, a natural killer cell, a macrophage, a dendritic cell, a monocyte, a megakaryocyte, or an osteoclast. In certain embodiments, the modified cell can be modified while the cell is quiescent, in an activated state, resting, in interphase, in prophase, in metaphase, in anaphase, or in telophase. In certain embodiments, the modified cell can be fresh, cryopreserved, bulk, sorted into sub-populations, from whole blood, from leukapheresis, or from an immortalized cell line.

### Centyrins

[0448] Centyrins of the disclosure may be derived from a fibronectin type III (FN3) repeat protein, encoding or complementary nucleic acids, vectors, host cells, compositions, combinations, formulations, devices, and methods of making and using them. In a preferred embodiment, the Centyrin is comprised of a consensus sequence of multiple FN3 domains from human Tenascin-C (hereinafter “Tenascin”). In a further preferred embodiment, the protein scaffold of the present invention is a consensus sequence of 15 FN3 domains. The Centyrins of the disclosure can be designed to bind various molecules, for example, a cellular target protein. In a preferred embodiment, the Centyrins of the disclosure can be designed to bind an epitope of a wild type and/or variant form of an antigen.

[0449] Centyrins of the disclosure may include additional molecules or moieties, for example, the Fc region of an antibody, albumin binding domain, or other moiety influencing half-life. In further embodiments, the Centyrins of the disclosure may be bound to a nucleic acid molecule that may encode the Centyrin.

[0450] The disclosure provides at least one method for expressing at least one Centyrin based on a consensus sequence of multiple FN3 domains, in a host cell, comprising culturing a host cell as described herein under conditions wherein at least one protein scaffold is expressed in detectable and/or recoverable amounts.

[0451] The disclosure provides at least one composition comprising (a) a Centyrin based on a consensus sequence of multiple FN3 domains and/or encoding nucleic acid as described herein; and (b) a suitable and/or pharmaceutically acceptable carrier or diluent.

[0452] The disclosure provides a method of generating libraries of a Centyrin based on a fibronectin type III (FN3) repeat protein, preferably, a consensus sequence of multiple FN3 domains and, more preferably, a consensus sequence of multiple FN3 domains from human Tenascin. The library is formed by making successive generations of Centyrins by altering (by mutation) the amino acids or the number of amino acids in the molecules in particular positions in portions of the Centyrin, e.g., loop regions. Libraries can be generated by altering the amino acid composition of a single loop or the simultaneous alteration of multiple loops or additional positions of the Centyrin molecule. The loops that are altered can be lengthened or shortened accordingly. Such libraries can be generated to include all possible amino acids at each position, or a designed subset of amino acids. The library members can be used for screening by display, such as in vitro or CIS display (DNA, RNA, ribosome display, etc.), yeast, bacterial, and phage display.

[0453] Centyrins of the disclosure provide enhanced biophysical properties, such as stability under reducing conditions and solubility at high concentrations; they may be expressed and folded in prokaryotic systems, such as E. coli, in eukaryotic systems, such as yeast, and in in vitro transcription/translation systems, such as the rabbit reticulocyte lysate system.

[0454] The disclosure provides a method of generating a Centyrin molecule that binds to a particular target by panning the Centyrin library of the invention with the target and detecting binders. In other related aspects, the disclosure comprises screening methods that may be used to generate or affinity mature Centyrins with the desired activity, e.g., capable of binding to target proteins with a certain affinity. Affinity maturation can be accomplished by iterative rounds of mutagenesis and selection using systems, such as phage display or in vitro display. Mutagenesis during this process may be the result of site directed mutagenesis to specific Centyrin residues, random mutagenesis due to error-prone PCR, DNA shuffling, and/or a combination of these techniques.

[0455] The disclosure provides an isolated, recombinant and/or synthetic Centyrin based on a consensus sequence of fibronectin type III (FN3) repeat protein, including, without limitation, mammalian-derived Centyrins, as well as compositions and encoding nucleic acid molecules comprising at least one polynucleotide encoding a Centyrin based on the consensus FN3 sequence. The disclosure further includes, but is not limited to, methods of making and using such nucleic acids and Centyrins, including diagnostic and therapeutic compositions, methods and devices.

[0456] The Centyrins of the disclosure offer advantages over conventional therapeutics, such as ability to administer locally, orally, or cross the blood-brain barrier, ability to express in E. Coli allowing for increased expression of protein as a function of resources versus mammalian cell expression ability to be engineered into bispecific or tandem molecules that bind to multiple targets or multiple epitopes of the same target, ability to be conjugated to drugs, polymers, and probes, ability to be formulated to high concentrations, and the ability of such molecules to effectively penetrate diseased tissues and tumors.

[0457] Moreover, the Centyrins possess many of the properties of antibodies in relation to their fold that mimics the variable region of an antibody. This orientation enables the FN3 loops to be exposed similar to antibody complementarity determining regions (CDRs). They should be able to bind to cellular targets and the loops can be altered, e.g., affinity matured, to improve certain binding or related properties.

[0458] Three of the six loops of the Centyrin of the disclosure correspond topologically to the complementarity determining regions (CDRs 1-3), i.e., antigen-binding regions, of an antibody, while the remaining three loops are surface exposed in a manner similar to antibody CDRs. These loops span at or about residues 13-16, 22-28, 38-43, 51-54, 60-64, and 75-81 of SEQ ID NO: 18018. Preferably, the loop regions at or about residues 22-28, 51-54, and 75-81 of SEQ ID NO: 18018 are altered for binding specificity and affinity. One or more of these loop regions are randomized with other loop regions and/or other strands maintaining their sequence as backbone portions to populate a library and potent binders can be selected from the library having high affinity for a particular protein target. One or more of the loop regions can interact with a target protein similar to an antibody CDR interaction with the protein.

[0459] In certain embodiments of the disclosure, PSMA-specific Centyrins are designed, evolved and/or selected for their ability to specifically bind to a sequence of PSMA. In certain embodiments, the PSMA-specific Centyrins are capable of binding to a sequence of PSMA with a comparable affinity to that of an anti-PSMA antibody binding an epitope of PSMA. In certain embodiments, the PSMA-specific Centyrins are capable of binding to a sequence of PSMA with a stronger affinity to that of an anti-PSMA antibody binding an epitope of PSMA. In certain embodiments, the PSMA-specific Centyrins are capable of binding to a sequence of PSMA to which an antibody is not capable of binding. For example the sequence of PSMA may be discontinuous or may have a secondary structure.

### Production and Generation of CARTyrins

[0460] At least one CARTyrin of the disclosure can be optionally produced by a cell line, a mixed cell line, an immortalized cell or clonal population of immortalized cells, as well known in the art. See, e.g., Ausubel, et al., ed., Current Protocols in Molecular Biology, John Wiley & Sons, Inc., NY, N.Y. (1987-2001); Sambrook, et al., Molecular Cloning: A Laboratory Manual, 2nd Edition, Cold Spring Harbor, N.Y. (1989); Harlow and Lane, Antibodies, a Laboratory Manual, Cold Spring Harbor, N.Y. (1989); Colligan, et al., eds., Current Protocols in Immunology, John Wiley & Sons, Inc., NY (1994-2001); Colligan et al., Current Protocols in Protein Science, John Wiley & Sons, NY, N.Y., (1997-2001).

[0461] Amino acids from a CARTyrin can be altered, added and/or deleted to reduce immunogenicity or reduce, enhance or modify binding, affinity, on-rate, off-rate, avidity, specificity, half-life, stability, solubility or any other suitable characteristic, as known in the art.

[0462] Optionally, CARTyrins can be engineered with retention of high affinity for the antigen and other favorable biological properties. To achieve this goal, the CARTyrins can be optionally prepared by a process of analysis of the parental sequences and various conceptual engineered products using three-dimensional models of the parental and engineered sequences. Three-dimensional models are commonly available and are familiar to those skilled in the art. Computer programs are available which illustrate and display probable three-dimensional conformational structures of selected candidate sequences and can measure possible immunogenicity (e.g., Immunofilter program of Xencor, Inc. of Monrovia, Calif.). Inspection of these displays permits analysis of the likely role of the residues in the functioning of the candidate sequence, i.e., the analysis of residues that influence the ability of the candidate Centyrin or CARTyrin to bind its antigen. In this way, residues can be selected and combined from the parent and reference sequences so that the desired characteristic, such as affinity for the target antigen(s), is achieved. Alternatively, or in addition to, the above procedures, other suitable methods of engineering can be used.

### Screening of CARTyrin Proteins

[0463] Screening Centyrins or CARTyrins for specific binding to similar proteins or fragments can be conveniently achieved using nucleotide (DNA or RNA display) or peptide display libraries, for example, in vitro display. This method involves the screening of large collections of peptides for individual members having the desired function or structure. The displayed nucleotide or peptide sequences can be from 3 to 5000 or more nucleotides or amino acids in length, frequently from 5-100 amino acids long, and often from about 8 to 25 amino acids long. In addition to direct chemical synthetic methods for generating peptide libraries, several recombinant DNA methods have been described. One type involves the display of a peptide sequence on the surface of a bacteriophage or cell. Each bacteriophage or cell contains the nucleotide sequence encoding the particular displayed peptide sequence. The Centyrins CARTyrins of the disclosure can bind human or other mammalian proteins with a wide range of affinities (KD). In a preferred embodiment, at least one Centyrin of the present invention can optionally bind to a target protein with high affinity, for example, with a KD equal to or less than about 10⁻⁷ M, such as but not limited to, 0.1-9.9 (or any range or value therein)×10⁻⁸, 10⁻⁹, 10⁻¹⁰, 10⁻¹¹, 10⁻¹², 10⁻¹³, 10⁻¹⁴, 10⁻¹⁵ or any range or value therein, as determined by surface plasmon resonance or the Kinexa method, as practiced by those of skill in the art.

[0464] The affinity or avidity of a Centyrin or CARTyrin for an antigen can be determined experimentally using any suitable method. (See, for example, Berzofsky, et al., “Antibody-Antigen Interactions,” In Fundamental Immunology, Paul, W. E., Ed., Raven Press: New York, N.Y. (1984); Kuby, Janis Immunology, W.H. Freeman and Company: New York, N.Y. (1992); and methods described herein). The measured affinity of a particular Centyrin-antigen or Centyrin-antigen interaction can vary if measured under different conditions (e.g., salt concentration, pH). Thus, measurements of affinity and other antigen-binding parameters (e.g., KD, Kon, Koff) are preferably made with standardized solutions of Centyrins or CARTyrins and antigen, and a standardized buffer, such as the buffer described herein.

[0465] Competitive assays can be performed with the Centyrin or CARTyrin of the disclosure in order to determine what proteins, antibodies, and other antagonists compete for binding to a target protein with the Centyrin or CARTyrin of the present invention and/or share the epitope region. These assays as readily known to those of ordinary skill in the art evaluate competition between antagonists or ligands for a limited number of binding sites on a protein. The protein and/or antibody is immobilized or insolubilized before or after the competition and the sample bound to the target protein is separated from the unbound sample, for example, by decanting (where the protein/antibody was preinsolubilized) or by centrifuging (where the protein/antibody was precipitated after the competitive reaction). Also, the competitive binding may be determined by whether function is altered by the binding or lack of binding of the Centyrin or CARTyrin to the target protein, e.g., whether the Centyrin or CARTyrin molecule inhibits or potentiates the enzymatic activity of, for example, a label. ELISA and other functional assays may be used, as well known in the art.

### Nucleic Acid Molecules

[0466] Nucleic acid molecules of the disclosure encoding Centyrins or CARTyrins can be in the form of RNA, such as mRNA, hnRNA, tRNA or any other form, or in the form of DNA, including, but not limited to, cDNA and genomic DNA obtained by cloning or produced synthetically, or any combinations thereof. The DNA can be triple-stranded, double-stranded or single-stranded, or any combination thereof. Any portion of at least one strand of the DNA or RNA can be the coding strand, also known as the sense strand, or it can be the non-coding strand, also referred to as the anti-sense strand.

[0467] Isolated nucleic acid molecules of the disclosure can include nucleic acid molecules comprising an open reading frame (ORF), optionally, with one or more introns, e.g., but not limited to, at least one specified portion of at least one CARTyrin; nucleic acid molecules comprising the coding sequence for a CARTyrin; and nucleic acid molecules which comprise a nucleotide sequence substantially different from those described above but which, due to the degeneracy of the genetic code, still encode the CARTyrin as described herein and/or as known in the art. Of course, the genetic code is well known in the art. Thus, it would be routine for one skilled in the art to generate such degenerate nucleic acid variants that code for specific CARTyrins of the present invention. See, e.g., Ausubel, et al., supra, and such nucleic acid variants are included in the present invention.

[0468] As indicated herein, nucleic acid molecules of the disclosure which comprise a nucleic acid encoding a CARTyrin can include, but are not limited to, those encoding the amino acid sequence of a Centyrin fragment, by itself the coding sequence for the entire CARTyrin or a portion thereof the coding sequence for a Centyrin, fragment or portion, as well as additional sequences, such as the coding sequence of at least one signal leader or fusion peptide, with or without the aforementioned additional coding sequences, such as at least one intron, together with additional, non-coding sequences, including but not limited to, non-coding 5′ and 3′ sequences, such as the transcribed, non-translated sequences that play a role in transcription, mRNA processing, including splicing and polyadenylation signals (for example, ribosome binding and stability of mRNA); an additional coding sequence that codes for additional amino acids, such as those that provide additional functionalities. Thus, the sequence encoding a CARTyrin can be fused to a marker sequence, such as a sequence encoding a peptide that facilitates purification of the fused CARTyrin comprising a Centyrin fragment or portion.

### Polynucleotides Selectively Hybridizing to a Polynucleotide as Described Herein

[0469] The disclosure provides isolated nucleic acids that hybridize under selective hybridization conditions to a polynucleotide disclosed herein. Thus, the polynucleotides of this embodiment can be used for isolating, detecting, and/or quantifying nucleic acids comprising such polynucleotides. For example, polynucleotides of the present invention can be used to identify, isolate, or amplify partial or full-length clones in a deposited library. In some embodiments, the polynucleotides are genomic or cDNA sequences isolated, or otherwise complementary to, a cDNA from a human or mammalian nucleic acid library.

[0470] Preferably, the cDNA library comprises at least 80% full-length sequences, preferably, at least 85% or 90% full-length sequences, and, more preferably, at least 95% full-length sequences. The cDNA libraries can be normalized to increase the representation of rare sequences. Low or moderate stringency hybridization conditions are typically, but not exclusively, employed with sequences having a reduced sequence identity relative to complementary sequences. Moderate and high stringency conditions can optionally be employed for sequences of greater identity. Low stringency conditions allow selective hybridization of sequences having about 70% sequence identity and can be employed to identify orthologous or paralogous sequences.

[0471] Optionally, polynucleotides of this invention will encode at least a portion of a CARTyrin encoded by the polynucleotides described herein. The polynucleotides of this invention embrace nucleic acid sequences that can be employed for selective hybridization to a polynucleotide encoding a CARTyrin of the present invention. See, e.g., Ausubel, supra; Colligan, supra, each entirely incorporated herein by reference.

### Construction of Nucleic Acids

[0472] The isolated nucleic acids of the disclosure can be made using (a) recombinant methods, (b) synthetic techniques, (c) purification techniques, and/or (d) combinations thereof, as well-known in the art.

[0473] The nucleic acids can conveniently comprise sequences in addition to a polynucleotide of the present invention. For example, a multi-cloning site comprising one or more endonuclease restriction sites can be inserted into the nucleic acid to aid in isolation of the polynucleotide. Also, translatable sequences can be inserted to aid in the isolation of the translated polynucleotide of the disclosure. For example, a hexa-histidine marker sequence provides a convenient means to purify the proteins of the disclosure. The nucleic acid of the disclosure, excluding the coding sequence, is optionally a vector, adapter, or linker for cloning and/or expression of a polynucleotide of the disclosure.

[0474] Additional sequences can be added to such cloning and/or expression sequences to optimize their function in cloning and/or expression, to aid in isolation of the polynucleotide, or to improve the introduction of the polynucleotide into a cell. Use of cloning vectors, expression vectors, adapters, and linkers is well known in the art. (See, e.g., Ausubel, supra; or Sambrook, supra).

### Recombinant Methods for Constructing Nucleic Acids

[0475] The isolated nucleic acid compositions of this disclosure, such as RNA, cDNA, genomic DNA, or any combination thereof, can be obtained from biological sources using any number of cloning methodologies known to those of skill in the art. In some embodiments, oligonucleotide probes that selectively hybridize, under stringent conditions, to the polynucleotides of the present invention are used to identify the desired sequence in a cDNA or genomic DNA library. The isolation of RNA, and construction of cDNA and genomic libraries are well known to those of ordinary skill in the art. (See, e.g., Ausubel, supra; or Sambrook, supra).

### Nucleic Acid Screening and Isolation Methods

[0476] A cDNA or genomic library can be screened using a probe based upon the sequence of a polynucleotide of the disclosure. Probes can be used to hybridize with genomic DNA or cDNA sequences to isolate homologous genes in the same or different organisms. Those of skill in the art will appreciate that various degrees of stringency of hybridization can be employed in the assay; and either the hybridization or the wash medium can be stringent. As the conditions for hybridization become more stringent, there must be a greater degree of complementarity between the probe and the target for duplex formation to occur. The degree of stringency can be controlled by one or more of temperature, ionic strength, pH and the presence of a partially denaturing solvent, such as formamide. For example, the stringency of hybridization is conveniently varied by changing the polarity of the reactant solution through, for example, manipulation of the concentration of formamide within the range of 0% to 50%. The degree of complementarity (sequence identity) required for detectable binding will vary in accordance with the stringency of the hybridization medium and/or wash medium. The degree of complementarity will optimally be 100%, or 70-100%, or any range or value therein. However, it should be understood that minor sequence variations in the probes and primers can be compensated for by reducing the stringency of the hybridization and/or wash medium.

[0477] Methods of amplification of RNA or DNA are well known in the art and can be used according to the disclosure without undue experimentation, based on the teaching and guidance presented herein.

[0478] Known methods of DNA or RNA amplification include, but are not limited to, polymerase chain reaction (PCR) and related amplification processes (see, e.g., U.S. Pat. Nos. 4,683,195, 4,683,202, 4,800,159, 4,965,188, to Mullis, et al.; U.S. Pat. Nos. 4,795,699 and 4,921,794 to Tabor, et al; U.S. Pat. No. 5,142,033 to Innis; U.S. Pat. No. 5,122,464 to Wilson, et al.; U.S. Pat. No. 5,091,310 to Innis; U.S. Pat. No. 5,066,584 to Gyllensten, et al; U.S. Pat. No. 4,889,818 to Gelfand, et al; U.S. Pat. No. 4,994,370 to Silver, et al; U.S. Pat. No. 4,766,067 to Biswas; U.S. Pat. No. 4,656,134 to Ringold) and RNA mediated amplification that uses anti-sense RNA to the target sequence as a template for double-stranded DNA synthesis (U.S. Pat. No. 5,130,238 to Malek, et al, with the tradename NASBA), the entire contents of which references are incorporated herein by reference. (See, e.g., Ausubel, supra; or Sambrook, supra.)

[0479] For instance, polymerase chain reaction (PCR) technology can be used to amplify the sequences of polynucleotides of the disclosure and related genes directly from genomic DNA or cDNA libraries. PCR and other in vitro amplification methods can also be useful, for example, to clone nucleic acid sequences that code for proteins to be expressed, to make nucleic acids to use as probes for detecting the presence of the desired mRNA in samples, for nucleic acid sequencing, or for other purposes. Examples of techniques sufficient to direct persons of skill through in vitro amplification methods are found in Berger, supra, Sambrook, supra, and Ausubel, supra, as well as Mullis, et al., U.S. Pat. No. 4,683,202 (1987); and Innis, et al., PCR Protocols A Guide to Methods and Applications, Eds., Academic Press Inc., San Diego, Calif. (1990). Commercially available kits for genomic PCR amplification are known in the art. See, e.g., Advantage-GC Genomic PCR Kit (Clontech). Additionally, e.g., the T4 gene 32 protein (Boehringer Mannheim) can be used to improve yield of long PCR products.

### Synthetic Methods for Constructing Nucleic Acids

[0480] The isolated nucleic acids of the disclosure can also be prepared by direct chemical synthesis by known methods (see, e.g., Ausubel, et al., supra). Chemical synthesis generally produces a single-stranded oligonucleotide, which can be converted into double-stranded DNA by hybridization with a complementary sequence, or by polymerization with a DNA polymerase using the single strand as a template. One of skill in the art will recognize that while chemical synthesis of DNA can be limited to sequences of about 100 or more bases, longer sequences can be obtained by the ligation of shorter sequences.

### Recombinant Expression Cassettes

[0481] The disclosure further provides recombinant expression cassettes comprising a nucleic acid of the disclosure. A nucleic acid sequence of the disclosure, for example, a cDNA or a genomic sequence encoding a CARTyrin of the disclosure, can be used to construct a recombinant expression cassette that can be introduced into at least one desired host cell. A recombinant expression cassette will typically comprise a polynucleotide of the disclosure operably linked to transcriptional initiation regulatory sequences that will direct the transcription of the polynucleotide in the intended host cell. Both heterologous and non-heterologous (i.e., endogenous) promoters can be employed to direct expression of the nucleic acids of the disclosure.

[0482] In some embodiments, isolated nucleic acids that serve as promoter, enhancer, or other elements can be introduced in the appropriate position (upstream, downstream or in the intron) of a non-heterologous form of a polynucleotide of the disclosure so as to up or down regulate expression of a polynucleotide of the disclosure. For example, endogenous promoters can be altered in vivo or in vitro by mutation, deletion and/or substitution.

### Nanotransposons

[0483] The disclosure provides a nanotransposon comprising: (a) a sequence encoding a transposon insert, comprising a sequence encoding a first inverted terminal repeat (ITR), a sequence encoding a second inverted terminal repeat (ITR), and an intra-ITR sequence; (b) a sequence encoding a backbone, wherein the sequence encoding the backbone comprises a sequence encoding an origin of replication having between 1 and 450 nucleotides, inclusive of the endpoints, and a sequence encoding a selectable marker having between 1 and 200 nucleotides, inclusive of the endpoints, and (c) an inter-ITR sequence. In some embodiments, the inter-ITR sequence of (c) comprises the sequence of (b). In some embodiments, the intra-ITR sequence of (a) comprises the sequence of (b).

[0484] In some embodiments of the nanotransposons of the disclosure, the sequence encoding the backbone comprises between 1 and 600 nucleotides, inclusive of the endpoints. In some embodiments, the sequence encoding the backbone consists of between 1 and 50 nucleotides, between 50 and 100 nucleotides, between 100 and 150 nucleotides, between 150 and 200 nucleotides, between 200 and 250 nucleotides, between 250 and 300 nucleotides, between 300 and 350 nucleotides, between 350 and 400 nucleotides, between 400 and 450 nucleotides, between 450 and 500 nucleotides, between 500 and 550 nucleotides, between 550 and 600 nucleotides, each range inclusive of the endpoints.

[0485] In some embodiments of the nanotransposons of the disclosure, the inter-ITR sequence comprises between 1 and 1000 nucleotides, inclusive of the endpoints. In some embodiments, the inter-ITR sequence consists of between 1 and 50 nucleotides, between 50 and 100 nucleotides, between 100 and 150 nucleotides, between 150 and 200 nucleotides, between 200 and 250 nucleotides, between 250 and 300 nucleotides, between 300 and 350 nucleotides, between 350 and 400 nucleotides, between 400 and 450 nucleotides, between 450 and 500 nucleotides, between 500 and 550 nucleotides, between 550 and 600 nucleotides, between 600 and 650 nucleotides, between 650 and 700 nucleotides, between 700 and 750 nucleotides, between 750 and 800 nucleotides, between 800 and 850 nucleotides, between 850 and 900 nucleotides, between 900 and 950 nucleotides, or between 950 and 1000 nucleotides, each range inclusive of the endpoints.

[0486] In some embodiments of the nanotransposons of the disclosure, including the short nanotransposons (SNTs) of the disclosure, the inter-ITR sequence comprises between 1 and 200 nucleotides, inclusive of the endpoints. In some embodiments, the inter-ITR sequence consists of between 1 and 10 nucleotides, between 10 and 20 nucleotides, between 20 and 30 nucleotides, between 30 and 40 nucleotides, between 40 and 50 nucleotides, between 50 and 60 nucleotides, between 60 and 70 nucleotides, between 70 and 80 nucleotides, between 80 and 90 nucleotides, or between 90 and 100 nucleotides, each range inclusive of the endpoints.

[0487] In some embodiments of the nanotransposons of the disclosure, the selectable marker having between 1 and 200 nucleotides, inclusive of the endpoints, comprises a sequence encoding a sucrose-selectable marker. In some embodiments, the sequence encoding a sucrose-selectable marker comprises a sequence encoding an RNA-OUT sequence. In some embodiments, the sequence encoding an RNA-OUT sequence comprises or consists of 137 base pairs (bp). In some embodiments, the selectable marker having between 1 and 200 nucleotides, inclusive of the endpoints, comprises a sequence encoding a fluorescent marker. In some embodiments, the selectable marker having between 1 and 200 nucleotides, inclusive of the endpoints, comprises a sequence encoding a cell surface marker.

[0488] In some embodiments of the nanotransposons of the disclosure, the sequence encoding an origin of replication having between 1 and 450 nucleotides, inclusive of the endpoints, comprises a sequence encoding a mini origin of replication. In some embodiments, the sequence encoding an origin of replication having between 1 and 450 nucleotides, inclusive of the endpoints, comprises a sequence encoding an R6K origin of replication. In some embodiments, the R6K origin of replication comprises an R6K gamma origin of replication. In some embodiments, the R6K origin of replication comprises an R6K mini origin of replication. In some embodiments, the R6K origin of replication comprises an R6K gamma mini origin of replication. In some embodiments, the R6K gamma mini origin of replication comprises or consists of 281 base pairs (bp).

[0489] In some embodiments of the nanotransposons of the disclosure, the sequence encoding the backbone does not comprise a recombination site, an excision site, a ligation site or a combination thereof. In some embodiments, neither the nanotransposon nor the sequence encoding the backbone comprises a product of a recombination site, an excision site, a ligation site or a combination thereof. In some embodiments, neither the nanotransposon nor the sequence encoding the backbone is derived from a recombination site, an excision site, a ligation site or a combination thereof.

[0490] In some embodiments of the nanotransposons of the disclosure, a recombination site comprises a sequence resulting from a recombination event. In some embodiments, a recombination site comprises a sequence that is a product of a recombination event. In some embodiments, the recombination event comprises an activity of a recombinase (e.g., a recombinase site).

[0491] In some embodiments of the nanotransposons of the disclosure, the sequence encoding the backbone does not further comprise a sequence encoding foreign DNA.

[0492] In some embodiments of the nanotransposons of the disclosure, the inter-ITR sequence does not comprise a recombination site, an excision site, a ligation site or a combination thereof. In some embodiments, the inter-ITR sequence does not comprise a product of a recombination event, an excision event, a ligation event or a combination thereof. In some embodiments, the inter-ITR sequence is not derived from a recombination event, an excision event, a ligation event or a combination thereof.

[0493] In some embodiments of the nanotransposons of the disclosure, the inter-ITR sequence comprises a sequence encoding foreign DNA.

[0494] In some embodiments of the nanotransposons of the disclosure, the intra-ITR sequence comprises at least one sequence encoding an insulator and a sequence encoding a promoter capable of expressing an exogenous sequence in a mammalian cell. In some embodiments, the mammalian cell is a human cell.

[0495] In some embodiments of the nanotransposons of the disclosure, the intra-ITR sequence comprises a first sequence encoding an insulator, a sequence encoding a promoter capable of expressing an exogenous sequence in a mammalian cell and a second sequence encoding an insulator.

[0496] In some embodiments of the nanotransposons of the disclosure, the intra-ITR sequence comprises a first sequence encoding an insulator, a sequence encoding a promoter capable of expressing an exogenous sequence in a mammalian cell, a polyadenosine (polyA) sequence and a second sequence encoding an insulator.

[0497] In some embodiments of the nanotransposons of the disclosure, the intra-ITR sequence comprises a first sequence encoding an insulator, a sequence encoding a promoter capable of expressing an exogenous sequence in a mammalian cell, at least one exogenous sequence, a polyadenosine (polyA) sequence and a second sequence encoding an insulator.

[0498] In some embodiments of the nanotransposons of the disclosure, the sequence encoding a promoter capable of expressing an exogenous sequence in a mammalian cell is capable of expressing an exogenous sequence in a human cell. In some embodiments, the sequence encoding a promoter capable of expressing an exogenous sequence in a mammalian cell comprises a sequence encoding a constitutive promoter. In some embodiments, the sequence encoding a promoter capable of expressing an exogenous sequence in a mammalian cell comprises a sequence encoding an inducible promoter. In some embodiments, the intra-ITR sequence comprises a first sequence encoding a first promoter capable of expressing an exogenous sequence in a mammalian cell and a second sequence encoding a second promoter capable of expressing an exogenous sequence in mammalian cell, wherein the first promoter is a constitutive promoter, wherein the second promoter is an inducible promoter, and wherein the first sequence encoding the first promoter and the second sequence encoding the second promoter are oriented in opposite directions. In some embodiments, the sequence encoding a promoter capable of expressing an exogenous sequence in a mammalian cell comprises a sequence encoding a cell-type or tissue-type specific promoter. In some embodiments, the sequence encoding a promoter capable of expressing an exogenous sequence in a mammalian cell comprises a sequence encoding an EF1a promoter, a sequence encoding a CMV promoter, a sequence encoding an MND promoter, a sequence encoding an SV40 promoter, a sequence encoding a PGK1 promoter, a sequence encoding a Ubc promoter, a sequence encoding a CAG promoter, a sequence encoding an H1 promoter, or a sequence encoding a U6 promoter.

[0499] In some embodiments of the nanotransposons of the disclosure, the polyadenosine (polyA) sequence is isolated or derived from a viral polyA sequence. In some embodiments, the polyadenosine (polyA) sequence is isolated or derived from an (SV40) polyA sequence.

[0500] In some embodiments of the nanotransposons of the disclosure, the at least one exogenous sequence comprises an inducible proapoptotic polypeptide. In some embodiments, the inducible caspase polypeptide comprises (a) a ligand binding region, (b) a linker, and (c) a caspase polypeptide, wherein the inducible proapoptotic polypeptide does not comprise a non-human sequence. In some embodiments, the inducible caspase polypeptide comprises (a) a ligand binding region, (b) a linker, and (c) a truncated caspase 9 polypeptide, wherein the inducible proapoptotic polypeptide does not comprise a non-human sequence.

[0501] In some embodiments of the nanotransposons of the disclosure, including those wherein the at least one exogenous sequence comprises an inducible proapoptotic polypeptide, the ligand binding region comprises a FK506 binding protein 12 (FKBP12) polypeptide. In some embodiments, the amino acid sequence of the ligand binding region comprises a FK506 binding protein 12 (FKBP12) polypeptide. In some embodiments, the FK506 binding protein 12 (FKBP12) polypeptide comprises a modification at position 36 of the sequence. In some embodiments, the modification comprises a substitution of valine (V) for phenylalanine (F) at position 36 (F36V). In some embodiments, the FKBP12 polypeptide is encoded by an amino acid sequence comprising

(SEQ ID NO: 14635)
GVQVETISPGDGRTFPKRGQTCVVHYTGMLEDGKKVDSSRDRNKPFKFML
GKQEVIRGWEEGVAQMSVGQRAKLTISPDYAYGATGHPGIIPPHATLVFD
VELLKLE.

In some embodiments, the FKBP12 polypeptide is encoded by a nucleic acid sequence comprising

(SEQ ID NO: 14636)
GGGGTCCAGGTCGAGACTATTTCACCAGGGGATGGGCGAACATTTCCAAA
AAGGGGCCAGACTTGCGTCGTGCATTACACCGGGATGCTGGAGGACGGGA
AGAAAGTGGACAGCTCCAGGGATCGCAACAAGCCCTTCAAGTTCATGCTG
GGAAAGCAGGAAGTGATCCGAGGATGGGAGGAAGGCGTGGCACAGATGTC
AGTCGGCCAGCGGGCCAAACTGACCATTAGCCCTGACTACGCTTATGGAG
CAACAGGCCACCCAGGGATCATTCCCCCTCATGCCACCCTGGTCTTCGAT
GTGGAACTGCTGAAGCTGGAG.

[0502] In some embodiments of the nanotransposons of the disclosure, including those wherein the at least one exogenous sequence comprises an inducible proapoptotic polypeptide, the linker region is encoded by an amino acid comprising GGGGS (SEQ ID NO: 14637) or a nucleic acid sequence comprising GGAGGAGGAGGATCC (SEQ ID NO: 14638). In some embodiments, the nucleic acid sequence encoding the linker does not comprise a restriction site.

[0503] In some embodiments of the nanotransposons of the disclosure, including those wherein the at least one exogenous sequence comprises an inducible proapoptotic polypeptide, the truncated caspase 9 polypeptide is encoded by an amino acid sequence that does not comprise an arginine (R) at position 87 of the sequence. In some embodiments, the truncated caspase 9 polypeptide is encoded by an amino acid sequence that does not comprise an alanine (A) at position 282 the sequence. In some embodiments, the truncated caspase 9 polypeptide is encoded by an amino acid comprising

(SEQ ID NO: 14639)
GFGDVGALESLRGNADLAYILSMEPCGHCLIINNVNFCRESGLRTRTGSN
IDCEKLRRRFSSLHFMVEVKGDLTAKKMVLALLELAQQDHGALDCCVVVI
LSHGCQASHLQFPGAVYGTDGCPVSVEKIVNIFNGTSCPSLGGKPKLFFI
QACGGEQKDHGFEVASTSPEDESPGSNPEPDATPFQEGLRTFDQLDAISS
LPTPSDIFVSYSTFPGFVSWRDPKSGSWYVETLDDIFEQWAHSEDLQSLL
LRVANAVSVKGIYKQMPGCFNFLRKKLFFKTS.

In some embodiments, the truncated caspase 9 polypeptide is encoded by a nucleic acid sequence comprising

(SEQ ID NO: 14640)
GGATTTGGGGACGTGGGGGCCCTGGAGTCTCTGCGAGGAAATGCCGATCT
GGCTTACATCCTGAGCATGGAACCCTGCGGCCACTGTCTGATCATTAACA
ATGTGAACTTCTGCAGAGAAAGCGGACTGCGAACACGGACTGGCTCCAAT
ATTGACTGTGAGAAGCTGCGGAGAAGGTTCTCTAGTCTGCACTTTATGGT
CGAAGTGAAAGGGGATCTGACCGCCAAGAAAATGGTGCTGGCCCTGCTGG
AGCTGGCTCAGCAGGACCATGGAGCTCTGGATTGCTGCGTGGTCGTGATC
CTGTCCCACGGGTGCCAGGCTTCTCATCTGCAGTTCCCCGGAGCAGTGTA
CGGAACAGACGGCTGTCCTGTCAGCGTGGAGAAGATCGTCAACATCTTCA
ACGGCACTTCTTGCCCTAGTCTGGGGGGAAAGCCAAAACTGTTCTTTATC
CAGGCCTGTGGCGGGGAACAGAAAGATCACGGCTTCGAGGTGGCCAGCAC
CAGCCCTGAGGACGAATCACCAGGGAGCAACCCTGAACCAGATGCAACTC
CATTCCAGGAGGGACTGAGGACCTTTGACCAGCTGGATGCTATCTCAAGC
CTGCCCACTCCTAGTGACATTTTCGTGTCTTACAGTACCTTCCCAGGCTT
TGTCTCATGGCGCGATCCCAAGTCAGGGAGCTGGTACGTGGAGACACTGG
ACGACATCTTTGAACAGTGGGCCCATTCAGAGGACCTGCAGAGCCTGCTG
CTGCGAGTGGCAAACGCTGTCTCTGTGAAGGGCATCTACAAACAGATGCC
CGGGTGCTTCAATTTTCTGAGAAAGAAACTGTTCTTTAAGACTTCC.

[0504] In some embodiments of the nanotransposons of the disclosure, including those wherein the at least one exogenous sequence comprises an inducible proapoptotic polypeptide, the inducible proapoptotic polypeptide is encoded by an amino acid sequence comprising

(SEQ ID NO: 14641)
GVQVETISPGDGRTFPKRGQTCVVHYTGMLEDGKKVDSSRDRNKPFKFML
GKQEVIRGWEEGVAQMSVGQRAKLTISPDYAYGATGHPGIIPPHATLVFD
VELLKLEGGGGSGFGDVGALESLRGNADLAYILSMEPCGHCLIINNVNFC
RESGLRTRTGSNIDCEKLRRRFSSLHFMVEVKGDLTAKKMVLALLELAQQ
DHGALDCCVVVILSHGCQASHLQFPGAVYGTDGCPVSVEKIVNIFNGTSC
PSLGGKPKLFFIQACGGEQKDHGFEVASTSPEDESPGSNPEPDATPFQEG
LRTFDQLDAISSLPTPSDIFVSYSTFPGFVSWRDPKSGSWYVETLDDIFE
QWAHSEDLQSLLLRVANAVSVKGIYKQMPGCFNFLRKKLFFKTS.

In some embodiments, the inducible proapoptotic polypeptide is encoded by a nucleic acid sequence comprising

(SEQ ID NO: 14642)
ggggtccaggtcgagactatttcaccaggggatgggcgaacatttccaaa
aaggggccagacttgcgtcgtgcattacaccgggatgctggaggacggga
agaaagtggacagctccagggatcgcaacaagcccttcaagttcatgctg
ggaaagcaggaagtgatccgaggatgggaggaaggcgtggcacagatgtc
agtcggccagcgggccaaactgaccattagccctgactacgcttatggag
caacaggccacccagggatcattccccctcatgccaccctggtcttcgat
gtggaactgctgaagctggagggaggaggaggatccggatttggggacgt
gggggccctggagtctctgcgaggaaatgccgatctggcttacatcctga
gcatggaaccctgcggccactgtctgatcattaacaatgtgaacttctgc
agagaaagcggactgcgaacacggactggctccaatattgactgtgagaa
gctgcggagaaggttctctagtctgcactttatggtcgaagtgaaagggg
atctgaccgccaagaaaatggtgctggccctgctggagctggctcagcag
gaccatggagctctggattgctgcgtggtcgtgatcctgtcccacgggtg
ccaggcttctcatctgcagttccccggagcagtgtacggaacagacggct
gtcctgtcagcgtggagaagatcgtcaacatcttcaacggcacttcttgc
cctagtctggggggaaagccaaaactgttctttatccaggcctgtggcgg
ggaacagaaagatcacggcttcgaggtggccagcaccagccctgaggacg
aatcaccagggagcaaccctgaaccagatgcaactccattccaggaggga
ctgaggacctttgaccagctggatgctatctcaagcctgcccactcctag
tgacattacgtgtcttacagtaccttcccaggctttgtctcatggcgcga
tcccaagtcagggagctggtacgtggagacactggacgacatctttgaac
agtgggcccattcagaggacctgcagagcctgctgctgcgagtggcaaac
gctgtctctgtgaagggcatctacaaacagatgcccgggtgcttcaatta
ctgagaaagaaactgttctttaagacttcc.

[0505] In some embodiments of the nanotransposons of the disclosure, including those wherein the at least one exogenous sequence comprises an inducible proapoptotic polypeptide, the exogenous sequence further comprises a sequence encoding a selectable marker. In some embodiments, the sequence encoding the selectable marker comprises a sequence encoding a detectable marker. In some embodiments, the detectable marker comprises a fluorescent marker or a cell-surface marker. In some embodiments, the sequence encoding the selectable marker comprises a sequence encoding a protein that is active in dividing cells and not active in non-dividing cells. In some embodiments, the sequence encoding the selectable marker comprises a sequence encoding a metabolic marker. In some embodiments, the sequence encoding the selectable marker comprises a sequence encoding a dihydrofolate reductase (DHFR) mutein enzyme. In some embodiments, the DHFR mutein enzyme comprises or consists of the amino acid sequence of:

```
(SEQ ID NO: 17012)
    1 MVGSLNCIVA VSQNMGIGKN GDFPWPPLRN ESRYFQRMTT TSSVEGKQNL
  61 VIMGKKTWFS IPEKNRPLKG RINLVLSREL KEPPQGAHFL SRSLDDALKL
121 TEQPELANKV DMVWIVGGSS VYKEAMNHPG HLKLFVTRIM QDFESDTFFP
181 EIDLEKYKLL PEYPGVLSDV QEEKGIKYKF EVYEKND.
```

In some embodiments, the DHFR mutein enzyme is encoded by a the nucleic acid sequence comprising or consisting of

(SEQ ID NO: 17095)
atggtcgggtctctgaattgtatcgtcgccgtgagtcagaacatgggcat
tgggaagaatggcgatttcccatggccacctctgcgcaacgagtcccgat
actttcagcggatgacaactacctcctctgtggaagggaaacagaatctg
gtcatcatgggaaagaaaacttggttcagcattccagagaagaaccggcc
cctgaaaggcagaatcaatctggtgctgtcccgagaactgaaggagccac
cacagggagctcactttctgagccggtccctggacgatgcactgaagctg
acagaacagcctgagctggccaacaaagtcgatatggtgtggatcgtcgg
gggaagttcagtgtataaggaggccatgaatcaccccggccatctgaaac
tgttcgtcacacggatcatgcaggactttgagagcgatactttctttcct
gaaattgacctggagaagtacaaactgctgcccgaatatcctggcgtgct
gtccgatgtccaggaagagaaaggcatcaaatacaagttcgaggtctatg
agaagaatgac.

In some embodiments, the amino acid sequence of the DHFR mutein enzyme further comprises a mutation at one or more of positions 80, 113, or 153. In some embodiments, the amino acid sequence of the DHFR mutein enzyme comprises one or more of a substitution of a Phenylalanine (F) or a Leucine (L) at position 80, a substitution of a Leucine (L) or a Valine (V) at position 113, and a substitution of a Valine (V) or an Aspartic Acid (D) at position 153.

[0506] In some embodiments of the nanotransposons of the disclosure, including those wherein the at least one exogenous sequence comprises an inducible proapoptotic polypeptide and/or the exogenous sequence comprises a sequence encoding a selectable marker, the exogenous sequence further comprises a sequence encoding a non-naturally occurring antigen receptor, and/or a sequence encoding a therapeutic polypeptide. In some embodiments, the non-naturally occurring antigen receptor comprises a T cell Receptor (TCR). In some embodiments, a sequence encoding the TCR comprises one or more of an insertion, a deletion, a substitution, an invertion, a transposition or a frameshift compared to a corresponding wild type sequence. In some embodiments, a sequence encoding the TCR comprises a chimeric or recombinant sequence. In some embodiments, the non-naturally occurring antigen receptor comprises a chimeric antigen receptor (CAR). In some embodiments, the CAR comprises: (a) an ectodomain comprising an antigen recognition region, (b) a transmembrane domain, and (c) an endodomain comprising at least one costimulatory domain. In some embodiments, the ectodomain of (a) of the CAR further comprises a signal peptide. In some embodiments, the ectodomain of (a) of the CAR further comprises a hinge between the antigen recognition region and the transmembrane domain. In some embodiments, the endodomain comprises a human CD3ζ endodomain. In some embodiments, the at least one costimulatory domain comprises a human 4-1BB, CD28, CD40, ICOS, MyD88, OX-40 intracellular segment, or any combination thereof. In some embodiments, the at least one costimulatory domain comprises a human CD28 and/or a 4-1BB costimulatory domain. In some embodiments, the antigen recognition region comprises one or more of a scFv, a VHH, a VH, and a Centyrin.

[0507] In some embodiments of the nanotransposons of the disclosure, including those wherein the at least one exogenous sequence comprises an inducible proapoptotic polypeptide and/or the exogenous sequence comprises a sequence encoding a selectable marker, the exogenous sequence further comprises a sequence encoding a transposase.

[0508] In some embodiments of the nanotransposons of the disclosure, the intra-ITR sequence comprises a sequence encoding a selectable marker, an exogenous sequence, a sequence encoding an inducible caspase polypeptide, and at least one sequence encoding a self-cleaving peptide. In some embodiments, the at least one sequence encoding a self-cleaving peptide is positioned between one or more of: (a) the sequence encoding a selectable marker and the exogenous sequence, (b) the sequence encoding a selectable marker and the inducible caspase polypeptide, and (c) the exogenous sequence and the inducible caspase polypeptide. In some embodiments, a first sequence encoding a self-cleaving peptide is positioned between the sequence encoding a selectable marker and the exogenous sequence and a second sequence encoding a self-cleaving peptide is positioned between the exogenous sequence and the inducible caspase polypeptide.

[0509] In some embodiments of the nanotransposons of the disclosure, including those wherein the at least one exogenous sequence comprises one or more of an inducible proapoptotic polypeptide, a sequence encoding a selectable marker, and an exogenous sequence, the sequence encoding a first inverted terminal repeat (ITR) or the sequence encoding a second inverted terminal repeat (ITR) are recognized by a piggyBac transposase or a piggyBac-like transposase. In some embodiments, the sequence encoding a first inverted terminal repeat (ITR) or the sequence encoding a second inverted terminal repeat (ITR) are recognized by a piggyBac transposase. In some embodiments, the sequence encoding a first inverted terminal repeat (ITR) or the sequence encoding a second inverted terminal repeat (ITR) are recognized by a piggyBac-like transposase. In some embodiments, the sequence encoding a first inverted terminal repeat (ITR) or the sequence encoding a second inverted terminal repeat (ITR) comprise a TTAA, a TTAT or a TTAX recognition sequence. In some embodiments, the sequence encoding a first inverted terminal repeat (ITR) or the sequence encoding a second inverted terminal repeat (ITR) comprise a TTAA, a TTAT or a TTAX recognition sequence and a sequence having at least 50% identity to a sequence isolated or derived from a piggyBac transposase or a piggyBac-like transposase. In some embodiments, the sequence encoding a first inverted terminal repeat (ITR) or the sequence encoding a second inverted terminal repeat (ITR) comprise at least 2 nucleotides (nts), 3 nts, 4 nts, 5 nts, 6 nts, 7 nts, 8 nts, 9 nts, 10 nts, 11 nts, 12 nts, 13 nts, 14 nts, 15 nts, 16 nts, 17 nts, 18 nts, 19 nts, or 20 nts.

[0510] In some embodiments of the nanotransposons of the disclosure, including those wherein the at least one exogenous sequence comprises one or more of an inducible proapoptotic polypeptide, a sequence encoding a selectable marker, and an exogenous sequence, the sequence encoding a first inverted terminal repeat (ITR) or the sequence encoding a second inverted terminal repeat (ITR) are recognized by a piggyBac transposase or a piggyBac-like transposase. In some embodiments, the sequence encoding a first inverted terminal repeat (ITR) or the sequence encoding a second inverted terminal repeat (ITR) comprises the sequence of

(SEQ ID NO: 17096)
CCCTAGAAAGATAGTCTGCGTAAAATTGACGCATG

or a sequence having at least 70% identity to the sequence of

(SEQ ID NO: 17096)
CCCTAGAAAGATAGTCTGCGTAAAATTGACGCATG.

In some embodiments, the sequence encoding a first inverted terminal repeat (ITR) or the sequence encoding a second inverted terminal repeat (ITR) comprises the sequence of

(SEQ ID NO: 17097)
CCCTAGAAAGATAATCATATTGTGACGTACGTTAAAGATAATCATGCGTA
AAATTGACGCATG.

In some embodiments, the sequence encoding a first inverted terminal repeat (ITR) or the sequence encoding a second inverted terminal repeat (ITR) comprises the sequence of

(SEQ ID NO: 17096)
CCCTAGAAAGATAGTCTGCGTAAAATTGACGCATG

and comprises the sequence of

(SEQ ID NO: 17097)
CCCTAGAAAGATAATCATATTGTGACGTACGTTAAAGATAATCATGCGTA
AAATTGACGCATG.

In some embodiments, the sequence encoding a first inverted terminal repeat (ITR) or the sequence encoding a second inverted terminal repeat (ITR) comprises the sequence of

(SEQ ID NO: 17096)
CCCTAGAAAGATAGTCTGCGTAAAATTGACGCATG

and comprises the sequence of

(SEQ ID NO: 17098)
CCCTAGAAAGATAATCATATTGTGACGTACGTTAAAGATAATCATGTGTA
AAATTGACGCATG.

In some embodiments, the sequence encoding a first inverted terminal repeat (ITR) or the sequence encoding a second inverted terminal repeat (ITR) comprises the sequence of CCCTAGAAAGATAGTCTGCGTAAAATTGACGCATG (SEQ ID NO: 17096) and comprises the sequence of

(SEQ ID NO: 17099)
TTAACCCTAGAAAGATAATCATATTGTGACGTACGTTAAAGATAATCATG
TGTAAAATTGACGCATGTGTTTTATCGGTCTGTATATCGAGGTTTATTTA
TTAATTTGAATAGATATTAAGTTTTATTATATTTACACTTACATACTAAT
AATAAATTCAACAAACAATTTATTTATGTTTATTTATTTATTAAAAAAAA
CAAAAACTCAAAATTTCTTCTATAAAGTAACAAAACTTTTA.

[0511] In some embodiments of the nanotransposons of the disclosure, including those wherein the at least one exogenous sequence comprises one or more of an inducible proapoptotic polypeptide, a sequence encoding a selectable marker, and an exogenous sequence, the sequence encoding a first inverted terminal repeat (ITR) or the sequence encoding a second inverted terminal repeat (ITR) are recognized by a piggyBac transposase or a piggyBac-like transposase. In some embodiments, the sequence encoding a first inverted terminal repeat (ITR) or the sequence encoding a second inverted terminal repeat (ITR) is recognized by a piggyBac transposase having an amino acid sequence of at least 20% identity to the amino acid sequence of

```
(SEQ ID NO: 14487)
    1 MGSSLDDEHI LSALLQSDDE LVGEDSDSEI SDHVSEDDVQ SDTEEAFIDE VHEVQPTSSG
  61 SEILDEQNVI EQPGSSLASN RILTLPQRTI RGKNKHCWST SKSTRRSRVS ALNIVRSQRG
121 PTRMCRNIYD PLLCFKLFFT DEIISEIVKW TNAEISLKRR ESMTGATFRD TNEDEIYAFF
181 GILVMTAVRK DNHMSTDDLF DRSLSMVYVS VMSRDRFDFL IRCLRMDDKS IRPTLRENDV
241 FTPVRKIWDL FIHQCIQNYT PGAHLTIDEQ LLGFRGRCPF RMYIPNKPSK YGIKILMMCD
301 SGTKYMINGM PYLGRGTQTN GVPLGEYYVK ELSKPVHGSC RNITCDNWFT SIPLAKNLLQ
361 EPYKLTIVGT VRSNKREIPE VLKNSRSRPV GTSMFCFDGP LTLVSYKPKP AKMVYLLSSC
421 DEDASINEST GKPQMVMYYN QTKGGVDTLD QMCSVMTCSR KTNRWPMALL YGMINIACIN
481 SFIIYSHNVS SKGEKVQSRK KFMRNLYMSL TSSFMRKRLE APTLKRYLRD NISNILPNEV
541 PGTSDDSTEE PVMKKRTYCT YCPSKIRRKA NASCKKCKKV ICREHNIDMC QSCF.
```

In some embodiments, the sequence encoding a first inverted terminal repeat (ITR) or the sequence encoding a second inverted terminal repeat (ITR) is recognized by a piggyBac transposase having the amino acid sequence of

```
(SEQ ID NO: 14487)
    1 MGSSLDDEHI LSALLQSDDE LVGEDSDSEI SDHVSEDDVQ SDTEEAFIDE VHEVQPTSSG
  61 SEILDEQNVI EQPGSSLASN RILTLPQRTI RGKNKHCWST SKSTRRSRVS ALNIVRSQRG
121 PTRMCRNIYD PLLCFKLFFT DEIISEIVKW TNAEISLKRR ESMTGATFRD TNEDEIYAFF
181 GILVMTAVRK DNHMSTDDLF DRSLSMVYVS VMSRDRFDFL IRCLRMDDKS IRPTLRENDV
241 FTPVRKIWDL FIHQCIQNYT PGAHLTIDEQ LLGFRGRCPF RMYIPNKPSK YGIKILMMCD
301 SGTKYMINGM PYLGRGTQTN GVPLGEYYVK ELSKPVHGSC RNITCDNWFT SIPLAKNLLQ
361 EPYKLTIVGT VRSNKREIPE VLKNSRSRPV GTSMFCFDGP LTLVSYKPKP AKMVYLLSSC
421 DEDASINEST GKPQMVMYYN QTKGGVDTLD QMCSVMTCSR KTNRWPMALL YGMINIACIN
481 SFIIYSHNVS SKGEKVQSRK KFMRNLYMSL TSSFMRKRLE APTLKRYLRD NISNILPNEV
541 PGTSDDSTEE PVMKKRTYCT YCPSKIRRKA NASCKKCKKV ICREHNIDMC QSCF.
```

In some embodiments, the sequence encoding a first inverted terminal repeat (ITR) or the sequence encoding a second inverted terminal repeat (ITR) is recognized by a piggyBac transposase having an amino acid sequence of at least 20% identity to the amino acid sequence of

```
(SEQ ID NO: 14484)
    1 MGSSLDDEHI LSALLQSDDE LVGEDSDSEV SDHVSEDDVQ SDTEEAFIDE VHEVQPTSSG
  61 SEILDEQNVI EQPGSSLASN RILTLPQRTI RGKNKHCWST SKSTRRSRVS ALNIVRSQRG
121 PTRMCRNIYD PLLCFKLFFT DEIISEIVKW TNAEISLKRR ESMTSATFRD TNEDEIYAFF
181 GILVMTAVRK DNHMSTDDLF DRSLSMVYVS VMSRDRFDFL IRCLRMDDKS IRPTLRENDV
241 FTPVRKIWDL FIHQCIQNYT PGAHLTIDEQ LLGFRGRCPF RVYIPNKPSK YGIKILMMCD
301 SGTKYMINGM PYLGRGTQTN GVPLGEYYVK ELSKPVHGSC RNITCDNWFT SIPLAKNLLQ
361 EPYKLTIVGT VRSNKREIPE VLKNSRSRPV GTSMFCFDGP LTLVSYKPKP AKMVYLLSSC
421 DEDASINEST GKPQMVMYYN QTKGGVDTLD QMCSVMTCSR KTNRWPMALL YGMINIACIN
481 SFIIYSHNVS SKGEKVQSRK KFMRNLYMSL TSSFMRKRLE APTLKRYLRD NISNILPKEV
541 PGTSDDSTEE PVMKKRTYCT YCPSKIRRKA NASCKKCKKV ICREHNIDMC QSCF.
```

In some embodiments, the sequence encoding a first inverted terminal repeat (ITR) or the sequence encoding a second inverted terminal repeat (ITR) is recognized by a piggyBac transposase having the amino acid sequence of

```
(SEQ ID NO: 14484)
    1 MGSSLDDEHI LSALLQSDDE LVGEDSDSEV SDHVSEDDVQ SDTEEAFIDE VHEVQPTSSG
  61 SEILDEQNVI EQPGSSLASN RILTLPQRTI RGKNKHCWST SKSTRRSRVS ALNIVRSQRG
121 PTRMCRNIYD PLLCFKLFFT DEIISEIVKW TNAEISLKRR ESMTSATFRD TNEDEIYAFF
181 GILVMTAVRK DNHMSTDDLF DRSLSMVYVS VMSRDRFDFL IRCLRMDDKS IRPTLRENDV
241 FTPVRKIWDL FIHQCIQNYT PGAHLTIDEQ LLGFRGRCPF RVYIPNKPSK YGIKILMMCD
301 SGTKYMINGM PYLGRGTQTN GVPLGEYYVK ELSKPVHGSC RNITCDNWFT SIPLAKNLLQ
361 EPYKLTIVGT VRSNKREIPE VLKNSRSRPV GTSMFCFDGP LTLVSYKPKP AKMVYLLSSC
421 DEDASINEST GKPQMVMYYN QTKGGVDTLD QMCSVMTCSR KTNRWPMALL YGMINIACIN
481 SFIIYSHNVS SKGEKVQSRK KFMRNLYMSL TSSFMRKRLE APTLKRYLRD NISNILPKEV
541 PGTSDDSTEE PVMKKRTYCT YCPSKIRRKA NASCKKCKKV ICREHNIDMC QSCF.
```

[0512] In some embodiments of the nanotransposons of the disclosure, including those wherein the at least one exogenous sequence comprises one or more of an inducible proapoptotic polypeptide, a sequence encoding a selectable marker, and an exogenous sequence, the sequence encoding a first inverted terminal repeat (ITR) or the sequence encoding a second inverted terminal repeat (ITR) are recognized by a Sleeping Beauty transposase. In some embodiments, the Sleeping Beauty transposase is a hyperactive Sleeping Beauty transposase (SB100X).

[0513] In some embodiments of the nanotransposons of the disclosure, including those wherein the at least one exogenous sequence comprises one or more of an inducible proapoptotic polypeptide, a sequence encoding a selectable marker, and an exogenous sequence, the sequence encoding a first inverted terminal repeat (ITR) or the sequence encoding a second inverted terminal repeat (ITR) are recognized by a Helitron transposase.

[0514] In some embodiments of the nanotransposons of the disclosure, including those wherein the at least one exogenous sequence comprises one or more of an inducible proapoptotic polypeptide, a sequence encoding a selectable marker, and an exogenous sequence, the sequence encoding a first inverted terminal repeat (ITR) or the sequence encoding a second inverted terminal repeat (ITR) are recognized by a Tol2 transposase.

[0515] The disclosure provides a cell comprising a nanotransposon of the disclosure. In some embodiments, the cell further comprises a transposase composition. In some embodiments, the transposase composition comprises a transposase or a sequence encoding the transposase that is capable of recognizing the first ITR or the second ITR of the nanotransposon. In some embodiments, the transposase composition comprises a nanotransposon comprising the sequence encoding the transposase. In some embodiments, the cell comprises a first nanotransposon comprising an exogenous sequence and a second nanotransposon comprising a sequence encoding a transposase. In some embodiments, the cell is an allogeneic cell.

[0516] The disclosure provides a composition comprising the nanotransposon of the disclosure.

[0517] The disclosure provides a composition comprising the cell of the disclosure. In some embodiments, the cell comprises a nanotransposon of the disclosure. In some embodiments, the cell is not further modified. In some embodiments, the cell is allogeneic.

[0518] The disclosure provides a composition comprising the cell of the disclosure. In some embodiments, the cell comprises a nanotransposon of the disclosure. In some embodiments, the cell is not further modified. In some embodiments, the cell is autologous.

[0519] The disclosure provides a composition comprising a plurality of cells of the disclosure. In some embodiments, at least one cell of the plurality of cells comprises a nanotransposon of the disclosure. In some embodiments, a portion of the plurality of cells comprises a nanotransposon of the disclosure. In some embodiments, the portion comprises at least 1%, 2%, 5%, 10%, 15%, 20%, 25%, 30%, 35%, 40%, 45%, 50%, 55%, 60%, 65%, 70%, 75%, 80%, 85%, 90%, 95%, 97%, 99% or any percentage in between of the plurality of cells. In some embodiments, each cell of the plurality of cells comprises a nanotransposon of the disclosure. In some embodiments, the plurality of cells does not comprise a modified cell of the disclosure. In some embodiments, at least one cell of the plurality of cells is not further modified. In some embodiments, none of the plurality of cells is not further modified. In some embodiments, plurality of cells is allogeneic. In some embodiments, an allogeneic plurality of cells are produced according to the methods of the disclosure. In some embodiments, plurality of cells is autologous. In some embodiments, an autologous plurality of cells are produced according to the methods of the disclosure.

[0520] The disclosure provides a modified cell comprising: (a) a nanotransposon of the disclosure; (b) a sequence encoding an inducible proapoptotic polypeptide; and wherein the cell is a T cell, (c) a modification of an endogenous sequence encoding a T cell Receptor (TCR), wherein the modification reduces or eliminates a level of expression or activity of the TCR. In some embodiments, the cell further comprises: (d) a non-naturally occurring sequence comprising an HLA class I histocompatibility antigen, alpha chain E (HLA-E), and (e) a modification of an endogenous sequence encoding Beta-2-Microglobulin (B2M), wherein the modification reduces or eliminates a level of expression or activity of a major histocompatibility complex (MHC) class I (MHC-I).

[0521] The disclosure provides a modified cell comprising: (a) a nanotransposon of the disclosure; (b) a sequence encoding an inducible proapoptotic polypeptide; (c) a non-naturally occurring sequence comprising an HLA class I histocompatibility antigen, alpha chain E (HLA-E), and (e) a modification of an endogenous sequence encoding Beta-2-Microglobulin (B2M), wherein the modification reduces or eliminates a level of expression or activity of a major histocompatibility complex (MHC) class I (MHC-I).

[0522] In some embodiments of the modified cells of the disclosure, the non-naturally occurring sequence comprising a HLA-E further comprises a sequence encoding a B2M signal peptide. In some embodiments, the non-naturally occurring sequence comprising an HLA-E further comprises a linker, wherein the linker is positioned between the sequence encoding the sequence encoding a B2M polypeptide and the sequence encoding the HLA-E. In some embodiments, the non-naturally occurring sequence comprising an HLA-E further comprises a sequence encoding a peptide and a sequence encoding a B2M polypeptide. In some embodiments, the non-naturally occurring sequence comprising an HLA-E further comprises a first linker positioned between the sequence encoding the B2M signal peptide and the sequence encoding the peptide, and a second linker positioned between the sequence encoding the B2M polypeptide and the sequence encoding the HLA-E.

[0523] In some embodiments of the cells, unmodified cells and modified cells of the disclosure, the cell is a mammalian cell.

[0524] In some embodiments of the cells, unmodified cells and modified cells of the disclosure, the cell is a human cell.

[0525] In some embodiments of the cells, unmodified cells and modified cells of the disclosure, the cell is a stem cell.

[0526] In some embodiments of the cells, unmodified cells and modified cells of the disclosure, the cell is a differentiated cell.

[0527] In some embodiments of the cells, unmodified cells and modified cells of the disclosure, the cell is a somatic cell.

[0528] In some embodiments of the cells, unmodified cells and modified cells of the disclosure, the cell is an immune cell or an immune cell precursor. In some embodiments, the immune cell is a lymphoid progenitor cell, a natural killer (NK) cell, a cytokine induced killer (CIK) cell, a T lymphocyte (T cell), a B lymphocyte (B-cell) or an antigen presenting cell (APC). In some embodiments, the immune cell is a T cell, an early memory T cell, a stem cell-like T cell, a stem memory T cell (Tscm), or a central memory T cell (Tcm). In some embodiments, the immune cell precursor is a hematopoietic stem cell (HSC). In some embodiments, the cell is an antigen presenting cell (APC).

[0529] In some embodiments of the cells, unmodified cells and modified cells of the disclosure, the cell further comprises a gene editing composition. In some embodiments, the gene editing composition comprises a sequence encoding a DNA binding domain and a sequence encoding a nuclease protein or a nuclease domain thereof. In some embodiments, the gene editing composition comprises a sequence encoding a nuclease protein or a sequence encoding a nuclease domain thereof. In some embodiments, the e sequence encoding a nuclease protein or the sequence encoding a nuclease domain thereof comprises a DNA sequence, an RNA sequence, or a combination thereof. In some embodiments, the nuclease or the nuclease domain thereof comprises one or more of a CRISPR/Cas protein, a Transcription Activator-Like Effector Nuclease (TALEN), a Zinc Finger Nuclease (ZFN), and an endonuclease. In some embodiments, the CRISPR/Cas protein comprises a nuclease-inactivated Cas (dCas) protein.

[0530] In some embodiments of the cells, unmodified cells and modified cells of the disclosure, the cell further comprises a gene editing composition. In some embodiments, the gene editing composition comprises a sequence encoding a DNA binding domain and a sequence encoding a nuclease protein or a nuclease domain thereof. In some embodiments, the nuclease or the nuclease domain thereof comprises a nuclease-inactivated Cas (dCas) protein and an endonuclease. In some embodiments, the endonuclease comprises a Clo051 nuclease or a nuclease domain thereof. In some embodiments, the gene editing composition comprises a fusion protein. In some embodiments, the fusion protein comprises a nuclease-inactivated Cas9 (dCas9) protein and a Clo051 nuclease or a Clo051 nuclease domain. In some embodiments, the gene editing composition further comprises a guide sequence. In some embodiments, the guide sequence comprises an RNA sequence. In some embodiments, the fusion protein comprises or consists of the amino acid sequence:

(SEQ ID NO: 17013)
MAPKKKRKVEGIKSNISLLKDELRGQISHISHEYLSLIDLAFDSKQNRLF
EMKVLELLVNEYGFKGRHLGGSRKPDGIVYSTTLEDNFGIIVDTKAYSEG
YSLPISQADEMERYVRENSNRDEEVNPNKWWENFSEEVKKYYFVFISGSF
KGKFEEQLRRLSMTTGVNGSAVNVVNLLLGAEKIRSGEMTIEELERAMFN
NSEFILKYGGGGSDKKYSIGLAIGTNSVGWAVITDEYKVPSKKEKVLGNT
DRHSIKKNLIGALLFDSGETAEATRLKRTARRRYTRRKNRICYLQEIFSN
EMAKVDDSFFHRLEESFLVEEDKKHERHPIFGNIVDEVAYHEKYPTIYHL
RKKLVDSTDKADLRLIYLALAHMIKFRGHFLIEGDLNPDNSDVDKLFIQL
VQTYNQLFEENPINASGVDAKAILSARLSKSRRLENLIAQLPGEKKNGLF
GNLIALSLGLIPNEKSNEDLAEDAKLQLSKDTYDDDLDNLLAQIGDQYAD
LFLAAKNLSDAILLSDILRVNTEITKAPLSASMIKRYDEHHQDLTLLKAL
VRQQLPEKYKEIFFDQSKNGYAGYIDGGASQEEFYKFIKPILEKMDGTEE
LLVKLNREDLLRKQRTFDNGSIPHQIHLGELHAILRRQEDFYPFLKDNRE
KIEKILTFRIPYYVGPLARGNSRFAWMTRKSEETITPWNFEEVVDKGASA
QSFIERMTNEDKNLPNEKVLPKHSLLYEYFTVYNELTKVKYVTEGMRKPA
FLSGEQKKAIVDLLEKTNRKVIVKQLKEDYFKKIECEDSVEISGVEDRFN
ASLGTYHDLLKIIKDKDFLDNEENEDILEDIVLILTLFEDREMIEERLKT
YAHLFDDKVMKQLKRRRYTGWGRLSRKLINGIRDKQSGKTILDFLKSDGF
ANRNFMQLIHDDSLTFKEDIQKAQVSGQGDSLHEHIANLAGSPAIKKGIL
QTVKVVDELVKVMGRHKPENIVIEMARENQTTQKGQKNSRERMKRIEEGI
KELGSQILKEHPVENTQLQNEKLYLYYLQNGRDMYVDQELDINRLSDYDV
DAIVPQSFLKDDSIDNKVLTRSDKNRGKSDNVPSEEVVKKMKNYWRQLLN
AKLITQRKEDNLIKAERGGLSELDKAGFIKRQLVETRQITKHVAQILDSR
MNTKYDENDKLIREVKVITLKSKLVSDFRKDFQFYKVREINNYHHAHDAY
LNAVVGTALIKKYPKLESEFVYGDYKVYDVRKMIAKSEQEIGKATAKYFF
YSNIMNFFKTEITLANGEIRKRPLIETNGETGEIVWDKGRDFATVRKVLS
MPQVNIVKKTEVQTGGFSKESILPKRNSDKLIARKKDWDPKKYGGFDSPT
VAYSVLVVAKVEKGKSKKLKSVKELLGITIMERSSFEKNPIDFLEAKGYK
EVKKDLIIKLPKYSLFELENGRKRMLASAGELQKGNELALPSKYVNFLYL
ASHYEKLKGSPEDNEQKQLFVEQHKHYLDEIIEQISEFSKRVILADANLD
KVLSAYNKHRDKPIREQAENIIHLFTLTNLGAPAAFKYFDTTIDRKRYTS
TKEVLDATLIHQSITGLYETRIDLSQLGGDGSPKKKRKVSS

or a nucleic acid comprising or consisting of the sequence:

```
(SEQ ID NO: 17014)
      1 atggcaccaa agaagaaaag aaaagtggag ggcatcaagt caaacatcag cctgctgaaa
    61 gacgaactgc ggggacagat tagtcacatc agtcacgagt acctgtcact gattgatctg
  121 gccttcgaca gcaagcagaa tagactgttt gagatgaaag tgctggaact gctggtcaac
  181 gagtatggct tcaagggcag acatctgggc gggtctagga aacctgacgg catcgtgtac
  241 agtaccacac tggaagacaa cttcggaatc attgtcgata ccaaggctta ttccgagggc
  301 tactctctgc caattagtca ggcagatgag atggaaaggt acgtgcgcga aaactcaaat
  361 agggacgagg aagtcaaccc caataagtgg tgggagaatt tcagcgagga agtgaagaaa
  421 tactacttcg tctttatctc aggcagcttc aaagggaagt ttgaggaaca gctgcggaga
  481 ctgtccatga ctaccggggt gaacggatct gctgtcaacg tggtcaatct gctgctgggc
  541 gcagaaaaga tcaggtccgg ggagatgaca attgaggaac tggaacgcgc catgttcaac
  601 aattctgagt ttatcctgaa gtatggaggc gggggaagcg ataagaaata ctccatcgga
  661 ctggccattg gcaccaattc cgtgggctgg gctgtcatca cagacgagta caaggtgcca
  721 agcaagaagt tcaaggtcct ggggaacacc gatcgccaca gtatcaagaa aaatctgatt
  781 ggagccctgc tgttcgactc aggcgagact gctgaagcaa cccgactgaa gcggactgct
  841 aggcgccgat atacccggag aaaaaatcgg atctgctacc tgcaggaaat tttcagcaac
  901 gagatggcca aggtggacga tagtttcttt caccgcctgg aggaatcatt cctggtggag
  961 gaagataaga aacacgagcg gcatcccatc tttggcaaca ttgtggacga agtcgcttat
1021 cacgagaagt accctactat ctatcatctg aggaagaaac tggtggactc caccgataag
1081 gcagacctgc gcctgatcta tctggccctg gctcacatga tcaagttccg ggggcatttt
1141 ctgatcgagg gagatctgaa ccctgacaat tctgatgtgg acaagctgtt catccagctg
1201 gtccagacat acaatcagct gtttgaggaa aacccaatta atgcctcagg cgtggacgca
1261 aaggccatcc tgagcgccag actgtccaaa tctaggcgcc tggaaaacct gatcgctcag
1321 ctgccaggag agaagaaaaa cggcctgttt gggaatctga ttgcactgtc cctgggcctg
1381 acacccaact tcaagtctaa ttttgatctg gccgaggacg ctaagctgca gctgtccaaa
1441 gacacttatg acgatgacct ggataacctg ctggctcaga tcggcgatca gtacgcagac
1501 ctgttcctgg ccgctaagaa tctgagtgac gccatcctgc tgtcagatat tctgcgcgtg
1561 aacacagaga ttactaaggc cccactgagt gcttcaatga tcaaaagata tgacgagcac
1621 catcaggatc tgaccctgct gaaggctctg gtgaggcagc agctgcccga gaaatacaag
1681 gaaatcttct ttgatcagag caagaatgga tacgccggct atattgacgg cggggcttcc
1741 caggaggagt tctacaagtt catcaagccc attctggaaa agatggacgg caccgaggaa
1801 ctgctggtga agctgaatcg ggaggacctg ctgagaaaac agaggacatt tgataacgga
1861 agcatccctc accagattca tctgggcgaa ctgcacgcca tcctgcgacg gcaggaggac
1921 ttctacccat ttctgaagga taaccgcgag aaaatcgaaa agatcctgac cttcagaatc
1981 ccctactatg tggggcctct ggcacgggga aatagtagat ttgcctggat gacaagaaag
2041 tcagaggaaa ctatcacccc ctggaacttc gaggaagtgg tcgataaagg cgctagcgca
2101 cagtccttca ttgaaaggat gacaaatttt gacaagaacc tgccaaatga gaaggtgctg
2161 cccaaacaca gcctgctgta cgaatatttc acagtgtata acgagctgac taaagtgaag
2221 tacgtcaccg aagggatgcg caagcccgca ttcctgtccg gagagcagaa gaaagccatc
2281 gtggacctgc tgtttaagac aaatcggaaa gtgactgtca aacagctgaa ggaagactat
2341 ttcaagaaaa ttgagtgttt cgattcagtg gaaatcagcg gcgtcgagga caggtttaac
2401 gcctccctgg ggacctacca cgatctgctg aagatcatca aggataagga cttcctggac
2461 aacgaggaaa atgaggacat cctggaggac attgtgctga cactgactct gtttgaggat
2521 cgcgaaatga tcgaggaacg actgaagact tatgcccatc tgttcgatga caaagtgatg
2581 aagcagctga aaagaaggcg ctacaccgga tggggacgcc tgagccgaaa actgatcaat
2641 gggattagag acaagcagag cggaaaaact atcctggact ttctgaagtc cgatggcttc
2701 gccaacagga acttcatgca gctgattcac gatgactctc tgaccttcaa ggaggacatc
2761 cagaaagcac aggtgtctgg ccagggggac agtctgcacg agcatatcgc aaacctggcc
2821 ggcagccccg ccatcaagaa agggattctg cagaccgtga aggtggtgga cgaactggtc
2881 aaggtcatgg gacgacacaa acctgagaac atcgtgattg agatggcccg cgaaaatcag
2941 acaactcaga agggccagaa aaacagtcga gaacggatga agagaatcga ggaaggcatc
3001 aaggagctgg ggtcacagat cctgaaggag catcctgtgg aaaacactca gctgcagaat
3061 gagaaactgt atctgtacta tctgcagaat ggacgggata tgtacgtgga ccaggagctg
3121 gatattaaca gactgagtga ttatgacgtg gatgccatcg tccctcagag cttcctgaag
3181 gatgactcca ttgacaacaa ggtgctgacc aggtccgaca agaaccgcgg caaatcagat
3241 aatgtgccaa gcgaggaagt ggtcaagaaa atgaagaact actggaggca gctgctgaat
3301 gccaagctga tcacacagcg gaaatttgat aacctgacta aggcagaaag aggaggcctg
3361 tctgagctgg acaaggccgg cttcatcaag cggcagctgg tggagacaag acagatcact
3421 aagcacgtcg ctcagattct ggatagcaga atgaacacaa agtacgatga aaacgacaag
3481 ctgatcaggg aggtgaaagt cattactctg aaatccaagc tggtgtctga ctttagaaag
3541 gatttccagt tttataaagt cagggagatc aacaactacc accatgctca tgacgcatac
3601 ctgaacgcag tggtcgggac cgccctgatt aagaaatacc ccaagctgga gtccgagttc
3661 gtgtacggag actataaagt gtacgatgtc cggaagatga tcgccaaatc tgagcaggaa
3721 attggcaagg ccaccgctaa gtatttcttt tacagtaaca tcatgaattt ctttaagacc
3781 gaaatcacac tggcaaatgg ggagatcaga aaaaggcctc tgattgagac caacggggag
3841 acaggagaaa tcgtgtggga caagggaagg gattttgcta ccgtgcgcaa agtcctgtcc
3901 atgccccaag tgaatattgt caagaaaact gaagtgcaga ccgggggatt ctctaaggag
3961 agtattctgc ctaagcgaaa ctctgataaa ctgatcgccc ggaagaaaga ctgggacccc
4021 aagaagtatg gcgggttcga ctctccaaca gtggcttaca gtgtcctggt ggtcgcaaag
4081 gtggaaaagg ggaagtccaa gaaactgaag tctgtcaaag agctgctggg aatcactatt
4141 atggaacgca gctccttcga gaagaatcct atcgattttc tggaagccaa gggctataaa
4201 gaggtgaaga aagacctgat cattaagctg ccaaaatact cactgtttga gctggaaaac
4261 ggacgaaagc gaatgctggc aagcgccgga gaactgcaga agggcaatga gctggccctg
4321 ccctccaaat acgtgaactt cctgtatctg gctagccact acgagaaact gaaggggtcc
4381 cctgaggata acgaacagaa gcagctgttt gtggagcagc acaaacatta tctggacgag
4441 atcattgaac agatttcaga gttcagcaag agagtgatcc tggctgacgc aaatctggat
4501 aaagtcctga gcgcatacaa caagcaccga gacaaaccaa tccgggagca ggccgaaaat
4561 atcattcatc tgttcaccct gacaaacctg ggcgcccctg cagccttcaa gtattttgac
4621 accacaatcg atcggaagag atacacttct accaaagagg tgctggatgc taccctgatc
4681 caccagagta ttaccggcct gtatgagaca cgcatcgacc tgtcacagct gggaggcgat
4741 gggagcccca agaaaaagcg gaaggtgtct agttaa.
```

In some embodiments, the fusion protein comprises or consists of the amino acid sequence:

```
((SEQ ID NO: 17058)
      1 MPKKKRKVEG IKSNISLLKD ELRGQISHIS HEYLSLIDLA FDSKQNRLFE MKVLELLVNE
    61 YGFKGRHLGG SRKPDGIVYS TTLEDNFGII VDTKAYSEGY SLPISQADEM ERYVRENSNR
  121 DEEVNPNKWW ENFSEEVKKY YFVFISGSFK GKFEEQLRRL SMTTGVNGSA VNVVNLLLGA
  181 EKIRSGEMTI EELERAMFNN SEFILKYGGG GSDKKYSIGL AIGTNSVGWA VITDEYKVPS
  241 KKFKVLGNTD RHSIKKNLIG ALLFDSGETA EATRLKRTAR RRYTRRKNRI CYLQEIFSNE
  301 MAKVDDSFFH RLEESFLVEE DKKHERHPIF GNIVDEVAYH EKYPTIYHLR KKLVDSTDKA
  361 DLRLIYLALA HMIKFRGHFL IEGDLNPDNS DVDKLFIQLV QTYNQLFEEN PINASGVDAK
  421 AILSARLSKS RRLENLIAQL PGEKKNGLFG NLIALSLGLT PNFKSNFDLA EDAKLQLSKD
  481 TYDDDLDNLL AQIGDQYADL FLAAKNLSDA ILLSDILRVN TEITKAPLSA SMIKRYDEHH
  541 QDLTLLKALV RQQLPEKYKE IFFDQSKNGY AGYIDGGASQ EEFYKFIKPI LEKMDGTEEL
  601 LVKLNREDLL RKQRTFDNGS IPHQIHLGEL HAILRRQEDF YPFLKDNREK IEKILTFRIP
  661 YYVGPLARGN SRFAWMTRKS EETITPWNFE EVVDKGASAQ SFIERMTNFD KNLPNEKVLP
  721 KHSLLYEYFT VYNELTKVKY VTEGMRKPAF LSGEQKKAIV DLLFKTNRKV TVKQLKEDYF
  781 KKIECFDSVE ISGVEDRFNA SLGTYHDLLK IIKDKDFLDN EENEDILEDI VLTLTLFEDR
  841 EMIEERLKTY AHLFDDKVMK QLKRRRYTGW GRLSRKLING IRDKQSGKTI LDFLKSDGFA
  901 NRNFMQLIHD DSLTFKEDIQ KAQVSGQGDS LHEHIANLAG SPAIKKGILQ TVKVVDELVK
  961 VMGRHKPENI VIEMARENQT TQKGQKNSRE RMKRIEEGIK ELGSQILKEH PVENTQLQNE
1021 KLYLYYLQNG RDMYVDQELD INRLSDYDVD AIVPQSFLKD DSIDNKVLTR SDKNRGKSDN
1081 VPSEEVVKKM KNYWRQLLNA KLITQRKFDN LTKAERGGLS ELDKAGFIKR QLVETRQITK
1141 HVAQILDSRM NTKYDENDKL IREVKVITLK SKLVSDFRKD FQFYKVREIN NYHHAHDAYL
1201 NAVVGTALIK KYPKLESEFV YGDYKVYDVR KMIAKSEQEI GKATAKYFFY SNIMNFFKTE
1261 ITLANGEIRK RPLIETNGET GEIVWDKGRD FATVRKVLSM PQVNIVKKTE VQTGGFSKES
1321 ILPKRNSDKL IARKKDWDPK KYGGFDSPTV AYSVLVVAKV EKGKSKKLKS VKELLGITIM
1381 ERSSFEKNPI DFLEAKGYKE VKKDLIIKLP KYSLFELENG RKRMLASAGE LQKGNELALP
1441 SKYVNFLYLA SHYEKLKGSP EDNEQKQLFV EQHKHYLDEI IEQISEFSKR VILADANLDK
1501 VLSAYNKHRD KPIREQAENI IHLFTLINLG APAAFKYFDT TIDRKRYTST KEVLDATLIH
1561 QSITGLYETR IDLSQLGGDG SPKKKRKV
```

or a nucleic acid comprising or consisting of the sequence:

```
(SEQ ID NO: 17059)
      1 atgcctaaga agaagcggaa ggtggaaggc atcaaaagca acatctccct cctgaaagac
    61 gaactccggg ggcagattag ccacattagt cacgaatacc tctccctcat cgacctggct
  121 ttcgatagca agcagaacag gctctttgag atgaaagtgc tggaactgct cgtcaatgag
  181 tacgggttca agggtcgaca cctcggcgga tctaggaaac cagacggcat cgtgtatagt
  241 accacactgg aagacaactt tgggatcatt gtggatacca aggcatactc tgagggttat
  301 agtctgccca tttcacaggc cgacgagatg gaacggtacg tgcgcgagaa ctcaaataga
  361 gatgaggaag tcaaccctaa caagtggtgg gagaacttct ctgaggaagt gaagaaatac
  421 tacttcgtct ttatcagcgg gtccttcaag ggtaaatttg aggaacagct caggagactg
  481 agcatgacta ccggcgtgaa tggcagcgcc gtcaacgtgg tcaatctgct cctgggcgct
  541 gaaaagattc ggagcggaga gatgaccatc gaagagctgg agagggcaat gtttaataat
  601 agcgagttta tcctgaaata cggtggcggt ggatccgata aaaagtattc tattggttta
  661 gccatcggca ctaattccgt tggatgggct gtcataaccg atgaatacaa agtaccttca
  721 aagaaattta aggtgttggg gaacacagac cgtcattcga ttaaaaagaa tcttatcggt
  781 gccctcctat tcgatagtgg cgaaacggca gaggcgactc gcctgaaacg aaccgctcgg
  841 agaaggtata cacgtcgcaa gaaccgaata tgttacttac aagaaatttt tagcaatgag
  901 atggccaaag ttgacgattc tttctttcac cgtttggaag agtccttcct tgtcgaagag
  961 gacaagaaac atgaacggca ccccatcttt ggaaacatag tagatgaggt ggcatatcat
1021 gaaaagtacc caacgattta tcacctcaga aaaaagctag ttgactcaac tgataaagcg
1081 gacctgaggt taatctactt ggctcttgcc catatgataa agttccgtgg gcactttctc
1141 attgagggtg atctaaatcc ggacaactcg gatgtcgaca aactgttcat ccagttagta
1201 caaacctata atcagttgtt tgaagagaac cctataaatg caagtggcgt ggatgcgaag
1261 gctattctta gcgcccgcct ctctaaatcc cgacggctag aaaacctgat cgcacaatta
1321 cccggagaga agaaaaatgg gttgttcggt aaccttatag cgctctcact aggcctgaca
1381 ccaaatttta agtcgaactt cgacttagct gaagatgcca aattgcagct tagtaaggac
1441 acgtacgatg acgatctcga caatctactg gcacaaattg gagatcagta tgcggactta
1501 tttttggctg ccaaaaacct tagcgatgca atcctcctat ctgacatact gagagttaat
1561 actgagatta ccaaggcgcc gttatccgct tcaatgatca aaaggtacga tgaacatcac
1621 caagacttga cacttctcaa ggccctagtc cgtcagcaac tgcctgagaa atataaggaa
1681 atattctttg atcagtcgaa aaacgggtac gcaggttata ttgacggcgg agcgagtcaa
1741 gaggaattct acaagtttat caaacccata ttagagaaga tggatgggac ggaagagttg
1801 cttgtaaaac tcaatcgcga agatctactg cgaaagcagc ggactttcga caacggtagc
1861 attccacatc aaatccactt aggcgaattg catgctatac ttagaaggca ggaggatttt
1921 tatccgttcc tcaaagacaa tcgtgaaaag attgagaaaa tcctaacctt tcgcatacct
1981 tactatgtgg gacccctggc ccgagggaac tctcggttcg catggatgac aagaaagtcc
2041 gaagaaacga ttactccatg gaattttgag gaagttgtcg ataaaggtgc gtcagctcaa
2101 tcgttcatcg agaggatgac caactttgac aagaatttac cgaacgaaaa agtattgcct
2161 aagcacagtt tactttacga gtatttcaca gtgtacaatg aactcacgaa agttaagtat
2221 gtcactgagg gcatgcgtaa acccgccttt ctaagcggag aacagaagaa agcaatagta
2281 gatctgttat tcaagaccaa ccgcaaagtg acagttaagc aattgaaaga ggactacttt
2341 aagaaaattg aatgcttcga ttctgtcgag atctccgggg tagaagatcg atttaatgcg
2401 tcacttggta cgtatcatga cctcctaaag ataattaaag ataaggactt cctggataac
2461 gaagagaatg aagatatctt agaagatata gtgttgactc ttaccctctt tgaagatcgg
2521 gaaatgattg aggaaagact aaaaacatac gctcacctgt tcgacgataa ggttatgaaa
2581 cagttaaaga ggcgtcgcta tacgggctgg ggacgattgt cgcggaaact tatcaacggg
2641 ataagagaca agcaaagtgg taaaactatt ctcgattttc taaagagcga cggcttcgcc
2701 aataggaact ttatgcagct gatccatgat gactctttaa ccttcaaaga ggatatacaa
2761 aaggcacagg tttccggaca aggggactca ttgcacgaac atattgcgaa tcttgctggt
2821 tcgccagcca tcaaaaaggg catactccag acagtcaaag tagtggatga gctagttaag
2881 gtcatgggac gtcacaaacc ggaaaacatt gtaatcgaga tggcacgcga aaatcaaacg
2941 actcagaagg ggcaaaaaaa cagtcgagag cggatgaaga gaatagaaga gggtattaaa
3001 gaactgggca gccagatctt aaaggagcat cctgtggaaa atacccaatt gcagaacgag
3061 aaactttacc tctattacct acaaaatgga agggacatgt atgttgatca ggaactggac
3121 ataaaccgtt tatctgatta cgacgtcgat gccattgtac cccaatcctt tttgaaggac
3181 gattcaatcg acaataaagt gcttacacgc tcggataaga accgagggaa aagtgacaat
3241 gttccaagcg aggaagtcgt aaagaaaatg aagaactatt ggcggcagct cctaaatgcg
3301 aaactgataa cgcaaagaaa gttcgataac ttaactaaag ctgagagggg tggcttgtct
3361 gaacttgaca aggccggatt tattaaacgt cagctcgtgg aaacccgcca aatcacaaag
3421 catgttgcac agatactaga ttcccgaatg aatacgaaat acgacgagaa cgataagctg
3481 attcgggaag tcaaagtaat cactttaaag tcaaaattgg tgtcggactt cagaaaggat
3541 tttcaattct ataaagttag ggagataaat aactaccacc atgcgcacga cgcttatctt
3601 aatgccgtcg tagggaccgc actcattaag aaatacccga agctagaaag tgagtttgtg
3661 tatggtgatt acaaagttta tgacgtccgt aagatgatcg cgaaaagcga acaggagata
3721 ggcaaggcta cagccaaata cttcttttat tctaacatta tgaatttctt taagacggaa
3781 atcactctgg caaacggaga gatacgcaaa cgacctttaa ttgaaaccaa tggggagaca
3841 ggtgaaatcg tatgggataa gggccgggac ttcgcgacgg tgagaaaagt tttgtccatg
3901 ccccaagtca acatagtaaa gaaaactgag gtgcagaccg gagggttttc aaaggaatcg
3961 attcttccaa aaaggaatag tgataagctc atcgctcgta aaaaggactg ggacccgaaa
4021 aagtacggtg gcttcgatag ccctacagtt gcctattctg tcctagtagt ggcaaaagtt
4081 gagaagggaa aatccaagaa actgaagtca gtcaaagaat tattggggat aacgattatg
4141 gagcgctcgt cttttgaaaa gaaccccatc gacttccttg aggcgaaagg ttacaaggaa
4201 gtaaaaaagg atctcataat taaactacca aagtatagtc tgtttgagtt agaaaatggc
4261 cgaaaacgga tgttggctag cgccggagag cttcaaaagg ggaacgaact cgcactaccg
4321 tctaaatacg tgaatttcct gtatttagcg tcccattacg agaagttgaa aggttcacct
4381 gaagataacg aacagaagca actttttgtt gagcagcaca aacattatct cgacgaaatc
4441 atagagcaaa tttcggaatt cagtaagaga gtcatcctag ctgatgccaa tctggacaaa
4501 gtattaagcg catacaacaa gcacagggat aaacccatac gtgagcaggc ggaaaatatt
4561 atccatttgt ttactcttac caacctcggc gctccagccg cattcaagta ttttgacaca
4621 acgatagatc gcaaacgata cacttctacc aaggaggtgc tagacgcgac actgattcac
4681 caatccatca cgggattata tgaaactcgg atagatttgt cacagcttgg gggtgacgga
4741 tcccccaaga agaagaggaa agtctga.
```

[0531] In some embodiments of the cells, unmodified cells and modified cells of the disclosure, a nanotransposon comprises the gene editing composition comprising a guide sequence and a sequence encoding a fusion protein comprising a sequence encoding an inactivated Cas9 (dCas9) and a sequence encoding a Clo051 nuclease or a nuclease domain thereof.

[0532] In some embodiments of the cells, unmodified cells and modified cells of the disclosure, the cell expresses the gene editing composition transiently.

[0533] In some embodiments of the cells, unmodified cells and modified cells of the disclosure, the cell is a T cell and the guide RNA comprises a sequence complementary to a target sequence encoding an endogenous TCR. In some embodiments, the guide RNA comprises a sequence complementary to a target sequence encoding a B2M polypeptide.

[0534] In some embodiments of the cells, unmodified cells and modified cells of the disclosure, the guide RNA comprises a sequence complementary to a target sequence within a safe harbor site of a genomic DNA sequence.

[0535] In some embodiments of the cells, unmodified cells and modified cells of the disclosure, the Clo051 nuclease or a nuclease domain thereof induces a single or double strand break in a target sequence. In some embodiments, a donor sequence, a donor plasmid, or a donor nanotransposon intra-ITR sequence integrated at a position of single or double strand break and/or at a position of cellular repair within a target sequence.

[0536] The disclosure provides a composition comprising a modified cell according to the disclosure. In some embodiments, the composition further comprises a pharmaceutically-acceptable carrier.

[0537] The disclosure provides a composition comprising a plurality of modified cells according to the disclosure. In some embodiments, the composition further comprises a pharmaceutically-acceptable carrier.

[0538] The disclosure provides a composition of the disclosure for use in the treatment of a disease or disorder.

[0539] The disclosure provides the use of a composition of the disclosure for the treatment of a disease or disorder.

[0540] The disclosure provides a method of treating a disease or disorder comprising administering to a subject in need thereof a therapeutically-effective amount of a composition of the disclosure. In some embodiments, the subject does not develop graft vs. host (GvH) and/or host vs. graft (HvG) following administration of the composition. In some embodiments, the administration is systemic. In some embodiments, the composition is administered by an intravenous route. In some embodiments, the composition is administered by an intravenous injection or an intravenous infusion.

[0541] The disclosure provides a method of treating a disease or disorder comprising administering to a subject in need thereof a therapeutically-effective amount of a composition of the disclosure. In some embodiments, the subject does not develop graft vs. host (GvH) and/or host vs. graft (HvG) following administration of the composition. In some embodiments, the administration is local. In some embodiments, the composition is administered by an intra-tumoral route, an intraspinal route, an intracerebroventricular route, an intraocular route or an intraosseous route. In some embodiments, the composition is administered by an intra-tumoral injection or infusion, an intraspinal injection or infusion, an intracerebroventricular injection or infusion, an intraocular injection or infusion or an intraosseous injection or infusion.

[0542] In some embodiments of the methods of treating a disease or disorder of the disclosure, the therapeutically effective dose is a single dose and wherein the allogeneic cells of the composition engraft and/or persist for a sufficient time to treat the disease or disorder. In some embodiments, the single dose is one of at least 2, 5, 10, 15, 20, 25, 30, 35, 40, 45, 50, 55, 60, 65, 70, 75, 80, 85, 90, 95, 100 or any number of doses in between that are manufactured simultaneously.

[0543] In some embodiments of the methods of treating a disease or disorder of the disclosure, the therapeutically effective dose is a single dose and wherein the autologous cells of the composition engraft and/or persist for a sufficient time to treat the disease or disorder. In some embodiments, the single dose is one of at least 2, 5, 10, 15, 20, 25, 30, 35, 40, 45, 50, 55, 60, 65, 70, 75, 80, 85, 90, 95, 100 or any number of doses in between that are manufactured simultaneously.

### Vectors and Host Cells

[0544] The disclosure also relates to vectors that include isolated nucleic acid molecules of the disclosure, host cells that are genetically engineered with the recombinant vectors, and the production of at least one Centyrin or CARTyrin by recombinant techniques, as is well known in the art. See, e.g., Sambrook, et al., supra; Ausubel, et al., supra, each entirely incorporated herein by reference.

[0545] For example, the PB-EF1a vector may be used. The vector comprises the following nucleotide sequence:

(SEQ ID NO: 18051)
tgtacatagattaaccctagaaagataatcatattgtgacgtacgttaaagataatcatgcgtaaaattgacgcatgtgttttatcggtctgt
atatcgaggtttatttattaatttgaatagatattaagttttattatatttacacttacatactaataataaattcaacaaacaatttatttatgtttatt
tatttattaaaaaaaaacaaaaactcaaaatttcttctataaagtaacaaaacttttatcgaatacctgcagcccgggggatgcagaggga
cagcccccccccaaagcccccagggatgtaattacgtccctcccccgctagggggcagcagcgagccgcccggggctccgctcc
ggtccggcgctccccccgcatccccgagccggcagcgtgcggggacagcccgggcacggggaaggtggcacgggatcgctttc
ctctgaacgcttctcgctgctattgagcctgcagacacctggggggatacggggaaaagttgactgtgcctttcgatcgaaccatgga
cagttagctttgcaaagatggataaagttttaaacagagaggaatctagcagctaatggaccttctaggtcttgaaaggagtgggaattg
gctccggtgcccgtcagtgggcagagcgcacatcgcccacagtccccgagaagttggggggaggggtcggcaattgaaccggtg
cctagagaaggtggcgcggggtaaactgggaaagtgatgtcgtgtactggctccgcctttttcccgagggtgggggagaaccgtata
taagtgcagtagtcgccgtgaacgttctttttcgcaacgggtttgccgccagaacacaggtaagtgccgtgtgtggttcccgcgggcct
ggcctctttacgggttatggcccttgcgtgccttgaattacttccacctggctgcagtacgtgattcttgatcccgagcttcgggttggaag
tgggtgggagagttcgaggccttgcgcttaaggagccccttcgcctcgtgcttgagttgaggcctggcctgggcgctggggccgccg
cgtgcgaatctggtggcaccttcgcgcctgtctcgctgctttcgataagtctctagccatttaaaatttttgatgacctgctgcgacgcttttt
ttctggcaagatagtcttgtaaatgcgggccaagatctgcacactggtatttcggataggggccgcgggcggcgacggggcccgtg
cgtcccagcgcacatgttcggcgaggcggggcctgcgagcgcggccaccgagaatcggacgggggtagtctcaagctggccggc
ctgctctggtgcctggcctcgcgccgccgtgtatcgccccgccctgggcggcaaggctggcccggtcggcaccagttgcgtgagcg
gaaagatggccgcttcccggccctgctgcagggagctcaaaatggaggacgcggcgctcgggagagcgggcgggtgagtcaccc
acacaaaggaaaagggcctttccgtcctcagccgtcgcttcatgtgactccacggagtaccgggcgccgtccaggcacctcgattagt
tctcgagcttttggagtacgtcgtctttaggttggggggaggggttttatgcgatggagtttccccacactgagtgggtggagactgaag
ttaggccagcttggcacttgatgtaattctccttggaatttgccctattgagtttggatcttggttcattctcaagcctcagacagtggttcaa
agtttttttcttccatttcaggtgtcgtgagaattctaatacgactcactatagggtgtgctgtctcatcattttggcaaagattggccaccaa
gcttgtcctgcaggagggtcgacgcctctagacgggcggccgctccggatccacgggtaccgatcacatatgcctttaattaaacact
agttctatagtgtcacctaaattccctttagtgagggttaatggccgtaggccgccagaattgggtccagacatgataagatacattgatg
agtttggacaaaccacaactagaatgcagtgaaaaaaatgctttatttgtgaaatttgtgatgctattgctttatttgtaaccattataagctg
caataaacaagttaacaacaacaattgcattcatatatgtacaggttcagggggaggtgtgggaggattacggactctaggacctgcg
catgcgcttggcgtaatcatggtcatagctgtttcctgttttccccgtatccccccaggtgtctgcaggctcaaagagcagcgagaagcg
ttcagaggaaagcgatcccgtgccaccttccccgtgcccgggctgtccccgcacgctgccggctcggggatgcggggggagcgcc
ggaccggagcggagccccgggcggctcgctgctgccccctagcgggggagggacgtaattacatccctgggggctttggggggg
ggctgtccctctcaccgcggtggagctccagcttttgttcgaattggggccccccctcgagggtatcgatgatatctataacaagaaaat
atatatataataagttatcacgtaagtagaacatgaaataacaatataattatcgtatgagttaaatcttaaaagtcacgtaaaagataatcat
gcgtcattttgactcacgcggtcgttatagttcaaaatcagtgacacttaccgcattgacaagcacgcctcacgggagctccaagcggc
gactgagatgtcctaaatgcacagcgacggattcgcgctatttagaaagagagagcaatatttcaagaatgcatgcgtcaattttacgca
gactatctttctagggttaatctagctagccttaagggcgcctattgcgttgcgctcactgcccgctttccagtcgggaaacctgtcgtgc
cagctgcattaatgaatcggccaacgcgcggggagaggcggtagcgtattgggcgctcttccgcttcctcgctcactgactcgctgc
gctcggtcgttcggctgcggcgagcggtatcagctcactcaaaggcggtaatacggttatccacagaatcaggggataacgcaggaa
agaacatgaccaaaatcccttaacgtgagttttcgttccactgagcgtcagaccccgtagaaaagatcaaaggatcttcttgagatccttt
ttttctgcgcgtaatctgctgcttgcaaacaaaaaaaccaccgctaccagcggtggtttgtttgccggatcaagagctaccaactctttttc
cgaaggtaactggcttcagcagagcgcagataccaaatactgttcttctagtgtagccgtagttaggccaccacttcaagaactctgtag
caccgcctacatacctcgctctgctaatcctgttaccagtggctgctgccagtggcgataagtcgtgtcttaccgggttggactcaagac
gatagttaccggataaggcgcagcggtcgggctgaacggggggttcgtgcacacagcccagcttggagcgaacgacctacaccga
actgagatacctacagcgtgagctatgagaaagcgccacgcttcccgaagggagaaaggcggacaggtatccggtaagcggcagg
gtcggaacaggagagcgcacgagggagcttccagggggaaacgcctggtatctttatagtcctgtcgggtttcgccacctctgacttg
agcgtcgatttttgtgatgctcgtcaggggggcggagcctatggaaaaacgccagcaacgcggcctttttacggttcctggccttagct
ggccattgctcacatgagattatcaaaaaggatcttcacctagatccttttaaattaaaaatgaagattaaatcaatctaaagtatatatga
gtaaacttggictgacagtcagaagaactcgtcaagaaggcgatagaaggcgatgcgctgcgaatcgggagcggcgataccgtaaa
gcacgaggaagcggtcagcccattcgccgccaagctcttcagcaatatcacgggtagccaacgctatgtcctgatagcggtccgcca
cacccagccggccacagtcgatgaatccagaaaagcggccattttccaccatgatattcggcaagcaggcatcgccatgggtcacga
cgagatcctcgccgtcgggcatgctcgccttgagcctggcgaacagttcggctggcgcgagcccctgatgctcttcgtccagatcatc
ctgatcgacaagaccggcttccatccgagtacgtgctcgctcgatgcgatgtttcgcttggtggtcgaatgggcaggtagccggatca
agcgtatgcagccgccgcattgcatcagccatgatggatactttctcggcaggagcaaggtgagatgacaggagatcctgccccggc
acttcgcccaatagcagccagtcccttcccgcttcagtgacaacgtcgagcacagctgcgcaaggaacgcccgtcgtggccagcca
cgatagccgcgctgcctcgtcttgcagttcattcagggcaccggacaggtcggtcttgacaaaaagaaccgggcgcccctgcgctga
cagccggaacacggcggcatcagagcagccgattgtctgttgtgcccagtcatagccgaatagcctctccacccaagcggccggag
aacctgcgtgcaatccatcttgttcaatcataatattattgaagcatttatcagggttcgtctcgtcccggtctcctcccaatgcatgtcaata
ttggccattagccatattattcattggttatatagcataaatcaatattggctattggccattgcatacgttgtatctatatcataata

[0546] The polynucleotides can optionally be joined to a vector containing a selectable marker for propagation in a host. Generally, a plasmid vector is introduced in a precipitate, such as a calcium phosphate precipitate, or in a complex with a charged lipid. If the vector is a virus, it can be packaged in vitro using an appropriate packaging cell line and then transduced into host cells.

[0547] The DNA insert should be operatively linked to an appropriate promoter. The expression constructs will further contain sites for transcription initiation, termination and, in the transcribed region, a ribosome binding site for translation. The coding portion of the mature transcripts expressed by the constructs will preferably include a translation initiating at the beginning and a termination codon (e.g., UAA, UGA or UAG) appropriately positioned at the end of the mRNA to be translated, with UAA and UAG preferred for mammalian or eukaryotic cell expression.

[0548] Expression vectors will preferably but optionally include at least one selectable marker. Such markers include, e.g., but are not limited to, ampicillin, zeocin (Sh bla gene), puromycin (pac gene), hygromycin B (hygB gene), G418/Geneticin (neo gene), mycophenolic acid, or glutamine synthetase (GS, U.S. Pat. Nos. 5,122,464; 5,770,359; 5,827,739), blasticidin (bsd gene), resistance genes for eukaryotic cell culture as well as ampicillin, zeocin (Sh bla gene), puromycin (pac gene), hygromycin B (hygB gene), G418/Geneticin (neo gene), kanamycin, spectinomycin, streptomycin, carbenicillin, bleomycin, erythromycin, polymyxin B, or tetracycline resistance genes for culturing in E. coli and other bacteria or prokaryotics (the above patents are entirely incorporated hereby by reference). Appropriate culture mediums and conditions for the above-described host cells are known in the art. Suitable vectors will be readily apparent to the skilled artisan. Introduction of a vector construct into a host cell can be effected by calcium phosphate transfection, DEAE-dextran mediated transfection, cationic lipid-mediated transfection, electroporation, transduction, infection or other known methods. Such methods are described in the art, such as Sambrook, supra, Chapters 1-4 and 16-18; Ausubel, supra, Chapters 1, 9, 13, 15, 16.

[0549] Expression vectors will preferably but optionally include at least one selectable cell surface marker for isolation of cells modified by the compositions and methods of the disclosure. Selectable cell surface markers of the disclosure comprise surface proteins, glycoproteins, or group of proteins that distinguish a cell or subset of cells from another defined subset of cells. Preferably the selectable cell surface marker distinguishes those cells modified by a composition or method of the disclosure from those cells that are not modified by a composition or method of the disclosure. Such cell surface markers include, e.g., but are not limited to, “cluster of designation” or “classification determinant” proteins (often abbreviated as “CD”) such as a truncated or full length form of CD19, CD271, CD34, CD22, CD20, CD33, CD52, or any combination thereof. Cell surface markers further include the suicide gene marker RQR8 (Philip B et al. Blood. 2014 Aug. 21; 124(8):1277-87).

[0550] Expression vectors will preferably but optionally include at least one selectable drug resistance marker for isolation of cells modified by the compositions and methods of the disclosure. Selectable drug resistance markers of the disclosure may comprise wild-type or mutant Neo, TYMS, FRANCF, RAD51C, GCS, MDR1, ALDH1, NKX2.2, or any combination thereof.

[0551] At least one Centyrin or CARTyrin of the disclosure can be expressed in a modified form, such as a fusion protein, and can include not only secretion signals, but also additional heterologous functional regions. For instance, a region of additional amino acids, particularly charged amino acids, can be added to the N-terminus of a CARTyrin to improve stability and persistence in the host cell, during purification, or during subsequent handling and storage. Also, peptide moieties can be added to a CARTyrin of the disclosure to facilitate purification. Such regions can be removed prior to final preparation of a CARTyrin or at least one fragment thereof. Such methods are described in many standard laboratory manuals, such as Sambrook, supra, Chapters 17.29-17.42 and 18.1-18.74; Ausubel, supra, Chapters 16, 17 and 18.

[0552] Those of ordinary skill in the art are knowledgeable in the numerous expression systems available for expression of a nucleic acid encoding a protein of the disclosure. Alternatively, nucleic acids of the disclosure can be expressed in a host cell by turning on (by manipulation) in a host cell that contains endogenous DNA encoding a Centyrin or CARTyrin of the disclosure. Such methods are well known in the art, e.g., as described in U.S. Pat. Nos. 5,580,734, 5,641,670, 5,733,746, and 5,733,761, entirely incorporated herein by reference.

[0553] Illustrative of cell cultures useful for the production of the CARTyrins, specified portions or variants thereof, are bacterial, yeast, and mammalian cells as known in the art. Mammalian cell systems often will be in the form of monolayers of cells although mammalian cell suspensions or bioreactors can also be used. A number of suitable host cell lines capable of expressing intact glycosylated proteins have been developed in the art, and include the COS-1 (e.g., ATCC CRL 1650), COS-7 (e.g., ATCC CRL-1651), HEK293, BHK21 (e.g., ATCC CRL-10), CHO (e.g., ATCC CRL 1610) and BSC-1 (e.g., ATCC CRL-26) cell lines, Cos-7 cells, CHO cells, hep G2 cells, P3X63Ag8.653, 5P2/0-Ag14, 293 cells, HeLa cells and the like, which are readily available from, for example, American Type Culture Collection, Manassas, Va. (www.atcc.org). Preferred host cells include cells of lymphoid origin, such as myeloma and lymphoma cells. Particularly preferred host cells are P3X63Ag8.653 cells (ATCC Accession Number CRL-1580) and SP2/0-Ag14 cells (ATCC Accession Number CRL-1851). In a particularly preferred embodiment, the recombinant cell is a P3X63Ab8.653 or an SP2/0-Ag14 cell.

[0554] Expression vectors for these cells can include one or more of the following expression control sequences, such as, but not limited to, an origin of replication; a promoter (e.g., late or early SV40 promoters, the CMV promoter (U.S. Pat. Nos. 5,168,062; 5,385,839), an HSV tk promoter, a pgk (phosphoglycerate kinase) promoter, an EF-1 alpha promoter (U.S. Pat. No. 5,266,491), at least one human promoter; an enhancer, and/or processing information sites, such as ribosome binding sites, RNA splice sites, polyadenylation sites (e.g., an SV40 large T Ag poly A addition site), and transcriptional terminator sequences. See, e.g., Ausubel et al., supra; Sambrook, et al., supra. Other cells useful for production of nucleic acids or proteins of the present invention are known and/or available, for instance, from the American Type Culture Collection Catalogue of Cell Lines and Hybridomas (www.atcc.org) or other known or commercial sources.

[0555] When eukaryotic host cells are employed, polyadenlyation or transcription terminator sequences are typically incorporated into the vector. An example of a terminator sequence is the polyadenlyation sequence from the bovine growth hormone gene. Sequences for accurate splicing of the transcript can also be included. An example of a splicing sequence is the VP1 intron from SV40 (Sprague, et al., J. Virol. 45:773-781 (1983)). Additionally, gene sequences to control replication in the host cell can be incorporated into the vector, as known in the art.

### Purification of a CARTyrin

[0556] A Centyrin or CARTyrin can be recovered and purified from recombinant cell cultures by well-known methods including, but not limited to, protein A purification, ammonium sulfate or ethanol precipitation, acid extraction, anion or cation exchange chromatography, phosphocellulose chromatography, hydrophobic interaction chromatography, affinity chromatography, hydroxylapatite chromatography and lectin chromatography. High performance liquid chromatography (“HPLC”) can also be employed for purification. See, e.g., Colligan, Current Protocols in Immunology, or Current Protocols in Protein Science, John Wiley & Sons, NY, N.Y., (1997-2001), e.g., Chapters 1, 4, 6, 8, 9, 10, each entirely incorporated herein by reference.

[0557] Centyrins or CARTyrins of the disclosure include purified products, products of chemical synthetic procedures, and products produced by recombinant techniques from a prokaryotic or eukaryotic host, including, for example, E. coli, yeast, higher plant, insect and mammalian cells. Depending upon the host employed in a recombinant production procedure, the CARTyrin of the disclosure can be glycosylated or can be non-glycosylated. Such methods are described in many standard laboratory manuals, such as Sambrook, supra, Sections 17.37-17.42; Ausubel, supra, Chapters 10, 12, 13, 16, 18 and 20, Colligan, Protein Science, supra, Chapters 12-14, all entirely incorporated herein by reference.

### Amino Acid Codes

[0558] The amino acids that make up CARtyrins of the disclosure are often abbreviated. The amino acid designations can be indicated by designating the amino acid by its single letter code, its three letter code, name, or three nucleotide codon(s) as is well understood in the art (see Alberts, B., et al., Molecular Biology of The Cell, Third Ed., Garland Publishing, Inc., New York, 1994). A CARTyrin of the disclosure can include one or more amino acid substitutions, deletions or additions, from spontaneous or mutations and/or human manipulation, as specified herein. Amino acids in a CARTyrin of the disclosure that are essential for function can be identified by methods known in the art, such as site-directed mutagenesis or alanine-scanning mutagenesis (e.g., Ausubel, supra, Chapters 8, 15; Cunningham and Wells, Science 244:1081-1085 (1989)). The latter procedure introduces single alanine mutations at every residue in the molecule. The resulting mutant molecules are then tested for biological activity, such as, but not limited to, at least one neutralizing activity. Sites that are critical for CARTyrin binding can also be identified by structural analysis, such as crystallization, nuclear magnetic resonance or photoaffinity labeling (Smith, et al., J. Mol. Biol. 224:899-904 (1992) and de Vos, et al., Science 255:306-312 (1992)).

[0559] As those of skill will appreciate, the invention includes at least one biologically active CARTyrin of the disclosure. Biologically active CARTyrins have a specific activity at least 20%, 30%, or 40%, and, preferably, at least 50%, 60%, or 70%, and, most preferably, at least 80%, 90%, or 95%-99% or more of the specific activity of the native (non-synthetic), endogenous or related and known CARTyrin. Methods of assaying and quantifying measures of enzymatic activity and substrate specificity are well known to those of skill in the art.

[0560] In another aspect, the disclosure relates to Centyrins and fragments, as described herein, which are modified by the covalent attachment of an organic moiety. Such modification can produce a CARTyrin fragment with improved pharmacokinetic properties (e.g., increased in vivo serum half-life). The organic moiety can be a linear or branched hydrophilic polymeric group, fatty acid group, or fatty acid ester group. In particular embodiments, the hydrophilic polymeric group can have a molecular weight of about 800 to about 120,000 Daltons and can be a polyalkane glycol (e.g., polyethylene glycol (PEG), polypropylene glycol (PPG)), carbohydrate polymer, amino acid polymer or polyvinyl pyrolidone, and the fatty acid or fatty acid ester group can comprise from about eight to about forty carbon atoms.

[0561] The modified CARTyrin and fragments of the disclosure can comprise one or more organic moieties that are covalently bonded, directly or indirectly, to the antibody. Each organic moiety that is bonded to a CARTyrin or fragment thereof of the disclosure can independently be a hydrophilic polymeric group, a fatty acid group or a fatty acid ester group. As used herein, the term “fatty acid” encompasses mono-carboxylic acids and di-carboxylic acids. A “hydrophilic polymeric group,” as the term is used herein, refers to an organic polymer that is more soluble in water than in octane. For example, polylysine is more soluble in water than in octane. Thus, a Centyrin or CARTyrin modified by the covalent attachment of polylysine is encompassed by the disclosure. Hydrophilic polymers suitable for modifying Centyrins or CARTyrins of the disclosure can be linear or branched and include, for example, polyalkane glycols (e.g., PEG, monomethoxy-polyethylene glycol (mPEG), PPG and the like), carbohydrates (e.g., dextran, cellulose, oligosaccharides, polysaccharides and the like), polymers of hydrophilic amino acids (e.g., polylysine, polyarginine, polyaspartate and the like), polyalkane oxides (e.g., polyethylene oxide, polypropylene oxide and the like) and polyvinyl pyrolidone. Preferably, the hydrophilic polymer that modifies the CARTyrin of the disclosure has a molecular weight of about 800 to about 150,000 Daltons as a separate molecular entity. For example, PEG5000 and PEG 20,000, wherein the subscript is the average molecular weight of the polymer in Daltons, can be used. The hydrophilic polymeric group can be substituted with one to about six alkyl, fatty acid or fatty acid ester groups. Hydrophilic polymers that are substituted with a fatty acid or fatty acid ester group can be prepared by employing suitable methods. For example, a polymer comprising an amine group can be coupled to a carboxylate of the fatty acid or fatty acid ester, and an activated carboxylate (e.g., activated with N,N-carbonyl diimidazole) on a fatty acid or fatty acid ester can be coupled to a hydroxyl group on a polymer.

[0562] Fatty acids and fatty acid esters suitable for modifying CARTyrins of the disclosure can be saturated or can contain one or more units of unsaturation. Fatty acids that are suitable for modifying CARtyrins of the disclosure include, for example, n-dodecanoate (C12, laurate), n-tetradecanoate (C14, myristate), n-octadecanoate (C18, stearate), n-eicosanoate (C20, arachidate), n-docosanoate (C22, behenate), n-triacontanoate (C30), n-tetracontanoate (C40), cis-Δ9-octadecanoate (C18, oleate), all cis-Δ5,8,11,14-eicosatetraenoate (C20, arachidonate), octanedioic acid, tetradecanedioic acid, octadecanedioic acid, docosanedioic acid, and the like. Suitable fatty acid esters include mono-esters of dicarboxylic acids that comprise a linear or branched lower alkyl group. The lower alkyl group can comprise from one to about twelve, preferably, one to about six, carbon atoms.

[0563] The modified CARTyrins and fragments can be prepared using suitable methods, such as by reaction with one or more modifying agents. A “modifying agent” as the term is used herein, refers to a suitable organic group (e.g., hydrophilic polymer, a fatty acid, a fatty acid ester) that comprises an activating group. An “activating group” is a chemical moiety or functional group that can, under appropriate conditions, react with a second chemical group thereby forming a covalent bond between the modifying agent and the second chemical group. For example, amine-reactive activating groups include electrophilic groups, such as tosylate, mesylate, halo (chloro, bromo, fluoro, iodo), N-hydroxysuccinimidyl esters (NHS), and the like. Activating groups that can react with thiols include, for example, maleimide, iodoacetyl, acrylolyl, pyridyl disulfides, 5-thiol-2-nitrobenzoic acid thiol (TNB-thiol), and the like. An aldehyde functional group can be coupled to amine- or hydrazide-containing molecules, and an azide group can react with a trivalent phosphorous group to form phosphoramidate or phosphorimide linkages. Suitable methods to introduce activating groups into molecules are known in the art (see for example, Hermanson, G. T., Bioconjugate Techniques, Academic Press: San Diego, Calif. (1996)). An activating group can be bonded directly to the organic group (e.g., hydrophilic polymer, fatty acid, fatty acid ester), or through a linker moiety, for example, a divalent C1-C12 group wherein one or more carbon atoms can be replaced by a heteroatom, such as oxygen, nitrogen or sulfur. Suitable linker moieties include, for example, tetraethylene glycol, —(CH2)3-, —NH—(CH2)6-NH—, —(CH2)2-NH— and —CH2-O—CH2-CH2-O—CH2-CH2-O—CH—NH—. Modifying agents that comprise a linker moiety can be produced, for example, by reacting a mono-Boc-alkyldiamine (e.g., mono-Boc-ethylenediamine, mono-Boc-diaminohexane) with a fatty acid in the presence of 1-ethyl-3-(3-dimethylaminopropyl) carbodiimide (EDC) to form an amide bond between the free amine and the fatty acid carboxylate. The Boc protecting group can be removed from the product by treatment with trifluoroacetic acid (TFA) to expose a primary amine that can be coupled to another carboxylate, as described, or can be reacted with maleic anhydride and the resulting product cyclized to produce an activated maleimido derivative of the fatty acid. (See, for example, Thompson, et al., WO 92/16221, the entire teachings of which are incorporated herein by reference.)

[0564] The modified CARTyrins and fragments of the disclosure can be produced by reacting CARTyrin proteins or fragments with a modifying agent. For example, the organic moieties can be bonded to the CARTyrin protein in a non-site specific manner by employing an amine-reactive modifying agent, for example, an NHS ester of PEG. Modified CARTyrin proteins and fragments comprising an organic moiety that is bonded to specific sites of a CARTyrin of the disclosure can be prepared using suitable methods, such as reverse proteolysis (Fisch et al., Bioconjugate Chem., 3:147-153 (1992); Werlen et al., Bioconjugate Chem., 5:411-417 (1994); Kumaran et al., Protein Sci. 6(10):2233-2241 (1997); Itoh et al., Bioorg. Chem., 24(1): 59-68 (1996); Capellas et al., Biotechnol. Bioeng., 56(4):456-463 (1997)), and the methods described in Hermanson, G. T., Bioconjugate Techniques, Academic Press: San Diego, Calif. (1996).

### CARTyrin Compositions Comprising Further Therapeutically Active Ingredients

[0565] Centyrin or CARTyrin compounds, compositions or combinations of the present disclosure can further comprise at least one of any suitable auxiliary, such as, but not limited to, diluent, binder, stabilizer, buffers, salts, lipophilic solvents, preservative, adjuvant or the like. Pharmaceutically acceptable auxiliaries are preferred. Non-limiting examples of, and methods of preparing such sterile solutions are well known in the art, such as, but limited to, Gennaro, Ed., Remington's Pharmaceutical Sciences, 18th Edition, Mack Publishing Co. (Easton, Pa.) 1990. Pharmaceutically acceptable carriers can be routinely selected that are suitable for the mode of administration, solubility and/or stability of the Centyrin or CARTyrin, fragment or variant composition as well known in the art or as described herein.

[0566] Pharmaceutical excipients and additives useful in the present composition include, but are not limited to, proteins, peptides, amino acids, lipids, and carbohydrates (e.g., sugars, including monosaccharides, di-, tri-, tetra-, and oligosaccharides; derivatized sugars, such as alditols, aldonic acids, esterified sugars and the like; and polysaccharides or sugar polymers), which can be present singly or in combination, comprising alone or in combination 1-99.99% by weight or volume. Exemplary protein excipients include serum albumin, such as human serum albumin (HSA), recombinant human albumin (rHA), gelatin, casein, and the like. Representative amino acid/protein components, which can also function in a buffering capacity, include alanine, glycine, arginine, betaine, histidine, glutamic acid, aspartic acid, cysteine, lysine, leucine, isoleucine, valine, methionine, phenylalanine, aspartame, and the like. One preferred amino acid is glycine.

[0567] Carbohydrate excipients suitable for use in the invention include, for example, monosaccharides, such as fructose, maltose, galactose, glucose, D-mannose, sorbose, and the like; disaccharides, such as lactose, sucrose, trehalose, cellobiose, and the like; polysaccharides, such as raffinose, melezitose, maltodextrins, dextrans, starches, and the like; and alditols, such as mannitol, xylitol, maltitol, lactitol, xylitol sorbitol (glucitol), myoinositol and the like. Preferred carbohydrate excipients for use in the present invention are mannitol, trehalose, and raffinose.

[0568] CARTyrin compositions can also include a buffer or a pH-adjusting agent; typically, the buffer is a salt prepared from an organic acid or base. Representative buffers include organic acid salts, such as salts of citric acid, ascorbic acid, gluconic acid, carbonic acid, tartaric acid, succinic acid, acetic acid, or phthalic acid; Tris, tromethamine hydrochloride, or phosphate buffers. Preferred buffers for use in the present compositions are organic acid salts, such as citrate.

[0569] Additionally, CARTyrin compositions of the invention can include polymeric excipients/additives, such as polyvinylpyrrolidones, ficolls (a polymeric sugar), dextrates (e.g., cyclodextrins, such as 2-hydroxypropyl-β-cyclodextrin), polyethylene glycols, flavoring agents, antimicrobial agents, sweeteners, antioxidants, antistatic agents, surfactants (e.g., polysorbates, such as “TWEEN 20” and “TWEEN 80”), lipids (e.g., phospholipids, fatty acids), steroids (e.g., cholesterol), and chelating agents (e.g., EDTA).

[0570] These and additional known pharmaceutical excipients and/or additives suitable for use in the Centyrin or CARTyrin, portion or variant compositions according to the invention are known in the art, e.g., as listed in “Remington: The Science & Practice of Pharmacy”, 19th ed., Williams & Williams, (1995), and in the “Physician's Desk Reference”, 52nd ed., Medical Economics, Montvale, N.J. (1998), the disclosures of which are entirely incorporated herein by reference. Preferred carrier or excipient materials are carbohydrates (e.g., saccharides and alditols) and buffers (e.g., citrate) or polymeric agents. An exemplary carrier molecule is the mucopolysaccharide, hyaluronic acid, which may be useful for intraarticular delivery.

T Cell Isolation from a Leukapheresis Product

[0571] A leukapheresis product or blood may be collected from a subject at clinical site using a closed system and standard methods (e.g., a COBE Spectra Apheresis System). Preferably, the product is collected according to standard hospital or institutional Leukapheresis procedures in standard Leukapheresis collection bags. For example, in preferred embodiments of the methods of the disclosure, no additional anticoagulants or blood additives (heparin, etc.) are included beyond those normally used during leukapheresis.

[0572] Alternatively, white blood cells (WBC)/Peripheral Blood Mononuclear Cells (PBMC) (using Biosafe Sepax 2 (Closed/Automated)) or T cells (using CliniMACS® Prodigy (Closed/Automated)) may be isolated directly from whole blood. However, in certain subjects (e.g. those diagnosed and/or treated for cancer), the WBC/PBMC yield may be significantly lower when isolated from whole blood than when isolated by leukapheresis.

[0573] Either the leukapheresis procedure and/or the direct cell isolation procedure may be used for any subject of the disclosure.

[0574] The leukapheresis product, blood, WBC/PBMC composition and/or T-cell composition should be packed in insulated containers and should be kept at controlled room temperature (+19° C. to +25° C.) according to standard hospital of institutional blood collection procedures approved for use with the clinical protocol. The leukapheresis product, blood, WBC/PBMC composition and/or T-cell composition should not be refrigerated.

[0575] The cell concentration leukapheresis product, blood, WBC/PBMC composition and/or T-cell composition should not exceed 0.2×10⁹ cells per mL during transportation. Intense mixing of the leukapheresis product, blood, WBC/PBMC composition and/or T-cell composition should be avoided.

[0576] If the leukapheresis product, blood, WBC/PBMC composition and/or T-cell composition has to be stored, e.g. overnight, it should be kept at controlled room temperature (same as above). During storage, the concentration of the leukapheresis product, blood, WBC/PBMC composition and/or T-cell composition should never exceed 0.2×10⁹ cell per mL.

[0577] Preferably, cells of the leukapheresis product, blood, WBC/PBMC composition and/or T-cell composition should be stored in autologous plasma. In certain embodiments, if the cell concentration of the leukapheresis product, blood, WBC/PBMC composition and/or T-cell composition is higher than 0.2×10⁹ cell per mL, the product should be diluted with autologous plasma.

[0578] Preferably, the leukapheresis product, blood, WBC/PBMC composition and/or T-cell composition should not be older than 24 hours when starting the labeling and separation procedure. The leukapheresis product, blood, WBC/PBMC composition and/or T-cell composition may be processed and/or prepared for cell labeling using a closed and/or automated system (e.g., CliniMACS Prodigy).

[0579] An automated system may perform additional buffy coat isolation, possibly by ficolation, and/or washing of the cellular product (e.g., the leukapheresis product, blood, WBC/PBMC composition and/or T cell composition).

[0580] A closed and/or automated system may be used to prepare and label cells for T-Cell isolation (from, for example, the leukapheresis product, blood, WBC/PBMC composition and/or T cell composition).

[0581] Although WBC/PBMCs may be nucleofected directly (which is easier and saves additional steps), the methods of the disclosure may include first isolating T cells prior to nucleofection. The easier strategy of directly nucleofecting PBMC requires selective expansion of CARTyrin+ cells that is mediated via CARTyrin signaling, which by itself is proving to be an inferior expansion method that directly reduces the in vivo efficiency of the product by rendering T cells functionally exhausted. The product may be a heterogeneous composition of CARTyrin+ cells including T cells, NK cells, NKT cells, monocytes, or any combination thereof, which increases the variability in product from patient to patient and makes dosing and CRS management more difficult. Since T cells are thought to be the primary effectors in tumor suppression and killing, T cell isolation for the manufacture of an autologous product may result in significant benefits over the other more heterogeneous composition.

[0582] T cells may be isolated directly, by enrichment of labeled cells or depletion of labeled cells in a one-way labeling procedure or, indirectly, in a two-step labeling procedure. According to certain enrichment strategies of the disclosure, T cells may be collected in a Cell Collection Bag and the non-labeled cells (non-target cells) in a Negative Fraction Bag. In contrast to an enrichment strategy of the disclosure, the non-labeled cells (target cells) are collected in a Cell Collection Bag and the labeled cells (non-target cells) are collected in a Negative Fraction Bag or in the Non-Target Cell Bag, respectively. Selection reagents may include, but are not limited to, antibody-coated beads. Antibody-coated beads may either be removed prior to a modification and/or an expansion step, or, retained on the cells prior to a modification and/or an expansion step. One or more of the following non-limiting examples of cellular markers may be used to isolate T-cells: CD3, CD4, CD8, CD25, anti-biotin, CD1c, CD3/CD19, CD3/CD56, CD14, CD19, CD34, CD45RA, CD56, CD62L, CD133, CD137, CD271, CD304, IFN-gamma, TCR alpha/beta, and/or any combination thereof. Methods for the isolation of T-cells may include one or more reagents that specifically bind and/or detectably-label one or more of the following non-limiting examples of cellular markers may be used to isolate T-cells: CD3, CD4, CD8, CD25, anti-biotin, CD1c, CD3/CD19, CD3/CD56, CD14, CD19, CD34, CD45RA, CD56, CD62L, CD133, CD137, CD271, CD304, IFN-gamma, TCR alpha/beta, and/or any combination thereof. These reagents may or may not be “Good Manufacturing Practices” (“GMP”) grade. Reagents may include, but are not limited to, Thermo DynaBeads and Miltenyi CliniMACS products. Methods of isolating T-cells of the disclosure may include multiple iterations of labeling and/or isolation steps. At any point in the methods of isolating T-cells of the disclosure, unwanted cells and/or unwanted cell types may be depleted from a T cell product composition of the disclosure by positively or negatively selecting for the unwanted cells and/or unwanted cell types. A T cell product composition of the disclosure may contain additional cell types that may express CD4, CD8, and/or another T cell marker(s).

[0583] Methods of the disclosure for nucleofection of T cells may eliminate the step of T cell isolation by, for example, a process for nucleofection of T cells in a population or composition of WBC/PBMCs that, following nucleofection, includes an isolation step or a selective expansion step via TCR signaling.

[0584] Certain cell populations may be depleted by positive or negative selection before or after T cell enrichment and/or sorting. Examples of cell compositions that may be depleted from a cell product composition may include myeloid cells, CD25+ regulatory T cells (T Regs), dendritic cells, macrophages, red blood cells, mast cells, gamma-delta T cells, natural killer (NK) cells, a Natural Killer (NK)-like cell (e.g. a Cytokine Induced Killer (CIK) cell), induced natural killer (iNK) T cells, NK T cells, B cells, or any combination thereof.

[0585] T cell product compositions of the disclosure may include CD4+ and CD8+ T-Cells. CD4+ and CD8+ T-Cells may be isolated into separate collection bags during an isolation or selection procedure. CD4+ T cells and CD8+ T cells may be further treated separately, or treated after reconstitution (combination into the same composition) at a particular ratio.

[0586] The particular ratio at which CD4+ T cells and CD8+ T cells may be reconstituted may depend upon the type and efficacy of expansion technology used, cell medium, and/or growth conditions utilized for expansion of T-cell product compositions. Examples of possible CD4+: CD8+ ratios include, but are not limited to, 50%:50%, 60%:40%, 40%:60% 75%:25% and 25%:75%.

[0587] CD8+ T cells exhibit a potent capacity for tumor cell killing, while CD4+ T cells provide many of the cytokines required to support CD8+ T cell proliferative capacity and function. Because T cells isolated from normal donors are predominantly CD4+, the T-cell product compositions are artificially adjusted in vitro with respect to the CD4+:CD8+ ratio to improve upon the ratio of CD4+ T cells to CD8+ T cells that would otherwise be present in vivo. An optimized ratio may also be used for the ex vivo expansion of the autologous T-cell product composition. In view of the artificially adjusted CD4+:CD8+ ratio of the T-cell product composition, it is important to note that the product compositions of the disclosure may be significantly different and provide significantly greater advantage than any endogenously-occurring population of T-cells.

[0588] Preferred methods for T cell isolation may include a negative selection strategy for yielding untouched pan T cell, meaning that the resultant T-cell composition includes T-cells that have not been manipulated and that contain an endogenously-occurring variety/ratio of T-cells.

[0589] Reagents that may be used for positive or negative selection include, but are not limited to, magnetic cell separation beads. Magnetic cell separation beads may or may not be removed or depleted from selected populations of CD4+ T cells, CD8+ T cells, or a mixed population of both CD4+ and CD8+ T cells before performing the next step in a T-cell isolation method of the disclosure.

[0590] T cell compositions and T cell product compositions may be prepared for cryopreservation, storage in standard T Cell Culture Medium, and/or genetic modification.

[0591] T cell compositions, T cell product compositions, unstimulated T cell compositions, resting T cell compositions or any portion thereof may be cryopreserved using a standard cryopreservation method optimized for storing and recovering human cells with high recovery, viability, phenotype, and/or functional capacity. Commercially-available cryopreservation media and/or protocols may be used. Cryopreservation methods of the disclosure may include a DMSO free cryopreservant (e.g. CryoSOfree™ DMSO-free Cryopreservation Medium) reduce freezing-related toxicity.

[0592] T cell compositions, T cell product compositions, unstimulated T cell compositions, resting T cell compositions or any portion thereof may be stored in a culture medium. T cell culture media of the disclosure may be optimized for cell storage, cell genetic modification, cell phenotype and/or cell expansion. T cell culture media of the disclosure may include one or more antibiotics. Because the inclusion of an antibiotic within a cell culture media may decrease transfection efficiency and/or cell yield following genetic modification via nucleofection, the specific antibiotics (or combinations thereof) and their respective concentration(s) may be altered for optimal transfection efficiency and/or cell yield following genetic modification via nucleofection.

[0593] T cell culture media of the disclosure may include serum, and, moreover, the serum composition and concentration may be altered for optimal cell outcomes. Human AB serum is preferred over FBS/FCS for culture of T cells because, although contemplated for use in T cell culture media of the disclosure, FBS/FCS may introduce xeno-proteins. Serum may be isolated form the blood of the subject for whom the T-cell composition in culture is intended for administration, thus, a T cell culture medium of the disclosure may comprise autologous serum. Serum-free media or serum-substitute may also be used in T-cell culture media of the disclosure. In certain embodiments of the T-cell culture media and methods of the disclosure, serum-free media or serum-substitute may provide advantages over supplementing the medium with xeno-serum, including, but not limited to, healthier cells that have greater viability, nucleofect with higher efficiency, exhibit greater viability post-nucleofection, display a more desirable cell phenotype, and/or greater/faster expansion upon addition of expansion technologies.

[0594] T cell culture media may include a commercially-available cell growth media. Exemplary commercially-available cell growth media include, but are not limited to, PBS, HBSS, OptiMEM, DMEM, RPMI 1640, AIM-V, X-VIVO 15, CellGro DC Medium, CTS OpTimizer T Cell Expansion SFM, TexMACS Medium, PRIME-XV T Cell Expansion Medium, ImmunoCult-XF T Cell Expansion Medium, or any combination thereof.

[0595] T cell compositions, T cell product compositions, unstimulated T cell compositions, resting T cell compositions or any portion thereof may be prepared for genetic modification. Preparation of T cell compositions, T cell product compositions, unstimulated T cell compositions, resting T cell compositions or any portion thereof for genetic modification may include cell washing and/or resuspension in a desired nucleofection buffer. Cryopreserved T-cell compositions may be thawed and prepared for genetic modification by nucleofection. Cryopreserved cells may be thawed according to standard or known protocols. Thawing and preparation of cryopreserved cells may be optimized to yield cells that have greater viability, nucleofect with higher efficiency, exhibit greater viability post-nucleofection, display a more desirable cell phenotype, and/or greater/faster expansion upon addition of expansion technologies. For example, Grifols Albutein (25% human albumin) may be used in the thawing and/or preparation process.

### Genetic Modification of an Autologous T Cell Product Composition

[0596] T cell compositions, T cell product compositions, unstimulated T cell compositions, resting T cell compositions or any portion thereof may be genetically modified using, for example, a nucleofection strategy such as electroporation. The total number of cells to be nucleofected, the total volume of the nucleofection reaction, and the precise timing of the preparation of the sample may be optimized to yield cells that have greater viability, nucleofect with higher efficiency, exhibit greater viability post-nucleofection, display a more desirable cell phenotype, and/or greater/faster expansion upon addition of expansion technologies.

[0597] Nucleofection and/or electroporation may be accomplished using, for example, Lonza Amaxa, MaxCyte PulseAgile, Harvard Apparatus BTX, and/or Invitrogen Neon. Non-metal electrode systems, including, but not limited to, plastic polymer electrodes, may be preferred for nucleofection.

[0598] Prior to genetic modification by nucleofection, T cell compositions, T cell product compositions, unstimulated T cell compositions, resting T cell compositions or any portion thereof may be resuspended in a nucleofection buffer. Nucleofection buffers of the disclosure include commercially-available nucleofection buffers. Nucleofection buffers of the disclosure may be optimized to yield cells that have greater viability, nucleofect with higher efficiency, exhibit greater viability post-nucleofection, display a more desirable cell phenotype, and/or greater/faster expansion upon addition of expansion technologies. Nucleofection buffers of the disclosure may include, but are not limited to, PBS, HBSS, OptiMEM, BTXpress, Amaxa Nucleofector, Human T cell nucleofection buffer and any combination thereof. Nucleofection buffers of the disclosure may comprise one or more supplemental factors to yield cells that have greater viability, nucleofect with higher efficiency, exhibit greater viability post-nucleofection, display a more desirable cell phenotype, and/or greater/faster expansion upon addition of expansion technologies. Exemplary supplemental factors include, but are not limited to, recombinant human cytokines, chemokines, interleukins and any combination thereof. Exemplary cytokines, chemokines, and interleukins include, but are not limited to, IL2, IL7, IL12, IL15, IL21, IL1 IL3, IL4, IL5, IL6, IL8, CXCL8, IL9, IL10, IL11, IL13, IL14, IL16, IL17, IL18, IL19, IL20, IL22, IL23, IL25, IL26, IL27, IL28, IL29, IL30, IL31, IL32, IL33, IL35, IL36, GM-CSF, IFN-gamma, IL-1 alpha/IL-1F1, IL-1 beta/IL-1F2, IL-12 p70, IL-12/IL-35 p35, IL-13, IL-17/IL-17A, IL-17A/F Heterodimer, IL-17F, IL-18/IL-1F4, IL-23, IL-24, IL-32, IL-32 beta, IL-32 gamma, IL-33, LAP (TGF-beta 1), Lymphotoxin-alpha/TNF-beta, TGF-beta, TNF-alpha, TRANCE/TNFSF11/RANK L and any combination thereof. Exemplary supplemental factors include, but are not limited to, salts, minerals, metabolites or any combination thereof. Exemplary salts, minerals, and metabolites include, but are not limited to, HEPES, Nicotinamide, Heparin, Sodium Pyruvate, L-Glutamine, MEM Non-Essential Amino Acid Solution, Ascorbic Acid, Nucleosides, FBS/FCS, Human serum, serum-substitute, anti-biotics, pH adjusters, Earle's Salts, 2-Mercaptoethanol, Human transferrin, Recombinant human insulin, Human serum albumin, Nucleofector PLUS Supplement, KCL, MgCl2, Na2HPO4, NAH2PO4, Sodium lactobionate, Manitol, Sodium succinate, Sodium Chloride, CINa, Glucose, Ca(NO3)2, Tris/HCl, K2HPO4, KH2PO4, Polyethylenimine, Poly-ethylene-glycol, Poloxamer 188, Poloxamer 181, Poloxamer 407, Poly-vinylpyrrolidone, Pop313, Crown-5, and any combination thereof. Exemplary supplemental factors include, but are not limited to, media such as PBS, HBSS, OptiMEM, DMEM, RPMI 1640, AIM-V, X-VIVO 15, CellGro DC Medium, CTS OpTimizer T Cell Expansion SFM, TexMACS Medium, PRIME-XV T Cell Expansion Medium, ImmunoCult-XF T Cell Expansion Medium and any combination thereof. Exemplary supplemental factors include, but are not limited to, inhibitors of cellular DNA sensing, metabolism, differentiation, signal transduction, the apoptotic pathway and combinations thereof. Exemplary inhibitors include, but are not limited to, inhibitors of TLR9, MyD88, IRAK, TRAF6, TRAF3, IRF-7, NF-KB, Type 1 Interferons, pro-inflammatory cytokines, cGAS, STING, Sec5, TBK1, IRF-3, RNA pol III, RIG-1, IPS-1, FADD, RIP1, TRAF3, AIM2, ASC, Caspase1, Pro-IL1B, PI3K, Akt, Wnt3A, inhibitors of glycogen synthase kinase-3β (GSK-3 β) (e.g. TWS119), Bafilomycin, Chloroquine, Quinacrine, AC-YVAD-CMK, Z-VAD-FMK, Z-IETD-FMK and any combination thereof. Exemplary supplemental factors include, but are not limited to, reagents that modify or stabilize one or more nucleic acids in a way to enhance cellular delivery, enhance nuclear delivery or transport, enhance the facilitated transport of nucleic acid into the nucleus, enhance degradation of epi-chromosomal nucleic acid, and/or decrease DNA-mediated toxicity. Exemplary reagents that modify or stabilize one or more nucleic acids include, but are not limited to, pH modifiers, DNA-binding proteins, lipids, phospholipids, CaPO4, net neutral charge DNA binding peptides with or without NLS sequences, TREX1 enzyme, and any combination thereof.

[0599] Transposition reagents, including a transposon and a transposase, may be added to a nucleofection reaction of the disclosure prior to, simultaneously with, or after an addition of cells to a nucleofection buffer (optionally, contained within a nucleofection reaction vial or cuvette). Transposons of the disclosure may comprise plasmid DNA, linearized plasmid DNA, a PCR product, DOGGYBONE™ DNA, an mRNA template, a single or double-stranded DNA, a protein-nucleic acid combination or any combination thereof. Transposons of the disclosure may comprised one or more sequences that encode one or more TTAA site(s), one or more inverted terminal repeat(s) (ITRs), one or more long terminal repeat(s) (LTRs), one or more insulator(s), one or more promotor(s), one or more full-length or truncated gene(s), one or more polyA signal(s), one or more self-cleaving 2A peptide cleavage site(s), one or more internal ribosome entry site(s) (IRES), one or more enhancer(s), one or more regulator(s), one or more replication origin(s), and any combination thereof.

[0600] Transposons of the disclosure may comprise one or more sequences that encode one or more full-length or truncated gene(s). Full-length and/or truncated gene(s) introduced by transposons of the disclosure may encode one or more of a signal peptide, a CARTyrin, an anti-PSMA CARTyrin, a Centyrin, a PSMA-specific Centryin, a hinge, a transmembrane domain, a costimulatory domain, a chimeric antigen receptor (CAR), a chimeric T-cell receptor (CAR-T, a CARTyrin or an anti-PSMA CARTyrin), a receptor, a ligand, a cytokine, a drug resistance gene, a tumor antigen, an allo or auto antigen, an enzyme, a protein, a peptide, a poly-peptide, a fluorescent protein, a mutein or any combination thereof.

[0601] Transposons of the disclosure may be prepared in water, TAE, TBE, PBS, HBSS, media, a supplemental factor of the disclosure or any combination thereof.

[0602] Transposons of the disclosure may be designed to optimize clinical safety and/or improve manufacturability. As a non-limiting example, transposons of the disclosure may be designed to optimize clinical safety and/or improve manufacturability by eliminating unnecessary sequences or regions and/or including a non-antibiotic selection marker. Transposons of the disclosure may or may not be GMP grade.

[0603] Transposase enzymes of the disclosure may be encoded by one or more sequences of plasmid DNA, mRNA, protein, protein-nucleic acid combination or any combination thereof.

[0604] Transposase enzymes of the disclosure may be prepared in water, TAE, TBE, PBS, HBSS, media, a supplemental factor of the disclosure or any combination thereof. Transposase enzymes of the disclosure or the sequences/constructs encoding or delivering them may or may not be GMP grade.

[0605] Transposons and transposase enzymes of the disclosure may be delivered to a cell by any means.

[0606] Although compositions and methods of the disclosure include delivery of a transposon and/or transposase of the disclosure to a cell by plasmid DNA (pDNA), the use of a plasmid for delivery may allow the transposon and/or transposase to be integrated into the chromosomal DNA of the cell, which may lead to continued transposase expression. Accordingly, transposon and/or transposase enzymes of the disclosure may be delivered to a cell as either mRNA or protein to remove any possibility for chromosomal integration.

[0607] Transposons and transposases of the disclosure may be pre-incubated alone or in combination with one another prior to the introduction of the transposon and/or transposase into a nucleofection reaction. The absolute amounts of each of the transposon and the transposase, as well as the relative amounts, e.g., a ratio of transposon to transposase may be optimized.

[0608] Following preparation of nucleofection reaction, optionally, in a vial or cuvette, the reaction may be loaded into a nucleofector apparatus and activated for delivery of an electric pulse according to the manufacturer's protocol. Electric pulse conditions used for delivery of a transposon and/or a transposase of the disclosure (or a sequence encoding a transposon and/or a transposase of the disclosure) to a cell may be optimized for yielding cells with enhanced viability, higher nucleofection efficiency, greater viability post-nucleofection, desirable cell phenotype, and/or greater/faster expansion upon addition of expansion technologies. When using Amaxa nucleofector technology, each of the various nucleofection programs for the Amaxa 2B or 4D nucleofector are contemplated.

[0609] Following a nucleofection reaction of the disclosure, cells may be gently added to a cell medium. For example, when T cells undergo the nucleofection reaction, the T cells may be added to a T cell medium. Post-nucleofection cell media of the disclosure may comprise any one or more commercially-available media. Post-nucleofection cell media of the disclosure (including post-nucleofection T cell media of the disclosure) may be optimized to yield cells with greater viability, higher nucleofection efficiency, exhibit greater viability post-nucleofection, display a more desirable cell phenotype, and/or greater/faster expansion upon addition of expansion technologies. Post-nucleofection cell media of the disclosure (including post-nucleofection T cell media of the disclosure) may comprise PBS, HBSS, OptiMEM, DMEM, RPMI 1640, AIM-V, X-VIVO 15, CellGro DC Medium, CTS OpTimizer T Cell Expansion SFM, TexMACS Medium, PRIME-XV T Cell Expansion Medium, ImmunoCult-XF T Cell Expansion Medium and any combination thereof. Post-nucleofection cell media of the disclosure (including post-nucleofection T cell media of the disclosure) may comprise one or more supplemental factors of the disclosure to enhance viability, nucleofection efficiency, viability post-nucleofection, cell phenotype, and/or greater/faster expansion upon addition of expansion technologies. Exemplary supplemental factors include, but are not limited to, recombinant human cytokines, chemokines, interleukins and any combination thereof. Exemplary cytokines, chemokines, and interleukins include, but are not limited to, IL2, IL7, IL12, IL15, IL21, IL1, IL3, IL4, IL5, IL6, IL8, CXCL8, IL9, IL10, IL11, IL13, IL14, IL16, IL17, IL18, IL19, IL20, IL22, IL23, IL25, IL26, IL27, IL28, IL29, IL30, IL31, IL32, IL33, IL35, IL36, GM-CSF, IFN-gamma, IL-1 alpha/IL-1F1, IL-1 beta/IL-1F2, IL-12 p70, IL-12/IL-35 p35, IL-13, IL-17/IL-17A, IL-17A/F Heterodimer, IL-17F, IL-18/IL-1F4, IL-23, IL-24, IL-32, IL-32 beta, IL-32 gamma, IL-33, LAP (TGF-beta 1), Lymphotoxin-alpha/TNF-beta, TGF-beta, TNF-alpha, TRANCE/TNFSF11/RANK L and any combination thereof. Exemplary supplemental factors include, but are not limited to, salts, minerals, metabolites or any combination thereof. Exemplary salts, minerals, and metabolites include, but are not limited to, HEPES, Nicotinamide, Heparin, Sodium Pyruvate, L-Glutamine, MEM Non-Essential Amino Acid Solution, Ascorbic Acid, Nucleosides, FBS/FCS, Human serum, serum-substitute, anti-biotics, pH adjusters, Earle's Salts, 2-Mercaptoethanol, Human transferrin, Recombinant human insulin, Human serum albumin, Nucleofector PLUS Supplement, KCL, MgCl2, Na2HPO4, NAH2PO4, Sodium lactobionate, Manitol, Sodium succinate, Sodium Chloride, CINa, Glucose, Ca(NO3)2, Tris/HCl, K2HPO4, KH2PO4, Polyethylenimine, Poly-ethylene-glycol, Poloxamer 188, Poloxamer 181, Poloxamer 407, Poly-vinylpyrrolidone, Pop313, Crown-5, and any combination thereof. Exemplary supplemental factors include, but are not limited to, media such as PBS, HBSS, OptiMEM, DMEM, RPMI 1640, AIM-V, X-VIVO 15, CellGro DC Medium, CTS OpTimizer T Cell Expansion SFM, TexMACS Medium, PRIME-XV T Cell Expansion Medium, ImmunoCult-XF T Cell Expansion Medium and any combination thereof. Exemplary supplemental factors include, but are not limited to, inhibitors of cellular DNA sensing, metabolism, differentiation, signal transduction, the apoptotic pathway and combinations thereof. Exemplary inhibitors include, but are not limited to, inhibitors of TLR9, MyD88, IRAK, TRAF6, TRAF3, IRF-7, NF-KB, Type 1 Interferons, pro-inflammatory cytokines, cGAS, STING, Sec5, TBK1, IRF-3, RNA pol III, RIG-1, IPS-1, FADD, RIP1, TRAF3, AIM2, ASC, Caspase1, Pro-IL1B, PI3K, Akt, Wnt3A, inhibitors of glycogen synthase kinase-3β (GSK-3β) (e.g. TWS119), Bafilomycin, Chloroquine, Quinacrine, AC-YVAD-CMK, Z-VAD-FMK, Z-IETD-FMK and any combination thereof. Exemplary supplemental factors include, but are not limited to, reagents that modify or stabilize one or more nucleic acids in a way to enhance cellular delivery, enhance nuclear delivery or transport, enhance the facilitated transport of nucleic acid into the nucleus, enhance degradation of epi-chromosomal nucleic acid, and/or decrease DNA-mediated toxicity. Exemplary reagents that modify or stabilize one or more nucleic acids include, but are not limited to, pH modifiers, DNA-binding proteins, lipids, phospholipids, CaPO4, net neutral charge DNA binding peptides with or without NLS sequences, TREX1 enzyme, and any combination thereof.

[0610] Post-nucleofection cell media of the disclosure (including post-nucleofection T cell media of the disclosure) may be used at room temperature or pre-warmed to, for example to between 32° C. to 37° C., inclusive of the endpoints. Post-nucleofection cell media of the disclosure (including post-nucleofection T cell media of the disclosure) may be pre-warmed to any temperature that maintains or enhances cell viability and/or expression of a transposon or portion thereof of the disclosure.

[0611] Post-nucleofection cell media of the disclosure (including post-nucleofection T cell media of the disclosure) may be contained in tissue culture flasks or dishes, G-Rex flasks, Bioreactor or cell culture bags, or any other standard receptacle. Post-nucleofection cell cultures of the disclosure (including post-nucleofection T cell cultures of the disclosure) may be may be kept still, or, alternatively, they may be perturbed (e.g. rocked, swirled, or shaken).

[0612] Post-nucleofection cell cultures may comprise genetically-modified cells. Post-nucleofection T cell cultures may comprise genetically-modified T cells. Genetically modified cells of the disclosure may be either rested for a defined period of time or stimulated for expansion by, for example, the addition of a T Cell Expander technology. In certain embodiments, genetically modified cells of the disclosure may be either rested for a defined period of time or immediately stimulated for expansion by, for example, the addition of a T Cell Expander technology. Genetically modified cells of the disclosure may be rested to allow them sufficient time to acclimate, time for transposition to occur, and/or time for positive or negative selection, resulting in cells with enhanced viability, higher nucleofection efficiency, greater viability post-nucleofection, desirable cell phenotype, and/or greater/faster expansion upon addition of expansion technologies. Genetically modified cells of the disclosure may be rested, for example, for 1, 2, 3, 4, 5, 6, 7, 8, 9, 10, 11, 12, 13, 14, 15, 16, 17, 18, 19, 20, 21, 22, 23, 24, or more hours. In certain embodiments, genetically modified cells of the disclosure may be rested, for example, for an overnight. In certain aspects, an overnight is about 12 hours. Genetically modified cells of the disclosure may be rested, for example, for 1, 2, 3, 4, 5, 6, 7, 8, 9, 10, 11, 12, 13, 14 or more days.

[0613] Genetically modified cells of the disclosure may be selected following a nucleofection reaction and prior to addition of an expander technology. For optimal selection of genetically-modified cells, the cells may be allowed to rest in a post-nucleofection cell medium for at least 2-14 days to facilitate identification of modified cells (e.g., differentiation of modified from non-modified cells).

[0614] As early as 24-hours post-nucleofection, expression of a Centyrin or CARTyrin and selection marker of the disclosure may be detectable in modified T cells upon successful nucleofection of a transposon of the disclosure. Due to epi-chromosomal expression of the transposon, expression of a selection marker alone may not differentiate modified T cells (those cells in which the transposon has been successfully integrated) from unmodified T cells (those cells in which the transposon was not successfully integrated). When epi-chromosomal expression of the transposon obscures the detection of modified cells by the selection marker, the nucleofected cells (both modified and unmodified cells) may be rested for a period of time (e.g. 2-14 days) to allow the cells to cease expression or lose all epi-chromosomal transposon expression. Following this extended resting period, only modified T cells should remain positive for expression of selection marker. The length of this extended resting period may be optimized for each nucleofection reaction and selection process. When epi-chromosomal expression of the transposon obscures the detection of modified cells by the selection marker, selection may be performed without this extended resting period, however, an additional selection step may be included at a later time point (e.g. either during or after the expansion stage).

[0615] Selection of genetically modified cells of the disclosure may be performed by any means. In certain embodiments of the methods of the disclosure, selection of genetically modified cells of the disclosure may be performed by isolating cells expressing a specific selection marker. Selection markers of the disclosure may be encoded by one or more sequences in the transposon. Selection markers of the disclosure may be expressed by the modified cell as a result of successful transposition (i.e., not encoded by one or more sequences in the transposon). In certain embodiments, genetically modified cells of the disclosure contain a selection marker that confers resistance to a deleterious compound of the post-nucleofection cell medium. The deleterious compound may comprise, for example, an antibiotic or a drug that, absent the resistance conferred by the selection marker to the modified cells, would result in cell death. Exemplary selection markers include, but are not limited to, wild type (WT) or mutant forms of one or more of the following genes: neo, DHFR, TYMS, ALDH, MDR1, MGMT, FANCF, RAD51C, GCS, and NKX2.2. Exemplary selection markers include, but are not limited to, a surface-expressed selection marker or surface-expressed tag may be targeted by Ab-coated magnetic bead technology or column selection, respectively. A cleavable tag such as those used in protein purification may be added to a selection marker of the disclosure for efficient column selection, washing, and elution. In certain embodiments, selection markers of the disclosure are not expressed by the modified cells (including modified T cells) endogenously and, therefore, may be useful in the physical isolation of modified cells (by, for example, cell sorting techniques). Exemplary selection markers of the disclosure are not expressed by the modified cells (including modified T cells) endogenously include, but are not limited to, full-length, mutated, or truncated forms of CD271, CD19 CD52, CD34, RQR8, CD22, CD20, CD33 and any combination thereof.

[0616] Genetically modified cells of the disclosure may be selective expanded following a nucleofection reaction. In certain embodiments, modified T cells comprising a CARTyrin may be selectively expanded by CARTyrin stimulation. Modified T cells comprising a CARTyrin may be stimulated by contact with a target-covered reagent (e.g. a tumor line or a normal cell line expressing a target or expander beads covered in a target). Alternatively, modified T cells comprising a CARTyrin may be stimulated by contact with an irradiated tumor cell, an irradiated allogeneic normal cell, an irradiated autologous PBMC. To minimize contamination of cell product compositions of the disclosure with a target-expressing cell used for stimulation, for example, when the cell product composition may be administered directly to a subject, the stimulation may be performed using expander beads coated with CARTyrin target protein. Selective expansion of modified T cells comprising a CARTyrin by CARTyrin stimulation may be optimized to avoid functionally-exhausting the modified T-cells.

[0617] Selected genetically-modified cells of the disclosure may be cryopreserved, rested for a defined period of time, or stimulated for expansion by the addition of a Cell Expander technology. Selected genetically-modified cells of the disclosure may be cryopreserved, rested for a defined period of time, or immediately stimulated for expansion by the addition of a Cell Expander technology. When the selected genetically-modified cells are T cells, the T cells may be stimulated for expansion by the addition of a T-Cell Expander technology. Selected genetically modified cells of the disclosure may be rested, for example, for 1, 2, 3, 4, 5, 6, 7, 8, 9, 10, 11, 12, 13, 14, 15, 16, 17, 18, 19, 20, 21, 22, 23, 24, or more hours. In certain embodiments, selected genetically modified cells of the disclosure may be rested, for example, for an overnight. In certain aspects, an overnight is about 12 hours. Selected genetically modified cells of the disclosure may be rested, for example, for 1, 2, 3, 4, 5, 6, 7, 8, 9, 10, 11, 12, 13, 14 or more days. Selected genetically modified cells of the disclosure may be rested for any period of time resulting in cells with enhanced viability, higher nucleofection efficiency, greater viability post-nucleofection, desirable cell phenotype, and/or greater/faster expansion upon addition of expansion technologies.

[0618] Selected genetically-modified cells (including selected genetically-modified T cells of the disclosure) may be cryopreserved using any standard cryopreservation method, which may be optimized for storing and/or recovering human cells with high recovery, viability, phenotype, and/or functional capacity. Cryopreservation methods of the disclosure may include commercially-available cryopreservation media and/or protocols.

[0619] A transposition efficiency of selected genetically-modified cells (including selected genetically-modified T cells of the disclosure) may be assessed by any means. For example, prior to the application of an expander technology, expression of the transposon by selected genetically-modified cells (including selected genetically-modified T cells of the disclosure) may be measured by fluorescence-activated cell sorting (FACS). Determination of a transposition efficiency of selected genetically-modified cells (including selected genetically-modified T cells of the disclosure) may include determining a percentage of selected cells expressing the transposon (e.g. a CARTyrin). Alternatively, or in addition, a purity of T cells, a Mean Fluorescence Intensity (MFI) of the transposon expression (e.g. CARTyrin expression), an ability of a CARTyrin (delivered in the transposon) to mediate degranulation and/or killing of a target cell expressing the CARTyrin ligand, and/or a phenotype of selected genetically-modified cells (including selected genetically-modified T cells of the disclosure) may be assessed by any means.

[0620] Cell product compositions of the disclosure may be released for administration to a subject upon meeting certain release criteria. Exemplary release criteria may include, but are not limited to, a particular percentage of modified, selected and/or expanded T cells expressing detectable levels of a CARTyrin on the cell surface.

### Genetic Modification of an Autologous T Cell Product Composition

[0621] Genetically-modified cells (including genetically-modified T cells) of the disclosure may be expanded using an expander technology. Expander technologies of the disclosure may comprise a commercially-available expander technology. Exemplary expander technologies of the disclosure include stimulation a genetically-modified T cell of the disclosure via the TCR. While all means for stimulation of a genetically-modified T cell of the disclosure are contemplated, stimulation a genetically-modified T cell of the disclosure via the TCR is a preferred method, yielding a product with a superior level of killing capacity.

[0622] To stimulate a genetically-modified T cell of the disclosure via the TCR, Thermo Expander DynaBeads may be used at a 3:1 bead to T cell ratio. If the expander beads are not biodegradable, the beads may be removed from the expander composition. For example, the beads may be removed from the expander composition after about 5 days. To stimulate a genetically-modified T cell of the disclosure via the TCR, a Miltenyi T Cell Activation/Expansion Reagent may be used. To stimulate a genetically-modified T cell of the disclosure via the TCR, StemCell Technologies' ImmunoCult Human CD3/CD28 or CD3/CD28/CD2 T Cell Activator Reagent may be used. This technology may be preferred since the soluble tetrameric antibody complexes would degrade after a period and would not require removal from the process.

[0623] Artificial antigen presenting cells (APCs) may be engineered to co-express the target antigen and may be used to stimulate a cell or T-cell of the disclosure through a TCR and/or CARTyrin of the disclosure. Artificial APCs may comprise or may be derived from a tumor cell line (including, for example, the immortalized myelogenous leukemia line K562) and may be engineered to co-express multiple costimulatory molecules or technologies (such as CD28, 4-1BBL, CD64, mbIL-21, mbIL-15, CAR target molecule, etc.). When artificial APCs of the disclosure are combined with costimulatory molecules, conditions may be optimized to prevent the development or emergence of an undesirable phenotype and functional capacity, namely terminally-differentiated effector T cells.

[0624] Irradiated PBMCs (auto or allo) may express some target antigens, such as CD19, and may be used to stimulate a cell or T-cell of the disclosure through a TCR and/or CARTyrin of the disclosure. Alternatively, or in addition, irradiated tumor cells may express some target antigens and may be used to stimulate a cell or T-cell of the disclosure through a TCR and/or CARTyrin of the disclosure.

[0625] Plate-bound and/or soluble anti-CD3, anti-CD2 and/or anti-CD28 stimulate may be used to stimulate a cell or T-cell of the disclosure through a TCR and/or CARTyrin of the disclosure.

[0626] Antigen-coated beads may display target protein and may be used to stimulate a cell or T-cell of the disclosure through a TCR and/or CARTyrin of the disclosure. Alternatively, or in addition, expander beads coated with a CARTyrin target protein may be used to stimulate a cell or T-cell of the disclosure through a TCR and/or CARTyrin of the disclosure.

[0627] Expansion methods drawn to stimulation of a cell or T-cell of the disclosure through the TCR or CARTyrin and via surface-expressed CD2, CD3, CD28, 4-1BB, and/or other markers on genetically-modified T cells.

[0628] An expansion technology may be applied to a cell of the disclosure immediately post-nucleofection until approximately 24 hours post-nucleofection. While various cell media may be used during an expansion procedure, a desirable T Cell Expansion Media of the disclosure may yield cells with, for example, greater viability, cell phenotype, total expansion, or greater capacity for in vivo persistence, engraftment, and/or CAR-mediated killing. Cell media of the disclosure may be optimized to improve/enhance expansion, phenotype, and function of genetically-modified cells of the disclosure. A preferred phenotype of expanded T cells may include a mixture of T stem cell memory, T central, and T effector memory cells. Expander Dynabeads may yield mainly central memory T cells which may lead to superior performance in the clinic.

[0629] Exemplary T cell expansion media of the disclosure may include, in part or in total, PBS, HBSS, OptiMEM, DMEM, RPMI 1640, AIM-V, X-VIVO 15, CellGro DC Medium, CTS OpTimizer T Cell Expansion SFM, TexMACS Medium, PRIME-XV T Cell Expansion Medium, ImmunoCult-XF T Cell Expansion Medium, or any combination thereof. T cell expansion media of the disclosure may further include one or more supplemental factors. Supplemental factors that may be included in a T cell expansion media of the disclosure enhance viability, cell phenotype, total expansion, or increase capacity for in vivo persistence, engraftment, and/or CARTyrin-mediated killing. Supplemental factors that may be included in a T cell expansion media of the disclosure include, but are not limited to, recombinant human cytokines, chemokines, and/or interleukins such as IL2, IL7, IL12, IL15, IL21, IL1, IL3, IL4, IL5, IL6, IL8, CXCL8, IL9, IL10, IL11, IL13, IL14, IL16, IL17, IL18, IL19, IL20, IL22, IL23, IL25, IL26, IL27, IL28, IL29, IL30, IL31, IL32, IL33, IL35, IL36, GM-CSF, IFN-gamma, IL-1 alpha/IL-1F1, IL-1 beta/IL-1F2, IL-12 p70, IL-12/IL-35 p35, IL-13, IL-17/IL-17A, IL-17A/F Heterodimer, IL-17F, IL-18/IL-1F4, IL-23, IL-24, IL-32, IL-32 beta, IL-32 gamma, IL-33, LAP (TGF-beta 1), Lymphotoxin-alpha/TNF-beta, TGF-beta, TNF-alpha, TRANCE/TNFSF11/RANK L, or any combination thereof. Supplemental factors that may be included in a T cell expansion media of the disclosure include, but are not limited to, salts, minerals, and/or metabolites such as HEPES, Nicotinamide, Heparin, Sodium Pyruvate, L-Glutamine, MEM Non-Essential Amino Acid Solution, Ascorbic Acid, Nucleosides, FBS/FCS, Human serum, serum-substitute, anti-biotics, pH adjusters, Earle's Salts, 2-Mercaptoethanol, Human transferrin, Recombinant human insulin, Human serum albumin, Nucleofector PLUS Supplement, KCL, MgCl2, Na2HPO4, NAH2PO4, Sodium lactobionate, Manitol, Sodium succinate, Sodium Chloride, CINa, Glucose, Ca(NO3)2, Tris/HCl, K2HPO4, KH2PO4, Polyethylenimine, Poly-ethylene-glycol, Poloxamer 188, Poloxamer 181, Poloxamer 407, Poly-vinylpyrrolidone, Pop313, Crown-5 or any combination thereof. Supplemental factors that may be included in a T cell expansion media of the disclosure include, but are not limited to, inhibitors of cellular DNA sensing, metabolism, differentiation, signal transduction, and/or the apoptotic pathway such as inhibitors of TLR9, MyD88, IRAK, TRAF6, TRAF3, IRF-7, NF-KB, Type 1 Interferons, pro-inflammatory cytokines, cGAS, STING, Sec5, TBK1, IRF-3, RNA pol III, RIG-1, IPS-1, FADD, RIP1, TRAF3, AIM2, ASC, Caspase1, Pro-IL1B, PI3K, Akt, Wnt3A, inhibitors of glycogen synthase kinase-3β (GSK-3 β) (e.g. TWS119), Bafilomycin, Chloroquine, Quinacrine, AC-YVAD-CMK, Z-VAD-FMK, Z-IETD-FMK, or any combination thereof.

[0630] Supplemental factors that may be included in a T cell expansion media of the disclosure include, but are not limited to, reagents that modify or stabilize nucleic acids in a way to enhance cellular delivery, enhance nuclear delivery or transport, enhance the facilitated transport of nucleic acid into the nucleus, enhance degradation of epi-chromosomal nucleic acid, and/or decrease DNA-mediated toxicity, such as pH modifiers, DNA-binding proteins, lipids, phospholipids, CaPO4, net neutral charge DNA binding peptides with or without NLS sequences, TREX1 enzyme, or any combination thereof.

[0631] Genetically-modified cells of the disclosure may be selected during the expansion process by the use of selectable drugs or compounds. For example, in certain embodiments, when a transposon of the disclosure may encode a selection marker that confers to genetically-modified cells resistance to a drug added to the culture medium, selection may occur during the expansion process and may require approximately 1-14 days of culture for selection to occur. Examples of drug resistance genes that may be used as selection markers encoded by a transposon of the disclosure, include, but are not limited to, wild type (WT) or mutant forms of the genes neo, DHFR, TYMS, ALDH, MDR1, MGMT, FANCF, RAD51C, GCS, NKX2.2, or any combination thereof. Examples of corresponding drugs or compounds that may be added to the culture medium to which a selection marker may confer resistance include, but are not limited to, G418, Puromycin, Ampicillin, Kanamycin, Methotrexate, Mephalan, Temozolomide, Vincristine, Etoposide, Doxorubicin, Bendamustine, Fludarabine, Aredia (Pamidronate Disodium), Becenum (Carmustine), BiCNU (Carmustine), Bortezomib, Carfilzomib, Carmubris (Carmustine), Carmustine, Clafen (Cyclophosphamide), Cyclophosphamide, Cytoxan (Cyclophosphamide), Daratumumab, Darzalex (Daratumumab), Doxil (Doxorubicin Hydrochloride Liposome), Doxorubicin Hydrochloride Liposome, Dox-SL (Doxorubicin Hydrochloride Liposome), Elotuzumab, Empliciti (Elotuzumab), Evacet (Doxorubicin Hydrochloride Liposome), Farydak (Panobinostat), Ixazomib Citrate, Kyprolis (Carfilzomib), Lenalidomide, LipoDox (Doxorubicin Hydrochloride Liposome), Mozobil (Plerixafor), Neosar (Cyclophosphamide), Ninlaro (Ixazomib Citrate), Pamidronate Disodium, Panobinostat, Plerixafor, Pomalidomide, Pomalyst (Pomalidomide), Revlimid (Lenalidomide), Synovir (Thalidomide), Thalidomide, Thalomid (Thalidomide), Velcade (Bortezomib), Zoledronic Acid, Zometa (Zoledronic Acid), or any combination thereof.

[0632] A T-Cell Expansion process of the disclosure may occur in a cell culture bag in a WAVE Bioreactor, a G-Rex flask, or in any other suitable container and/or reactor.

[0633] A cell or T-cell culture of the disclosure may be kept steady, rocked, swirled, or shaken.

[0634] A cell or T-cell expansion process of the disclosure may optimize certain conditions, including, but not limited to culture duration, cell concentration, schedule for T cell medium addition/removal, cell size, total cell number, cell phenotype, purity of cell population, percentage of genetically-modified cells in growing cell population, use and composition of supplements, the addition/removal of expander technologies, or any combination thereof.

[0635] A cell or T-cell expansion process of the disclosure may continue until a predefined endpoint prior to formulation of the resultant expanded cell population. For example, a cell or T-cell expansion process of the disclosure may continue for a predetermined amount of time: at least, 2, 4, 6, 8, 10, 12, 14, 16, 18, 20, 22, 24 hours; at least 1, 2, 3, 4, 5, 6, 7, 8, 9, 10, 11, 12, 13, 14, 15, 16, 17, 18, 19, 20, 21, 22, 23, 24, 25, 26, 27, 28, 29, 30 days; at least 1, 2, 3, 4, 5, 6, 7, 8, 9, 10, 11, 12 weeks; at least 1, 2, 3, 4, 5, 6, months, or at least 1 year. A cell or T-cell expansion process of the disclosure may continue until the resultant culture reaches a predetermined overall cell density: 1, 10, 100, 1000, 104, 105, 106, 107, 108, 109, 1010 cells per volume (μl, ml, L) or any density in between. A cell or T-cell expansion process of the disclosure may continue until the genetically-modified cells of a resultant culture demonstrate a predetermined level of expression of a transposon of the disclosure: 1%, 10%, 20%, 30%, 40%, 50%, 60%, 70%, 80%, 90%, or 100% or any percentage in between of a threshold level of expression (a minimum, maximum or mean level of expression indicating the resultant genetically-modified cells are clinically-efficacious). A cell or T-cell expansion process of the disclosure may continue until the proportion of genetically-modified cells of a resultant culture to the proportion of unmodified cells reaches a predetermined threshold: at least 1:10, 1:9, 1:8, 1:7, 1:6, 1:5, 1:4, 1:3, 1:2, 1:1, 2:1, 2:1, 4:1, 5:1, 6:1, 7:1, 8:1, 9:1 10:1 or any ratio in between.

### Analysis of Genetically-Modified Autologous T Cells for Release

[0636] A percentage of genetically-modified cells may be assessed during or after an expansion process of the disclosure. Cellular expression of a transposon by a genetically-modified cell of the disclosure may be measured by fluorescence-activated cell sorting (FACS). For example, FACS may be used to determine a percentage of cells or T cells expressing a CARTyrin of the disclosure. Alternatively, or in addition, a purity of genetically-modified cells or T cells, the Mean Fluorescence Intensity (MFI) of a CARTyrin expressed by a genetically-modified cell or T cell of the disclosure, an ability of the CARTyrin to mediate degranulation and/or killing of a target cell expressing the CARTyrin ligand, and/or a phenotype of CARTyrin+ T cells may be assessed.

[0637] Compositions of the disclosure intended for administration to a subject may be required to meet one or more “release criteria” that indicate that the composition is safe and efficacious for formulation as a pharmaceutical product and/or administration to a subject. Release criteria may include a requirement that a composition of the disclosure (e.g. a T-cell product of the disclosure) comprises a particular percentage of T cells expressing detectable levels of a CARTyrin of the disclosure on their cell surface.

[0638] The expansion process should be continued until a specific criterion has been met (e.g. achieving a certain total number of cells, achieving a particular population of memory cells, achieving a population of a specific size).

[0639] Certain criterion signal a point at which the expansion process should end. For example, cells should be formulated, reactivated, or cryopreserved once they reach a cell size of 300 fL (otherwise, cells reaching a size above this threshold may start to die). Cryopreservation immediately once a population of cells reaches an average cell size of less than 300 fL may yield better cell recovery upon thawing and culture because the cells haven't yet reached a fully quiescent state prior to cryopreservation (a fully quiescent size is approximately 180 fL). Prior to expansion, T cells of the disclosure may have a cell size of about 180 fL, but may more than quadruple their cell size to approximately 900 fL at 3 days post-expansion. Over the next 6-12 days, the population of T-cells will slowly decrease cell size to full quiescence at 180 fL.

[0640] A process for preparing a cell population for formulation may include, but is not limited to the steps of, concentrating the cells of the cell population, washing the cells, and/or further selection of the cells via drug resistance or magnetic bead sorting against a particular surface-expressed marker. A process for preparing a cell population for formulation may further include a sorting step to ensure the safety and purity of the final product. For example, if a tumor cell from a patient has been used to stimulate a genetically-modified T-cell of the disclosure or that have been genetically-modified in order to stimulate a genetically-modified T-cell of the disclosure that is being prepared for formulation, it is critical that no tumor cells from the patient are included in the final product.

Cell Product Infusion and/or Cryopreservation for Infusion

[0641] A pharmaceutical formulation of the disclosure may be distributed into bags for infusion, cryopreservation, and/or storage.

[0642] A pharmaceutical formulation of the disclosure may be cryopreserved using a standard protocol and, optionally, an infusible cryopreservation medium. For example, a DMSO free cryopreservant (e.g. CryoSOfree™ DMSO-free Cryopreservation Medium) may be used to reduce freezing-related toxicity. A cryopreserved pharmaceutical formulation of the disclosure may be stored for infusion to a patient at a later date. An effective treatment may require multiple administrations of a pharmaceutical formulation of the disclosure and, therefore, pharmaceutical formulations may be packaged in pre-aliquoted “doses” that may be stored frozen but separated for thawing of individual doses.

[0643] A pharmaceutical formulation of the disclosure may be stored at room temperature. An effective treatment may require multiple administrations of a pharmaceutical formulation of the disclosure and, therefore, pharmaceutical formulations may be packaged in pre-aliquoted “doses” that may be stored together but separated for administration of individual doses.

[0644] A pharmaceutical formulation of the disclosure may be archived for subsequent re-expansion and/or selection for generation of additional doses to the same patient in the case of an allogenic therapy who may need an administration at a future date following, for example, a remission and relapse of a condition.

### Formulations

[0645] As noted above, the disclosure provides for stable formulations, which preferably comprise a phosphate buffer with saline or a chosen salt, as well as preserved solutions and formulations containing a preservative as well as multi-use preserved formulations suitable for pharmaceutical or veterinary use, comprising at least one CARTyrin in a pharmaceutically acceptable formulation. Preserved formulations contain at least one known preservative or optionally selected from the group consisting of at least one phenol, m-cresol, p-cresol, o-cresol, chlorocresol, benzyl alcohol, phenylmercuric nitrite, phenoxyethanol, formaldehyde, chlorobutanol, magnesium chloride (e.g., hexahydrate), alkylparaben (methyl, ethyl, propyl, butyl and the like), benzalkonium chloride, benzethonium chloride, sodium dehydroacetate and thimerosal, polymers, or mixtures thereof in an aqueous diluent. Any suitable concentration or mixture can be used as known in the art, such as about 0.0015%, or any range, value, or fraction therein. Non-limiting examples include, no preservative, about 0.1-2% m-cresol (e.g., 0.2, 0.3. 0.4, 0.5, 0.9, 1.0%), about 0.1-3% benzyl alcohol (e.g., 0.5, 0.9, 1.1, 1.5, 1.9, 2.0, 2.5%), about 0.001-0.5% thimerosal (e.g., 0.005, 0.01), about 0.001-2.0% phenol (e.g., 0.05, 0.25, 0.28, 0.5, 0.9, 1.0%), 0.0005-1.0% alkylparaben(s) (e.g., 0.00075, 0.0009, 0.001, 0.002, 0.005, 0.0075, 0.009, 0.01, 0.02, 0.05, 0.075, 0.09, 0.1, 0.2, 0.3, 0.5, 0.75, 0.9, 1.0%), and the like.

[0646] As noted above, the invention provides an article of manufacture, comprising packaging material and at least one vial comprising a solution of at least one CARTyrin with the prescribed buffers and/or preservatives, optionally in an aqueous diluent, wherein said packaging material comprises a label that indicates that such solution can be held over a period of 1, 2, 3, 4, 5, 6, 9, 12, 18, 20, 24, 30, 36, 40, 48, 54, 60, 66, 72 hours or greater. The invention further comprises an article of manufacture, comprising packaging material, a first vial comprising lyophilized at least one CARTyrin, and a second vial comprising an aqueous diluent of prescribed buffer or preservative, wherein said packaging material comprises a label that instructs a patient to reconstitute the at least one CARTyrin in the aqueous diluent to form a solution that can be held over a period of twenty-four hours or greater.

[0647] The at least one CARTyrin used in accordance with the present invention can be produced by recombinant means, including from mammalian cell or transgenic preparations, or can be purified from other biological sources, as described herein or as known in the art.

[0648] The range of at least one CARTyrin in the product of the present invention includes amounts yielding upon reconstitution, if in a wet/dry system, concentrations from about 1.0 μg/ml to about 1000 mg/ml, although lower and higher concentrations are operable and are dependent on the intended delivery vehicle, e.g., solution formulations will differ from transdermal patch, pulmonary, transmucosal, or osmotic or micro pump methods.

[0649] Preferably, the aqueous diluent optionally further comprises a pharmaceutically acceptable preservative. Preferred preservatives include those selected from the group consisting of phenol, m-cresol, p-cresol, o-cresol, chlorocresol, benzyl alcohol, alkylparaben (methyl, ethyl, propyl, butyl and the like), benzalkonium chloride, benzethonium chloride, sodium dehydroacetate and thimerosal, or mixtures thereof. The concentration of preservative used in the formulation is a concentration sufficient to yield an anti-microbial effect. Such concentrations are dependent on the preservative selected and are readily determined by the skilled artisan.

[0650] Other excipients, e.g., isotonicity agents, buffers, antioxidants, and preservative enhancers, can be optionally and preferably added to the diluent. An isotonicity agent, such as glycerin, is commonly used at known concentrations. A physiologically tolerated buffer is preferably added to provide improved pH control. The formulations can cover a wide range of pHs, such as from about pH 4 to about pH 10, and preferred ranges from about pH 5 to about pH 9, and a most preferred range of about 6.0 to about 8.0. Preferably, the formulations of the present invention have a pH between about 6.8 and about 7.8. Preferred buffers include phosphate buffers, most preferably, sodium phosphate, particularly, phosphate buffered saline (PBS).

[0651] Other additives, such as a pharmaceutically acceptable solubilizers like Tween 20 (polyoxyethylene (20) sorbitan monolaurate), Tween 40 (polyoxyethylene (20) sorbitan monopalmitate), Tween 80 (polyoxyethylene (20) sorbitan monooleate), Pluronic F68 (polyoxyethylene polyoxypropylene block copolymers), and PEG (polyethylene glycol) or non-ionic surfactants, such as polysorbate 20 or 80 or poloxamer 184 or 188, Pluronic® polyls, other block co-polymers, and chelators, such as EDTA and EGTA, can optionally be added to the formulations or compositions to reduce aggregation. These additives are particularly useful if a pump or plastic container is used to administer the formulation. The presence of pharmaceutically acceptable surfactant mitigates the propensity for the protein to aggregate.

[0652] The formulations of the present invention can be prepared by a process which comprises mixing at least one CARTyrin and a preservative selected from the group consisting of phenol, m-cresol, p-cresol, o-cresol, chlorocresol, benzyl alcohol, alkylparaben, (methyl, ethyl, propyl, butyl and the like), benzalkonium chloride, benzethonium chloride, sodium dehydroacetate and thimerosal or mixtures thereof in an aqueous diluent. Mixing the at least one CARTyrin and preservative in an aqueous diluent is carried out using conventional dissolution and mixing procedures. To prepare a suitable formulation, for example, a measured amount of at least one CARTyrin in buffered solution is combined with the desired preservative in a buffered solution in quantities sufficient to provide the protein and preservative at the desired concentrations. Variations of this process would be recognized by one of ordinary skill in the art. For example, the order the components are added, whether additional additives are used, the temperature and pH at which the formulation is prepared, are all factors that can be optimized for the concentration and means of administration used.

[0653] The claimed formulations can be provided to patients as clear solutions or as dual vials comprising a vial of lyophilized at least one CARTyrin that is reconstituted with a second vial containing water, a preservative and/or excipients, preferably, a phosphate buffer and/or saline and a chosen salt, in an aqueous diluent. Either a single solution vial or dual vial requiring reconstitution can be reused multiple times and can suffice for a single or multiple cycles of patient treatment and thus can provide a more convenient treatment regimen than currently available.

[0654] The present claimed articles of manufacture are useful for administration over a period ranging from immediate to twenty-four hours or greater. Accordingly, the presently claimed articles of manufacture offer significant advantages to the patient. Formulations of the invention can optionally be safely stored at temperatures of from about 2° C. to about 40° C. and retain the biological activity of the protein for extended periods of time, thus allowing a package label indicating that the solution can be held and/or used over a period of 6, 12, 18, 24, 36, 48, 72, or 96 hours or greater. If preserved diluent is used, such label can include use up to 1-12 months, one-half, one and a half, and/or two years.

[0655] The solutions of at least one CARTyrin of the invention can be prepared by a process that comprises mixing at least one CARTyrin in an aqueous diluent. Mixing is carried out using conventional dissolution and mixing procedures. To prepare a suitable diluent, for example, a measured amount of at least one CARTyrin in water or buffer is combined in quantities sufficient to provide the protein and, optionally, a preservative or buffer at the desired concentrations. Variations of this process would be recognized by one of ordinary skill in the art. For example, the order the components are added, whether additional additives are used, the temperature and pH at which the formulation is prepared, are all factors that can be optimized for the concentration and means of administration used.

[0656] The claimed products can be provided to patients as clear solutions or as dual vials comprising a vial of lyophilized at least one CARTyrin that is reconstituted with a second vial containing the aqueous diluent. Either a single solution vial or dual vial requiring reconstitution can be reused multiple times and can suffice for a single or multiple cycles of patient treatment and thus provides a more convenient treatment regimen than currently available.

[0657] The claimed products can be provided indirectly to patients by providing to pharmacies, clinics, or other such institutions and facilities, clear solutions or dual vials comprising a vial of lyophilized at least one CARTyrin that is reconstituted with a second vial containing the aqueous diluent. The clear solution in this case can be up to one liter or even larger in size, providing a large reservoir from which smaller portions of the at least one CARTyrin solution can be retrieved one or multiple times for transfer into smaller vials and provided by the pharmacy or clinic to their customers and/or patients.

[0658] Recognized devices comprising single vial systems include pen-injector devices for delivery of a solution, such as BD Pens, BD Autojector®, Humaject®, NovoPen®, BD®Pen, AutoPen®, and OptiPen®, GenotropinPen®, Genotronorm Pen®, Humatro Pen®, Reco-Pen®, Roferon Pen®, Biojector®, Iject®, J-tip Needle-Free Injector®, Intraject®, Medi-Ject®, e.g., as made or developed by Becton Dickinson (Franklin Lakes, N.J., www.bectondickenson.com), Disetronic (Burgdorf, Switzerland, www.disetronic.com; Bioject, Portland, Oreg. (www.bioject.com); National Medical Products, Weston Medical (Peterborough, UK, www.weston-medical.com), Medi-Ject Corp (Minneapolis, Minn., www.mediject.com), and similarly suitable devices. Recognized devices comprising a dual vial system include those pen-injector systems for reconstituting a lyophilized drug in a cartridge for delivery of the reconstituted solution, such as the HumatroPen®. Examples of other devices suitable include pre-filled syringes, auto-injectors, needle free injectors and needle free IV infusion sets.

[0659] The products presently claimed include packaging material. The packaging material provides, in addition to the information required by the regulatory agencies, the conditions under which the product can be used. The packaging material of the present invention provides instructions to the patient to reconstitute at least one CARTyrin in the aqueous diluent to form a solution and to use the solution over a period of 2-24 hours or greater for the two vial, wet/dry, product. For the single vial, solution product, the label indicates that such solution can be used over a period of 2-24 hours or greater. The presently claimed products are useful for human pharmaceutical product use.

[0660] The formulations of the present invention can be prepared by a process that comprises mixing at least one CARTyrin and a selected buffer, preferably, a phosphate buffer containing saline or a chosen salt. Mixing at least one CARTyrin and buffer in an aqueous diluent is carried out using conventional dissolution and mixing procedures. To prepare a suitable formulation, for example, a measured amount of at least one CARTyrin in water or buffer is combined with the desired buffering agent in water in quantities sufficient to provide the protein and buffer at the desired concentrations. Variations of this process would be recognized by one of ordinary skill in the art. For example, the order the components are added, whether additional additives are used, the temperature and pH at which the formulation is prepared, are all factors that can be optimized for the concentration and means of administration used.

[0661] The claimed stable or preserved formulations can be provided to patients as clear solutions or as dual vials comprising a vial of lyophilized CARTyrin that is reconstituted with a second vial containing a preservative or buffer and excipients in an aqueous diluent. Either a single solution vial or dual vial requiring reconstitution can be reused multiple times and can suffice for a single or multiple cycles of patient treatment and thus provides a more convenient treatment regimen than currently available.

[0662] Other formulations or methods of stabilizing the CARTyrin may result in other than a clear solution of lyophilized powder comprising the CARTyrin. Among non-clear solutions are formulations comprising particulate suspensions, said particulates being a composition containing the CARTyrin in a structure of variable dimension and known variously as a microsphere, microparticle, nanoparticle, nanosphere, or liposome. Such relatively homogenous, essentially spherical, particulate formulations containing an active agent can be formed by contacting an aqueous phase containing the active agent and a polymer and a nonaqueous phase followed by evaporation of the nonaqueous phase to cause the coalescence of particles from the aqueous phase as taught in U.S. Pat. No. 4,589,330. Porous microparticles can be prepared using a first phase containing active agent and a polymer dispersed in a continuous solvent and removing said solvent from the suspension by freeze-drying or dilution-extraction-precipitation as taught in U.S. Pat. No. 4,818,542. Preferred polymers for such preparations are natural or synthetic copolymers or polymers selected from the group consisting of gelatin agar, starch, arabinogalactan, albumin, collagen, polyglycolic acid, polylactic aced, glycolide-L(−) lactide poly(episilon-caprolactone, poly(epsilon-caprolactone-CO-lactic acid), poly(epsilon-caprolactone-CO-glycolic acid), poly(β-hydroxy butyric acid), polyethylene oxide, polyethylene, poly(alkyl-2-cyanoacrylate), poly(hydroxyethyl methacrylate), polyamides, poly(amino acids), poly(2-hydroxyethyl DL-aspartamide), poly(ester urea), poly(L-phenylalanine/ethylene glycol/1,6-diisocyanatohexane) and poly(methyl methacrylate). Particularly preferred polymers are polyesters, such as polyglycolic acid, polylactic aced, glycolide-L(−) lactide poly(episilon-caprolactone, poly(epsilon-caprolactone-CO-lactic acid), and poly(epsilon-caprolactone-CO-glycolic acid. Solvents useful for dissolving the polymer and/or the active include: water, hexafluoroisopropanol, methylenechloride, tetrahydrofuran, hexane, benzene, or hexafluoroacetone sesquihydrate. The process of dispersing the active containing phase with a second phase may include pressure forcing said first phase through an orifice in a nozzle to affect droplet formation.

[0663] Dry powder formulations may result from processes other than lyophilization, such as by spray drying or solvent extraction by evaporation or by precipitation of a crystalline composition followed by one or more steps to remove aqueous or nonaqueous solvent. Preparation of a spray-dried CARTyrin preparation is taught in U.S. Pat. No. 6,019,968. The CARTyrin-based dry powder compositions may be produced by spray drying solutions or slurries of the CARTyrin and, optionally, excipients, in a solvent under conditions to provide a respirable dry powder. Solvents may include polar compounds, such as water and ethanol, which may be readily dried. CARTyrin stability may be enhanced by performing the spray drying procedures in the absence of oxygen, such as under a nitrogen blanket or by using nitrogen as the drying gas. Another relatively dry formulation is a dispersion of a plurality of perforated microstructures dispersed in a suspension medium that typically comprises a hydrofluoroalkane propellant as taught in WO 9916419. The stabilized dispersions may be administered to the lung of a patient using a metered dose inhaler. Equipment useful in the commercial manufacture of spray dried medicaments are manufactured by Buchi Ltd. or Niro Corp.

[0664] At least one CARTyrin in either the stable or preserved formulations or solutions described herein, can be administered to a patient in accordance with the present invention via a variety of delivery methods including SC or IM injection; transdermal, pulmonary, transmucosal, implant, osmotic pump, cartridge, micro pump, or other means appreciated by the skilled artisan, as well-known in the art.

### Therapeutic Applications

[0665] The present invention also provides a method for modulating or treating a disease, in a cell, tissue, organ, animal, or patient, as known in the art or as described herein, using at least one CARTyrin of the present invention, e.g., administering or contacting the cell, tissue, organ, animal, or patient with a therapeutic effective amount of CARTyrin. The present invention also provides a method for modulating or treating a disease, in a cell, tissue, organ, animal, or patient including, but not limited to, a malignant disease.

[0666] The present invention also provides a method for modulating or treating at least one malignant disease in a cell, tissue, organ, animal or patient, including, but not limited to, at least one of: leukemia, acute leukemia, acute lymphoblastic leukemia (ALL), acute lymphocytic leukemia, B-cell, T-cell or FAB ALL, acute myeloid leukemia (AML), acute myelogenous leukemia, chronic myelocytic leukemia (CML), chronic lymphocytic leukemia (CLL), hairy cell leukemia, myelodyplastic syndrome (MDS), a lymphoma, Hodgkin's disease, a malignant lymphoma, non-Hodgkin's lymphoma, Burkitt's lymphoma, multiple myeloma, Kaposi's sarcoma, colorectal carcinoma, pancreatic carcinoma, nasopharyngeal carcinoma, malignant histiocytosis, paraneoplastic syndrome/hypercalcemia of malignancy, solid tumors, bladder cancer, breast cancer, colorectal cancer, endometrial cancer, head cancer, neck cancer, hereditary nonpolyposis cancer, Hodgkin's lymphoma, liver cancer, lung cancer, non-small cell lung cancer, ovarian cancer, pancreatic cancer, prostate cancer, renal cell carcinoma, testicular cancer, adenocarcinomas, sarcomas, malignant melanoma, hemangioma, metastatic disease, cancer related bone resorption, cancer related bone pain, and the like.

[0667] Any method of the present invention can comprise administering an effective amount of a composition or pharmaceutical composition comprising at least one CARTyrin to a cell, tissue, organ, animal or patient in need of such modulation, treatment or therapy. Such a method can optionally further comprise co-administration or combination therapy for treating such diseases or disorders, wherein the administering of said at least one CARTyrin, specified portion or variant thereof, further comprises administering, before concurrently, and/or after, at least one selected from at least one of an alkylating agent, an a mitotic inhibitor, and a radiopharmaceutical. Suitable dosages are well known in the art. See, e.g., Wells et al., eds., Pharmacotherapy Handbook, 2nd Edition, Appleton and Lange, Stamford, Conn. (2000); PDR Pharmacopoeia, Tarascon Pocket Pharmacopoeia 2000, Deluxe Edition, Tarascon Publishing, Loma Linda, Calif. (2000); Nursing 2001 Handbook of Drugs, 21st edition, Springhouse Corp., Springhouse, Pa., 2001; Health Professional's Drug Guide 2001, ed., Shannon, Wilson, Stang, Prentice-Hall, Inc, Upper Saddle River, N.J. each of which references are entirely incorporated herein by reference.

[0668] Preferred doses can optionally include about 0.1-99 and/or 100-500 mg/kg/administration, or any range, value or fraction thereof, or to achieve a serum concentration of about 0.1-5000 μg/ml serum concentration per single or multiple administration, or any range, value or fraction thereof. A preferred dosage range for the CARTyrin of the present invention is from about 1 mg/kg, up to about 3, about 6 or about 12 mg/kg of body weight of the patient.

[0669] Alternatively, the dosage administered can vary depending upon known factors, such as the pharmacodynamic characteristics of the particular agent, and its mode and route of administration; age, health, and weight of the recipient; nature and extent of symptoms, kind of concurrent treatment, frequency of treatment, and the effect desired. Usually a dosage of active ingredient can be about 0.1 to 100 milligrams per kilogram of body weight. Ordinarily 0.1 to 50, and preferably, 0.1 to 10 milligrams per kilogram per administration or in sustained release form is effective to obtain desired results.

[0670] As a non-limiting example, treatment of humans or animals can be provided as a one-time or periodic dosage of at least one CARTyrin of the present invention about 0.1 to 100 mg/kg or any range, value or fraction thereof per day, on at least one of day 1-40, or, alternatively or additionally, at least one of week 1-52, or, alternatively or additionally, at least one of 1-20 years, or any combination thereof, using single, infusion or repeated doses.

[0671] Dosage forms (composition) suitable for internal administration generally contain from about 0.001 milligram to about 500 milligrams of active ingredient per unit or container. In these pharmaceutical compositions the active ingredient will ordinarily be present in an amount of about 0.5-99.999% by weight based on the total weight of the composition.

[0672] For parenteral administration, the CARTyrin can be formulated as a solution, suspension, emulsion, particle, powder, or lyophilized powder in association, or separately provided, with a pharmaceutically acceptable parenteral vehicle. Examples of such vehicles are water, saline, Ringer's solution, dextrose solution, and about 1-10% human serum albumin. Liposomes and nonaqueous vehicles, such as fixed oils, can also be used. The vehicle or lyophilized powder can contain additives that maintain isotonicity (e.g., sodium chloride, mannitol) and chemical stability (e.g., buffers and preservatives). The formulation is sterilized by known or suitable techniques.

[0673] Suitable pharmaceutical carriers are described in the most recent edition of Remington's Pharmaceutical Sciences, A. Osol, a standard reference text in this field.

### Alternative Administration

[0674] Many known and developed modes can be used according to the present invention for administering pharmaceutically effective amounts of at least one CARTyrin according to the present invention. While pulmonary administration is used in the following description, other modes of administration can be used according to the present invention with suitable results. CARTyrins of the present invention can be delivered in a carrier, as a solution, emulsion, colloid, or suspension, or as a dry powder, using any of a variety of devices and methods suitable for administration by inhalation or other modes described here within or known in the art.

### Parenteral Formulations and Administration

[0675] Formulations for parenteral administration can contain as common excipients sterile water or saline, polyalkylene glycols, such as polyethylene glycol, oils of vegetable origin, hydrogenated naphthalenes and the like. Aqueous or oily suspensions for injection can be prepared by using an appropriate emulsifier or humidifier and a suspending agent, according to known methods. Agents for injection can be a non-toxic, non-orally administrable diluting agent, such as aqueous solution, a sterile injectable solution or suspension in a solvent. As the usable vehicle or solvent, water, Ringer's solution, isotonic saline, etc. are allowed; as an ordinary solvent or suspending solvent, sterile involatile oil can be used. For these purposes, any kind of involatile oil and fatty acid can be used, including natural or synthetic or semisynthetic fatty oils or fatty acids; natural or synthetic or semisynthtetic mono- or di- or tri-glycerides. Parental administration is known in the art and includes, but is not limited to, conventional means of injections, a gas pressured needle-less injection device as described in U.S. Pat. No. 5,851,198, and a laser perforator device as described in U.S. Pat. No. 5,839,446 entirely incorporated herein by reference.

### Alternative Delivery

[0676] The invention further relates to the administration of at least one CARTyrin by parenteral, subcutaneous, intramuscular, intravenous, intrarticular, intrabronchial, intraabdominal, intracapsular, intracartilaginous, intracavitary, intracelial, intracerebellar, intracerebroventricular, intracolic, intracervical, intragastric, intrahepatic, intramyocardial, intraosteal, intrapelvic, intrapericardiac, intraperitoneal, intrapleural, intraprostatic, intrapulmonary, intrarectal, intrarenal, intraretinal, intraspinal, intrasynovial, intrathoracic, intrauterine, intravesical, intralesional, bolus, vaginal, rectal, buccal, sublingual, intranasal, or transdermal means. At least one CARTyrin composition can be prepared for use for parenteral (subcutaneous, intramuscular or intravenous) or any other administration particularly in the form of liquid solutions or suspensions; for use in vaginal or rectal administration particularly in semisolid forms, such as, but not limited to, creams and suppositories; for buccal, or sublingual administration, such as, but not limited to, in the form of tablets or capsules; or intranasally, such as, but not limited to, the form of powders, nasal drops or aerosols or certain agents; or transdermally, such as not limited to a gel, ointment, lotion, suspension or patch delivery system with chemical enhancers such as dimethyl sulfoxide to either modify the skin structure or to increase the drug concentration in the transdermal patch (Junginger, et al. In “Drug Permeation Enhancement;” Hsieh, D. S., Eds., pp. 59-90 (Marcel Dekker, Inc. New York 1994, entirely incorporated herein by reference), or with oxidizing agents that enable the application of formulations containing proteins and peptides onto the skin (WO 98/53847), or applications of electric fields to create transient transport pathways, such as electroporation, or to increase the mobility of charged drugs through the skin, such as iontophoresis, or application of ultrasound, such as sonophoresis (U.S. Pat. Nos. 4,309,989 and 4,767,402) (the above publications and patents being entirely incorporated herein by reference).

### Infusion of Modified Cells as Adoptive Cell Therapy

[0677] The disclosure provides modified cells that express one or more CARs and/or CARTyrins of the disclosure that have been selected and/or expanded for administration to a subject in need thereof. Modified cells of the disclosure may be formulated for storage at any temperature including room temperature and body temperature. Modified cells of the disclosure may be formulated for cryopreservation and subsequent thawing. Modified cells of the disclosure may be formulated in a pharmaceutically acceptable carrier for direct administration to a subject from sterile packaging. Modified cells of the disclosure may be formulated in a pharmaceutically acceptable carrier with an indicator of cell viability and/or CAR/CARTyrin expression level to ensure a minimal level of cell function and CAR/CARTyrin expression. Modified cells of the disclosure may be formulated in a pharmaceutically acceptable carrier at a prescribed density with one or more reagents to inhibit further expansion and/or prevent cell death.

### Inducible Proapoptotic Polypeptides

[0678] Inducible proapoptotic polypeptides of the disclosure are superior to existing inducible polypeptides because the inducible proapoptotic polypeptides of the disclosure are far less immunogenic. While inducible proapoptotic polypeptides of the disclosure are recombinant polypeptides, and, therefore, non-naturally occurring, the sequences that are recombined to produce the inducible proapoptotic polypeptides of the disclosure do not comprise non-human sequences that the host human immune system could recognize as “non-self” and, consequently, induce an immune response in the subject receiving an inducible proapoptotic polypeptide of the disclosure, a cell comprising the inducible proapoptotic polypeptide or a composition comprising the inducible proapoptotic polypeptide or the cell comprising the inducible proapoptotic polypeptide.

[0679] The disclosure provides inducible proapoptotic polypeptides comprising a ligand binding region, a linker, and a proapoptotic peptide, wherein the inducible proapoptotic polypeptide does not comprise a non-human sequence. In certain embodiments, the non-human sequence comprises a restriction site. In certain embodiments, the proapoptotic peptide is a caspase polypeptide. In certain embodiments, the caspase polypeptide is a caspase 9 polypeptide. In certain embodiments, the caspase 9 polypeptide is a truncated caspase 9 polypeptide. Inducible proapoptotic polypeptides of the disclosure may be non-naturally occurring.

[0680] Caspase polypeptides of the disclosure include, but are not limited to, caspase 1, caspase 2, caspase 3, caspase 4, caspase 5, caspase 6, caspase 7, caspase 8, caspase 9, caspase 10, caspase 11, caspase 12, and caspase 14. Caspase polypeptides of the disclosure include, but are not limited to, those caspase polypeptides associated with apoptosis including caspase 2, caspase 3, caspase 6, caspase 7, caspase 8, caspase 9, and caspase 10. Caspase polypeptides of the disclosure include, but are not limited to, those caspase polypeptides that initiate apoptosis, including caspase 2, caspase 8, caspase 9, and caspase 10. Caspase polypeptides of the disclosure include, but are not limited to, those caspase polypeptides that execute apoptosis, including caspase 3, caspase 6, and caspase 7.

[0681] Caspase polypeptides of the disclosure may be encoded by an amino acid or a nucleic acid sequence having one or more modifications compared to a wild type amino acid or a nucleic acid sequence. The nucleic acid sequence encoding a caspase polypeptide of the disclosure may be codon optimized. The one or more modifications to an amino acid and/or nucleic acid sequence of a caspase polypeptide of the disclosure may increase an interaction, a cross-linking, a cross-activation, or an activation of the caspase polypeptide of the disclosure compared to a wild type amino acid or a nucleic acid sequence. Alternatively, or in addition, the one or more modifications to an amino acid and/or nucleic acid sequence of a caspase polypeptide of the disclosure may decrease the immunogenicity of the caspase polypeptide of the disclosure compared to a wild type amino acid or a nucleic acid sequence.

[0682] Caspase polypeptides of the disclosure may be truncated compared to a wild type caspase polypeptide. For example, a caspase polypeptide may be truncated to eliminate a sequence encoding a Caspase Activation and Recruitment Domain (CARD) to eliminate or minimize the possibility of activating a local inflammatory response in addition to initiating apoptosis in the cell comprising an inducible caspase polypeptide of the disclosure. The nucleic acid sequence encoding a caspase polypeptide of the disclosure may be spliced to form a variant amino acid sequence of the caspase polypeptide of the disclosure compared to a wild type caspase polypeptide. Caspase polypeptides of the disclosure may be encoded by recombinant and/or chimeric sequences. Recombinant and/or chimeric caspase polypeptides of the disclosure may include sequences from one or more different caspase polypeptides. Alternatively, or in addition, recombinant and/or chimeric caspase polypeptides of the disclosure may include sequences from one or more species (e.g. a human sequence and a non-human sequence). Caspase polypeptides of the disclosure may be non-naturally occurring.

[0683] The ligand binding region of an inducible proapoptotic polypeptide of the disclosure may include any polypeptide sequence that facilitates or promotes the dimerization of a first inducible proapoptotic polypeptide of the disclosure with a second inducible proapoptotic polypeptide of the disclosure, the dimerization of which activates or induces cross-linking of the proapoptotic polypeptides and initiation of apoptosis in the cell.

[0684] The ligand-binding (“dimerization”) region may comprise any polypeptide or functional domain thereof that will allow for induction using an endogenous or non-naturally occurring ligand (i.e. and induction agent), for example, a non-naturally occurring synthetic ligand. The ligand-binding region may be internal or external to the cellular membrane, depending upon the nature of the inducible proapoptotic polypeptide and the choice of ligand (i.e. induction agent). A wide variety of ligand-binding polypeptides and functional domains thereof, including receptors, are known. Ligand-binding regions of the disclosure may include one or more sequences from a receptor. Of particular interest are ligand-binding regions for which ligands (for example, small organic ligands) are known or may be readily produced. These ligand-binding regions or receptors may include, but are not limited to, the FKBPs and cyclophilin receptors, the steroid receptors, the tetracycline receptor, and the like, as well as “non-naturally occurring” receptors, which can be obtained from antibodies, particularly the heavy or light chain subunit, mutated sequences thereof, random amino acid sequences obtained by stochastic procedures, combinatorial syntheses, and the like. In certain embodiments, the ligand-binding region is selected from the group consisting of a FKBP ligand-binding region, a cyclophilin receptor ligand-binding region, a steroid receptor ligand-binding region, a cyclophilin receptors ligand-binding region, and a tetracycline receptor ligand-binding region.

[0685] The ligand-binding regions comprising one or more receptor domain(s) may be at least about 50 amino acids, and fewer than about 350 amino acids, usually fewer than 200 amino acids, either as the endogenous domain or truncated active portion thereof. The binding region may, for example, be small (<25 kDa, to allow efficient transfection in viral vectors), monomeric, nonimmunogenic, have synthetically accessible, cell permeable, nontoxic ligands that can be configured for dimerization.

[0686] The ligand-binding regions comprising one or more receptor domain(s) may be intracellular or extracellular depending upon the design of the inducible proapoptotic polypeptide and the availability of an appropriate ligand (i.e. induction agent). For hydrophobic ligands, the binding region can be on either side of the membrane, but for hydrophilic ligands, particularly protein ligands, the binding region will usually be external to the cell membrane, unless there is a transport system for internalizing the ligand in a form in which it is available for binding. For an intracellular receptor, the inducible proapoptotic polypeptide or a transposon or vector comprising the inducible proapoptotic polypeptide may encode a signal peptide and transmembrane domain 5′ or 3′ of the receptor domain sequence or may have a lipid attachment signal sequence 5′ of the receptor domain sequence. Where the receptor domain is between the signal peptide and the transmembrane domain, the receptor domain will be extracellular.

[0687] Antibodies and antibody subunits, e.g., heavy or light chain, particularly fragments, more particularly all or part of the variable region, or fusions of heavy and light chain to create high-affinity binding, can be used as a ligand binding region of the disclosure. Antibodies that are contemplated include ones that are an ectopically expressed human product, such as an extracellular domain that would not trigger an immune response and generally not expressed in the periphery (i.e., outside the CNS/brain area). Such examples, include, but are not limited to low affinity nerve growth factor receptor (LNGFR), and embryonic surface proteins (i.e., carcinoembryonic antigen). Yet further, antibodies can be prepared against haptenic molecules, which are physiologically acceptable, and the individual antibody subunits screened for binding affinity. The cDNA encoding the subunits can be isolated and modified by deletion of the constant region, portions of the variable region, mutagenesis of the variable region, or the like, to obtain a binding protein domain that has the appropriate affinity for the ligand. In this way, almost any physiologically acceptable haptenic compound can be employed as the ligand or to provide an epitope for the ligand. Instead of antibody units, endogenous receptors can be employed, where the binding region or domain is known and there is a useful or known ligand for binding.

[0688] For multimerizing the receptor, the ligand for the ligand-binding region/receptor domains of the inducible proapoptotic polypeptides may be multimeric in the sense that the ligand can have at least two binding sites, with each of the binding sites capable of binding to a ligand receptor region (i.e. a ligand having a first binding site capable of binding the ligand-binding region of a first inducible proapoptotic polypeptide and a second binding site capable of binding the ligand-binding region of a second inducible proapoptotic polypeptide, wherein the ligand-binding regions of the first and the second inducible proapoptotic polypeptides are either identical or distinct). Thus, as used herein, the term “multimeric ligand binding region” refers to a ligand-binding region of an inducible proapoptotic polypeptide of the disclosure that binds to a multimeric ligand. Multimeric ligands of the disclosure include dimeric ligands. A dimeric ligand of the disclosure may have two binding sites capable of binding to the ligand receptor domain. In certain embodiments, multimeric ligands of the disclosure are a dimer or higher order oligomer, usually not greater than about tetrameric, of small synthetic organic molecules, the individual molecules typically being at least about 150 Da and less than about 5 kDa, usually less than about 3 kDa. A variety of pairs of synthetic ligands and receptors can be employed. For example, in embodiments involving endogenous receptors, dimeric FK506 can be used with an FKBP12 receptor, dimerized cyclosporin A can be used with the cyclophilin receptor, dimerized estrogen with an estrogen receptor, dimerized glucocorticoids with a glucocorticoid receptor, dimerized tetracycline with the tetracycline receptor, dimerized vitamin D with the vitamin D receptor, and the like. Alternatively higher orders of the ligands, e.g., trimeric can be used. For embodiments involving non-naturally occurring receptors, e.g., antibody subunits, modified antibody subunits, single chain antibodies comprised of heavy and light chain variable regions in tandem, separated by a flexible linker, or modified receptors, and mutated sequences thereof, and the like, any of a large variety of compounds can be used. A significant characteristic of the units comprising a multimeric ligand of the disclosure is that each binding site is able to bind the receptor with high affinity, and preferably, that they are able to be dimerized chemically. Also, methods are available to balance the hydrophobicity/hydrophilicity of the ligands so that they are able to dissolve in serum at functional levels, yet diffuse across plasma membranes for most applications.

[0689] Activation of inducible proapoptotic polypeptides of the disclosure may be accomplished through, for example, chemically induced dimerization (CID) mediated by an induction agent to produce a conditionally controlled protein or polypeptide. Proapoptotic polypeptides of the disclosure not only inducible, but the induction of these polypeptides is also reversible, due to the degradation of the labile dimerizing agent or administration of a monomeric competitive inhibitor.

[0690] In certain embodiments, the ligand binding region comprises a FK506 binding protein 12 (FKBP12) polypeptide. In certain embodiments, the ligand binding region comprises a FKBP12 polypeptide having a substitution of valine (V) for phenylalanine (F) at position 36 (F36V). In certain embodiments, in which the ligand binding region comprises a FKBP12 polypeptide having a substitution of valine (V) for phenylalanine (F) at position 36 (F36V), the induction agent may comprise AP1903, a synthetic drug (CAS Index Name: 2-Piperidinecarboxylic acid, 1-[(2S)-1-oxo-2-(3,4,5-trimethoxyphenyl)butyl]-, 1,2-ethanediylbis[imino(2-oxo-2,1-ethanediyl)oxy-3,1-phenylene[(1R)-3-(3,4-dimethoxyphenyl)propylidene]]ester, [2S-[1(R*),2R*[S*[S*[1(R*),2R*]]]]]-(9C1) CAS Registry Number: 195514-63-7; Molecular Formula: C78H98N4020; Molecular Weight: 1411.65)). In certain embodiments, in which the ligand binding region comprises a FKBP12 polypeptide having a substitution of valine (V) for phenylalanine (F) at position 36 (F36V), the induction agent may comprise AP20187 (CAS Registry Number: 195514-80-8 and Molecular Formula: C82H107N5020). In certain embodiments, the induction agent is an AP20187 analog, such as, for example, AP1510. As used herein, the induction agents AP20187, AP1903 and AP1510 may be used interchangeably.

[0691] AP1903 API is manufactured by Alphora Research Inc. and AP1903 Drug Product for Injection is made by Formatech Inc. It is formulated as a 5 mg/mL solution of AP1903 in a 25% solution of the non-ionic solubilizer Solutol HS 15 (250 mg/mL, BASF). At room temperature, this formulation is a clear, slightly yellow solution. Upon refrigeration, this formulation undergoes a reversible phase transition, resulting in a milky solution. This phase transition is reversed upon re-warming to room temperature. The fill is 2.33 mL in a 3 mL glass vial (approximately 10 mg AP1903 for Injection total per vial). Upon determining a need to administer AP1903, patients may be, for example, administered a single fixed dose of AP1903 for Injection (0.4 mg/kg) via IV infusion over 2 hours, using a non-DEHP, non-ethylene oxide sterilized infusion set. The dose of AP1903 is calculated individually for all patients, and is not be recalculated unless body weight fluctuates by 10%. The calculated dose is diluted in 100 mL in 0.9% normal saline before infusion. In a previous Phase I study of AP1903, 24 healthy volunteers were treated with single doses of AP1903 for Injection at dose levels of 0.01, 0.05, 0.1, 0.5 and 1.0 mg/kg infused IV over 2 hours. AP1903 plasma levels were directly proportional to dose, with mean Cmax values ranging from approximately 10-1275 ng/mL over the 0.01-1.0 mg/kg dose range. Following the initial infusion period, blood concentrations demonstrated a rapid distribution phase, with plasma levels reduced to approximately 18, 7, and 1% of maximal concentration at 0.5, 2 and 10 hours post-dose, respectively. AP1903 for Injection was shown to be safe and well tolerated at all dose levels and demonstrated a favorable pharmacokinetic profile. luliucci J D, et al., J Clin Pharmacol. 41: 870-9, 2001.

[0692] The fixed dose of AP1903 for injection used, for example, may be 0.4 mg/kg intravenously infused over 2 hours. The amount of AP1903 needed in vitro for effective signaling of cells is 10-100 nM (1600 Da MW). This equates to 16-160 μg/L or 0.016-1.6 μg/kg (1.6-160 μg/kg). Doses up to 1 mg/kg were well-tolerated in the Phase I study of AP1903 described above. Therefore, 0.4 mg/kg may be a safe and effective dose of AP1903 for this Phase I study in combination with the therapeutic cells.

[0693] The amino acid and/or nucleic acid sequence encoding ligand binding of the disclosure may contain sequence one or more modifications compared to a wild type amino acid or nucleic acid sequence. For example, the amino acid and/or nucleic acid sequence encoding ligand binding region of the disclosure may be a codon-optimized sequence. The one or more modifications may increase the binding affinity of a ligand (e.g. an induction agent) for the ligand binding region of the disclosure compared to a wild type polypeptide. Alternatively, or in addition, the one or more modifications may decrease the immunogenicity of the ligand binding region of the disclosure compared to a wild type polypeptide. Ligand binding regions of the disclosure and/or induction agents of the disclosure may be non-naturally occurring.

[0694] Inducible proapoptotic polypeptides of the disclosure comprise a ligand binding region, a linker and a proapoptotic peptide, wherein the inducible proapoptotic polypeptide does not comprise a non-human sequence. In certain embodiments, the non-human sequence comprises a restriction site. The linker may comprise any organic or inorganic material that permits, upon dimerization of the ligand binding region, interaction, cross-linking, cross-activation, or activation of the proapoptotic polypeptides such that the interaction or activation of the proapoptotic polypeptides initiates apoptosis in the cell. In certain embodiments, the linker is a polypeptide. In certain embodiments, the linker is a polypeptide comprising a G/S rich amino acid sequence (a “GS” linker). In certain embodiments, the linker is a polypeptide comprising the amino acid sequence GGGGS (SEQ ID NO: 18028). In preferred embodiments, the linker is a polypeptide and the nucleic acid encoding the polypeptide does not contain a restriction site for a restriction endonuclease. Linkers of the disclosure may be non-naturally occurring.

[0695] Inducible proapoptotic polypeptides of the disclosure may be expressed in a cell under the transcriptional regulation of any promoter capable of initiating and/or regulating the expression of an inducible proapoptotic polypeptide of the disclosure in that cell. The term “promoter” as used herein refers to a promoter that acts as the initial binding site for RNA polymerase to transcribe a gene. For example, inducible proapoptotic polypeptides of the disclosure may be expressed in a mammalian cell under the transcriptional regulation of any promoter capable of initiating and/or regulating the expression of an inducible proapoptotic polypeptide of the disclosure in a mammalian cell, including, but not limited to native, endogenous, exogenous, and heterologous promoters. Preferred mammalian cells include human cells. Thus, inducible proapoptotic polypeptides of the disclosure may be expressed in a human cell under the transcriptional regulation of any promoter capable of initiating and/or regulating the expression of an inducible proapoptotic polypeptide of the disclosure in a human cell, including, but not limited to, a human promoter or a viral promoter. Exemplary promoters for expression in human cells include, but are not limited to, a human cytomegalovirus (CMV) immediate early gene promoter, a SV40 early promoter, a Rous sarcoma virus long terminal repeat, β-actin promoter, a rat insulin promoter and a glyceraldehyde-3-phosphate dehydrogenase promoter, each of which may be used to obtain high-level expression of an inducible proapoptotic polypeptide of the disclosure. The use of other viral or mammalian cellular or bacterial phage promoters which are well known in the art to achieve expression of an inducible proapoptotic polypeptide of the disclosure is contemplated as well, provided that the levels of expression are sufficient for initiating apoptosis in a cell. By employing a promoter with well-known properties, the level and pattern of expression of the protein of interest following transfection or transformation can be optimized.

[0696] Selection of a promoter that is regulated in response to specific physiologic or synthetic signals can permit inducible expression of the inducible proapoptotic polypeptide of the disclosure. The ecdysone system (Invitrogen, Carlsbad, Calif.) is one such system. This system is designed to allow regulated expression of a gene of interest in mammalian cells. It consists of a tightly regulated expression mechanism that allows virtually no basal level expression of a transgene, but over 200-fold inducibility. The system is based on the heterodimeric ecdysone receptor of Drosophila, and when ecdysone or an analog such as muristerone A binds to the receptor, the receptor activates a promoter to turn on expression of the downstream transgene high levels of mRNA transcripts are attained. In this system, both monomers of the heterodimeric receptor are constitutively expressed from one vector, whereas the ecdysone-responsive promoter, which drives expression of the gene of interest, is on another plasmid. Engineering of this type of system into a vector of interest may therefore be useful. Another inducible system that may be useful is the Tet-Off™ or Tet-On™ system (Clontech, Palo Alto, Calif.) originally developed by Gossen and Bujard (Gossen and Bujard, Proc. Natl. Acad. Sci. USA, 89:5547-5551, 1992; Gossen et al., Science, 268:1766-1769, 1995). This system also allows high levels of gene expression to be regulated in response to tetracycline or tetracycline derivatives such as doxycycline. In the Tet-On™ system, gene expression is turned on in the presence of doxycycline, whereas in the Tet-Off™ system, gene expression is turned on in the absence of doxycycline. These systems are based on two regulatory elements derived from the tetracycline resistance operon of E. coli: the tetracycline operator sequence (to which the tetracycline repressor binds) and the tetracycline repressor protein. The gene of interest is cloned into a plasmid behind a promoter that has tetracycline-responsive elements present in it. A second plasmid contains a regulatory element called the tetracycline-controlled transactivator, which is composed, in the Tet-Off™ system, of the VP16 domain from the herpes simplex virus and the wild-type tetracycline repressor. Thus in the absence of doxycycline, transcription is constitutively on. In the Tet-On™ system, the tetracycline repressor is not wild type and in the presence of doxycycline activates transcription. For gene therapy vector production, the Tet-Off™ system may be used so that the producer cells could be grown in the presence of tetracycline or doxycycline and prevent expression of a potentially toxic transgene, but when the vector is introduced to the patient, the gene expression would be constitutively on.

[0697] In some circumstances, it is desirable to regulate expression of a transgene in a gene therapy vector. For example, different viral promoters with varying strengths of activity are utilized depending on the level of expression desired. In mammalian cells, the CMV immediate early promoter is often used to provide strong transcriptional activation. The CMV promoter is reviewed in Donnelly, J. J., et al., 1997. Annu. Rev. Immunol. 15:617-48. Modified versions of the CMV promoter that are less potent have also been used when reduced levels of expression of the transgene are desired. When expression of a transgene in hematopoietic cells is desired, retroviral promoters such as the LTRs from MLV or MMTV are often used. Other viral promoters that are used depending on the desired effect include SV40, RSV LTR, HIV-1 and HIV-2 LTR, adenovirus promoters such as from the E1A, E2A, or MLP region, AAV LTR, HSV-TK, and avian sarcoma virus.

[0698] In other examples, promoters may be selected that are developmentally regulated and are active in particular differentiated cells. Thus, for example, a promoter may not be active in a pluripotent stem cell, but, for example, where the pluripotent stem cell differentiates into a more mature cell, the promoter may then be activated.

[0699] Similarly tissue specific promoters are used to effect transcription in specific tissues or cells so as to reduce potential toxicity or undesirable effects to non-targeted tissues. These promoters may result in reduced expression compared to a stronger promoter such as the CMV promoter, but may also result in more limited expression, and immunogenicity (Bojak, A., et al., 2002. Vaccine. 20:1975-79; Cazeaux, N., et al., 2002. Vaccine 20:3322-31). For example, tissue specific promoters such as the PSA associated promoter or prostate-specific glandular kallikrein, or the muscle creatine kinase gene may be used where appropriate.

[0700] Examples of tissue specific or differentiation specific promoters include, but are not limited to, the following: B29 (B cells); CD14 (monocytic cells); CD43 (leukocytes and platelets); CD45 (hematopoietic cells); CD68 (macrophages); desmin (muscle); elastase-1 (pancreatic acinar cells); endoglin (endothelial cells); fibronectin (differentiating cells, healing tissues); and Flt-1 (endothelial cells); GFAP (astrocytes).

[0701] In certain indications, it is desirable to activate transcription at specific times after administration of the gene therapy vector. This is done with such promoters as those that are hormone or cytokine regulatable. Cytokine and inflammatory protein responsive promoters that can be used include K and T kininogen (Kageyama et al., (1987) J. Biol. Chem., 262, 2345-2351), c-fos, TNF-alpha, C-reactive protein (Arcone, et al., (1988) Nucl. Acids Res., 16(8), 3195-3207), haptoglobin (Oliviero et al., (1987) EMBO J., 6, 1905-1912), serum amyloid A2, C/EBP alpha, IL-1, IL-6 (Poli and Cortese, (1989) Proc. Nat'l Acad. Sci. USA, 86, 8202-8206), Complement C3 (Wilson et al., (1990) Mol. Cell. Biol., 6181-6191), IL-8, alpha-1 acid glycoprotein (Prowse and Baumann, (1988) Mol Cell Biol, 8, 42-51), alpha-1 antitrypsin, lipoprotein lipase (Zechner et al., Mol. Cell. Biol., 2394-2401, 1988), angiotensinogen (Ron, et al., (1991) Mol. Cell. Biol., 2887-2895), fibrinogen, c-jun (inducible by phorbol esters, TNF-alpha, UV radiation, retinoic acid, and hydrogen peroxide), collagenase (induced by phorbol esters and retinoic acid), metallothionein (heavy metal and glucocorticoid inducible), Stromelysin (inducible by phorbol ester, interleukin-1 and EGF), alpha-2 macroglobulin and alpha-1 anti-chymotrypsin. Other promoters include, for example, SV40, MMTV, Human Immunodeficiency Virus (MV), Moloney virus, ALV, Epstein Barr virus, Rous Sarcoma virus, human actin, myosin, hemoglobin, and creatine.

[0702] It is envisioned that any of the above promoters alone or in combination with another can be useful depending on the action desired. Promoters, and other regulatory elements, are selected such that they are functional in the desired cells or tissue. In addition, this list of promoters should not be construed to be exhaustive or limiting; other promoters that are used in conjunction with the promoters and methods disclosed herein.

### Armored T-Cells “Knock-Down” Strategy

[0703] T-cells of the disclosure may be genetically modified to enhance their therapeutic potential. Alternatively, or in addition, T-cells of the disclosure may be modified to render them less sensitive to immunologic and/or metabolic checkpoints. Modifications of this type “armor” the T cells of the disclosure, which, following the modification, may be referred to here as “armored” T cells. Armored T cells of the disclosure may be produced by, for example, blocking and/or diluting specific endogenous checkpoint signals delivered to the T-cells (i.e. checkpoint inhibition) within the tumor immunosuppressive microenvironment, for example.

[0704] In some embodiments, an armored T-cell of the disclosure is derived from a T cell, a NK cell, a hematopoietic progenitor cell, a peripheral blood (PB) derived T cell (including a T cell isolated or derived from G-CSF-mobilized peripheral blood), or an umbilical cord blood (UCB) derived T cell. In some embodiments, an armored T-cell of the disclosure comprises one or more of a chimeric ligand receptor (CLR comprising a protein scaffold, an antibody, an ScFv, or an antibody mimetic)/chimeric antigen receptor (CAR comprising a protein scaffold, an antibody, an ScFv, or an antibody mimetic), a CARTyrin (a CAR comprising a Centyrin), and/or a VCAR (a CAR comprising a camelid VHH or a single domain VH) of the disclosure. In some embodiments, an armored T-cell of the disclosure comprises an inducible proapoptotic polypeptide comprising (a) a ligand binding region, (b) a linker, and (c) a truncated caspase 9 polypeptide, wherein the inducible proapoptotic polypeptide does not comprise a non-human sequence. In some embodiments, the non-human sequence is a restriction site. In some embodiments, the ligand binding region inducible caspase polypeptide comprises a FK506 binding protein 12 (FKBP12) polypeptide. In some embodiments, the amino acid sequence of the FK506 binding protein 12 (FKBP12) polypeptide comprises a modification at position 36 of the sequence. In some embodiments, the modification is a substitution of valine (V) for phenylalanine (F) at position 36 (F36V). In some embodiments, an armored T-cell of the disclosure comprises an exogenous sequence. In some embodiments, the exogenous sequence comprises a sequence encoding a therapeutic protein. Exemplary therapeutic proteins may be nuclear, cytoplasmic, intracellular, transmembrane, cell-surface bound, or secreted proteins. Exemplary therapeutic proteins expressed by the armored T cell may modify an activity of the armored T cell or may modify an activity of a second cell. In some embodiments, an armored T-cell of the disclosure comprises a selection gene or a selection marker. In some embodiments, an armored T-cell of the disclosure comprises a synthetic gene expression cassette (also referred to herein as an inducible transgene construct).

[0705] In some embodiments, a T-cell of the disclosure is modified to silence or reduce expression one or more gene(s) encoding receptor(s) of inhibitory checkpoint signals to produce an armored T-cell of the disclosure. Examples of inhibitory checkpoint signals include, but are not limited to, a PD-L1 ligand binding to a PD-1 receptor on a CAR-T cell of the disclosure or a TGFβ cytokine binding to a TGFβRII receptor on a CAR-T cell. Receptors of inhibitory checkpoint signals are expressed on the cell surface or within the cytoplasm of a T-cell. Silencing or reducing expressing of the gene encoding the receptor of the inhibitory checkpoint signal results a loss of protein expression of the inhibitory checkpoint receptors on the surface or within the cytoplasm of an armored T-cell of the disclosure. Thus, armored T cells of the disclosure having silenced or reduced expression of one or more genes encoding an inhibitory checkpoint receptor is resistant, non-receptive or insensitive to checkpoint signals. The armored T cell's resistance or decreased sensitivity to inhibitory checkpoint signals enhances the armored T cell's therapeutic potential in the presence of these inhibitory checkpoint signals. Inhibitory checkpoint signals include but are not limited to the examples listed in Table 1. Exemplary inhibitory checkpoint signals that may be silenced in an armored T cell of the disclosure include, but are not limited to, PD-1 and TGFβRII.

TABLE 1
Exemplary Inhibitory Checkpoint Signals (and proteins that
induce immunosuppression). A CSR of the disclosure may comprise
an endodomain of any one of the proteins of this table.

| Full Name | Abbreviation | SEQ ID NO: |
|---|---|---|
| Programmed cell death protein 1 | PD1 | 14643-14644 |
| transforming growth factor β Receptor 1 | TGFβR1 | 14645 |
| transforming growth factor β Receptor 2 | TGFβR2 | 14646 |
| T-cell immunoglobulin and mucin-domain | TIM3 | 14647 |
| containing-3 | | |
| Lymphocyte-activation gene 3 | LAG3 | 14648 |
| Cytotoxic T-lymphocyte protein 4 | CTLA4 | 14649 |
| B- and T-lymphocyte attenuator | BTLA | 14650 |
| Killer cell immunoglobulin-like receptor | KIR | 14651 |
| Alpha-2A adrenergic receptor | A2aR | 14652 |
| V-type immunoglobulin domain-containing | VISTA | 14653 |
| suppressor of T-cell activation | | |
| T-cell immunoreceptor with Ig and ITIM | TIGIT | 14654 |
| domains | | |
| Programmed cell death 1 ligand 1 | B7H1 or PD-L1 | 14655 |
| Programmed cell death 1 ligand 2 | B7DC or PD-L2 | 14656 |
| T-lymphocyte activation antigen CD80 | B7-1 or CD80 | 14657 |
| T-lymphocyte activation antigen CD86 | B7-2 or CD86 | 14658 |
| CD160 antigen | CD160 | 14659 |
| Leukocyte-associated immunoglobulin-like | LAIR1 | 14660 |
| receptor 1 | | |
| T-cell immunoglobulin and mucin domain- | TIM4 or TIMD4 | 14661 |
| containing protein 4 | | |
| Natural killer cell receptor 2B4 | 2B4 or CD244 | 14662 |
| Major Histocompatibility Complex type I | MHC I | 14663 |
| Major Histocompatibility Complex type II | MHC II | |
| Putative 2-methylcitrate dehydratase receptor | PDH1R | |
| T-cell immunoglobulin and mucin domain 1 | TIM1R | |
| receptor | | |
| T-cell immunoglobulin and mucin domain 4 | TIM4R | |
| receptor | | |
| B7-H3 receptor | B7H3R or CD176 | |
| | Receptor | |
| B7-H4 receptor | B7H4R | |
| Immunoglobulin-like transcript (ILT) 3 receptor | ILT3R | |
| phosphoinositide 3-kinase, subunit alpha | PI3K alpha | 14664 |
| phosphoinositide 3-kinase, subunit gamma | PI3K gamma | 14665 |
| Tyrosine-protein phosphatase non-receptor type | SHP2 or PTPN11 | 14666 |
| 11 | | |
| Protein phosphatase 2, subunit gamma | PP2A gamma | 14667 |
| Protein phosphatase 2, subunit beta | PP2A beta | 14668 |
| Protein phosphatase 2, subunit delta | PP2A delta | 14669 |
| Protein phosphatase 2, subunit epsilon | PP2A epsilon | 14670 |
| Protein phosphatase 2, subunit alpha | PP2A alpha | 14671 |
| T-cell Receptor, subunit alpha | TCR alpha | 14672 |
| T-cell Receptor, subunit beta | TCR beta | 14673 |
| T-cell Receptor, subunit zeta | TCR zeta | 14674 |
| T-cell Receptor, subunit CD3 epsilon | TCR CD3 epsilon | 14675 |
| T-cell Receptor, subunit CD3 gamma | TCR CD3 gamma | 14676 |
| T-cell Receptor, subunit CD3 delta | TCR CD3 delta | 14677 |
| Cluster of Differentiation 28 | CD28 | 14678 |
| Galectins | Galectins | |
| Galectin 9 | Galectin 9 | 14679 |
| High Mobility Group Box 1 | HMGB1 | 14680 |
| Arginase 1 | ARG1 | 14681 |
| Prostaglandin-Endoperoxide Synthase 1 | PTGS1 | 14682 |
| Prostaglandin-Endoperoxide Synthase 2 | PTGS2 | 14683 |
| Mucin 1, Cell Surface Associated | MUC1 | 14684 |
| Mucin 2, Oligomeric Mucus/Gel-Forming | MUC2 | 14685 |
| Mucin 3A, Cell Surface Associated | MUC3A | 14686 |
| Mucin 3B, Cell Surface Associated | MUC3B | 14687 |
| Mucin 4, Cell Surface Associated | MUC4 | 14688 |
| Mucin 5AC, Oligomeric Mucus/Gel-Forming | MUC5AC | 14689 |
| Mucin 5B, Oligomeric Mucus/Gel-Forming | MUC5B | 14690 |
| Mucin 6, Oligomeric Mucus/Gel-Forming | MUC6 | 14691 |
| Mucin 7, Secreted | MUC7 | 14692 |
| Mucin 8 | MUC8 | |
| Mucin 12, Cell Surface Associated | MUC12 | 14693 |
| Mucin 13, Cell Surface Associated | MUC13 | 14694 |
| Mucin 15, Cell Surface Associated | MUC15 | 14695 |
| Mucin 16, Cell Surface Associated | MUC16 | 14696 |
| Mucin 17, Cell Surface Associated | MUC17 | 14697 |
| Mucin 19, Oligomeric | MUC19 | 14698 |
| Mucin 20, Cell Surface Associated | MUC20 | 14699 |
| Mucin 21, Cell Surface Associated | MUC21 | 14700 |
| Mucin 22 | MUC22 | 14701 |
| Indoleamine 2,3-Dioxygenase 1 | IDO1 | 14702 |
| Indoleamine 2,3-Dioxygenase 2 | IDO2 | 14703 |
| Inducible T Cell Costimulator Ligand | ICOSLG | 14704 |
| ROS Proto-Oncogene 1, Receptor Tyrosine | ROS1 | 14705 |
| Kinase | | |
| Tumor Necrosis Factor Receptor Superfamily | 4-1BB, CD137, ILA or | 14706 |
| Member 9 | TNFRSF9 | |
| 4-1BB Ligand | 4-1BB-L | 14707 |
| Glucocorticoid-induced TNFR family related | GITR | 14708 |
| gene | | |
| Glucocorticoid-induced TNFR family related | GITRL | 14709 |
| gene ligand | | |

[0706] In some embodiments, a T-cell of the disclosure is modified to silence or reduce expression of one or more gene(s) encoding intracellular proteins involved in checkpoint signaling to produce an armored T-cell of the disclosure. The activity of a T-cell of the disclosure may be enhanced by targeting any intracellular signaling protein involved in a checkpoint signaling pathway, thereby achieving checkpoint inhibition or interference to one or more checkpoint pathways. Intracellular signaling proteins involved in checkpoint signaling include, but are not limited to, exemplary intracellular signaling proteins listed in Table 2.

TABLE 2
Exemplary Intracellular Signaling Proteins.

| Full Name | Abbreviation | SEQ ID NO: |
|---|---|---|
| phosphoinositide 3-kinase, subunit alpha | PI3K alpha | 14710 |
| phosphoinositide 3-kinase, subunit gamma | PI3K gamma | 14711 |
| Tyrosine-protein phosphatase non-receptor type | SHP2 or PTPN11 | 14712 |
| 11 | | |
| Protein phosphatase 2, subunit gamma | PP2A gamma | 14713 |
| Protein phosphatase 2, subunit beta | PP2A beta | 14714 |
| Protein phosphatase 2, subunit delta | PP2A delta | 14715 |
| Protein phosphatase 2, subunit epsilon | PP2A epsilon | 14716 |
| Protein phosphatase 2, subunit alpha | PP2A alpha | 14717 |
| RAC-alpha serine/threonine-protein kinase | AKT or PKB | 14718 |
| Tyrosine-protein kinase ZAP-70 | ZAP70 | 14719 |
| Amino acid sequence (KIEELE)-containing | KIEELE-domain | |
| domain protein | containing proteins | |
| BCL2 associated athanogene 6 | Bat3, Bag6 or Scythe | 14720 |
| B-cell lymphoma-extra large | Bcl-xL | 14721 |
| Bcl-2-related protein A1 | Bfl-1 or BCL2A1 | 14722 |

[0707] In some embodiments, a T-cell of the disclosure is modified to silence or reduce expression of one or more gene(s) encoding a transcription factor that hinders the efficacy of a therapy to produce an armored T-cell of the disclosure. The activity of armored T-cells may be enhanced or modulated by silencing or reducing expression (or repressing a function) of a transcription factor that hinders the efficacy of a therapy. Exemplary transcription factors that may be modified to silence or reduce expression or to repress a function thereof include, but are not limited to, the exemplary transcription factors listed in Table 3. For example, expression of a FOXP3 gene may be silenced or reduced in an armored T cell of the disclosure to prevent or reduce the formation of T regulatory CAR-T-cells (CAR-Treg cells), the expression or activity of which may reduce efficacy of a therapy.

TABLE 3
Exemplary Transcription Factors.

| Full Name | Abbreviation | SEQ ID NO: |
|---|---|---|
| activity-dependent neuroprotector homeobox | ADNP | 14723 |
| ADNP homeobox 2 | ADNP2 | 14724 |
| AE binding protein 1 | AEBP1 | 14725 |
| AE binding protein 2 | AEBP2 | 14726 |
| AF4/FMR2 family member 1 | AFF1 | 14727 |
| AF4/FMR2 family member 2 | AFF2 | 14728 |
| AF4/FMR2 family member 3 | AFF3 | 14729 |
| AF4/FMR2 family member 4 | AFF4 | 14730 |
| AT-hook containing transcription factor 1 | AHCTF1 | 14731 |
| aryl hydrocarbon receptor | AHR | 14732 |
| aryl-hydrocarbon receptor repressor | AHRR | 14733 |
| autoimmune regulator | AIRE | 14734 |
| AT-hook transcription factor | AKNA | 14735 |
| ALX homeobox 1 | ALX1 | 14736 |
| ALX homeobox 3 | ALX3 | 14737 |
| ALX homeobox 4 | ALX4 | 14738 |
| ankyrin repeat and zinc finger domain containing 1 | ANKZF1 | 14739 |
| adaptor related protein complex 5 zeta 1 subunit | AP5Z1 | 14740 |
| androgen receptor | AR | 14741 |
| arginine-fifty homeobox | ARGFX | 14742 |
| Rho GTPase activating protein 35 | ARHGAP35 | 14743 |
| AT-rich interaction domain 1A | ARID1A | 14744 |
| AT-rich interaction domain 1B | ARID1B | 14745 |
| AT-rich interaction domain 2 | ARID2 | 14746 |
| AT-rich interaction domain 3A | ARID3A | 14747 |
| AT-rich interaction domain 3B | ARID3B | 14748 |
| AT-rich interaction domain 3C | ARID3C | 14749 |
| AT-rich interaction domain 4A | ARID4A | 14750 |
| AT-rich interaction domain 4B | ARID4B | 14751 |
| AT-rich interaction domain 5A | ARID5A | 14752 |
| AT-rich interaction domain 5B | ARID5B | 14753 |
| aryl hydrocarbon receptor nuclear translocator | ARNT | 14754 |
| aryl hydrocarbon receptor nuclear translocator 2 | ARNT2 | 14755 |
| aryl hydrocarbon receptor nuclear translocator like | ARNTL | 14756 |
| aryl hydrocarbon receptor nuclear translocator like 2 | ARNTL2 | 14757 |
| aristaless related homeobox | ARX | 14758 |
| achaete-scute family bHLH transcription factor 1 | ASCL1 | 14759 |
| achaete-scute family bHLH transcription factor 2 | ASCL2 | 14760 |
| achaete-scute family bHLH transcription factor 3 | ASCL3 | 14761 |
| achaete-scute family bHLH transcription factor 4 | ASCL4 | 14762 |
| achaete-scute family bHLH transcription factor 5 | ASCL5 | 14763 |
| ash1 (absent, small, or homeotic)-like (Drosophila) | ASH1L | 14764 |
| ash2 (absent, small, or homeotic)-like (Drosophila) | ASH2L | 14765 |
| activating transcription factor 1 | ATF1 | 14766 |
| activating transcription factor 2 | ATF2 | 14767 |
| activating transcription factor 3 | ATF3 | 14768 |
| activating transcription factor 4 | ATF4 | 14769 |
| activating transcription factor 5 | ATF5 | 14770 |
| activating transcription factor 6 | ATF6 | 14771 |
| activating transcription factor 6 beta | ATF6B | 14772 |
| activating transcription factor 7 | ATF7 | 14773 |
| atonal bHLH transcription factor 1 | ATOH1 | 14774 |
| atonal bHLH transcription factor 7 | ATOH7 | 14775 |
| atonal bHLH transcription factor 8 | ATOH8 | 14776 |
| alpha thalassemia/mental retardation syndrome X- | ATRX | 14777 |
| linked | | |
| ataxin 7 | ATXN7 | 14778 |
| BTB and CNC homology 1, basic leucine zipper | BACH1 | 14779-14780 |
| transcription factor 1 | | |
| BTB domain and CNC homolog 2 | BACH2 | 14781 |
| BarH like homeobox 1 | BARHL1 | 14782 |
| BarH like homeobox 2 | BARHL2 | 14783 |
| BARX homeobox 1 | BARX1 | 14784 |
| BARX homeobox 2 | BARX2 | 14785 |
| Basic Leucine Zipper ATF-Like Transcription Factor, | Batf | 14786 |
| basic leucine zipper transcription factor, ATF-like | BATF | 14786 |
| basic leucine zipper transcription factor, ATF-like 2 | BATF2 | 14787 |
| basic leucine zipper transcription factor, ATF-like 3 | BATF3 | 14788 |
| bobby sox homolog (Drosophila) | BBX | 14789 |
| B-cell CLL/lymphoma 11A | BCL11A | 14790 |
| B-cell CLL/lymphoma 11B | BCL11B | 14791 |
| B-cell CLL/lymphoma 3 | BCL3 | 14792 |
| B-cell CLL/lymphoma 6 | BCL6 | 14793 |
| B-cell CLL/lymphoma 6, member B | BCL6B | 14794 |
| BCL2 associated transcription factor 1 | BCLAF1 | 14795 |
| basic helix-loop-helix family member a15 | BHLHA15 | 14796 |
| basic helix-loop-helix family member a9 | BHLHA9 | 14797 |
| basic helix-loop-helix domain containing, class B, 9 | BHLHB9 | 14798 |
| basic helix-loop-helix family member e22 | BHLHE22 | 14799 |
| basic helix-loop-helix family member e23 | BHLHE23 | 14800 |
| basic helix-loop-helix family member e40 | BHLHE40 | 14801 |
| basic helix-loop-helix family member e41 | BHLHE41 | 14802 |
| Beta-Interferon Gene Positive-Regulatory Domain I | Blimp-1 | 14803 |
| Binding Factor | | |
| bone morphogenetic protein 2 | BMP2 | 14804 |
| basonuclin 1 | BNC1 | 14805 |
| basonuclin 2 | BNC2 | 14806 |
| bolA family member 1 | BOLA1 | 14807 |
| bolA family member 2 | BOLA2 | 14808 |
| bolA family member 3 | BOLA3 | 14809 |
| bromodomain PHD finger transcription factor | BPTF | 14810 |
| breast cancer 1 | BRCA1 | 14811 |
| brain specific homeobox | BSX | 14812 |
| chromosome 20 open reading frame 194 | C20orf194 | 14813 |
| calmodulin binding transcription activator 1 | CAMTA1 | 14814 |
| calmodulin binding transcription activator 2 | CAMTA2 | 14815 |
| calcium regulated heat stable protein 1 | CARHSP1 | 14816 |
| castor zinc finger 1 | CASZ1 | 14817 |
| core-binding factor, beta subunit | CBFB | 14818 |
| coiled-coil domain containing 79 | CCDC79 | 14819 |
| cell division cycle 5 like | CDC5L | 14820 |
| caudal type homeobox 1 | CDX1 | 14821 |
| caudal type homeobox 2 | CDX2 | 14822 |
| caudal type homeobox 4 | CDX4 | 14823 |
| CCAAT/enhancer binding protein alpha | CEBPA | 14824 |
| CCAAT/enhancer binding protein beta | CEBPB | 14825 |
| CCAAT/enhancer binding protein delta | CEBPD | 14826 |
| CCAAT/enhancer binding protein epsilon | CEBPE | 14827 |
| CCAAT/enhancer binding protein gamma | CEBPG | 14828 |
| CCAAT/enhancer binding protein zeta | CEBPZ | 14829 |
| centromere protein T | CENPT | 14830 |
| ceramide synthase 3 | CERS3 | 14831 |
| ceramide synthase 6 | CERS6 | 14832 |
| chromosome alignment maintaining phosphoprotein 1 | CHAMP1 | 14833 |
| capicua transcriptional repressor | CIC | 14834 |
| CDKN1A interacting zinc finger protein 1 | CIZ1 | 14835 |
| clock circadian regulator | CLOCK | 14836 |
| CCR4-NOT transcription complex subunit 4 | CNOT4 | 14837 |
| CPX chromosome region, candidate 1 | CPXCR1 | 14838 |
| cramped chromatin regulator homolog 1 | CRAMP1 | 14839 |
| cAMP responsive element binding protein 1 | CREB1 | 14840 |
| cAMP responsive element binding protein 3 | CREB3 | 14841 |
| cAMP responsive element binding protein 3-like 1 | CREB3L1 | 14842 |
| cAMP responsive element binding protein 3-like 2 | CREB3L2 | 14843 |
| cAMP responsive element binding protein 3-like 3 | CREB3L3 | 14844 |
| cAMP responsive element binding protein 3-like 4 | CREB3L4 | 14845 |
| cAMP responsive element binding protein 5 | CREB5 | 14846 |
| CREB binding protein | CREBBP | 14847 |
| cAMP responsive element binding protein-like 2 | CREBL2 | 14848 |
| CREB3 regulatory factor | CREBRF | 14849 |
| CREB/ATF bZIP transcription factor | CREBZF | 14850 |
| cAMP responsive element modulator | CREM | 14851 |
| cone-rod homeobox | CRX | 14852 |
| cysteine-serine-rich nuclear protein 1 | CSRNP1 | 14853 |
| cysteine-serine-rich nuclear protein 2 | CSRNP2 | 14854 |
| cysteine-serine-rich nuclear protein 3 | CSRNP3 | 14855 |
| CCCTC-binding factor (zinc finger protein) | CTCF | 14856 |
| CCCTC-binding factor like | CTCFL | 14857 |
| cut-like homeobox 1 | CUX1 | 14858-14859 |
| cut-like homeobox 2 | CUX2 | 14860 |
| CXXC finger protein 1 | CXXC1 | 14861 |
| dachshund family transcription factor 1 | DACH1 | 14862 |
| dachshund family transcription factor 2 | DACH2 | 14863 |
| D site of albumin promoter (albumin D-box) binding | DBP | 14864 |
| protein | | |
| developing brain homeobox 1 | DBX1 | 14865 |
| developing brain homeobox 2 | DBX2 | 14866 |
| damage specific DNA binding protein 2 | DDB2 | 14867 |
| DNA damage inducible transcript 3 | DDIT3 | 14868 |
| DEAF1, transcription factor | DEAF1 | 14869 |
| distal-less homeobox 1 | DLX1 | 14870 |
| distal-less homeobox 2 | DLX2 | 14871 |
| distal-less homeobox 3 | DLX3 | 14872 |
| distal-less homeobox 4 | DLX4 | 14873 |
| distal-less homeobox 5 | DLX5 | 14874 |
| distal-less homeobox 6 | DLX6 | 14875 |
| DNA methyltransferase 1 associated protein 1 | DMAP1 | 14876 |
| diencephalon/mesencephalon homeobox 1 | DMBX1 | 14877 |
| doublesex and mab-3 related transcription factor 1 | DMRT1 | 14878 |
| doublesex and mab-3 related transcription factor 2 | DMRT2 | 14879 |
| doublesex and mab-3 related transcription factor 3 | DMRT3 | 14880 |
| DMRT like family Al | DMRTA1 | 14881 |
| DMRT like family A2 | DMRTA2 | 14882 |
| DMRT like family B with proline rich C-terminal 1 | DMRTB1 | 14883 |
| DMRT like family C1 | DMRTC1 | 14884 |
| DMRT like family C1B | DMRTC1B | 14884 |
| DMRT like family C2 | DMRTC2 | 14885 |
| cyclin D binding myb like transcription factor 1 | DMTF1 | 14886 |
| DnaJ heat shock protein family (Hsp40) member C1 | DNAJC1 | 14887 |
| DnaJ heat shock protein family (Hsp40) member C2 | DNAJC2 | 14888 |
| DnaJ heat shock protein family (Hsp40) member C21 | DNAJC21 | 14889 |
| DNA (cytosine-5-)-methyltransferase 1 | DNMT1 | 14890 |
| DNA (cytosine-5-)-methyltransferase 3 alpha | DNMT3A | 14891 |
| DNA (cytosine-5-)-methyltransferase 3 beta | DNMT3B | 14892 |
| DNA (cytosine-5-)-methyltransferase 3-like | DNMT3L | 14893 |
| double PHD fingers 1 | DPF1 | 14894 |
| double PHD fingers 2 | DPF2 | 14895 |
| double PHD fingers 3 | DPF3 | 14896 |
| divergent-paired related homeobox | DPRX | 14897 |
| down-regulator of transcription 1 | DR1 | 14898 |
| DR1 associated protein 1 | DRAP1 | 14899 |
| dorsal root ganglia homeobox | DRGX | 14900 |
| double homeobox 4 | DUX4 | 14901 |
| double homeobox 4 like 9 | DUX4L9 | 14902 |
| double homeobox A | DUXA | 14903 |
| E2F transcription factor 1 | E2F1 | 14904 |
| E2F transcription factor 2 | E2F2 | 14905 |
| E2F transcription factor 3 | E2F3 | 14906 |
| E2F transcription factor 4 | E2F4 | 14907 |
| E2F transcription factor 5 | E2F5 | 14908 |
| E2F transcription factor 6 | E2F6 | 14909 |
| E2F transcription factor 7 | E2F7 | 14910 |
| E2F transcription factor 8 | E2F8 | 14911 |
| E4F transcription factor 1 | E4F1 | 14912 |
| early B-cell factor 1 | EBF1 | 14913 |
| early B-cell factor 2 | EBF2 | 14914 |
| early B-cell factor 3 | EBF3 | 14915 |
| early B-cell factor 4 | EBF4 | 14916 |
| early growth response 1 | EGR1 | 14917 |
| early growth response 2 | EGR2 | 14918 |
| early growth response 3 | EGR3 | 14919 |
| early growth response 4 | EGR4 | 14920 |
| ets homologous factor | EHF | 14921 |
| E74-like factor 1 (ets domain transcription factor) | ELF1 | 14922 |
| E74-like factor 2 (ets domain transcription factor) | ELF2 | 14923 |
| E74-like factor 3 (ets domain transcription factor, | ELF3 | 14924 |
| epithelial-specific) | | |
| E74-like factor 4 (ets domain transcription factor) | ELF4 | 14925 |
| E74-like factor 5 (ets domain transcription factor) | ELF5 | 14926 |
| ELK1, member of ETS oncogene family | ELK1 | 14927 |
| ELK3, ETS-domain protein (SRF accessory protein 2) | ELK3 | 14928 |
| ELK4, ETS-domain protein (SRF accessory protein 1) | ELKA | 14929 |
| ELM2 and Myb/SANT-like domain containing 1 | ELMSAN1 | 14930 |
| empty spiracles homeobox 1 | EMX1 | 14931 |
| empty spiracles homeobox 2 | EMX2 | 14932 |
| engrailed homeobox 1 | EN1 | 14933 |
| engrailed homeobox 2 | EN2 | 14934 |
| enolase 1, (alpha) | ENO1 | 14935 |
| eomesodermin | EOMES | 14936 |
| endothelial PAS domain protein 1 | EPAS1 | 14937 |
| Ets2 repressor factor | ERF | 14938 |
| v-ets avian erythroblastosis virus E26 oncogene | ERG | 14939-14940 |
| homolog | | |
| estrogen receptor 1 | ESR1 | 14941 |
| estrogen receptor 2 (ER beta) | ESR2 | 14942 |
| estrogen related receptor alpha | ESRRA | 14943 |
| estrogen related receptor beta | ESRRB | 14944 |
| estrogen related receptor gamma | ESRRG | 14945 |
| ESX homeobox 1 | ESX1 | 14946 |
| v-ets avian erythroblastosis virus E26 oncogene | ETS1 | 14947 |
| homolog 1 | | |
| v-ets avian erythroblastosis virus E26 oncogene | ETS2 | 14948 |
| homolog 2 | | |
| ets variant 1 | ETV1 | 14949 |
| ets variant 2 | ETV2 | 14950 |
| ets variant 3 | ETV3 | 14951 |
| ets variant 3-like | ETV3L | 14952 |
| ets variant 4 | ETV4 | 14953 |
| ets variant 5 | ETV5 | 14954 |
| ets variant 6 | ETV6 | 14955 |
| ets variant 7 | ETV7 | 14956 |
| even-skipped homeobox 1 | EVX1 | 14957 |
| even-skipped homeobox 2 | EVX2 | 14958 |
| enhancer of zeste 1 poly comb repressive complex 2 | EZH1 | 14959 |
| subunit | | |
| enhancer of zeste 2 poly comb repressive complex 2 | EZH2 | 14960 |
| subunit | | |
| family with sequence similarity 170 member A | FAM170A | 14961 |
| Fer3-like bHLH transcription factor | FERD3L | 14962 |
| FEV (ETS oncogene family) | FEV | 14963 |
| FEZ family zinc finger 1 | FEZF1 | 14964 |
| FEZ family zinc finger 2 | FEZF2 | 14965 |
| folliculogenesis specific bHLH transcription factor | FIGLA | 14966 |
| FLT3-interacting zinc finger 1 | FIZ1 | 14967 |
| Fli-1 proto-oncogene, ETS transcription factor | FLI1 | 14968 |
| FBJ murine osteosarcoma viral oncogene homolog | FOS | 14969 |
| FBJ murine osteosarcoma viral oncogene homolog B | FOSB | 14970 |
| FOS like antigen 1 | FOSL1 | 14971 |
| FOS like antigen 2 | FOSL2 | 14972 |
| forkhead box A1 | FOXA1 | 14973 |
| forkhead box A2 | FOXA2 | 14974 |
| forkhead box A3 | FOXA3 | 14975 |
| forkhead box B1 | FOXB1 | 14976 |
| forkhead box B2 | FOXB2 | 14977 |
| forkhead box C1 | FOXC1 | 14978 |
| forkhead box C2 | FOXC2 | 14979 |
| forkhead box D1 | FOXD1 | 14980 |
| forkhead box D2 | FOXD2 | 14981 |
| forkhead box D3 | FOXD3 | 14982 |
| forkhead box D4 | FOXD4 | 14983 |
| forkhead box D4-like 1 | FOXD4L1 | 14984 |
| forkhead box D4-like 3 | FOXD4L3 | 14985 |
| forkhead box D4-like 4 | FOXD4L4 | 14986 |
| forkhead box D4-like 5 | FOXD4L5 | 14987 |
| forkhead box D4-like 6 | FOXD4L6 | 14988 |
| forkhead box E1 | FOXE1 | 14989 |
| forkhead box E3 | FOXE3 | 14990 |
| forkhead box F1 | FOXF1 | 14991 |
| forkhead box F2 | FOXF2 | 14992 |
| forkhead box G1 | FOXG1 | 14993 |
| forkhead box H1 | FOXH1 | 14994 |
| forkhead box I1 | FOXI1 | 14995 |
| forkhead box I2 | FOXI2 | 14996 |
| forkhead box I3 | FOXI3 | 14997 |
| forkhead box J1 | FOXJ1 | 14998 |
| forkhead box J2 | FOXJ2 | 14999 |
| forkhead box J3 | FOXJ3 | 15000 |
| forkhead box K1 | FOXK1 | 15001 |
| forkhead box K2 | FOXK2 | 15002 |
| forkhead box L1 | FOXL1 | 15003 |
| forkhead box L2 | FOXL2 | 15004 |
| forkhead box M1 | FOXM1 | 15005 |
| forkhead box N1 | FOXN1 | 15006 |
| forkhead box N2 | FOXN2 | 15007 |
| forkhead box N3 | FOXN3 | 15008 |
| forkhead box N4 | FOXN4 | 15009 |
| forkhead box O1 | FOXO1 | 15010 |
| forkhead box O3 | FOXO3 | 15011 |
| forkhead box O4 | FOXO4 | 15012 |
| forkhead box O6 | FOXO6 | 15013 |
| forkhead box P1 | FOXP1 | 15014 |
| forkhead box P2 | FOXP3 | 15015 |
| forkhead box P3 | FOXP4 | 15016 |
| forkhead box P4 | FOXQ1 | 15017 |
| forkhead box Q1 | FOXR1 | 15018 |
| forkhead box R1 | FOXR2 | 15019 |
| forkhead box R2 | FOXS1 | 15020 |
| forkhead box S1 | FOXP3 | 15021 |
| far upstream element binding protein 1 | FUBP1 | 15022 |
| far upstream element (FUSE) binding protein 3 | FUBP3 | 15023 |
| GA binding protein transcription factor alpha subunit | GABPA | 15024 |
| GA binding protein transcription factor, beta subunit 1 | GABPB1 | 15025 |
| GA binding protein transcription factor, beta subunit 2 | GABPB2 | 15026 |
| GATA binding protein 1 (globin transcription factor 1) | GATA1 | 15027 |
| GATA binding protein 2 | GATA2 | 15028 |
| GATA binding protein 3 | GATA3 | 15029 |
| GATA binding protein 4 | GATA4 | 15030 |
| GATA binding protein 5 | GATA5 | 15031 |
| GATA binding protein 6 | GATA6 | 15032 |
| GATA zinc finger domain containing 1 | GATAD1 | 15033 |
| GATA zinc finger domain containing 2 A | GATAD2A | 15034 |
| GATA zinc finger domain containing 2B | GATAD2B | 15035 |
| gastrulation brain homeobox 1 | GBX1 | 15036 |
| gastrulation brain homeobox 2 | GBX2 | 15037 |
| GC-rich sequence DNA-binding factor 2 | GCFC2 | 15038 |
| glial cells missing homolog 1 | GCM1 | 15039 |
| glial cells missing homolog 2 | GCM2 | 15040 |
| growth factor independent 1 transcription repressor | GFI1 | 15041 |
| growth factor independent 1B transcription repressor | GFI1B | 15042 |
| GLI family zinc finger 1 | GLI1 | 15043 |
| GLI family zinc finger 2 | GLI2 | 15044 |
| GLI family zinc finger 3 | GLI3 | 15045 |
| GLI family zinc finger 4 | GLI4 | 15046 |
| GLIS family zinc finger 1 | GLIS1 | 15047 |
| GLIS family zinc finger 2 | GLIS2 | 15048 |
| GLIS family zinc finger 3 | GLIS3 | 15049 |
| glucocorticoid modulatory element binding protein 1 | GMEB1 | 15050 |
| glucocorticoid modulatory element binding protein 2 | GMEB2 | 15051 |
| gon-4-like (C. elegans) | GON4L | 15052 |
| grainyhead like transcription factor 1 | GRHL1 | 15053 |
| grainyhead like transcription factor 2 | GRHL2 | 15054 |
| grainyhead like transcription factor 3 | GRHL3 | 15055 |
| goosecoid homeobox | GSC | 15056 |
| goosecoid homeobox 2 | GSC2 | 15057 |
| GS homeobox 1 | GSX1 | 15058 |
| GS homeobox 2 | GSX2 | 15059 |
| general transcription factor IIi | GTF2I | 15060 |
| general transcription factor IIIA | GTF3A | 15061 |
| GDNF inducible zinc finger protein 1 | GZF1 | 15062 |
| heart and neural crest derivatives expressed 1 | HAND1 | 15063 |
| heart and neural crest derivatives expressed 2 | HAND2 | 15064 |
| HMG-box transcription factor 1 | HBP1 | 15065-15066 |
| highly divergent homeobox | HDX | 15067 |
| helt bHLH transcription factor | HELT | 15068 |
| hes family bHLH transcription factor 1 | HES1 | 15069-15070 |
| hes family bHLH transcription factor 2 | HES2 | 15071 |
| hes family bHLH transcription factor 3 | HES3 | 15072 |
| hes family bHLH transcription factor 4 | HES4 | 15073 |
| hes family bHLH transcription factor 5 | HES5 | 15074 |
| hes family bHLH transcription factor 6 | HES6 | 15075 |
| hes family bHLH transcription factor 7 | HES7 | 15076 |
| HESX homeobox 1 | HESX1 | 15077 |
| hes-related family bHLH transcription factor with | HEY1 | 15078 |
| YRPW motif 1 | | |
| hes-related family bHLH transcription factor with | HEY2 | 15079 |
| YRPW motif 2 | | |
| hes-related family bHLH transcription factor with | HEYL | 15080 |
| YRPW motif-like | | |
| hematopoietically expressed homeobox | HHEX | 15081 |
| hypermethylated in cancer 1 | HIC1 | 15082 |
| hypermethylated in cancer 2 | HIC2 | 15083 |
| hypoxia inducible factor 1, alpha subunit (basic helix- | HIF1A | 15084 |
| loop-helix transcription factor) | | |
| hypoxia inducible factor 3, alpha subunit | HIF3A | 15085 |
| histone H4 transcription factor | HINFP | 15086 |
| human immunodeficiency virus type I enhancer | HIVEP1 | 15087 |
| binding protein 1 | | |
| human immunodeficiency virus type I enhancer | HIVEP2 | 15088 |
| binding protein 2 | | |
| human immunodeficiency virus type I enhancer | HIVEP3 | 15089 |
| binding protein 3 | | |
| HKR1, GLI-Kruppel zinc finger family member | HKR1 | 15090 |
| hepatic leukemia factor | HLF | 15091 |
| helicase-like transcription factor | HLTF | 15092 |
| H2.0-like homeobox | HLX | 15093 |
| homeobox containing 1 | HMBOX1 | 15094 |
| high mobility group 20A | HMG20A | 15095 |
| high mobility group 20B | HMG20B | 15096 |
| high mobility group AT-hook 1 | HMGA1 | 15097 |
| high mobility group AT-hook 2 | HMGA2 | 15098 |
| HMG-box containing 3 | HMGXB3 | 15099 |
| HMG-box containing 4 | HMGXB4 | 15100 |
| H6 family homeobox 1 | HMX1 | 15101 |
| H6 family homeobox 2 | HMX2 | 15102 |
| H6 family homeobox 3 | HMX3 | 15103-15104 |
| HNF1 homeobox A | HNF1A | 15105 |
| HNF1 homeobox B | HNF1B | 15106 |
| hepatocyte nuclear factor 4 alpha | HNF4A | 15107 |
| hepatocyte nuclear factor 4 gamma | HNF4G | 15108 |
| heterogeneous nuclear ribonucleoprotein K | HNRNPK | 15109 |
| homeobox and leucine zipper encoding | HOMEZ | 15110 |
| HOP homeobox | HOPX | 15111 |
| homeobox A1 | HOXA1 | 15112 |
| homeobox A10 | HOXA10 | 15113 |
| homeobox A11 | HOXA11 | 15114 |
| homeobox A13 | HOXA13 | 15115 |
| homeobox A2 | HOXA2 | 15116 |
| homeobox A3 | HOXA3 | 15117 |
| homeobox A4 | HOXA4 | 15118 |
| homeobox A5 | HOXA5 | 15119 |
| homeobox A6 | HOXA6 | 15120 |
| homeobox A7 | HOXA7 | 15121 |
| homeobox A9 | HOXA9 | 15122 |
| homeobox B1 | HOXB1 | 15123 |
| homeobox B13 | HOXB13 | 15124 |
| homeobox B2 | HOXB2 | 15125 |
| homeobox B3 | HOXB3 | 15126 |
| homeobox B4 | HOXB4 | 15127 |
| homeobox B5 | HOXB5 | 15128 |
| homeobox B6 | HOXB6 | 15129 |
| homeobox B7 | HOXB7 | 15130 |
| homeobox B8 | HOXB8 | 15131 |
| homeobox B9 | HOXB9 | 15132 |
| homeobox C10 | HOXC10 | 15133 |
| homeobox C11 | HOXC11 | 15134 |
| homeobox C12 | HOXC12 | 15135 |
| homeobox C13 | HOXC13 | 15136 |
| homeobox C4 | HOXC4 | 15137 |
| homeobox C5 | HOXC5 | 15138 |
| homeobox C6 | HOXC6 | 15139 |
| homeobox C8 | HOXC8 | 15140 |
| homeobox C9 | HOXC9 | 15141 |
| homeobox D1 | HOXD1 | 15142 |
| homeobox D10 | HOXD10 | 15143 |
| homeobox D11 | HOXD11 | 15144 |
| homeobox D12 | HOXD12 | 15145 |
| homeobox D13 | HOXD13 | 15146 |
| homeobox D3 | HOXD3 | 15147 |
| homeobox D4 | HOXD4 | 15148 |
| homeobox D8 | HOXD8 | 15149 |
| homeobox D9 | HOXD9 | 15150 |
| heat shock transcription factor 1 | HSF1 | 15151 |
| heat shock transcription factor 2 | HSF2 | 15152 |
| heat shock transcription factor 4 | HSF4 | 15153 |
| heat shock transcription factor family member 5 | HSF5 | 15154 |
| heat shock transcription factor family, X-linked 1 | HSFX1 | 15155 |
| heat shock transcription factor, Y-linked 1 | HSFY1 | 15156 |
| heat shock transcription factor, Y-linked 2 | HSFY2 | 15156 |
| inhibitor of DNA binding 1, dominant negative helix- | ID1 | 15157 |
| loop-helix protein | | |
| inhibitor of DNA binding 2, dominant negative helix- | ID2 | 15158 |
| loop-helix protein | | |
| inhibitor of DNA binding 3, dominant negative helix- | ID3 | 15159 |
| loop-helix protein | | |
| inhibitor of DNA binding 4, dominant negative helix- | ID4 | 15160 |
| loop-helix protein | | |
| interferon, gamma-inducible protein 16 | IFI16 | 15161 |
| IKAROS family zinc finger 1 | IKZF1 | 15162 |
| IKAROS family zinc finger 2 | IKZF2 | 15163 |
| IKAROS family zinc finger 3 | IKZF3 | 15164 |
| IKAROS family zinc finger 4 | IKZF4 | 15165 |
| IKAROS family zinc finger 5 | IKZF5 | 15166 |
| insulinoma associated 1 | INSM1 | 15167 |
| insulinoma-associated 2 | INSM2 | 15168 |
| interferon regulatory factor 1 | IRF1 | 15169 |
| interferon regulatory factor 2 | IRF2 | 15170 |
| interferon regulatory factor 3 | IRF3 | 15171 |
| interferon regulatory factor 4 | IRF4 | 15172 |
| interferon regulatory factor 5 | IRF5 | 15173 |
| interferon regulatory factor 6 | IRF6 | 15174 |
| interferon regulatory factor 7 | IRF7 | 15175 |
| interferon regulatory factor 8 | IRF8 | 15176 |
| interferon regulatory factor 9 | IRF9 | 15177 |
| iroquois homeobox 1 | IRX1 | 15178 |
| iroquois homeobox 2 | IRX2 | 15179 |
| iroquois homeobox 3 | IRX3 | 15180 |
| iroquois homeobox 4 | IRX4 | 15181 |
| iroquois homeobox 5 | IRX5 | 15182 |
| iroquois homeobox 6 | IRX6 | 15183 |
| ISL LIM homeobox 1 | ISL1 | 15184 |
| ISL LIM homeobox 2 | ISL2 | 15185 |
| intestine specific homeobox | ISX | 15186 |
| jumonji and AT-rich interaction domain containing 2 | JARID2 | 15187 |
| JAZF zinc finger 1 | JAZF1 | 15188 |
| Jun dimerization protein 2 | JDP2 | 15189 |
| jun proto-oncogene | JUN | 15190 |
| jun B proto-oncogene | JUNB | 15191 |
| jun D proto-oncogene | JUND | 15192 |
| K(lysine) acetyltransferase 5 | KAT5 | 15193 |
| lysine acetyltransferase 6A | KAT6A | 15194 |
| lysine acetyltransferase 6B | KAT6B | 15195 |
| lysine acetyltransferase 7 | KAT7 | 15196 |
| lysine acetyltransferase 8 | KAT8 | 15197 |
| potassium channel modulatory factor 1 | KCMF1 | 15198 |
| potassium voltage-gated channel interacting protein 3 | KCNIP3 | 15199 |
| lysine demethylase 2A | KDM2A | 15200 |
| lysine demethylase 5A | KDM5A | 15201 |
| lysine demethylase 5B | KDM5B | 15202 |
| lysine demethylase 5C | KDM5C | 15203 |
| lysine demethylase 5D | KDM5D | 15204 |
| KH-type splicing regulatory protein | KHSRP | 15205 |
| KIAA1549 | KIAA1549 | 15206 |
| Kruppel-like factor 1 (erythroid) | KLF1 | 15207 |
| Kruppel-like factor 10 | KLF10 | 15208 |
| Kruppel-like factor 11 | KLF11 | 15209 |
| Kruppel-like factor 12 | KLF12 | 15210 |
| Kruppel-like factor 13 | KLF13 | 15211 |
| Kruppel-like factor 14 | KLF14 | 15212 |
| Kruppel-like factor 15 | KLF15 | 15213 |
| Kruppel-like factor 16 | KLF16 | 15214 |
| Kruppel-like factor 17 | KLF17 | 15215 |
| Kruppel-like factor 2 | KLF2 | 15216 |
| Kruppel-like factor 3 (basic) | KLF3 | 15217 |
| Kruppel-like factor 4 (gut) | KLF4 | 15218 |
| Kruppel-like factor 5 (intestinal) | KLF5 | 15219 |
| Kruppel-like factor 6 | KLF6 | 15220 |
| Kruppel-like factor 7 (ubiquitous) | KLF7 | 15221 |
| Kruppel-like factor 8 | KLF8 | 15222 |
| Kruppel-like factor 9 | KLF9 | 15223 |
| lysine methyltransferase 2A | KMT2A | 15224 |
| lysine methyltransferase 2B | KMT2B | 15225 |
| lysine methyltransferase 2C | KMT2C | 15226 |
| lysine methyltransferase 2E | KMT2E | 15227 |
| l(3)mbt-like 1 (Drosophila) | L3MBTL1 | 15228 |
| l(3)mbt-like 2 (Drosophila) | L3MBTL2 | 15229 |
| l(3)mbt-like 3 (Drosophila) | L3MBTL3 | 15230 |
| l(3)mbt-like 4 (Drosophila) | L3MBTL4 | 15231 |
| ladybird homeobox 1 | LBX1 | 15232 |
| ladybird homeobox 2 | LBX2 | 15233 |
| ligand dependent nuclear receptor corepressor | LCOR | 15234 |
| ligand dependent nuclear receptor corepressor like | LCORL | 15235 |
| lymphoid enhancer binding factor 1 | LEF1 | 15236 |
| leucine twenty homeobox | LEUTX | 15237 |
| LIM homeobox 1 | LHX1 | 15238 |
| LIM homeobox 2 | LHX2 | 15239 |
| LIM homeobox 3 | LHX3 | 15240 |
| LIM homeobox 4 | LHX4 | 15241 |
| LIM homeobox 5 | LHX5 | 15242 |
| LIM homeobox 6 | LHX6 | 15243 |
| LIM homeobox 8 | LHX8 | 15244 |
| LIM homeobox 9 | LHX9 | 15245 |
| LIM homeobox transcription factor 1, alpha | LMX1A | 15246 |
| LIM homeobox transcription factor 1, beta | LMX1B | 15247 |
| LOC730110 | LOC730110 | |
| leucine rich repeat (in FLII) interacting protein 1 | LRRFIP1 | 15248 |
| leucine rich repeat (in FLII) interacting protein 2 | LRRFIP2 | 15249 |
| Ly 1 antibody reactive | LYAR | 15250 |
| lymphoblastic leukemia associated hematopoiesis | LYL1 | 15251 |
| regulator 1 | | |
| maelstrom spermatogenic transposon silencer | MAEL | 15252 |
| v-maf avian musculoaponeurotic fibrosarcoma | MAF | 15253 |
| oncogene homolog | | |
| MAF1 homolog, negative regulator of RNA | MAF1 | 15254 |
| polymerase III | | |
| v-maf avian musculoaponeurotic fibrosarcoma | MAFA | 15255-15256 |
| oncogene homolog A | | |
| v-maf avian musculoaponeurotic fibrosarcoma | MAFB | 15257 |
| oncogene homolog B | | |
| v-maf avian musculoaponeurotic fibrosarcoma | MAFF | 15258 |
| oncogene homolog F | | |
| v-maf avian musculoaponeurotic fibrosarcoma | MAFG | 15259 |
| oncogene homolog G | | |
| v-maf avian musculoaponeurotic fibrosarcoma | MAFK | 15260 |
| oncogene homolog K | | |
| matrin 3 | MATR3 | 15261 |
| MYC associated factor X | MAX | 15262 |
| MYC associated zinc finger protein | MAZ | 15263 |
| methyl-CpG binding domain protein 1 | MBD1 | 15264 |
| methyl-CpG binding domain protein 2 | MBD2 | 15265 |
| methyl-CpG binding domain protein 3 | MBD3 | 15266 |
| methyl-CpG binding domain protein 3-like 1 | MBD3L1 | 15267 |
| methyl-CpG binding domain protein 3-like 2 | MBD3L2 | 15268 |
| methyl-CpG binding domain 4 DNA glycosylase | MBD4 | 15269 |
| methyl-CpG binding domain protein 5 | MBD5 | 15270 |
| methyl-CpG binding domain protein 6 | MBD6 | 15271 |
| muscleblind like splicing regulator 3 | MBNL3 | 15272 |
| MDS1 and EVI1 complex locus | MECOM | 15273 |
| methyl-CpG binding protein 2 | MECP2 | 15274 |
| myocyte enhancer factor 2A | MEF2A | 15275 |
| myocyte enhancer factor 2B | MEF2B | 15276 |
| myocyte enhancer factor 2C | MEF2C | 15277 |
| myocyte enhancer factor 2D | MEF2D | 15278 |
| Meis homeobox 1 | MEIS1 | 15279 |
| Meis homeobox 2 | MEIS2 | 15280 |
| Meis homeobox 3 | MEIS3 | 15281 |
| Meis homeobox 3 pseudogene 1 | MEIS3P1 | 15282 |
| Meis homeobox 3 pseudogene 2 | MEIS3P2 | 15283 |
| mesenchyme homeobox 1 | MEOX1 | 15284 |
| mesenchyme homeobox 2 | MEOX2 | 15285 |
| mesoderm posterior bHLH transcription factor 1 | MESP1 | 15286 |
| mesoderm posterior bHLH transcription factor 2 | MESP2 | 15287 |
| MGA, MAX dimerization protein | MGA | 15288-15289 |
| MIER1 transcriptional regulator | MIER1 | 15290 |
| MIER family member 2 | MIER2 | 15291 |
| MIER family member 3 | MIER3 | 15292 |
| MIS18 binding protein 1 | MIS18BP1 | 15293 |
| microphthalmia-associated transcription factor | MITF | 15294 |
| Mix paired-like homeobox | MIXL1 | 15295 |
| mohawk homeobox | MKX | 15296 |
| myeloid/lymphoid or mixed-lineage leukemia; | MLLT1 | 15297 |
| translocated to, 1 | | |
| myeloid/lymphoid or mixed-lineage leukemia; | MLLT10 | 15298 |
| translocated to, 10 | | |
| myeloid/lymphoid or mixed-lineage leukemia; | MLLT11 | 15299 |
| translocated to, 11 | | |
| myeloid/lymphoid or mixed-lineage leukemia; | MLLT3 | 15300 |
| translocated to, 3 | | |
| myeloid/lymphoid or mixed-lineage leukemia; | MLLT4 | 15301 |
| translocated to, 4 | | |
| myeloid/lymphoid or mixed-lineage leukemia; | MLLT6 | 15302 |
| translocated to, 6 | | |
| MLX, MAX dimerization protein | MLX | 15303 |
| MLX interacting protein | MLXIP | 15304 |
| MLX interacting protein-like | MLXIPL | 15305 |
| MAX network transcriptional repressor | MNT | 15306 |
| motor neuron and pancreas homeobox 1 | MNX1 | 15307 |
| musculin | MSC | 15308 |
| mesogenin 1 | MSGN1 | 15309 |
| msh homeobox 1 | MSX1 | 15310 |
| msh homeobox 2 | MSX2 | 15311 |
| metastasis associated 1 | MTA1 | 15312 |
| metastasis associated 1 family member 2 | MTA2 | 15313 |
| metastasis associated 1 family member 3 | MTA3 | 15314 |
| metal-regulatory transcription factor 1 | MTF1 | 15315 |
| metal response element binding transcription factor 2 | MTF2 | 15316 |
| MAX dimerization protein 1 | MXD1 | 15317 |
| MAX dimerization protein 3 | MXD3 | 15318 |
| MAX dimerization protein 4 | MXD4 | 15319 |
| MAX interactor 1, dimerization protein | MXI1 | 15320 |
| v-myb avian myeloblastosis viral oncogene homolog | MYB | 15321 |
| v-myb avian myeloblastosis viral oncogene homolog- | MYBL1 | 15322 |
| like 1 | | |
| v-myb avian myeloblastosis viral oncogene homolog- | MYBL2 | 15323 |
| like 2 | | |
| v-myc avian myelocytomatosis viral oncogene | MYC | 15324 |
| homolog | | |
| v-myc avian myelocytomatosis viral oncogene lung | MYCL | 15325 |
| carcinoma derived homolog | | |
| MYCL pseudogene 1 | MYCLP1 | 15326 |
| v-myc avian myelocytomatosis viral oncogene | MYCN | 15327 |
| neuroblastoma derived homolog | | |
| myogenic factor 5 | MYF5 | 15328 |
| myogenic factor 6 | MYF6 | 15329 |
| myoneurin | MYNN | 15330 |
| myogenic differentiation 1 | MYOD1 | 15331 |
| myogenin (myogenic factor 4) | MYOG | 15332 |
| myelin regulatory factor | MYRF | 15333 |
| Myb-like, SWIRM and MPN domains 1 | MYSM1 | 15334 |
| myelin transcription factor 1 | MYT1 | 15335-15336 |
| myelin transcription factor 1 like | MYT1L | 15337 |
| myeloid zinc finger 1 | MZF1 | 15338 |
| Nanog homeobox | NANOG | 15339 |
| NANOG neighbor homeobox | NANOGNB | 15340 |
| Nanog homeobox pseudogene 1 | NANOGP1 | 15341 |
| Nanog homeobox pseudogene 8 | NANOGP8 | 15342 |
| nuclear receptor coactivator 1 | NCOA1 | 15343 |
| nuclear receptor coactivator 2 | NCOA2 | 15344 |
| nuclear receptor coactivator 3 | NCOA3 | 15345 |
| nuclear receptor coactivator 4 | NCOA4 | 15346 |
| nuclear receptor coactivator 5 | NCOA5 | 15347 |
| nuclear receptor coactivator 6 | NCOA6 | 15348 |
| nuclear receptor coactivator 7 | NCOA7 | 15349 |
| nuclear receptor corepressor 1 | NCOR1 | 15350 |
| nuclear receptor corepressor 2 | NCOR2 | 15351 |
| neuronal differentiation 1 | NEUROD1 | 15352 |
| neuronal differentiation 2 | NEUROD2 | 15353 |
| neuronal differentiation 4 | NEUROD4 | 15354 |
| neuronal differentiation 6 | NEUROD6 | 15355 |
| neuro genin 1 | NEUROG1 | 15356 |
| neuro genin 2 | NEUROG2 | 15357 |
| neuro genin 3 | NEUROG3 | 15358 |
| nuclear factor of activated T-cells 5, tonicity- | NFAT5 | 15359 |
| responsive | | |
| nuclear factor of activated T-cells, cytoplasmic, | NFATC1 | 15360 |
| calcineurin-dependent 1 | | |
| nuclear factor of activated T-cells, cytoplasmic, | NFATC2 | 15361 |
| calcineurin-dependent 2 | | |
| nuclear factor of activated T-cells, cytoplasmic, | NFATC3 | 15362 |
| calcineurin-dependent 3 | | |
| nuclear factor of activated T-cells, cytoplasmic, | NFATC4 | 15363 |
| calcineurin-dependent 4 | | |
| nuclear factor, erythroid 2 | NFE2 | 15364 |
| nuclear factor, erythroid 2 like 1 | NFE2L1 | 15365 |
| nuclear factor, erythroid 2 like 2 | NFE2L2 | 15366 |
| nuclear factor, erythroid 2 like 3 | NFE2L3 | 15367 |
| nuclear factor I/A | NFIA | 15368 |
| nuclear factor I/B | NFIB | 15369 |
| nuclear factor I/C (CCAAT-binding transcription | NFIC | 15370 |
| factor) | | |
| nuclear factor, interleukin 3 regulated | NFIL3 | 15371 |
| nuclear factor I/X (CCAAT-binding transcription | NFIX | 15372 |
| factor) | | |
| nuclear factor of kappa light polypeptide gene | NFKB1 | 15373 |
| enhancer in B-cells 1 | | |
| nuclear factor of kappa light polypeptide gene | NFKB2 | 15374 |
| enhancer in B-cells 2 (p49/p100) | | |
| nuclear factor of kappa light polypeptide gene | NFKBIA | 15375 |
| enhancer in B-cells inhibitor, alpha | | |
| nuclear factor of kappa light polypeptide gene | NFKBIB | 15376 |
| enhancer in B-cells inhibitor, beta | | |
| nuclear factor of kappa light polypeptide gene | NFKBID | 15377 |
| enhancer in B-cells inhibitor, delta | | |
| nuclear factor of kappa light polypeptide gene | NFKBIE | 15378 |
| enhancer in B-cells inhibitor, epsilon | | |
| nuclear factor of kappa light polypeptide gene | NFKBIL1 | 15379 |
| enhancer in B-cells inhibitor-like 1 | | |
| nuclear factor of kappa light polypeptide gene | NFKBIZ | 15380 |
| enhancer in B-cells inhibitor, zeta | | |
| nuclear factor related to kappaB binding protein | NFRKB | 15381 |
| nuclear transcription factor, X-box binding 1 | NFX1 | 15382 |
| nuclear transcription factor, X-box binding-like 1 | NFXL1 | 15383 |
| nuclear transcription factor Y subunit alpha | NFYA | 15384 |
| nuclear transcription factor Y subunit beta | NFYB | 15385 |
| nuclear transcription factor Y subunit gamma | NFYC | 15386 |
| nescient helix-loop-helix 1 | NHLH1 | 15387 |
| nescient helix-loop-helix 2 | NHLH2 | 15388 |
| NFKB repressing factor | NKRF | 15389 |
| NK1 homeobox 1 | NKX1-1 | 15390 |
| NK1 homeobox 2 | NKX1-2 | 15391 |
| NK2 homeobox 1 | NKX2-1 | 15392 |
| NK2 homeobox 2 | NKX2-2 | 15393 |
| NK2 homeobox 3 | NKX2-3 | 15394 |
| NK2 homeobox 4 | NKX2-4 | 15395 |
| NK2 homeobox 5 | NKX2-5 | 15396 |
| NK2 homeobox 6 | NKX2-6 | 15397 |
| NK2 homeobox 8 | NKX2-8 | 15398 |
| NK3 homeobox 1 | NKX3-1 | 15399 |
| NK3 homeobox 2 | NKX3-2 | 15400 |
| NK6 homeobox 1 | NKX6-1 | 15401 |
| NK6 homeobox 2 | NKX6-2 | 15402 |
| NK6 homeobox 3 | NKX6-3 | 15403 |
| NOBOX oogenesis homeobox | NOBOX | 15404 |
| NOC3 like DNA replication regulator | NOC3L | 15405 |
| nucleolar complex associated 4 homolog | NOC4L | 15406 |
| non-POU domain containing, octamer-binding | NONO | 15407 |
| notochord homeobox | NOTO | 15408 |
| neuronal PAS domain protein 1 | NPAS1 | 15409 |
| neuronal PAS domain protein 2 | NPAS2 | 15410 |
| neuronal PAS domain protein 3 | NPAS3 | 15411 |
| neuronal PAS domain protein 4 | NPAS4 | 15412 |
| nuclear receptor subfamily 0 group B member 1 | NR0B1 | 15413 |
| nuclear receptor subfamily 0 group B member 2 | NR0B2 | 15414 |
| nuclear receptor subfamily 1 group D member 1 | NR1D1 | 15415 |
| nuclear receptor subfamily 1 group D member 2 | NR1D2 | 15416 |
| nuclear receptor subfamily 1 group H member 2 | NR1H2 | 15417 |
| nuclear receptor subfamily 1 group H member 3 | NR1H3 | 15418 |
| nuclear receptor subfamily 1 group H member 4 | NR1H4 | 15419 |
| nuclear receptor subfamily 1 group I member 2 | NR1I2 | 15420 |
| nuclear receptor subfamily 1 group I member 3 | NR1I3 | 15421 |
| nuclear receptor subfamily 2 group C member 1 | NR2C1 | 15422 |
| nuclear receptor subfamily 2 group C member 2 | NR2C2 | 15423 |
| nuclear receptor subfamily 2 group E member 1 | NR2E1 | 15424 |
| nuclear receptor subfamily 2 group E member 3 | NR2E3 | 15425 |
| nuclear receptor subfamily 2 group F member 1 | NR2F1 | 15426 |
| nuclear receptor subfamily 2 group F member 2 | NR2F2 | 15427 |
| nuclear receptor subfamily 2 group F member 6 | NR2F6 | 15428 |
| nuclear receptor subfamily 3 group C member 1 | NR3C1 | 15429 |
| nuclear receptor subfamily 3 group C member 2 | NR3C2 | 15430 |
| nuclear receptor subfamily 4 group A member 1 | NR4A1 | 15431 |
| nuclear receptor subfamily 4 group A member 2 | NR4A2 | 15432 |
| nuclear receptor subfamily 4 group A member 3 | NR4A3 | 15433 |
| nuclear receptor subfamily 5 group A member 1 | NR5A1 | 15434 |
| nuclear receptor subfamily 5 group A member 2 | NR5A2 | 15435 |
| nuclear receptor subfamily 6 group A member 1 | NR6A1 | 15436 |
| nuclear respiratory factor 1 | NRF1 | 15437-15438 |
| neural retina leucine zipper | NRL | 15439 |
| oligodendrocyte transcription factor 1 | OLIG1 | 15440 |
| oligodendrocyte lineage transcription factor 2 | OLIG2 | 15441 |
| oligodendrocyte transcription factor 3 | OLIG3 | 15442 |
| one cut homeobox 1 | ONECUT1 | 15443 |
| one cut homeobox 2 | ONECUT2 | 15444 |
| one cut homeobox 3 | ONECUT3 | 15445 |
| odd-skipped related transciption factor 1 | OSR1 | 15446 |
| odd-skipped related transciption factor 2 | OSR2 | 15447 |
| orthopedia homeobox | OTP | 15448 |
| orthodenticle homeobox 1 | OTX1 | 15449 |
| orthodenticle homeobox 2 | OTX2 | 15450 |
| ovo like zinc finger 1 | OVOL1 | 15451 |
| ovo like zinc finger 2 | OVOL2 | 15452 |
| ovo like zinc finger 3 | OVOL3 | 15453 |
| poly(ADP-ribose) polymerase 1 | PARP1 | 15454 |
| poly(ADP-ribose) polymerase family member 12 | PARP12 | 15455 |
| POZ/BTB and AT hook containing zinc finger 1 | PATZ1 | 15456 |
| PRKC, apoptosis, WT1, regulator | PAWR | 15457 |
| paired box 1 | PAX1 | 15458 |
| paired box 2 | PAX2 | 15459 |
| paired box 3 | PAX3 | 15460 |
| paired box 4 | PAX4 | 15461 |
| paired box 5 | PAX5 | 15462 |
| paired box 6 | PAX6 | 15463 |
| paired box 7 | PAX7 | 15464 |
| paired box 8 | PAX8 | 15465 |
| paired box 9 | PAX9 | 15466 |
| PAX3 and PAX7 binding protein 1 | PAXBP1 | 15467 |
| polybromo 1 | PBRM1 | 15468 |
| pre-B-cell leukemia homeobox 1 | PBX1 | 15469 |
| pre-B-cell leukemia homeobox 2 | PBX2 | 15470 |
| pre-B-cell leukemia homeobox 3 | PBX3 | 15471 |
| pre-B-cell leukemia homeobox 4 | PBX4 | 15472 |
| poly(rC) binding protein 1 | PCBP1 | 15473 |
| poly(rC) binding protein 2 | PCBP2 | 15474 |
| poly(rC) binding protein 3 | PCBP3 | 15475 |
| poly(rC) binding protein 4 | PCBP4 | 15476 |
| poly comb group ring finger 6 | PCGF6 | 15477 |
| pancreatic and duodenal homeobox 1 | PDX1 | 15478-15479 |
| paternally expressed 3 | PEG3 | 15480 |
| progesterone receptor | PGR | 15481 |
| prohibitin | PHB | 15482 |
| prohibitin 2 | PHB2 | 15483 |
| PHD finger protein 20 | PHF20 | 15484 |
| PHD finger protein 5A | PHF5A | 15485 |
| paired like homeobox 2a | PHOX2A | 15486 |
| paired like homeobox 2b | PHOX2B | 15487 |
| putative homeodomain transcription factor 1 | PHTF1 | 15488 |
| putative homeodomain transcription factor 2 | PHTF2 | 15489 |
| paired like homeodomain 1 | PITX1 | 15490 |
| paired like homeodomain 2 | PITX2 | 15491 |
| paired like homeodomain 3 | PITX3 | 15492 |
| PBX/knotted 1 homeobox 1 | PKNOX1 | 15493 |
| PBX/knotted 1 homeobox 2 | PKNOX2 | 15494 |
| PLAG1 zinc finger | PLAG1 | 15495 |
| PLAG1 like zinc finger 1 | PLAGL1 | 15496 |
| PLAG1 like zinc finger 2 | PLAGL2 | 15497 |
| pleckstrin | PLEK | 15498 |
| promyelocytic leukaemia zinc finger | PLZF | 15499 |
| pogo transposable element with ZNF domain | POGZ | 15500 |
| POU class 1 homeobox 1 | POU1F1 | 15501 |
| POU class 2 associating factor 1 | POU2AF1 | 15502 |
| POU class 2 homeobox 1 | POU2F1 | 15503 |
| POU class 2 homeobox 2 | POU2F2 | 15504 |
| POU class 2 homeobox 3 | POU2F3 | 15505 |
| POU class 3 homeobox 1 | POU3F1 | 15506 |
| POU class 3 homeobox 2 | POU3F2 | 15507 |
| POU class 3 homeobox 3 | POU3F3 | 15508 |
| POU class 3 homeobox 4 | POU3F4 | 15509 |
| POU class 4 homeobox 1 | POU4F1 | 15510 |
| POU class 4 homeobox 2 | POU4F2 | 15511 |
| POU class 4 homeobox 3 | POU4F3 | 15512 |
| POU class 5 homeobox 1 | POU5F1 | 15513 |
| POU class 5 homeobox 1B | POU5F1B | 15514 |
| POU domain class 5, transcription factor 2 | POU5F2 | 15515 |
| POU class 6 homeobox 1 | POU6F1 | 15516 |
| POU class 6 homeobox 2 | POU6F2 | 15517 |
| peroxisome proliferator activated receptor alpha | PPARA | 15518 |
| peroxisome proliferator activated receptor delta | PPARD | 15519 |
| peroxisome proliferator activated receptor gamma | PPARG | 15520 |
| protein phosphatase 1 regulatory subunit 13 like | PPP1R13L | 15521 |
| PR domain 1 | PRDM1 | 15522 |
| PR domain 10 | PRDM10 | 15523 |
| PR domain 11 | PRDM11 | 15524 |
| PR domain 12 | PRDM12 | 15525 |
| PR domain 13 | PRDM13 | 15526 |
| PR domain 14 | PRDM14 | 15527 |
| PR domain 15 | PRDM15 | 15528 |
| PR domain 16 | PRDM16 | 15529 |
| PR domain 2 | PRDM2 | 15530 |
| PR domain 4 | PRDM4 | 15531 |
| PR domain 5 | PRDM5 | 15532 |
| PR domain 6 | PRDM6 | 15533 |
| PR domain 7 | PRDM7 | 15534 |
| PR domain 8 | PRDM8 | 15535 |
| PR domain 9 | PRDM9 | 15536 |
| prolactin regulatory element binding | PREB | 15537 |
| PROP paired-like homeobox 1 | PROP1 | 15538 |
| prospero homeobox 1 | PROX1 | 15539 |
| prospero homeobox 2 | PROX2 | 15540 |
| paired related homeobox 1 | PRRX1 | 15541 |
| paired related homeobox 2 | PRRX2 | 15542 |
| paraspeckle component 1 | PSPC1 | 15543 |
| pancreas specific transcription factor, 1a | PTF1A | 15544 |
| purine-rich element binding protein A | PURA | 15545 |
| purine-rich element binding protein B | PURB | 15546 |
| purine-rich element binding protein G | PURG | 15547 |
| retinoic acid receptor alpha | RARA | 15548 |
| retinoic acid receptor beta | RARB | 15549 |
| retinoic acid receptor gamma | RARG | 15550 |
| retina and anterior neural fold homeobox | RAX | 15551-15552 |
| retina and anterior neural fold homeobox 2 | RAX2 | 15553 |
| RB associated KRAB zinc finger | RBAK | 15554 |
| RNA binding motif protein 22 | RBM22 | 15555 |
| recombination signal binding protein for | RBPJ | 15556 |
| immunoglobulin kappa J region | | |
| recombination signal binding protein for | RBPJL | 15557 |
| immunoglobulin kappa J region-like | | |
| ring finger and CCCH-type domains 1 | RC3H1 | 15558 |
| ring finger and CCCH-type domains 2 | RC3H2 | 15559 |
| REST corepressor 1 | RCOR1 | 15560 |
| REST corepressor 2 | RCOR2 | 15561 |
| REST corepressor 3 | RCOR3 | 15562 |
| v-rel avian reticuloendothcliosis viral oncogene | REL | 15563 |
| homolog | | |
| v-rel avian reticuloendothcliosis viral oncogene | RELA | 15564 |
| homolog A | | |
| v-rel avian reticuloendothcliosis viral oncogene | RELB | 15565 |
| homolog B | | |
| arginine-glutamic acid di peptide (RE) repeats | RERE | 15566 |
| RE1-silencing transcription factor | REST | 15567 |
| regulatory factor X1 | RFX1 | 15568 |
| regulatory factor X2 | RFX2 | 15569 |
| regulatory factor X3 | RFX3 | 15570 |
| regulatory factor X4 | RFX4 | 15571 |
| regulatory factor X5 | RFX5 | 15572 |
| regulatory factor X6 | RFX6 | 15573 |
| regulatory factor X7 | RFX7 | 15574 |
| RFX family member 8, lacking RFX DNA binding | RFX8 | 15575 |
| domain | | |
| regulatory factor X associated ankyrin containing | RFXANK | 15576 |
| protein | | |
| regulatory factor X associated protein | RFXAP | 15577 |
| Rhox homeobox family member 1 | RHOXF1 | 15578 |
| Rhox homeobox family member 2 | RHOXF2 | 15579 |
| Rhox homeobox family member 2B | RHOXF2B | 15580 |
| rearranged L-myc fusion | RLF | 15581-15582 |
| RAR related orphan receptor A | RORA | 15583 |
| RAR related orphan receptor B | RORB | 15584 |
| RAR related orphan receptor C | RORC | 15585 |
| retinoic acid receptor-related orphan nuclear receptor | RORgT | 15586 |
| gamma | | |
| ras responsive element binding protein 1 | RREB1 | 15587 |
| runt related transcription factor 1 | RUNX1 | 15588 |
| runt related transcription factor 1; translocated to, 1 | RUNX1T1 | 15589 |
| (cyclin D related) | | |
| runt related transcription factor 2 | RUNX2 | 15590 |
| runt related transcription factor 3 | RUNX3 | 15591 |
| retinoid X receptor alpha | RXRA | 15592 |
| retinoid X receptor beta | RXRB | 15593 |
| retinoid X receptor gamma | RXRG | 15594 |
| spalt-like transcription factor 1 | SALL1 | 15595 |
| spalt-like transcription factor 2 | SALL2 | 15596 |
| spalt-like transcription factor 3 | SALL3 | 15597 |
| spalt-like transcription factor 4 | SALL4 | 15598 |
| SATB homeobox 1 | SATB1 | 15599 |
| SATB homeobox 2 | SATB2 | 15600 |
| S-phase cyclin A-associated protein in the ER | SCAPER | 15601 |
| scratch family zinc finger 1 | SCRT1 | 15602 |
| scratch family zinc finger 2 | SCRT2 | 15603 |
| scleraxis bHLH transcription factor | SCX | 15604 |
| SEBOX homeobox | SEBOX | 15605 |
| SET binding protein 1 | SETBP1 | 15606 |
| splicing factor proline/glutamine-rich | SFPQ | 15607 |
| short stature homeobox | SHOX | 15608 |
| short stature homeobox 2 | SHOX2 | 15609 |
| single-minded family bHLH transcription factor 1 | SIM1 | 15610 |
| single-minded family bHLH transcription factor 2 | SIM2 | 15611 |
| SIX homeobox 1 | SIX1 | 15612 |
| SIX homeobox 2 | SIX2 | 15613 |
| SIX homeobox 3 | SIX3 | 15614 |
| SIX homeobox 4 | SIX4 | 15615 |
| SIX homeobox 5 | SIX5 | 15616 |
| SIX homeobox 6 | SIX6 | 15617 |
| SKI proto-oncogene | SKI | 15618 |
| SKI-like proto-oncogene | SKIL | 15619 |
| SKI family transcriptional corepressor 1 | SKOR1 | 15620 |
| SKI family transcriptional corepressor 2 | SKOR2 | 15621 |
| solute carrier family 30 (zinc transporter), member 9 | SLC30A9 | 15622 |
| SMAD family member 1 | SMAD1 | 15623 |
| SMAD family member 2 | SMAD2 | 15624 |
| SMAD family member 3 | SMAD3 | 15625 |
| SMAD family member 4 | SMAD4 | 15626 |
| SMAD family member 5 | SMAD5 | 15627 |
| SMAD family member 6 | SMAD6 | 15628 |
| SMAD family member 7 | SMAD7 | 15629 |
| SMAD family member 9 | SMAD9 | 15630 |
| SWI/SNF related, matrix associated, actin dependent | SMARCA1 | 15631 |
| regulator of chromatin, subfamily a, member 1 | | |
| SWI/SNF related, matrix associated, actin dependent | SMARCA2 | 15632 |
| regulator of chromatin, subfamily a, member 2 | | |
| SWI/SNF related, matrix associated, actin dependent | SMARCA4 | 15633 |
| regulator of chromatin, subfamily a, member 4 | | |
| SWI/SNF related, matrix associated, actin dependent | SMARCA5 | 15634 |
| regulator of chromatin, subfamily a, member 5 | | |
| SWI/SNF-related, matrix-associated actin-dependent | SMARCAD1 | 15635 |
| regulator of chromatin, subfamily a, containing | | |
| DEAD/H box 1 | | |
| SWI/SNF related, matrix associated, actin dependent | SMARCAL1 | 15636 |
| regulator of chromatin, subfamily a-like 1 | | |
| SWI/SNF related, matrix associated, actin dependent | SMARCB1 | 15637 |
| regulator of chromatin, subfamily b, member 1 | | |
| SWI/SNF related, matrix associated, actin dependent | SMARCC1 | 15638 |
| regulator of chromatin, subfamily c, member 1 | | |
| SWI/SNF related, matrix associated, actin dependent | SMARCC2 | 15639 |
| regulator of chromatin, subfamily c, member 2 | | |
| SWI/SNF related, matrix associated, actin dependent | SMARCD1 | 15640 |
| regulator of chromatin, subfamily d, member 1 | | |
| SWI/SNF related, matrix associated, actin dependent | SMARCD2 | 15641 |
| regulator of chromatin, subfamily d, member 2 | | |
| SWI/SNF related, matrix associated, actin dependent | SMARCD3 | 15642 |
| regulator of chromatin, subfamily d, member 3 | | |
| SWI/SNF related, matrix associated, actin dependent | SMARCE1 | 15643 |
| regulator of chromatin, subfamily e, member 1 | | |
| snail family zinc finger 1 | SNAI1 | 15644 |
| snail family zinc finger 2 | SNAI2 | 15645 |
| snail family zinc finger 3 | SNAI3 | 15646 |
| small nuclear RNA activating complex polypeptide 4 | SNAPC4 | 15647 |
| spermatogenesis and oogenesis specific basic helix- | SOHLH1 | 15648 |
| loop-helix 1 | | |
| spermatogenesis and oogenesis specific basic helix- | SOHLH2 | 15649 |
| loop-helix 2 | | |
| SRY-box 1 | SOX1 | 15650 |
| SRY-box 10 | SOX10 | 15651 |
| SRY-box 11 | SOX11 | 15652 |
| SRY-box 12 | SOX12 | 15653 |
| SRY-box 13 | SOX13 | 15654 |
| SRY-box 14 | SOX14 | 15655 |
| SRY-box 15 | SOX15 | 15656 |
| SRY-box 17 | SOX17 | 15657 |
| SRY-box 18 | SOX18 | 15658 |
| SRY-box 2 | SOX2 | 15659 |
| SRY-box 21 | SOX21 | 15660 |
| SRY-box 3 | SOX3 | 15661 |
| SRY-box 30 | SOX30 | 15662 |
| SRY-box 4 | SOX4 | 15663 |
| SRY-box 5 | SOX5 | 15664 |
| SRY-box 6 | SOX6 | 15665 |
| SRY-box 7 | SOX7 | 15666 |
| SRY-box 8 | SOX8 | 15667 |
| SRY-box 9 | SOX9 | 15668 |
| Sp1 transcription factor | SP1 | 15669-15670 |
| SP100 nuclear antigen | SP100 | 15671 |
| SP110 nuclear body protein | SP110 | 15672 |
| SP140 nuclear body protein | SP140 | 15673 |
| SP140 nuclear body protein like | SP140L | 15674 |
| Sp2 transcription factor | SP2 | 15675 |
| Sp3 transcription factor | SP3 | 15676 |
| Sp4 transcription factor | SP4 | 15677 |
| Sp5 transcription factor | SP5 | 15678 |
| Sp6 transcription factor | SP6 | 15679 |
| Sp7 transcription factor | SP7 | 15680 |
| Sp8 transcription factor | SP8 | 15681 |
| Sp9 transcription factor | SP9 | 15682 |
| SAM pointed domain containing ETS transcription | SPDEF | 15683 |
| factor | | |
| Spi-1 proto-oncogene | SPI1 | 15684 |
| Spi-B transcription factor (Spi-1/PU.1 related) | SPIB | 15685 |
| Spi-C transcription factor (Spi-1/PU.1 related) | SPIC | 15686 |
| spermatogenic leucine zipper 1 | SPZ1 | 15687 |
| sterol regulatory element binding transcription factor 1 | SREBF1 | 15688 |
| sterol regulatory element binding transcription factor 2 | SREBF2 | 15689 |
| serum response factor | SRF | 15690 |
| sex determining region Y | SRY | 15691 |
| structure specific recognition protein 1 | SSRP1 | 15692 |
| suppression of tumorigenicity 18, zinc finger | ST18 | 15693 |
| signal transducer and activator of transcription 1 | STAT1 | 15694 |
| signal transducer and activator of transcription 2 | STAT2 | 15695 |
| signal transducer and activator of transcription 3 | STAT3 | 15696 |
| (acute-phase response factor) | | |
| signal transducer and activator of transcription 4 | STAT4 | 15697 |
| signal transducer and activator of transcription 5 | STAT5 | 15698 |
| signal transducer and activator of transcription 5A | STAT5A | 15699 |
| signal transducer and activator of transcription 5B | STAT5B | 15700 |
| signal transducer and activator of transcription 6, | STAT6 | 15701 |
| interleukin-4 induced | | |
| transcriptional adaptor 2A | TADA2A | 15702 |
| transcriptional adaptor 2B | TADA2B | 15703 |
| TATA-box binding protein associated factor 1 | TAF1 | 15704 |
| T-cell acute lymphocytic leukemia 1 | TAL1 | 15705 |
| T-cell acute lymphocytic leukemia 2 | TAL2 | 15706 |
| Taxi (human T-cell leukemia virus type I) binding | TAX1BP1 | 15707 |
| protein 1 | | |
| Taxi (human T-cell leukemia virus type I) binding | TAX1BP3 | 15708 |
| protein 3 | | |
| T-box transcription factor T-bet | Tbet | 15709 |
| TATA-box binding protein | TBP | 15710 |
| TATA-box binding protein like 1 | TBPL1 | 15711 |
| TATA-box binding protein like 2 | TBPL2 | 15712 |
| T-box, brain 1 | TBR1 | 15713 |
| T-box 1 | TBX1 | 15714 |
| T-box 10 | TBX10 | 15715 |
| T-box 15 | TBX15 | 15716 |
| T-box 18 | TBX18 | 15717 |
| T-box 19 | TBX19 | 15718 |
| T-box 2 | TBX2 | 15719 |
| T-box 20 | TBX20 | 15720 |
| T-box 21 | TBX21 | 15721 |
| T-box 22 | TBX22 | 15722 |
| T-box 3 | TBX3 | 15723 |
| T-box 4 | TBX4 | 15724 |
| T-box 5 | TBX5 | 15725 |
| T-box 6 | TBX6 | 15726 |
| transcription factor 12 | TCF12 | 15727 |
| transcription factor 15 (basic helix-loop-helix) | TCF15 | 15728 |
| transcription factor 19 | TCF19 | 15729 |
| transcription factor 20 (AR1) | TCF20 | 15730 |
| transcription factor 21 | TCF21 | 15731 |
| transcription factor 23 | TCF23 | 15732 |
| transcription factor 24 | TCF24 | 15733 |
| transcription factor 25 (basic helix-loop-helix) | TCF25 | 15734 |
| transcription factor 3 | TCF3 | 15735 |
| transcription factor 4 | TCF4 | 15736 |
| transcription factor 7 (T-cell specific, HMG-box, | TCF7 | 15737 |
| TCF1) | | |
| transcription factor 7 like 1 | TCF7L1 | 15738 |
| transcription factor 7 like 2 | TCF7L2 | 15739 |
| transcription factor-like 5 (basic helix-loop-helix) | TCFL5 | 15740 |
| TEA domain transcription factor 1 | TEAD1 | 15741 |
| TEA domain transcription factor 2 | TEAD2 | 15742 |
| TEA domain transcription factor 3 | TEAD3 | 15743 |
| TEA domain transcription factor 4 | TEAD4 | 15744 |
| thyrotrophic embryonic factor | TEF | 15745 |
| telomeric repeat binding factor (NIMA-interacting) 1 | TERF1 | 15746 |
| telomeric repeat binding factor 2 | TERF2 | 15747 |
| tet methylcytosine dioxygenase 1 | TET1 | 15748 |
| tet methylcytosine dioxygenase 2 | TET2 | 15749 |
| tet methylcytosine dioxygenase 3 | TET3 | 15750 |
| transcription factor A, mitochondrial | TFAM | 15751 |
| transcription factor AP-2 alpha (activating enhancer | TFAP2A | 15752 |
| binding protein 2 alpha) | | |
| transcription factor AP-2 beta (activating enhancer | TFAP2B | 15753 |
| binding protein 2 beta) | | |
| transcription factor AP-2 gamma (activating enhancer | TFAP2C | 15754 |
| binding protein 2 gamma) | | |
| transcription factor AP-2 delta (activating enhancer | TFAP2D | 15755 |
| binding protein 2 delta) | | |
| transcription factor AP-2 epsilon (activating enhancer | TFAP2E | 15756 |
| binding protein 2 epsilon) | | |
| transcription factor AP-4 (activating enhancer binding | TFAP4 | 15757 |
| protein 4) | | |
| transcription factor B1, mitochondrial | TFB1M | 15758 |
| transcription factor B2, mitochondrial | TFB2M | 15759 |
| transcription factor CP2 | TFCP2 | 15760 |
| transcription factor CP2-like 1 | TFCP2L1 | 15761 |
| transcription factor Dp-1 | TFDP1 | 15762 |
| transcription factor Dp-2 (E2F dimerization partner 2) | TFDP2 | 15763 |
| transcription factor Dp family member 3 | TFDP3 | 15764 |
| transcription factor binding to IGHM enhancer 3 | TFE3 | 15765 |
| transcription factor EB | TFEB | 15766 |
| transcription factor EC | TFEC | 15767 |
| TGFB induced factor homeobox 1 | TGIF1 | 15768 |
| TGFB induced factor homeobox 2 | TGIF2 | 15769 |
| TGFB induced factor homeobox 2 like, X-linked | TGIF2LX | 15770 |
| TGFB induced factor homeobox 2 like, Y-linked | TGIF2LY | 15771 |
| THAP domain containing, apoptosis associated protein | THAP1 | 15772 |
| 1 | | |
| THAP domain containing 10 | THAP10 | 15773 |
| THAP domain containing 11 | THAP11 | 15774 |
| THAP domain containing 12 | THAP12 | 15775 |
| THAP domain containing, apoptosis associated protein | THAP2 | 15776 |
| 2 | | |
| THAP domain containing, apoptosis associated protein | THAP3 | 15777 |
| 3 | | |
| THAP domain containing 4 | THAP4 | 15778 |
| THAP domain containing 5 | THAP5 | 15779 |
| THAP domain containing 6 | THAP6 | 15780 |
| THAP domain containing 7 | THAP7 | 15781 |
| THAP domain containing 8 | THAP8 | 15782 |
| THAP domain containing 9 | THAP9 | 15783 |
| Th inducing POZ-Kruppel Factor | ThPOK | 15784 |
| thyroid hormone receptor, alpha | THRA | 15785 |
| thyroid hormone receptor, beta | THRB | 15786 |
| T-cell leukemia homeobox 1 | TLX1 | 15787 |
| T-cell leukemia homeobox 2 | TLX2 | 15788 |
| T-cell leukemia homeobox 3 | TLX3 | 15789 |
| target of EGR1, member 1 (nuclear) | TOE1 | 15790 |
| tonsoku-like, DNA repair protein | TONSL | 15791 |
| topoisomerase I binding, arginine/serine-rich, E3 | TOPORS | 15792 |
| ubiquitin protein ligase | | |
| thymocyte selection associated high mobility group | TOX | 15793 |
| box | | |
| TOX high mobility group box family member 2 | TOX2 | 15794 |
| TOX high mobility group box family member 3 | TOX3 | 15795 |
| TOX high mobility group box family member 4 | TOX4 | 15796 |
| tumor protein p53 | TP53 | 15797 |
| tumor protein p63 | TP63 | 15798 |
| tumor protein p73 | TP73 | 15799 |
| tetra-peptide repeat homeobox 1 | TPRX1 | 15800 |
| tetra-peptide repeat homeobox-like | TPRXL | 15801 |
| transcriptional regulating factor 1 | TRERF1 | 15802 |
| trichorhinophalangeal syndrome I | TRPS1 | 15803 |
| TSC22 domain family member 1 | TSC22D1 | 15804 |
| TSC22 domain family member 2 | TSC22D2 | 15805 |
| TSC22 domain family member 3 | TSC22D3 | 15806 |
| TSC22 domain family member 4 | TSC22D4 | 15807 |
| teashirt zinc finger homeobox 1 | TSHZ1 | 15808 |
| teashirt zinc finger homeobox 2 | TSHZ2 | 15809 |
| teashirt zinc finger homeobox 3 | TSHZ3 | 15810 |
| transcription termination factor, RNA polymerase I | TTF1 | 15811-15812 |
| transcription termination factor, RNA polymerase II | TTF2 | 15813-15814 |
| tubby bipartite transcription factor | TUB | 15815 |
| twist family bHLH transcription factor 1 | TWIST1 | 15816 |
| twist family bHLH transcription factor 2 | TWIST2 | 15817 |
| upstream binding protein 1 (LBP-1a) | UBP1 | 15818 |
| upstream binding transcription factor, RNA | UBTF | 15819 |
| polymerase I | | |
| upstream binding transcription factor, RNA | UBTFL1 | 15820 |
| polymerase I-like 1 | | |
| upstream binding transcription factor, RNA | UBTFL6 | 15821 |
| polymerase I-like 6 (pseudogene) | | |
| UNC homeobox | UNCX | 15822 |
| unkempt family zinc finger | UNK | 15823 |
| unkempt family like zinc finger | UNKL | 15824 |
| upstream transcription factor 1 | USF1 | 15825 |
| upstream transcription factor 2, c-fos interacting | USF2 | 15826 |
| upstream transcription factor family member 3 | USF3 | 15827 |
| undifferentiated embryonic cell transcription factor 1 | UTF1 | 15828 |
| ventral anterior homeobox 1 | VAX1 | 15829 |
| ventral anterior homeobox 2 | VAX2 | 15830 |
| vitamin D (1,25-dihydroxyvitamin D3) receptor | VDR | 15831 |
| VENT homeobox | VENTX | 15832 |
| vascular endothelial zinc finger 1 | VEZF1 | 15833 |
| visual system homeobox 1 | VSX1 | 15834 |
| visual system homeobox 2 | VSX2 | 15835 |
| WD repeat and HMG-box DNA binding protein 1 | WDHD1 | 15836 |
| Wolf-Hirschhorn syndrome candidate 1 | WHSC1 | 15837 |
| widely interspaced zinc finger motifs | WIZ | 15838 |
| Wilms tumor 1 | WT1 | 15839 |
| X-box binding protein 1 | XBP1 | 15840 |
| Y-box binding protein 1 | YBX1 | 15841 |
| Y-box binding protein 2 | YBX2 | 15842 |
| Y-box binding protein 3 | YBX3 | 15843 |
| YEATS domain containing 2 | YEATS2 | 15844 |
| YEATS domain containing 4 | YEATS4 | 15845 |
| YY1 transcription factor | YY1 | 15846 |
| YY2 transcription factor | YY2 | 15847 |
| zinc finger BED-type containing 1 | ZBED1 | 15848 |
| zinc finger BED-type containing 2 | ZBED2 | 15849 |
| zinc finger BED-type containing 3 | ZBED3 | 15850 |
| zinc finger BED-type containing 4 | ZBED4 | 15851 |
| zinc finger BED-type containing 5 | ZBED5 | 15852 |
| zinc finger, BED-type containing 6 | ZBED6 | 15853 |
| Z-DNA binding protein 1 | ZBP1 | 15854-15855 |
| zinc finger and BTB domain containing 1 | ZBTB1 | 15856 |
| zinc finger and BTB domain containing 10 | ZBTB10 | 15857 |
| zinc finger and BTB domain containing 11 | ZBTB11 | 15858 |
| zinc finger and BTB domain containing 12 | ZBTB12 | 15859 |
| zinc finger and BTB domain containing 14 | ZBTB14 | 15860 |
| zinc finger and BTB domain containing 16 | ZBTB16 | 15861 |
| zinc finger and BTB domain containing 17 | ZBTB17 | 15862 |
| zinc finger and BTB domain containing 18 | ZBTB18 | 15863 |
| zinc finger and BTB domain containing 2 | ZBTB2 | 15864 |
| zinc finger and BTB domain containing 20 | ZBTB20 | 15865 |
| zinc finger and BTB domain containing 21 | ZBTB21 | 15866 |
| zinc finger and BTB domain containing 22 | ZBTB22 | 15867 |
| zinc finger and BTB domain containing 24 | ZBTB24 | 15868 |
| zinc finger and BTB domain containing 25 | ZBTB25 | 15869 |
| zinc finger and BTB domain containing 26 | ZBTB26 | 15870 |
| zinc finger and BTB domain containing 3 | ZBTB3 | 15871 |
| zinc finger and BTB domain containing 32 | ZBTB32 | 15872 |
| zinc finger and BTB domain containing 33 | ZBTB33 | 15873 |
| zinc finger and BTB domain containing 34 | ZBTB34 | 15874 |
| zinc finger and BTB domain containing 37 | ZBTB37 | 15875 |
| zinc finger and BTB domain containing 38 | ZBTB38 | 15876 |
| zinc finger and BTB domain containing 39 | ZBTB39 | 15877 |
| zinc finger and BTB domain containing 4 | ZBTB4 | 15878 |
| zinc finger and BTB domain containing 40 | ZBTB40 | 15879 |
| zinc finger and BTB domain containing 41 | ZBTB41 | 15880 |
| zinc finger and BTB domain containing 42 | ZBTB42 | 15881 |
| zinc finger and BTB domain containing 43 | ZBTB43 | 15882 |
| zinc finger and BTB domain containing 44 | ZBTB44 | 15883 |
| zinc finger and BTB domain containing 45 | ZBTB45 | 15884 |
| zinc finger and BTB domain containing 46 | ZBTB46 | 15885 |
| zinc finger and BTB domain containing 47 | ZBTB47 | 15886 |
| zinc finger and BTB domain containing 48 | ZBTB48 | 15887 |
| zinc finger and BTB domain containing 49 | ZBTB49 | 15888 |
| zinc finger and BTB domain containing 5 | ZBTB5 | 15889 |
| zinc finger and BTB domain containing 6 | ZBTB6 | 15890 |
| zinc finger and BTB domain containing 7A | ZBTB7A | 15891 |
| zinc finger and BTB domain containing 7B | ZBTB7B | 15892 |
| zinc finger and BTB domain containing 7C | ZBTB7C | 15893 |
| zinc finger and BTB domain containing 8A | ZBTB8A | 15894 |
| zinc finger and BTB domain containing 9 | ZBTB9 | 15895 |
| zinc finger CCCH-type containing 10 | ZC3H10 | 15896 |
| zinc finger CCCH-type containing 11A | ZC3H11A | 15897 |
| zinc finger CCCH-type containing 12A | ZC3H12A | 15898 |
| zinc finger CCCH-type containing 12B | ZC3H12B | 15899 |
| zinc finger CCCH-type containing 13 | ZC3H13 | 15900 |
| zinc finger CCCH-type containing 14 | ZC3H14 | 15901 |
| zinc finger CCCH-type containing 15 | ZC3H15 | 15902 |
| zinc finger CCCH-type containing 18 | ZC3H18 | 15903 |
| zinc finger CCCH-type containing 3 | ZC3H3 | 15904 |
| zinc finger CCCH-type containing 4 | ZC3H4 | 15905 |
| zinc finger CCCH-type containing 6 | ZC3H6 | 15906 |
| zinc finger CCCH-type containing 7A | ZC3H7A | 15907 |
| zinc finger CCCH-type containing 7B | ZC3H7B | 15908 |
| zinc finger CCCH-type containing 8 | ZC3H8 | 15909 |
| zinc finger CCHC-type containing 11 | ZCCHC11 | 15910 |
| zinc finger CCHC-type containing 6 | ZCCHC6 | 15911 |
| zinc finger E-box binding homeobox 1 | ZEB1 | 15912 |
| zinc finger E-box binding homeobox 2 | ZEB2 | 15913 |
| zinc finger and AT-hook domain containing | ZFAT | 15914 |
| zinc finger homeobox 2 | ZFHX2 | 15915 |
| zinc finger homeobox 3 | ZFHX3 | 15916 |
| zinc finger homeobox 4 | ZFHX4 | 15917 |
| ZFP1 zinc finger protein | ZFP1 | 15918 |
| ZFP14 zinc finger protein | ZFP14 | 15919 |
| ZFP2 zinc finger protein | ZFP2 | 15920 |
| ZFP28 zinc finger protein | ZFP28 | 15921 |
| ZFP3 zinc finger protein | ZFP3 | 15922 |
| ZFP30 zinc finger protein | ZFP30 | 15923 |
| ZFP36 ring finger protein-like 1 | ZFP36L1 | 15924 |
| ZFP36 ring finger protein-like 2 | ZFP36L2 | 15925 |
| ZFP37 zinc finger protein | ZFP37 | 15926 |
| ZFP41 zinc finger protein | ZFP41 | 15927 |
| ZFP42 zinc finger protein | ZFP42 | 15928 |
| ZFP57 zinc finger protein | ZFP57 | 15929 |
| ZFP62 zinc finger protein | ZFP62 | 15930 |
| ZFP64 zinc finger protein | ZFP64 | 15931 |
| ZFP69 zinc finger protein | ZFP69 | 15932-15933 |
| ZFP69 zinc finger protein B | ZFP69B | 15934 |
| ZFP82 zinc finger protein | ZFP82 | 15935 |
| ZFP90 zinc finger protein | ZFP90 | 15936 |
| ZFP91 zinc finger protein | ZFP91 | 15937 |
| ZFP92 zinc finger protein | ZFP92 | 15938 |
| zinc finger protein, FOG family member 1 | ZFPM1 | 15939 |
| zinc finger protein, FOG family member 2 | ZFPM2 | 15940 |
| zinc finger protein, X-linked | ZFX | 15941 |
| zinc finger protein, Y-linked | ZFY | 15942 |
| zinc finger, FYVE domain containing 26 | ZFYVE26 | 15943 |
| zinc finger, GATA-like protein 1 | ZGLP1 | 15944 |
| zinc finger CCCH-type and G-patch domain | ZGPAT | 15945 |
| containing | | |
| zinc fingers and homeoboxes 1 | ZHX1 | 15946 |
| zinc fingers and homeoboxes 2 | ZHX2 | 15947 |
| zinc fingers and homeoboxes 3 | ZHX3 | 15948 |
| Zic family member 1 | ZIC1 | 15949 |
| Zic family member 2 | ZIC2 | 15950 |
| Zic family member 3 | ZIC3 | 15951 |
| Zic family member 4 | ZIC4 | 15952 |
| Zic family member 5 | ZIC5 | 15953 |
| zinc finger protein interacting with K protein 1 | ZIK1 | 15954 |
| zinc finger, imprinted 2 | ZIM2 | 15955 |
| zinc finger, imprinted 3 | ZIM3 | 15956 |
| zinc finger with KRAB and SCAN domains 1 | ZKSCAN1 | 15957 |
| zinc finger with KRAB and SCAN domains 2 | ZKSCAN2 | 15958 |
| zinc finger with KRAB and SCAN domains 3 | ZKSCAN3 | 15959 |
| zinc finger with KRAB and SCAN domains 4 | ZKSCAN4 | 15960 |
| zinc finger with KRAB and SCAN domains 5 | ZKSCAN5 | 15961 |
| zinc finger with KRAB and SCAN domains 7 | ZKSCAN7 | 15962 |
| zinc finger with KRAB and SCAN domains 8 | ZKSCAN8 | 15963 |
| zinc finger matrin-type 1 | ZMAT1 | 15964 |
| zinc finger matrin-type 2 | ZMAT2 | 15965 |
| zinc finger matrin-type 3 | ZMAT3 | 15966 |
| zinc finger matrin-type 4 | ZMAT4 | 15967 |
| zinc finger matrin-type 5 | ZMAT5 | 15968 |
| zinc finger protein 10 | ZNF10 | 15969 |
| zinc finger protein 100 | ZNF100 | 15970 |
| zinc finger protein 101 | ZNF101 | 15971 |
| zinc finger protein 106 | ZNF106 | 15972 |
| zinc finger protein 107 | ZNF107 | 15973 |
| zinc finger protein 112 | ZNF112 | 15974 |
| zinc finger protein 114 | ZNF114 | 15975 |
| zinc finger protein 117 | ZNF117 | 15976 |
| zinc finger protein 12 | ZNF12 | 15977 |
| zinc finger protein 121 | ZNF121 | 15978 |
| zinc finger protein 124 | ZNF124 | 15979 |
| zinc finger protein 131 | ZNF131 | 15980 |
| zinc finger protein 132 | ZNF132 | 15981 |
| zinc finger protein 133 | ZNF133 | 15982 |
| zinc finger protein 134 | ZNF134 | 15983 |
| zinc finger protein 135 | ZNF135 | 15984 |
| zinc finger protein 136 | ZNF136 | 15985 |
| zinc finger protein 137, pseudogene | ZNF137P | 15986 |
| zinc finger protein 138 | ZNF138 | 15987 |
| zinc finger protein 14 | ZNF14 | 15988 |
| zinc finger protein 140 | ZNF140 | 15989 |
| zinc finger protein 141 | ZNF141 | 15990 |
| zinc finger protein 142 | ZNF142 | 15991 |
| zinc finger protein 143 | ZNF143 | 15992 |
| zinc finger protein 146 | ZNF146 | 15993 |
| zinc finger protein 148 | ZNF148 | 15994 |
| zinc finger protein 154 | ZNF154 | 15995 |
| zinc finger protein 155 | ZNF155 | 15996 |
| zinc finger protein 157 | ZNF157 | 15997 |
| zinc finger protein 16 | ZNF16 | 15998 |
| zinc finger protein 160 | ZNF160 | 15999 |
| zinc finger protein 165 | ZNF165 | 16000 |
| zinc finger protein 169 | ZNF169 | 16001 |
| zinc finger protein 17 | ZNF17 | 16002 |
| zinc finger protein 174 | ZNF174 | 16003 |
| zinc finger protein 175 | ZNF175 | 16004 |
| zinc finger protein 18 | ZNF18 | 16005 |
| zinc finger protein 180 | ZNF180 | 16006 |
| zinc finger protein 181 | ZNF181 | 16007 |
| zinc finger protein 182 | ZNF182 | 16008 |
| zinc finger protein 184 | ZNF184 | 16009 |
| zinc finger protein 189 | ZNF189 | 16010 |
| zinc finger protein 19 | ZNF19 | 16011 |
| zinc finger protein 195 | ZNF195 | 16012 |
| zinc finger protein 197 | ZNF197 | 16013 |
| zinc finger protein 2 | ZNF2 | 16014 |
| zinc finger protein 20 | ZNF20 | 16015-16016 |
| zinc finger protein 200 | ZNF200 | 16017 |
| zinc finger protein 202 | ZNF202 | 16018 |
| zinc finger protein 205 | ZNF205 | 16019 |
| zinc finger protein 207 | ZNF207 | 16020 |
| zinc finger protein 208 | ZNF208 | 16021 |
| zinc finger protein 211 | ZNF211 | 16022 |
| zinc finger protein 212 | ZNF212 | 16023 |
| zinc finger protein 213 | ZNF213 | 16024 |
| zinc finger protein 214 | ZNF214 | 16025 |
| zinc finger protein 215 | ZNF215 | 16026 |
| zinc finger protein 217 | ZNF217 | 16027 |
| zinc finger protein 219 | ZNF219 | 16028 |
| zinc finger protein 22 | ZNF22 | 16029 |
| zinc finger protein 221 | ZNF221 | 16030 |
| zinc finger protein 223 | ZNF223 | 16031 |
| zinc finger protein 224 | ZNF224 | 16032 |
| zinc finger protein 225 | ZNF225 | 16033-16034 |
| zinc finger protein 226 | ZNF226 | 16035 |
| zinc finger protein 227 | ZNF227 | 16036 |
| zinc finger protein 229 | ZNF229 | 16037 |
| zinc finger protein 23 | ZNF23 | 16038 |
| zinc finger protein 230 | ZNF230 | 16039-16040 |
| zinc finger protein 232 | ZNF232 | 16041 |
| zinc finger protein 233 | ZNF233 | 16042-16043 |
| zinc finger protein 234 | ZNF234 | 16044 |
| zinc finger protein 235 | ZNF235 | 16045 |
| zinc finger protein 236 | ZNF236 | 16046 |
| zinc finger protein 239 | ZNF239 | 16047 |
| zinc finger protein 24 | ZNF24 | 16048 |
| zinc finger protein 248 | ZNF248 | 16049 |
| zinc finger protein 25 | ZNF25 | 16050 |
| zinc finger protein 250 | ZNF250 | 16051 |
| zinc finger protein 251 | ZNF251 | 16052 |
| zinc finger protein 252, pseudogene | ZNF252P | 16053 |
| zinc finger protein 253 | ZNF253 | 16054 |
| zinc finger protein 254 | ZNF254 | 16055 |
| zinc finger protein 256 | ZNF256 | 16056 |
| zinc finger protein 257 | ZNF257 | 16057 |
| zinc finger protein 26 | ZNF26 | 16058 |
| zinc finger protein 260 | ZNF260 | 16059 |
| zinc finger protein 263 | ZNF263 | 16060 |
| zinc finger protein 264 | ZNF264 | 16061 |
| zinc finger protein 266 | ZNF266 | 16062 |
| zinc finger protein 267 | ZNF267 | 16063 |
| zinc finger protein 268 | ZNF268 | 16064 |
| zinc finger protein 273 | ZNF273 | 16065 |
| zinc finger protein 274 | ZNF274 | 16066 |
| zinc finger protein 275 | ZNF275 | 16067 |
| zinc finger protein 276 | ZNF276 | 16068 |
| zinc finger protein 277 | ZNF277 | 16069 |
| zinc finger protein 28 | ZNF28 | 16070 |
| zinc finger protein 280A | ZNF280A | 16071 |
| zinc finger protein 280B | ZNF280B | 16072 |
| zinc finger protein 280C | ZNF280C | 16073 |
| zinc finger protein 280D | ZNF280D | 16074 |
| zinc finger protein 281 | ZNF281 | 16075 |
| zinc finger protein 282 | ZNF282 | 16076 |
| zinc finger protein 283 | ZNF283 | 16077 |
| zinc finger protein 284 | ZNF284 | 16078 |
| zinc finger protein 285 | ZNF285 | 16079 |
| zinc finger protein 286A | ZNF286A | 16080 |
| zinc finger protein 286B | ZNF286B | 16081 |
| zinc finger protein 287 | ZNF287 | 16082 |
| zinc finger protein 292 | ZNF292 | 16083 |
| zinc finger protein 296 | ZNF296 | 16084 |
| zinc finger protein 3 | ZNF3 | 16085 |
| zinc finger protein 30 | ZNF30 | 16086 |
| zinc finger protein 300 | ZNF300 | 16087 |
| zinc finger protein 302 | ZNF302 | 16088 |
| zinc finger protein 304 | ZNF304 | 16089 |
| zinc finger protein 311 | ZNF311 | 16090 |
| zinc finger protein 316 | ZNF316 | 16091 |
| zinc finger protein 317 | ZNF317 | 16092 |
| zinc finger protein 318 | ZNF318 | 16093 |
| zinc finger protein 319 | ZNF319 | 16094 |
| zinc finger protein 32 | ZNF32 | 16095 |
| zinc finger protein 320 | ZNF320 | 16096 |
| zinc finger protein 322 | ZNF322 | 16097 |
| zinc finger protein 324 | ZNF324 | 16098 |
| zinc finger protein 324B | ZNF324B | 16099 |
| zinc finger protein 326 | ZNF326 | 16100 |
| zinc finger protein 329 | ZNF329 | 16101 |
| zinc finger protein 331 | ZNF331 | 16102 |
| zinc finger protein 333 | ZNF333 | 16103 |
| zinc finger protein 334 | ZNF334 | 16104 |
| zinc finger protein 335 | ZNF335 | 16105 |
| zinc finger protein 337 | ZNF337 | 16106 |
| zinc finger protein 33A | ZNF33A | 16107 |
| zinc finger protein 33B | ZNF33B | 16108 |
| zinc finger protein 34 | ZNF34 | 16109 |
| zinc finger protein 341 | ZNF341 | 16110 |
| zinc finger protein 343 | ZNF343 | 16111 |
| zinc finger protein 345 | ZNF345 | 16112 |
| zinc finger protein 346 | ZNF346 | 16113 |
| zinc finger protein 347 | ZNF347 | 16114 |
| zinc finger protein 35 | ZNF35 | 16115 |
| zinc finger protein 350 | ZNF350 | 16116 |
| zinc finger protein 354A | ZNF354A | 16117 |
| zinc finger protein 354B | ZNF354B | 16118 |
| zinc finger protein 354C | ZNF354C | 16119 |
| zinc finger protein 355, pseudogene | ZNF355P | 16120 |
| zinc finger protein 358 | ZNF358 | 16121 |
| zinc finger protein 362 | ZNF362 | 16122 |
| zinc finger protein 365 | ZNF365 | 16123-16124 |
| zinc finger protein 366 | ZNF366 | 16125 |
| zinc finger protein 367 | ZNF367 | 16126 |
| zinc finger protein 37A | ZNF37A | 16127 |
| zinc finger protein 382 | ZNF382 | 16128 |
| zinc finger protein 383 | ZNF383 | 16129 |
| zinc finger protein 384 | ZNF384 | 16130 |
| zinc finger protein 385A | ZNF385A | 16131 |
| zinc finger protein 385B | ZNF385B | 16132 |
| zinc finger protein 385C | ZNF385C | 16133 |
| zinc finger protein 385D | ZNF385D | 16134 |
| zinc finger protein 391 | ZNF391 | 16135 |
| zinc finger protein 394 | ZNF394 | 16136 |
| zinc finger protein 395 | ZNF395 | 16137 |
| zinc finger protein 396 | ZNF396 | 16138 |
| zinc finger protein 397 | ZNF397 | 16139 |
| zinc finger protein 398 | ZNF398 | 16140 |
| zinc finger protein 404 | ZNF404 | 16141 |
| zinc finger protein 407 | ZNF407 | 16142 |
| zinc finger protein 408 | ZNF408 | 16143 |
| zinc finger protein 41 | ZNF41 | 16144 |
| zinc finger protein 410 | ZNF410 | 16145 |
| zinc finger protein 414 | ZNF414 | 16146 |
| zinc finger protein 415 | ZNF415 | 16147 |
| zinc finger protein 416 | ZNF416 | 16148 |
| zinc finger protein 417 | ZNF417 | 16149 |
| zinc finger protein 418 | ZNF418 | 16150 |
| zinc finger protein 419 | ZNF419 | 16151 |
| zinc finger protein 420 | ZNF420 | 16152 |
| zinc finger protein 423 | ZNF423 | 16153 |
| zinc finger protein 425 | ZNF425 | 16154 |
| zinc finger protein 426 | ZNF426 | 16155 |
| zinc finger protein 428 | ZNF428 | 16156 |
| zinc finger protein 429 | ZNF429 | 16157 |
| zinc finger protein 43 | ZNF43 | 16158 |
| zinc finger protein 430 | ZNF430 | 16159 |
| zinc finger protein 431 | ZNF431 | 16160 |
| zinc finger protein 432 | ZNF432 | 16161 |
| zinc finger protein 433 | ZNF433 | 16162 |
| zinc finger protein 436 | ZNF436 | 16163 |
| zinc finger protein 438 | ZNF438 | 16164 |
| zinc finger protein 439 | ZNF439 | 16165 |
| zinc finger protein 44 | ZNF44 | 16166 |
| zinc finger protein 440 | ZNF440 | 16167 |
| zinc finger protein 441 | ZNF441 | 16168 |
| zinc finger protein 442 | ZNF442 | 16169 |
| zinc finger protein 443 | ZNF443 | 16170 |
| zinc finger protein 444 | ZNF444 | 16171 |
| zinc finger protein 445 | ZNF445 | 16172 |
| zinc finger protein 446 | ZNF446 | 16173 |
| zinc finger protein 449 | ZNF449 | 16174 |
| zinc finger protein 45 | ZNF45 | 16175 |
| zinc finger protein 451 | ZNF451 | 16176 |
| zinc finger protein 454 | ZNF454 | 16177 |
| zinc finger protein 460 | ZNF460 | 16178 |
| zinc finger protein 461 | ZNF461 | 16179 |
| zinc finger protein 462 | ZNF462 | 16180 |
| zinc finger protein 467 | ZNF467 | 16181 |
| zinc finger protein 468 | ZNF468 | 16182 |
| zinc finger protein 469 | ZNF469 | 16183 |
| zinc finger protein 470 | ZNF470 | 16184 |
| zinc finger protein 471 | ZNF471 | 16185 |
| zinc finger protein 473 | ZNF473 | 16186 |
| zinc finger protein 474 | ZNF474 | 16187-16188 |
| zinc finger protein 479 | ZNF479 | 16189 |
| zinc finger protein 48 | ZNF48 | 16190 |
| zinc finger protein 480 | ZNF480 | 16191 |
| zinc finger protein 483 | ZNF483 | 16192 |
| zinc finger protein 484 | ZNF484 | 16193 |
| zinc finger protein 485 | ZNF485 | 16194 |
| zinc finger protein 486 | ZNF486 | 16195 |
| zinc finger protein 487 | ZNF487 | 16196 |
| zinc finger protein 488 | ZNF488 | 16197 |
| zinc finger protein 490 | ZNF490 | 16198 |
| zinc finger protein 491 | ZNF491 | 16199 |
| zinc finger protein 492 | ZNF492 | 16200 |
| zinc finger protein 493 | ZNF493 | 16201 |
| zinc finger protein 496 | ZNF496 | 16202 |
| zinc finger protein 497 | ZNF497 | 16203 |
| zinc finger protein 500 | ZNF500 | 16204 |
| zinc finger protein 501 | ZNF501 | 16205 |
| zinc finger protein 502 | ZNF502 | 16206 |
| zinc finger protein 503 | ZNF503 | 16207 |
| zinc finger protein 506 | ZNF506 | 16208 |
| zinc finger protein 507 | ZNF507 | 16209 |
| zinc finger protein 510 | ZNF510 | 16210 |
| zinc finger protein 511 | ZNF511 | 16211 |
| zinc finger protein 512 | ZNF512 | 16212 |
| zinc finger protein 512B | ZNF512B | 16213 |
| zinc finger protein 513 | ZNF513 | 16214 |
| zinc finger protein 514 | ZNF514 | 16215 |
| zinc finger protein 516 | ZNF516 | 16216 |
| zinc finger protein 517 | ZNF517 | 16217 |
| zinc finger protein 518A | ZNF518A | 16218 |
| zinc finger protein 518B | ZNF518B | 16219 |
| zinc finger protein 519 | ZNF519 | 16220 |
| zinc finger protein 521 | ZNF521 | 16221 |
| zinc finger protein 524 | ZNF524 | 16222 |
| zinc finger protein 526 | ZNF526 | 16223 |
| zinc finger protein 527 | ZNF527 | 16224 |
| zinc finger protein 528 | ZNF528 | 16225 |
| zinc finger protein 529 | ZNF529 | 16226 |
| zinc finger protein 530 | ZNF530 | 16227 |
| zinc finger protein 532 | ZNF532 | 16228 |
| zinc finger protein 534 | ZNF534 | 16229 |
| zinc finger protein 536 | ZNF536 | 16230 |
| zinc finger protein 540 | ZNF540 | 16231 |
| zinc finger protein 541 | ZNF541 | 16232 |
| zinc finger protein 542, pseudogene | ZNF542P | 16233 |
| zinc finger protein 543 | ZNF543 | 16234 |
| zinc finger protein 544 | ZNF544 | 16235 |
| zinc finger protein 546 | ZNF546 | 16236 |
| zinc finger protein 547 | ZNF547 | 16237 |
| zinc finger protein 548 | ZNF548 | 16238 |
| zinc finger protein 549 | ZNF549 | 16239 |
| zinc finger protein 550 | ZNF550 | 16240 |
| zinc finger protein 552 | ZNF552 | 16241 |
| zinc finger protein 554 | ZNF554 | 16242 |
| zinc finger protein 555 | ZNF555 | 16243 |
| zinc finger protein 556 | ZNF556 | 16244 |
| zinc finger protein 557 | ZNF557 | 16245 |
| zinc finger protein 558 | ZNF558 | 16246 |
| zinc finger protein 559 | ZNF559 | 16247 |
| zinc finger protein 56 | ZNF56 | 16248 |
| zinc finger protein 560 | ZNF560 | 16249 |
| zinc finger protein 561 | ZNF561 | 16250 |
| zinc finger protein 562 | ZNF562 | 16251 |
| zinc finger protein 563 | ZNF563 | 16252 |
| zinc finger protein 564 | ZNF564 | 16253 |
| zinc finger protein 565 | ZNF565 | 16254 |
| zinc finger protein 566 | ZNF566 | 16255 |
| zinc finger protein 567 | ZNF567 | 16256 |
| zinc finger protein 568 | ZNF568 | 16257 |
| zinc finger protein 569 | ZNF569 | 16258 |
| zinc finger protein 57 | ZNF57 | 16259 |
| zinc finger protein 570 | ZNF570 | 16260 |
| zinc finger protein 571 | ZNF571 | 16261 |
| zinc finger protein 572 | ZNF572 | 16262 |
| zinc finger protein 573 | ZNF573 | 16263 |
| zinc finger protein 574 | ZNF574 | 16264 |
| zinc finger protein 575 | ZNF575 | 16265 |
| zinc finger protein 576 | ZNF576 | 16266-16267 |
| zinc finger protein 577 | ZNF577 | 16268 |
| zinc finger protein 578 | ZNF578 | 16269 |
| zinc finger protein 579 | ZNF579 | 16270 |
| zinc finger protein 580 | ZNF580 | 16271 |
| zinc finger protein 581 | ZNF581 | 16272 |
| zinc finger protein 582 | ZNF582 | 16273 |
| zinc finger protein 583 | ZNF583 | 16274 |
| zinc finger protein 584 | ZNF584 | 16275 |
| zinc finger protein 585A | ZNF585A | 16276 |
| zinc finger protein 585B | ZNF585B | 16277 |
| zinc finger protein 586 | ZNF586 | 16278 |
| zinc finger protein 587 | ZNF587 | 16279 |
| zinc finger protein 589 | ZNF589 | 16280 |
| zinc finger protein 592 | ZNF592 | 16281 |
| zinc finger protein 593 | ZNF593 | 16282 |
| zinc finger protein 594 | ZNF594 | 16283 |
| zinc finger protein 595 | ZNF595 | 16284 |
| zinc finger protein 596 | ZNF596 | 16285 |
| zinc finger protein 597 | ZNF597 | 16286 |
| zinc finger protein 598 | ZNF598 | 16287 |
| zinc finger protein 599 | ZNF599 | 16288 |
| zinc finger protein 600 | ZNF600 | 16289 |
| zinc finger protein 605 | ZNF605 | 16290 |
| zinc finger protein 606 | ZNF606 | 16291 |
| zinc finger protein 607 | ZNF607 | 16292 |
| zinc finger protein 608 | ZNF608 | 16293 |
| zinc finger protein 609 | ZNF609 | 16294 |
| zinc finger protein 610 | ZNF610 | 16295 |
| zinc finger protein 611 | ZNF611 | 16296 |
| zinc finger protein 613 | ZNF613 | 16297 |
| zinc finger protein 614 | ZNF614 | 16298 |
| zinc finger protein 615 | ZNF615 | 16299 |
| zinc finger protein 616 | ZNF616 | 16300 |
| zinc finger protein 618 | ZNF618 | 16301 |
| zinc finger protein 619 | ZNF619 | 16302 |
| zinc finger protein 620 | ZNF620 | 16303 |
| zinc finger protein 621 | ZNF621 | 16304 |
| zinc finger protein 622 | ZNF622 | 16305 |
| zinc finger protein 623 | ZNF623 | 16306 |
| zinc finger protein 624 | ZNF624 | 16307 |
| zinc finger protein 625 | ZNF625 | 16308 |
| zinc finger protein 626 | ZNF626 | 16309 |
| zinc finger protein 627 | ZNF627 | 16310 |
| zinc finger protein 628 | ZNF628 | 16311 |
| zinc finger protein 629 | ZNF629 | 16312 |
| zinc finger protein 639 | ZNF639 | 16313 |
| zinc finger protein 641 | ZNF641 | 16314 |
| zinc finger protein 644 | ZNF644 | 16315 |
| zinc finger protein 645 | ZNF645 | 16316 |
| zinc finger protein 646 | ZNF646 | 16317 |
| zinc finger protein 648 | ZNF648 | 16318 |
| zinc finger protein 649 | ZNF649 | 16319 |
| zinc finger protein 652 | ZNF652 | 16320 |
| zinc finger protein 653 | ZNF653 | 16321 |
| zinc finger protein 654 | ZNF654 | 16322 |
| zinc finger protein 655 | ZNF655 | 16323 |
| zinc finger protein 658 | ZNF658 | 16324 |
| zinc finger protein 658B (pseudogene) | ZNF658B | 16325 |
| zinc finger protein 66 | ZNF66 | 16326 |
| zinc finger protein 660 | ZNF660 | 16327 |
| zinc finger protein 662 | ZNF662 | 16328 |
| zinc finger protein 664 | ZNF664 | 16329 |
| zinc finger protein 665 | ZNF665 | 16330 |
| zinc finger protein 667 | ZNF667 | 16331 |
| zinc finger protein 668 | ZNF668 | 16332 |
| zinc finger protein 669 | ZNF669 | 16333 |
| zinc finger protein 670 | ZNF670 | 16334 |
| zinc finger protein 671 | ZNF671 | 16335 |
| zinc finger protein 672 | ZNF672 | 16336 |
| zinc finger protein 674 | ZNF674 | 16337 |
| zinc finger protein 675 | ZNF675 | 16338 |
| zinc finger protein 676 | ZNF676 | 16339 |
| zinc finger protein 677 | ZNF677 | 16340 |
| zinc finger protein 678 | ZNF678 | 16341 |
| zinc finger protein 679 | ZNF679 | 16342 |
| zinc finger protein 680 | ZNF680 | 16343 |
| zinc finger protein 681 | ZNF681 | 16344 |
| zinc finger protein 682 | ZNF682 | 16345 |
| zinc finger protein 683 | ZNF683 | 16346 |
| zinc finger protein 684 | ZNF684 | 16347 |
| zinc finger protein 687 | ZNF687 | 16348 |
| zinc finger protein 688 | ZNF688 | 16349 |
| zinc finger protein 689 | ZNF689 | 16350 |
| zinc finger protein 69 | ZNF69 | 16351 |
| zinc finger protein 691 | ZNF691 | 16352 |
| zinc finger protein 692 | ZNF692 | 16353 |
| zinc finger protein 695 | ZNF695 | 16354 |
| zinc finger protein 696 | ZNF696 | 16355 |
| zinc finger protein 697 | ZNF697 | 16356 |
| zinc finger protein 699 | ZNF699 | 16357 |
| zinc finger protein 7 | ZNF7 | 16358 |
| zinc finger protein 70 | ZNF70 | 16359 |
| zinc finger protein 701 | ZNF701 | 16360 |
| zinc finger protein 702, pseudogene | ZNF702P | 16361 |
| zinc finger protein 703 | ZNF703 | 16362 |
| zinc finger protein 704 | ZNF704 | 16363 |
| zinc finger protein 705A | ZNF705A | 16364 |
| zinc finger protein 705D | ZNF705D | 16365 |
| zinc finger protein 705E | ZNF705E | 16366 |
| zinc finger protein 705G | ZNF705G | 16367 |
| zinc finger protein 706 | ZNF706 | 16368 |
| zinc finger protein 707 | ZNF707 | 16369 |
| zinc finger protein 708 | ZNF708 | 16370 |
| zinc finger protein 709 | ZNF709 | 16371 |
| zinc finger protein 71 | ZNF71 | 16372 |
| zinc finger protein 710 | ZNF710 | 16373 |
| zinc finger protein 711 | ZNF711 | 16374 |
| zinc finger protein 713 | ZNF713 | 16375 |
| zinc finger protein 714 | ZNF714 | 16376 |
| zinc finger protein 716 | ZNF716 | 16377 |
| zinc finger protein 717 | ZNF717 | 16378 |
| zinc finger protein 718 | ZNF718 | 16379 |
| zinc finger protein 720 | ZNF720 | 16380 |
| zinc finger protein 721 | ZNF721 | 16381 |
| zinc finger protein 724, pseudogene | ZNF724P | 16382 |
| zinc finger protein 726 | ZNF726 | 16383 |
| zinc finger protein 727 | ZNF727 | 16384 |
| zinc finger protein 729 | ZNF729 | 16385 |
| zinc finger protein 730 | ZNF730 | 16386 |
| zinc finger protein 732 | ZNF732 | 16387 |
| zinc finger protein 735 | ZNF735 | 16388 |
| zinc finger protein 737 | ZNF737 | 16389 |
| zinc finger protein 74 | ZNF74 | 16390 |
| zinc finger protein 740 | ZNF740 | 16391 |
| zinc finger protein 746 | ZNF746 | 16392 |
| zinc finger protein 747 | ZNF747 | 16393 |
| zinc finger protein 749 | ZNF749 | 16394 |
| zinc finger protein 750 | ZNF750 | 16395 |
| zinc finger protein 75a | ZNF75A | 16396 |
| zinc finger protein 75D | ZNF75D | 16397 |
| zinc finger protein 76 | ZNF76 | 16398 |
| zinc finger protein 761 | ZNF761 | 16399 |
| zinc finger protein 763 | ZNF763 | 16400 |
| zinc finger protein 764 | ZNF764 | 16401 |
| zinc finger protein 765 | ZNF765 | 16402 |
| zinc finger protein 766 | ZNF766 | 16403 |
| zinc finger protein 768 | ZNF768 | 16404 |
| zinc finger protein 77 | ZNF77 | 16405 |
| zinc finger protein 770 | ZNF770 | 16406 |
| zinc finger protein 771 | ZNF771 | 16407 |
| zinc finger protein 772 | ZNF772 | 16408 |
| zinc finger protein 773 | ZNF773 | 16409 |
| zinc finger protein 774 | ZNF774 | 16410 |
| zinc finger protein 775 | ZNF775 | 16411 |
| zinc finger protein 776 | ZNF776 | 16412 |
| zinc finger protein 777 | ZNF777 | 16413 |
| zinc finger protein 778 | ZNF778 | 16414 |
| zinc finger protein 780A | ZNF780A | 16415 |
| zinc finger protein 780B | ZNF780B | 16416 |
| zinc finger protein 781 | ZNF781 | 16417 |
| zinc finger protein 782 | ZNF782 | 16418 |
| zinc finger family member 783 | ZNF783 | 16419 |
| zinc finger protein 784 | ZNF784 | 16420 |
| zinc finger protein 785 | ZNF785 | 16421 |
| zinc finger protein 786 | ZNF786 | 16422 |
| zinc finger protein 787 | ZNF787 | 16423 |
| zinc finger family member 788 | ZNF788 | 16424 |
| zinc finger protein 789 | ZNF789 | 16425 |
| zinc finger protein 79 | ZNF79 | 16426 |
| zinc finger protein 790 | ZNF790 | 16427 |
| zinc finger protein 791 | ZNF791 | 16428 |
| zinc finger protein 792 | ZNF792 | 16429 |
| zinc finger protein 793 | ZNF793 | 16430 |
| zinc finger protein 799 | ZNF799 | 16431 |
| zinc finger protein 8 | ZNF8 | 16432 |
| zinc finger protein 80 | ZNF80 | 16433 |
| zinc finger protein 800 | ZNF800 | 16434 |
| zinc finger protein 804A | ZNF804A | 16435 |
| zinc finger protein 804B | ZNF804B | 16436 |
| zinc finger protein 805 | ZNF805 | 16437 |
| zinc finger protein 806 | ZNF806 | 16438 |
| zinc finger protein 808 | ZNF808 | 16439 |
| zinc finger protein 81 | ZNF81 | 16440 |
| zinc finger protein 813 | ZNF813 | 16441 |
| zinc finger protein 814 | ZNF814 | 16442 |
| zinc finger protein 816 | ZNF816 | 16443 |
| zinc finger protein 821 | ZNF821 | 16444 |
| zinc finger protein 823 | ZNF823 | 16445 |
| zinc finger protein 827 | ZNF827 | 16446 |
| zinc finger protein 829 | ZNF829 | 16447 |
| zinc finger protein 83 | ZNF83 | 16448 |
| zinc finger protein 830 | ZNF830 | 16449 |
| zinc finger protein 831 | ZNF831 | 16450 |
| zinc finger protein 833, pseudogene | ZNF833P | 16451 |
| zinc finger protein 835 | ZNF835 | 16452 |
| zinc finger protein 836 | ZNF836 | 16453 |
| zinc finger protein 837 | ZNF837 | 16454 |
| zinc finger protein 839 | ZNF839 | 16455 |
| zinc finger protein 84 | ZNF84 | 16456 |
| zinc finger protein 840, pseudogene | ZNF840P | 16457 |
| zinc finger protein 841 | ZNF841 | 16458 |
| zinc finger protein 843 | ZNF843 | 16459 |
| zinc finger protein 844 | ZNF844 | 16460 |
| zinc finger protein 845 | ZNF845 | 16461 |
| zinc finger protein 846 | ZNF846 | 16462 |
| zinc finger protein 85 | ZNF85 | 16463 |
| zinc finger protein 853 | ZNF853 | 16464 |
| zinc finger protein 860 | ZNF860 | 16465 |
| zinc finger protein 876, pseudogene | ZNF876P | 16466 |
| zinc finger protein 878 | ZNF878 | 16467 |
| zinc finger protein 879 | ZNF879 | 16468 |
| zinc finger protein 880 | ZNF880 | 16469 |
| zinc finger protein 891 | ZNF891 | 16470 |
| zinc finger protein 90 | ZNF90 | 16471 |
| zinc finger protein 91 | ZNF91 | 16472 |
| zinc finger protein 92 | ZNF92 | 16473 |
| zinc finger protein 93 | ZNF93 | 16474 |
| zinc finger protein 98 | ZNF98 | 16475 |
| zinc finger protein 99 | ZNF99 | 16476 |
| zinc finger, NFX1-type containing 1 | ZNFX1 | 16477 |
| zinc finger and SCAN domain containing 1 | ZSCAN1 | 16478 |
| zinc finger and SCAN domain containing 10 | ZSCAN10 | 16479 |
| zinc finger and SCAN domain containing 12 | ZSCAN12 | 16480 |
| zinc finger and SCAN domain containing 16 | ZSCAN16 | 16481 |
| zinc finger and SCAN domain containing 18 | ZSCAN18 | 16482 |
| zinc finger and SCAN domain containing 2 | ZSCAN2 | 16483 |
| zinc finger and SCAN domain containing 20 | ZSCAN20 | 16484 |
| zinc finger and SCAN domain containing 21 | ZSCAN21 | 16485 |
| zinc finger and SCAN domain containing 22 | ZSCAN22 | 16486 |
| zinc finger and SCAN domain containing 23 | ZSCAN23 | 16487 |
| zinc finger and SCAN domain containing 25 | ZSCAN25 | 16488 |
| zinc finger and SCAN domain containing 26 | ZSCAN26 | 16489 |
| zinc finger and SCAN domain containing 29 | ZSCAN29 | 16490 |
| zinc finger and SCAN domain containing 30 | ZSCAN30 | 16491 |
| zinc finger and SCAN domain containing 31 | ZSCAN31 | 16492 |
| zinc finger and SCAN domain containing 32 | ZSCAN32 | 16493 |
| zinc finger and SCAN domain containing 4 | ZSCAN4 | 16494 |
| zinc finger and SCAN domain containing 5A | ZSCAN5A | 16495 |
| zinc finger and SCAN domain containing 5B | ZSCAN5B | 16496 |
| zinc finger and SCAN domain containing 5C, | ZSCAN5CP | 16497 |
| pseudogene | | |
| zinc finger and SCAN domain containing 9 | ZSCAN9 | 16498 |
| zinc finger with UFM1-specific peptidase domain | ZUFSP | 16499 |
| zinc finger, X-linked, duplicated A | ZXDA | 16500 |
| zinc finger, X-linked, duplicated B | ZXDB | 16501 |
| ZXD family zinc finger C | ZXDC | 16502 |
| zinc finger ZZ-type containing 3 | ZZZ3 | 16503 |

[0708] In some embodiments, a T-cell of the disclosure is modified to silence or reduce expression of one or more gene(s) encoding a cell death or cell apoptosis receptor to produce an armored T-cell of the disclosure. Interaction of a death receptor and its endogenous ligand results in the initiation of apoptosis. Disruption of an expression, an activity, or an interaction of a cell death and/or cell apoptosis receptor and/or ligand render an armored T-cell of the disclosure less receptive to death signals, consequently, making the armored T cell of the disclosure more efficacious in a tumor environment. An exemplary cell death receptor which may be modified in an armored T cell of the disclosure is Fas (CD95). Exemplary cell death and/or cell apoptosis receptors and ligands of the disclosure include, but are not limited to, the exemplary receptors and ligands provided in Table 4.

TABLE 4
Exemplary Cell Death and/or Cell
Apoptosis Receptors and Ligands.

| Full Name | Abbreviation | SEQ ID NO: |
|---|---|---|
| Cluster of Differentiation 120 | CD120a | 16504-16505 |
| Death receptor 3 | DR3 | 16506 |
| Death receptor 6 | DR6 | 16507 |
| first apoptosis signal (Fas) receptor | Fas | 16508-16509 |
| | (CD95/APO-1) | |
| Fas Ligand | FasL | 16510 |
| cellular tumor antigen p53 | p53 | 16511 |
| Tumor necrosis factor receptor 1 | TNF-R1 | 16512 |
| Tumor necrosis factor receptor 2 | TNF-R2 | 16513 |
| Tumor necrosis factor-related apoptosis- | TRAIL-R1 | 16514 |
| inducing ligand receptor 1 | (DR4) | |
| Tumor necrosis factor-related apoptosis- | TRAIL-R2 | 16515 |
| inducing ligand receptor 2 | (DR5) | |
| Fas-associated protein with death domain | FADD | 16516 |
| Tumor necrosis factor receptor type 1- | TRADD | 16517 |
| associated DEATH domain protein | | |
| Bcl-2-associatcd X protein | Bax | 16518 |
| Bcl-2 homologous killer | BAK | 16519 |
| 14-3-3 protein | 14-3-3 | 16520 |
| B-cell lymphoma 2 | Bcl-2 | 16521 |
| Cytochrome C | CytC | 16522 |
| Second mitochondria-derived activator of | Smac/Diablo | 16523 |
| caspase | | |
| High temperature requirement protein A2 | HTRA2/Omi | 16524 |
| Apoptosis inducing factor | AIF | 16525 |
| Endonuclease G | EXOG | 16526 |
| Caspase 9 | Cas9 | 16527 |
| Caspase 2 | Cas2 | 16528 |
| Caspase 8 | Cas8 | 16529 |
| Caspase 10 | Cas10 | 16530 |
| Caspase 3 | Cas3 | 16531 |
| Caspase 6 | Cas6 | 16532 |
| Caspase 7 | Cas7 | 16533 |
| Tumor Necrosis Factor alpha | TNF-alpha | 16534 |
| TNF-related weak inducer of apoptosis | TWEAK | 16535 |
| TNF-related weak inducer of apoptosis | TWEAK -R | 16536 |
| receptor | | |
| Tumor necrosis factor-related apoptosis- | TRAIL | 16537 |
| inducing ligand | | |
| TNF ligand-related molecule 1 | TL1A | 16538 |
| Receptor-interacting serine/threonine- | RIP1 | 16539 |
| protein kinase 1 | | |
| Cellular inhibitor of apoptosis 1 | cIAP-1 | 16540 |
| TNF receptor-associated factor 2 | TRAF-2 | 16541 |

[0709] In some embodiments, a T-cell of the disclosure is modified to silence or reduce expression of one or more gene(s) encoding a metabolic sensing protein to produce an armored T-cell of the disclosure. Disruption to the metabolic sensing of the immunosuppressive tumor microenvironment (characterized by low levels of oxygen, pH, glucose and other molecules) by an armored T-cell of the disclosure leads to extended retention of T-cell function and, consequently, more tumor cells killed per armored T cell. For example, HIF1a and VHL play a role in T-cell function while in a hypoxic environment. An armored T-cell of the disclosure may have silenced or reduced expression of one or more genes encoding HIF1a or VHL. Genes and proteins involved in metabolic sensing include, but are not limited to, the exemplary genes and proteins provided in Table 5.

TABLE 5
Exemplary Metabolic Sensing Genes (and encoded Proteins).

| Full Name | Metabolite | Abbreviation | SEQ ID NO: |
|---|---|---|---|
| hypoxia-inducible factor 1α | Low oxygen | HIF-1α | 16542 |
| von Hippel-Lindau tumor suppressor | Low oxygen | VHL | 16543 |
| Prolyl-hydroxylase domain proteins | High oxygen | PHD proteins | |
| Glucose transporter 1 | glucose | GLUT1 | 16544 |
| Linker of Activated T cells | Amino acid (leucine) | LAT | 16545 |
| CD98 glycoprotein | Amino acid (leucine) | CD98 | 16546 |
| Alanine, serine, cysteine-preferring | Cationic Amino acid | ASCT2/Slc1a5 | 16547 |
| transporter 2 | (glutamine) | | |
| Solute carrier family 7 member 1 | Cationic Amino acids | Slc7a1 | 16548 |
| Solute carrier family 7 member 2 | Cationic Amino acids | Slc7a2 | 16549 |
| Solute carrier family 7 member 3 | Cationic Amino acids | Slc7a3 | 16550 |
| Solute carrier family 7 member 4 | Cationic Amino acids | Slc7a4 | 16551 |
| Solute carrier family 7 member 5 | Glycoprotein | Slc7a5 | 16552 |
| | associated Amino | | |
| | acids | | |
| Solute carrier family 7 member 6 | Glycoprotein | Slc7a6 | 16553 |
| | associated Amino | | |
| | acids | | |
| Solute carrier family 7 member 7 | Glycoprotein | Slc7a7 | 16554 |
| | associated Amino | | |
| | acids | | |
| Solute carrier family 7 member 8 | Glycoprotein | Slc7a8 | 16555 |
| | associated Amino | | |
| | acids | | |
| Solute carrier family 7 member 9 | Glycoprotein | Slc7a9 | 16556 |
| | associated Amino | | |
| | acids | | |
| Solute carrier family 7 member 10 | Glycoprotein | Slc7a10 | 16557 |
| | associated Amino | | |
| | acids | | |
| Solute carrier family 7 member 11 | Glycoprotein | Slc7a11 | 16558 |
| | associated Amino | | |
| | acids | | |
| Solute carrier family 7 member 13 | Glycoprotein | Slc7a13 | 16559 |
| | associated Amino | | |
| | acids | | |
| Solute carrier family 7 member 14 | Cationic Amino acids | Slc7a14 | 16560 |
| Solute carrier family 3 member 2 | Amino acid | Slc3a2 | 16561 |
| Calcium transport protein 2 | Cationic Amino acid | CAT2 | 16562 |
| | (arginine) | | |
| Calcium transport protein 3 | Cationic Amino acid | CAT3 | 16563 |
| | (arginine) | | |
| Calcium transport protein 4 | Cationic Amino acid | CAT4 | 16564 |
| | (arginine) | | |
| Bromodomain adjacent to zinc finger | Amino acid (arginine) | BAZ1B | 16565 |
| domain protein 1B | | | |
| PC4 and SFRS1-interacting protein | Amino acid (arginine) | PSIP1 | 16566 |
| Translin | Amino acid (arginine) | TSN | 16567 |
| G-protein-coupled receptors | Fatty Acid and | GPCRs | |
| | Cholesterol | | |
| T-cell Receptor, subunit alpha | Fatty Acid and | TCR alpha | 16568 |
| | Cholesterol | | |
| T-cell Receptor, subunit beta | Fatty Acid and | TCR beta | 16569 |
| | Cholesterol | | |
| T-cell Receptor, subunit zeta | Fatty Acid and | TCR zeta | 16570 |
| | Cholesterol | | |
| T-cell Receptor, subunit CD3 epsilon | Fatty Acid and | TCR CD3 epsilon | 16571 |
| | Cholesterol | | |
| T-cell Receptor, subunit CD3 | Fatty Acid and | TCR CD3 gamma | 16572 |
| gamma | Cholesterol | | |
| T-cell Receptor, subunit CD3 delta | Fatty Acid and | TCR CD3 delta | 16573 |
| | Cholesterol | | |
| peroxisome proliferator-activated | Fatty Acid and | PPARs | |
| receptors | Cholesterol | | |
| AMP-activated protein kinase | Energy homeostasis | AMPK | 16574-16575 |
| | (intracellular AMP to | | |
| | ATP ratio) | | |
| P2X purinoceptor 7 | Redox homeostasis | P2X7 | 16576 |

[0710] In some embodiments, a T-cell of the disclosure is modified to silence or reduce expression of one or more gene(s) encoding proteins that that confer sensitivity to a cancer therapy, including a monoclonal antibody, to produce an armored T-cell of the disclosure. Thus, an armored T-cell of the disclosure can function and may demonstrate superior function or efficacy whilst in the presence of a cancer therapy (e.g. a chemotherapy, a monoclonal antibody therapy, or another anti-tumor treatment). Proteins involved in conferring sensitivity to a cancer therapy include, but are not limited to, the exemplary proteins provided in Table 6.

TABLE 6
Exemplary Proteins that Confer Sensitivity to a Cancer Therapeutic.

| Full Name | Abbreviation | SEQ ID NO: |
|---|---|---|
| Copper-transporting ATPase 2 | ATP7B | 16577 |
| Breakpoint cluster region protein | BCR | 16578 |
| Abelson tyrosine-protein kinase 1 | ABL | 16579 |
| Breast cancer resistance protein | BCRP | 16580 |
| Breast cancer type 1 susceptibility protein | BRCA1 | 16581 |
| Breast cancer type 2 susceptibility protein | BRCA2 | 16582 |
| CAMPATH-1 antigen | CD52 | 16583 |
| Cytochrome P450 2D6 | CYP2D6 | 16584 |
| Deoxycytidine kinase | dCK | 16585 |
| Dihydrofolate reductase | DHFR | 16586 |
| Dihydropyrimidine dehydrogenase [NADP(+)] | DPYD | 16587 |
| Epidermal growth factor receptor | EGFR | 16588 |
| DNA excision repair protein ERCC-1 | ERCC1 | 16589 |
| Estrogen Receptor | ESR | 16590 |
| Low affinity immunoglobulin gamma Fc region | FCGR3A | 16591 |
| receptor III-A | | |
| Receptor tyrosine-protein kinase erbB-2 | HER2 or ERBB2 | 16592 |
| Insulin-like growth factor 1 receptor | IGF1R | 16593 |
| GTPase KRas | KRAS | 16594 |
| Multidrug resistance protein 1 | MDR1 or ABCB1 | 16595 |
| Methylated-DNA--protein-cysteine methyltransferase | MGMT | 16596 |
| Multidrug resistance-associated protein 1 | MRP1 or ABCC1 | 16597 |
| Progesterone Receptor | PGR | 16598 |
| Regulator of G-protein signaling 10 | RGS10 | 16599 |
| Suppressor of cytokine signaling 3 | SOCS-3 | 16600 |
| Thymidylate synthase | TYMS | 16601 |
| UDP-glucuronosyltransferase 1-1 | UGT1A1 | 16602 |

[0711] In some embodiments, a T-cell of the disclosure is modified to silence or reduce expression of one or more gene(s) encoding a growth advantage factor to produce an armored T-cell. Silencing or reducing expression of an oncogene can confer a growth advantage for an armored T-cell of the disclosure. For example, silencing or reducing expression (e.g. disrupting expression) of a TET2 gene during a CAR-T manufacturing process results in the generation of an armored CAR-T with a significant capacity for expansion and subsequent eradication of a tumor when compared to a non-armored CAR-T lacking this capacity for expansion. This strategy may be coupled to a safety switch (e.g. an iC9 safety switch of the disclosure), which allows for the targeted disruption of an armored CAR-T-cell in the event of an adverse reaction from a subject or uncontrolled growth of the armored CAR-T. Exemplary growth advantage factors include, but are not limited to, the factors provided in Table 7.

TABLE 7
Exemplary Growth Advantage Factors.

| Full Name | Abbreviation | SEQ ID NO: |
|---|---|---|
| Ten Eleven Translocation 2 | TET2 | 16603 |
| DNA (cytosine-5)-methyltransferase 3A | DNMT3A | 16604 |
| Transforming protein RhoA | RHOA | 16605 |
| Proto-oncogene vav | VAV1 | 16606 |
| Rhombotin-2 | LMO2 | 16607 |
| T-cell acute lymphocytic leukemia | TALI | 16608 |
| protein 1 | | |
| Suppressor of cytokine signaling 1 | SOCS1 | 16609 |
| herpes virus entry mediator | HVEM | 16610 |
| T cell death-associated gene 8 | TDAG8 | 16611 |
| BCL6 corepressor | BCOR | 16612 |
| B and T cell attenuator | BTLA | 16613 |
| SPARC-like protein 1 | SPARCL1 | 16614 |
| Msh homeobox 1-like protein | MSX1 | 16615 |

### Armored T-Cells “Null or Switch Receptor” Strategy

[0712] In some embodiments, a T-cell of the disclosure is modified to express a modified/chimeric checkpoint receptor to produce an armored T-cell of the disclosure.

[0713] In some embodiments, the modified/chimeric checkpoint receptor comprises a null receptor, decoy receptor or dominant negative receptor. A null receptor, decoy receptor or dominant negative receptor of the disclosure may be modified/chimeric receptor/protein. A null receptor, decoy receptor or dominant negative receptor of the disclosure may be truncated for expression of the intracellular signaling domain. Alternatively, or in addition, a null receptor, decoy receptor or dominant negative receptor of the disclosure may be mutated within an intracellular signaling domain at one or more amino acid positions that are determinative or required for effective signaling. Truncation or mutation of null receptor, decoy receptor or dominant negative receptor of the disclosure may result in loss of the receptor's capacity to convey or transduce a checkpoint signal to the cell or within the cell.

[0714] For example, a dilution or a blockage of an immunosuppressive checkpoint signal from a PD-L1 receptor expressed on the surface of a tumor cell may be achieved by expressing a modified/chimeric PD-1 null receptor on the surface of an armored T-cell of the disclosure, which effectively competes with the endogenous (non-modified) PD-1 receptors also expressed on the surface of the armored T-cell to reduce or inhibit the transduction of the immunosuppressive checkpoint signal through endogenous PD-1 receptors of the armored T cell. In this exemplary embodiment, competition between the two different receptors for binding to PD-L1 expressed on the tumor cell reduces or diminishes a level of effective checkpoint signaling, thereby enhancing a therapeutic potential of the armored T-cell expressing the PD-1 null receptor.

[0715] In some embodiments, the modified/chimeric checkpoint receptor comprises a null receptor, decoy receptor or dominant negative receptor that is a transmembrane receptor.

[0716] In some embodiments, the modified/chimeric checkpoint receptor comprises a null receptor, decoy receptor or dominant negative receptor that is a membrane-associated or membrane-linked receptor/protein.

[0717] In some embodiments, the modified/chimeric checkpoint receptor comprises a null receptor, decoy receptor or dominant negative receptor that is an intracellular receptor/protein.

[0718] In some embodiments, the modified/chimeric checkpoint receptor comprises a null receptor, decoy receptor or dominant negative receptor that is an intracellular receptor/protein. Exemplary null, decoy, or dominant negative intracellular receptors/proteins of the disclosure include, but are not limited to, signaling components downstream of an inhibitory checkpoint signal (as provided, for example, in Tables 1 and 2), a transcription factor (as provided, for example, in Table 3), a cytokine or a cytokine receptor, a chemokine or a chemokine receptor, a cell death or apoptosis receptor/ligand (as provided, for example, in Table 4), a metabolic sensing molecule (as provided, for example, in Table 5), a protein conferring sensitivity to a cancer therapy (as provided, for example, in Table 6), and an oncogene or a tumor suppressor gene (as provided, for example, in Table 7). Exemplary cytokines, cytokine receptors, chemokines and chemokine receptors of the disclosure include, but are not limited to, the cytokines and cytokine receptors as well as chemokines and chemokine receptors provided in Table 8.

TABLE 8
Exemplary Cytokines, Cytokine receptors,
Chemokines and Chemokine Receptors.

| Full Name | Abbreviation | SEQ ID NO: |
|---|---|---|
| 4-1BB Ligand | 4-1BBL | 16616 |
| Tumor necrosis factor receptor | Apo3 or TNFRSF25 | 16617 |
| superfamily member 25 | | |
| Tumor necrosis factor receptor | APRIL or TNFRSF13 | 16618 |
| superfamily member 13 | | |
| Bcl2-associated agonist of cell death | Bcl-xL or BAD | 16619 |
| Tumor necrosis factor receptor | BCMA or TNFRSF17 | 16620 |
| superfamily member 17 | | |
| C-C motif chemokine 1 | CCL1 | 16621 |
| C-C motif chemokine 11 | CCL11 | 16622 |
| C-C motif chemokine 13 | CCL13 | 16623 |
| C-C motif chemokine 14 | CCL14 | 16624 |
| C-C motif chemokine 15 | CCL15 | 16625 |
| C-C motif chemokine 16 | CCL16 | 16626 |
| C-C motif chemokine 17 | CCL17 | 16627 |
| C-C motif chemokine 18 | CCL18 | 16628 |
| C-C motif chemokine 19 | CCL19 | 16629 |
| C-C motif chemokine 2 | CCL2 | 16630 |
| C-C motif chemokine 20 | CCL20 | 16631 |
| C-C motif chemokine 21 | CCL21 | 16632 |
| C-C motif chemokine 22 | CCL22 | 16633 |
| C-C motif chemokine 23 | CCL23 | 16634 |
| C-C motif chemokine 24 | CCL24 | 16635 |
| C-C motif chemokine 25 | CCL25 | 16636 |
| C-C motif chemokine 26 | CCL26 | 16637 |
| C-C motif chemokine 27 | CCL27 | 16638 |
| C-C motif chemokine 28 | CCL28 | 16639 |
| C-C motif chemokine 3 | CCL3 | 16640 |
| C-C motif chemokine 4 | CCL4 | 16641 |
| C-C motif chemokine 5 | CCL5 | 16642 |
| C-C motif chemokine 7 | CCL7 | 16643 |
| C-C motif chemokine 8 | CCL8 | 16644 |
| C-C chemokine receptor type 1 | CCR1 | 16645 |
| C-C chemokine receptor type 10 | CCR10 | 16646 |
| C-C chemokine receptor type 11 | CCR11 | 16647 |
| C-C chemokine receptor type 2 | CCR2 | 16648 |
| C-C chemokine receptor type 3 | CCR3 | 16649 |
| C-C chemokine receptor type 4 | CCR4 | 16650 |
| C-C chemokine receptor type 5 | CCR5 | 16651 |
| C-C chemokine receptor type 6 | CCR6 | 16652 |
| C-C chemokine receptor type 7 | CCR7 | 16653 |
| C-C chemokine receptor type 8 | CCR8 | 16654 |
| C-C chemokine receptor type 9 | CCR9 | 16655 |
| Granulocyte colony-stimulating factor | CD114 or CSF3R | 16656 |
| receptor | | |
| Macrophage colony-stimulating factor 1 | CD115 or CSFIR | 16657 |
| receptor | | |
| Granulocyte-macrophage colony- | CD116 or CSF2RA | 16658 |
| stimulating factor receptor subunit alpha | | |
| Mast/stem cell growth factor receptor | CD117 or KIT | 16659 |
| Kit | | |
| Leukemia inhibitory factor receptor | CD118 or LIFR | 16660 |
| Tumor necrosis factor receptor | CD120a or TNFRSF1A | 16661 |
| superfamily member 1A | | |
| Tumor necrosis factor receptor | CD120b or TNFRSF1B | 16662 |
| superfamily member 1B | | |
| Interleukin-1 receptor type 1 | CD121a or IL1R1 | 16663 |
| Interleukin-2 receptor subunit beta | CD122 or IL2RB | 16664 |
| Interleukin-3 receptor subunit alpha | CD123 or IL3RA | 16665 |
| Interleukin-4 receptor subunit alpha | CD124 or IL4R | 16666 |
| Interleukin-6 receptor subunit alpha | CD126 or IL6R | 16667 |
| Interleukin-7 receptor subunit alpha | CD127 or IL7R | 16668 |
| Interleukin-6 receptor subunit beta | CD130 or IL6ST | 16669 |
| Cytokine receptor common subunit | CD132 or IL2RG | 16670 |
| gamma | | |
| Tumor necrosis factor ligand | CD153 or TNFSF8 | 16671 |
| superfamily member 8 | | |
| CD40 ligand | CD154 or CD40L | 16672 |
| Tumor necrosis factor ligand | CD178 or FASLG | 16673 |
| superfamily member 6 | | |
| Interleukin-12 receptor subunit beta-1 | CD212 or IL12RB1 | 16674 |
| Interleukin-13 receptor subunit alpha-1 | CD213a1 or IL13RA1 | 16675 |
| Interleukin-13 receptor subunit alpha-2 | CD213a2 or IL13RA2 | 16676 |
| Interleukin-2 receptor subunit alpha | CD25 or IL2RA | 16677 |
| CD27 antigen | CD27 | 16678 |
| Tumor necrosis factor receptor | CD30 or TNFRSF8 | 16679 |
| superfamily member 8 | | |
| T-cell surface glycoprotein CD4 | CD4 | 16680 |
| Tumor necrosis factor receptor | CD40 or TNFRSF5 | 16681 |
| superfamily member 5 | | |
| CD70 antigen | CD70 | 16682 |
| Tumor necrosis factor receptor | CD95 or FAS or | 16683 |
| superfamily member 6 | FNFRSF6 | |
| Granulocyte-macrophage colony- | CDw116 or CSF2RA | 16684 |
| stimulating factor receptor subunit alpha | | |
| Interferon gamma receptor 1 | CDw119 or IFNGR1 | 16685 |
| Interleukin-1 receptor type 2 | CDw121b or IL1R2 | 16686 |
| Interleukin-5 receptor subunit alpha | CDw125 or IL5RA | 16687 |
| Cytokine receptor common subunit beta | CDw131 or CSF2RB | 16688 |
| Tumor necrosis factor receptor | CDw137 or TNFRSF9 | 16689 |
| superfamily member 9 | | |
| Interleukin-10 receptor | CDw210 or IL10R | 16690 |
| Interleukin-17 receptor A | CDw217 or IL17RA | 16691 |
| C-X3-C motif chemokine 1 | CX3CL1 | 16692 |
| CX3C chemokine receptor 1 | CX3CR1 | 16693 |
| C-X-C motif chemokine 1 | CXCL1 | 16694 |
| C-X-C motif chemokine 10 | CXCL10 | 16695 |
| C-X-C motif chemokine 11 | CXCL11 | 16696 |
| C-X-C motif chemokine 12 | CXCL12 | 16697 |
| C-X-C motif chemokine 13 | CXCL13 | 16698 |
| C-X-C motif chemokine 14 | CXCL14 | 16699 |
| C-X-C motif chemokine 16 | CXCL16 | 16700 |
| C-X-C motif chemokine 2 | CXCL2 | 16701 |
| C-X-C motif chemokine 3 | CXCL3 | 16702 |
| C-X-C motif chemokine 4 | CXCL4 | 16703 |
| C-X-C motif chemokine 5 | CXCL5 | 16704 |
| C-X-C motif chemokine 6 | CXCL6 | 16705 |
| C-X-C motif chemokine 7 | CXCL7 | 16706 |
| C-X-C motif chemokine 8 | CXCL8 | 16707 |
| C-X-C motif chemokine 9 | CXCL9 | 16708 |
| C-X-C chemokine receptor type 1 | CXCR1 | 16709 |
| C-X-C chemokine receptor type 2 | CXCR2 | 16710 |
| C-X-C chemokine receptor type 3 | CXCR3 | 16711 |
| C-X-C chemokine receptor type 4 | CXCR4 | 16712 |
| C-X-C chemokine receptor type 5 | CXCR5 | 16713 |
| C-X-C chemokine receptor type 6 | CXCR6 | 16714 |
| C-X-C chemokine receptor type 7 | CXCR7 | 16715 |
| Atypical chemokine receptor 1 | DARC or ACKR1 | 16716 |
| Erythropoietin | Epo | 16717 |
| Erythropoietin receptor | EpoR | 16718 |
| Receptor-type tyrosine-protein kinase | Flt-3 | 16719 |
| FLT3 | | |
| FLT3 Ligand | Flt-3L | 16720 |
| Granulocyte colony-stimulating factor | G-CSF or GSF3R | 16721 |
| receptor | | |
| Tumor necrosis factor receptor | GITR or TNFRSF18 | 16722 |
| superfamily member 18 | | |
| GITR Ligand | GITRL | 16723 |
| Cytokine receptor common subunit beta | GM-CSF or CSF2RB | 16724 |
| Interleukin-6 receptor subunit beta | gp130 or IL6ST | 16725 |
| Tumor necrosis factor receptor | HVEM or TNFRSF14 | 16726 |
| superfamily member 14 | | |
| Interferon gamma | IENγ | 16727 |
| Interferon gamma receptor 2 | IFNGR2 | 16728 |
| Interferon-alpha | IFN-α | 16729 |
| Interferon-beta | IFN-β | 16730 |
| Interleukin-1 alpha | IL1 | 16731 |
| Interleukin-10 | IL10 | 16732 |
| Interleukin-10 receptor | IL10R | 16733 |
| Interleukin-11 | IL-11 | 16734 |
| Interleukin-11 receptor alpha | IL-11Ra | 16735 |
| Interleukin-12 | IL12 | 16736 |
| Interleukin-13 | IL13 | 16737 |
| Interleukin-13 receptor | IL13R | 16738 |
| Interleukin-14 | IL-14 | 16739 |
| Interleukin-15 | IL15 | 16740 |
| Interleukin-15 receptor alpha | IL-15Ra | 16741 |
| Interleukin-16 | IL-16 | 16742 |
| Interleukin-17 | IL17 | 16743 |
| Interleukin-17 receptor | IL17R | 16744 |
| Interleukin-18 | IL18 | 16745 |
| Interleukin-1 receptor alpha | IL-1RA | 16746 |
| Interleukin-1 alpha | IL-1α | 16747 |
| Interleukin-1beta | IL-1β | 16748 |
| Interleukin-2 | IL2 | 16749 |
| Interleukin-20 | IL-20 | 16750 |
| Interleukin-20 receptor alpha | IL-20Rα | 16751 |
| Interleukin-20 receptor beta | IL-20Rβ | 16752 |
| Interleukin-21 | IL21 | 16753 |
| Interleukin-3 | IL-3 | 16754 |
| Interleukin-35 | IL35 | 16755 |
| Interleukin-4 | IL4 | 16756 |
| Interleukin-4 receptor | IL4R | 16757 |
| Interleukin-5 | IL5 | 16758 |
| Interleukin-5 receptor | IL5R | 16759 |
| Interleukin-6 | IL6 | 16760 |
| Interleukin-6 receptor | IL6R | 16761 |
| Interleukin-7 | IL7 | 16762 |
| Interleukin-9 receptor | IL-9R | 16763 |
| Leukemia inhibitory factor | LIF | 16764 |
| Leukemia inhibitory factor receptor | LIFR | 16765 |
| tumor necrosis factor superfamily | LIGHT or TNFSF14 | 16766 |
| member 14 | | |
| Tumor necrosis factor receptor | LTβR or TNFRSF3 | 16767 |
| superfamily member 3 | | |
| Lymphotoxin-beta | LT-β | 16768 |
| Macrophage colony-stimulating factor 1 | M-CSF | 16769 |
| Tumor necrosis factor receptor | OPG or TNFRSF11B | 16770 |
| superfamily member 11B | | |
| Oncostatin-M | OSM | 16771 |
| Oncostatin-M receptor | OSMR | 16772 |
| Tumor necrosis factor receptor | OX40 or TNFRSF4 | 16773 |
| superfamily member 4 | | |
| Tumor necrosis factor ligand | OX40L or TNFSF4 | 16774 |
| superfamily member 4 | | |
| Tumor necrosis factor receptor | RANK or TNFRSF11A | 16775 |
| superfamily member 11A | | |
| Kit Ligand | SCF or KITLG | 16776 |
| Tumor necrosis factor receptor | TACI or TNFRSF13B | 16777 |
| superfamily member 13B | | |
| Tumor necrosis factor ligand | TALL-1 or TNFSF13B | 16778 |
| superfamily member 13B | | |
| TGF-beta receptor type-1 | TGF-βR1 | 16779 |
| TGF-beta receptor type-2 | TGF-βR2 | 16780 |
| TGF-beta receptor type-3 | TGF-βR3 | 16781 |
| Transforming growth factor beta-1 | TGF-β1 | 16782 |
| Transforming growth factor beta-2 | TGF-β2 | 16783 |
| Transforming growth factor beta-3 | TGF-β3 | 16784 |
| Tumor necrosis factor alpha | TNF or TNF-α | 16785 |
| Tumor necrosis factor beta | TNF-β | 16786 |
| Thyroid peroxidase | Tpo | 16787 |
| Thyroid peroxidase receptor | TpoR | 16788 |
| Tumor necrosis factor ligand | TRAIL or TNFSF10 | 16789 |
| superfamily member 10 | | |
| Tumor necrosis factor receptor | TRAILR1 or | 16790 |
| superfamily member 10A | TNFRSF10A | |
| Tumor necrosis factor receptor | TRAILR2 or | 16791 |
| superfamily member 10B | TNFRSF10B | |
| Tumor necrosis factor ligand | TRANCE or TNFSF11 | 16792 |
| superfamily member 11 | | |
| Tumor necrosis factor ligand | TWEAK or TNFSF11 | 16793 |
| superfamily member 12 | | |
| Lymphotactin | XCL1 | 16794 |
| Cytokine SCM-1 beta | XCL2 | 16795 |

[0719] In some embodiments, the modified/chimeric checkpoint receptor comprises a switch receptor. Exemplary switch receptors may comprise a modified/chimeric receptor/protein of the disclosure wherein a native or wild type intracellular signaling domain is switched or replaced with a different intracellular signaling domain that is either non-native to the protein and/or not a wild-type domain. For example, replacement of an inhibitory signaling domain with a stimulatory signaling domain would switch an immunosuppressive signal into an immunostimulatory signal. Alternatively, replacement of an inhibitory signaling domain with a different inhibitory domain can reduce or enhance the level of inhibitory signaling. Expression or overexpression, of a switch receptor can result in the dilution and/or blockage of a cognate checkpoint signal via competition with an endogenous wildtype checkpoint receptor (not a switch receptor) for binding to the cognate checkpoint receptor expressed within the immunosuppressive tumor microenvironment. Armored T cells of the disclosure may comprise a sequence encoding switch receptors of the disclosure, leading to the expression of one or more switch receptors of the disclosure, and consequently, altering an activity of an armored T-cell of the disclosure. Armored T cells of the disclosure may express a switch receptor of the disclosure that targets an intracellularly expressed protein downstream of a checkpoint receptor, a transcription factor, a cytokine receptor, a death receptor, a metabolic sensing molecule, a cancer therapy, an oncogene, and/or a tumor suppressor protein or gene of the disclosure.

[0720] Exemplary switch receptors of the disclosure may comprise or may be derived from a protein including, but are not limited to, the signaling components downstream of an inhibitory checkpoint signal (as provided, for example, in Tables 1 and 2), a transcription factor (as provided, for example, in Table 3), a cytokine or a cytokine receptor, a chemokine or a chemokine receptor, a cell death or apoptosis receptor/ligand (as provided, for example, in Table 4), a metabolic sensing molecule (as provided, for example, in Table 5), a protein conferring sensitivity to a cancer therapy (as provided, for example, in Table 6), and an oncogene or a tumor suppressor gene (as provided, for example, in Table 7). Exemplary cytokines, cytokine receptors, chemokines and chemokine receptors of the disclosure include, but are not limited to, the cytokines and cytokine receptors as well as chemokines and chemokine receptors provided in Table 8.

### Armored T-Cells “Synthetic Gene Expression” Strategy

[0721] In some embodiments, a T-cell of the disclosure is modified to express chimeric ligand receptor (CLR) or a chimeric antigen receptor (CAR) that mediates conditional gene expression to produce an armored T-cell of the disclosure. The combination of the CLR/CAR and the condition gene expression system in the nucleus of the armored T cell constitutes a synthetic gene expression system that is conditionally activated upon binding of cognate ligand(s) with CLR or cognate antigen(s) with CAR. This system may help to ‘armor’ or enhance therapeutic potential of modified T cells by reducing or limiting synthetic gene expression at the site of ligand or antigen binding, at or within the tumor environment for example.

### Exogenous Receptors

[0722] In some embodiments, the armored T-cell comprises a composition comprising (a) an inducible transgene construct, comprising a sequence encoding an inducible promoter and a sequence encoding a transgene, and (b) a receptor construct, comprising a sequence encoding a constitutive promoter and a sequence encoding an exogenous receptor, such as a CLR or CAR, wherein, upon integration of the construct of (a) and the construct of (b) into a genomic sequence of a cell, the exogenous receptor is expressed, and wherein the exogenous receptor, upon binding a ligand or antigen, transduces an intracellular signal that targets directly or indirectly the inducible promoter regulating expression of the inducible transgene (a) to modify gene expression.

[0723] In some embodiments of a synthetic gene expression system of the disclosure, the composition modifies gene expression by decreasing gene expression. In some embodiments, the composition modifies gene expression by transiently modifying gene expression (e.g. for the duration of binding of the ligand to the exogenous receptor). In some embodiments, the composition modifies gene expression acutely (e.g. the ligand reversibly binds to the exogenous receptor). In some embodiments, the composition modifies gene expression chronically (e.g. the ligand irreversibly binds to the exogenous receptor).

[0724] In some embodiments of the compositions of the disclosure, the exogenous receptor of (b) comprises an endogenous receptor with respect to the genomic sequence of the cell. Exemplary receptors include, but are not limited to, intracellular receptors, cell-surface receptors, transmembrane receptors, ligand-gated ion channels, and G-protein coupled receptors.

[0725] In some embodiments of the compositions of the disclosure, the exogenous receptor of (b) comprises a non-naturally occurring receptor. In some embodiments, the non-naturally occurring receptor is a synthetic, modified, recombinant, mutant or chimeric receptor. In some embodiments, the non-naturally occurring receptor comprises one or more sequences isolated or derived from a T-cell receptor (TCR). In some embodiments, the non-naturally occurring receptor comprises one or more sequences isolated or derived from a scaffold protein. In some embodiments, including those wherein the non-naturally occurring receptor does not comprise a transmembrane domain, the non-naturally occurring receptor interacts with a second transmembrane, membrane-bound and/or an intracellular receptor that, following contact with the non-naturally occurring receptor, transduces an intracellular signal.

[0726] In some embodiments of the compositions of the disclosure, the exogenous receptor of (b) comprises a non-naturally occurring receptor. In some embodiments, the non-naturally occurring receptor is a synthetic, modified, recombinant, mutant or chimeric receptor. In some embodiments, the non-naturally occurring receptor comprises one or more sequences isolated or derived from a T-cell receptor (TCR). In some embodiments, the non-naturally occurring receptor comprises one or more sequences isolated or derived from a scaffold protein. In some embodiments, the non-naturally occurring receptor comprises a transmembrane domain. In some embodiments, the non-naturally occurring receptor interacts with an intracellular receptor that transduces an intracellular signal. In some embodiments, the non-naturally occurring receptor comprises an intracellular signalling domain. In some embodiments, the non-naturally occurring receptor is a chimeric ligand receptor (CLR). In some embodiments, the CLR is a chimeric antigen receptor (CAR).

[0727] In some embodiments of the compositions of the disclosure, the exogenous receptor of (b) comprises a non-naturally occurring receptor. In some embodiments, the CLR is a chimeric antigen receptor (CAR). In some embodiments, the chimeric ligand receptor comprises (a) an ectodomain comprising a ligand recognition region, wherein the ligand recognition region comprises at least scaffold protein; (b) a transmembrane domain, and (c) an endodomain comprising at least one costimulatory domain. In some embodiments, the ectodomain of (a) further comprises a signal peptide. In some embodiments, the ectodomain of (a) further comprises a hinge between the ligand recognition region and the transmembrane domain.

[0728] In some embodiments of the CLR/CARs of the disclosure, the signal peptide comprises a sequence encoding a human CD2, CD3δ, CD3ε, CD3γ, CD3ζ, CD4, CD8α, CD19, CD28, 4-1BB or GM-CSFR signal peptide. In some embodiments, the signal peptide comprises a sequence encoding a human CD8α signal peptide. In some embodiments, the signal peptide comprises an amino acid sequence comprising MALPVTALLLPLALLLHAARP (SEQ ID NO: 18004). In some embodiments, the signal peptide is encoded by a nucleic acid sequence comprising atggcactgccagtcaccgccctgctgctgcctctggctctgctgctgcacgcagctagacca.

[0729] In some embodiments of the CLR/CARs of the disclosure, the transmembrane domain comprises a sequence encoding a human CD2, CD3δ, CD3ε, CD3γ, CD3ζ, CD4, CD8α, CD19, CD28, 4-1BB or GM-CSFR transmembrane domain. In some embodiments, the transmembrane domain comprises a sequence encoding a human CD8α transmembrane domain. In some embodiments, the transmembrane domain comprises an amino acid sequence comprising IYIWAPLAGTCGVLLLSLVITLYC (SEQ ID NO: 18006). In some embodiments, the transmembrane domain is encoded by a nucleic acid sequence comprising

(SEQ ID NO: 18007)
atctacatttgggcaccactggccgggacctgtggagtgctgctgctgag
cctggtcatcacactgtactgc.

[0730] In some embodiments of the CLR/CARs of the disclosure, the endodomain comprises a human CD3ζ endodomain. In some embodiments, the at least one costimulatory domain comprises a human 4-1BB, CD28, CD40, ICOS, MyD88, OX-40 intracellular segment, or any combination thereof. In some embodiments, the at least one costimulatory domain comprises a human CD28 and/or a 4-1BB costimulatory domain. In some embodiments, the CD3ζ costimulatory domain comprises an amino acid sequence comprising

(SEQ ID NO: 18008)
RVKFSRSADAPAYKQGQNQLYNELNLGRREEYDVLDKRRGRDPEMGGKPR
RKNPQEGLYNELQKDKMAEAYSEIGMKGERRRGKGHDGLYQGLSTATKDT
YDALHMQALP
PR.

In some embodiments, the CD3ζ costimulatory domain is encoded by a nucleic acid sequence comprising

(SEQ ID NO: 18010)
cgcgtgaagtttagtcgatcagcagatgccccagcttacaaacagggaca
gaaccagctgtataacgagctgaatctgggccgccgagaggaatatgacg
tgctggataagcggagaggacgcgaccccgaaatgggaggcaagcccagg
cgcaaaaaccctcaggaaggcctgtataacgagctgcagaaggacaaaat
ggcagaagcctattctgagatcggcatgaagggggagcgacggagaggca
aagggcacgatgggctgtaccagggactgagcaccgccacaaaggacacc
tatgatgctctgcatatgcaggcactgcctccaagg.

In some embodiments, the 4-1BB costimulatory domain comprises an amino acid sequence comprising

(SEQ ID NO: 18011)
KRGRKKLLYIFKQPFMRPVQTTQEEDGCSCRFPEEEEGGCEL.

In some embodiments, the 4-1BB costimulatory domain is encoded by a nucleic acid sequence comprising

(SEQ ID NO: 18013)
aagagaggcaggaagaaactgctgtatattttcaaacagcccttcatgcg
ccccgtgcagactacccaggaggaagacgggtgctcctgtcgattccctg
aggaagaggaaggcgggtgtgagctg.

In some embodiments, the 4-1BB costimulatory domain is located between the transmembrane domain and the CD28 costimulatory domain.

[0731] In some embodiments of the CLR/CARs of the disclosure, the hinge comprises a sequence derived from a human CD8α, IgG4, and/or CD4 sequence. In some embodiments, the hinge comprises a sequence derived from a human CD8α sequence. In some embodiments, the hinge comprises an amino acid sequence comprising

(SEQ ID NO: 18014)
TTTPAPRPPTPAPTIASQPLSLRPEACRPAAGGAVHTRGLDFACD.

In some embodiments, the hinge is encoded by a nucleic acid sequence comprising

(SEQ ID NO: 18016)
ACCACAACCCCTGCCCCCAGACCTCCCACACCCGCCCCTACCATCGCGAG
TCAGCCCCTGAGTCTGAGACCTGAGGCCTGCAGGCCAGCTGCAGGAGGAG
CTGTGCACACCAGGGGCCTGGACTTCGCCTGCGAC
or
(SEQ ID NO: 18017)
ACCACAACCCCTGCCCCCAGACCTCCCACACCCGCCCCTACCATCGCGAG
TCAGCCCCTGAGTCTGAGACCTGAGGCCTGCAGGCCAGCTGCAGGAGGAG
CTGTGCACACCAGGGGCCTGGACTTCGCCTGCGAC.

In some embodiments, the at least one protein scaffold specifically binds the ligand.

[0732] In some embodiments of the compositions of the disclosure, the exogenous receptor of (b) comprises a non-naturally occurring receptor. In some embodiments, the CLR is a chimeric antigen receptor (CAR). In some embodiments, the chimeric ligand receptor comprises (a) an ectodomain comprising a ligand recognition region, wherein the ligand recognition region comprises at least scaffold protein; (b) a transmembrane domain, and (c) an endodomain comprising at least one costimulatory domain. In some embodiments, the at least one protein scaffold comprises an antibody, an antibody fragment, a single domain antibody, a single chain antibody, an antibody mimetic, or a Centyrin (referred to herein as a CARTyrin). In some embodiments, the ligand recognition region comprises one or more of an antibody, an antibody fragment, a single domain antibody, a single chain antibody, an antibody mimetic, and a Centyrin. In some embodiments, the single domain antibody comprises or consists of a VHH or a VH (referred to herein as a VCAR). In some embodiments, the single domain antibody comprises or consists of a VHH or a VH comprising human complementarity determining regions (CDRs). In some embodiments, the VH is a recombinant or chimeric protein. In some embodiments, the VH is a recombinant or chimeric human protein. In some embodiments, the antibody mimetic comprises or consists of an affibody, an afflilin, an affimer, an affitin, an alphabody, an anticalin, an avimer, a DARPin, a Fynomer, a Kunitz domain peptide or a monobody. In some embodiments, the Centyrin comprises or consists of a consensus sequence of at least one fibronectin type III (FN3) domain.

[0733] In some embodiments of the compositions of the disclosure, the exogenous receptor of (b) comprises a non-naturally occurring receptor. In some embodiments, the CLR is a chimeric antigen receptor (CAR). In some embodiments, the chimeric ligand receptor comprises (a) an ectodomain comprising a ligand recognition region, wherein the ligand recognition region comprises at least scaffold protein; (b) a transmembrane domain, and (c) an endodomain comprising at least one costimulatory domain. In some embodiments, the Centyrin comprises or consists of a consensus sequence of at least one fibronectin type III (FN3) domain. In some embodiments, the at least one fibronectin type III (FN3) domain is derived from a human protein. In some embodiments, the human protein is Tenascin-C. In some embodiments, the consensus sequence comprises

(SEQ ID NO: 18018)
LPAPKNLVVSEVTEDSLRLSWTAPDAAFDSFLIQYQESEKVGEAINLTVP
GSERSYDLTGLKPGTEYTVSIYGVKGGHRSNPLSAEFTT.

In some embodiments, the consensus sequence comprises

(SEQ ID NO: 18019)
MLPAPKNLVVSEVTEDSLRLSWTAPDAAFDSFLIQYQESEKVGEAI
NLTVPGSERSYDLTGLKPGTEYTVSIYGVKGGHRSNPLSAEFTT.

In some embodiments, the consensus sequence is modified at one or more positions within (a) a A-B loop comprising or consisting of the amino acid residues TEDS (SEQ ID NO:18020) at positions 13-16 of the consensus sequence; (b) a B-C loop comprising or consisting of the amino acid residues TAPDAAF (SEQ ID NO:18021) at positions 22-28 of the consensus sequence; (c) a C-D loop comprising or consisting of the amino acid residues SEKVGE (SEQ ID NO:18022) at positions 38-43 of the consensus sequence; (d) a D-E loop comprising or consisting of the amino acid residues GSER (SEQ ID NO:18023) at positions 51-54 of the consensus sequence; (e) a E-F loop comprising or consisting of the amino acid residues GLKPG (SEQ ID NO:18024) at positions 60-64 of the consensus sequence; (0 a F-G loop comprising or consisting of the amino acid residues KGGHRSN (SEQ ID NO:18025) at positions 75-81 of the consensus sequence; or (g) any combination of (a)-(f). In some embodiments, the Centyrin comprises a consensus sequence of at least 5 fibronectin type III (FN3) domains. In some embodiments, the Centyrin comprises a consensus sequence of at least 10 fibronectin type III (FN3) domains. In some embodiments, the Centyrin comprises a consensus sequence of at least 15 fibronectin type III (FN3) domains. In some embodiments, the scaffold binds an antigen with at least one affinity selected from a K_{D} of less than or equal to 10⁻⁹ M, less than or equal to 10⁻¹⁰ M, less than or equal to 10⁻¹¹ M, less than or equal to 10⁻¹² M, less than or equal to 10⁻¹³ M, less than or equal to 10⁻¹⁴ M, and less than or equal to 10⁻¹⁵ M. In some embodiments, the K_{D} is determined by surface plasmon resonance.

### Inducible Promoters

[0734] In some embodiments of the compositions of the disclosure, the sequence encoding the inducible promoter of (a) comprises a sequence encoding an NFκB promoter. In some embodiments of the compositions of the disclosure, the sequence encoding the inducible promoter of (a) comprises a sequence encoding an interferon (IFN) promoter or a sequence encoding an interleukin-2 promoter. In some embodiments, the interferon (IFN) promoter is an IFNγ promoter. In some embodiments of the compositions of the disclosure, the inducible promoter is isolated or derived from the promoter of a cytokine or a chemokine. In some embodiments, the cytokine or chemokine comprises IL2, IL3, IL4, IL5, IL6, IL10, IL12, IL13, IL17A/F, IL21, IL22, IL23, transforming growth factor beta (TGFβ), colony stimulating factor 2 (GM-CSF), interferon gamma (IFNγ), Tumor necrosis factor (TNFα), LTα, perforin, Granzyme C (Gzmc), Granzyme B (Gzmb), C-C motif chemokine ligand 5 (CCLS), C-C motif chemokine ligand 4 (Ccl4), C-C motif chemokine ligand 3 (Ccl3), X-C motif chemokine ligand 1 (Xcl1) and LIF interleukin 6 family cytokine (Lif).

[0735] In some embodiments of the compositions of the disclosure, the inducible promoter is isolated or derived from the promoter of a gene comprising a surface protein involved in cell differentiation, activation, exhaustion and function. In some embodiments, the gene comprises CD69, CD71, CTLA4, PD-1, TIGIT, LAG3, TIM-3, GITR, MHCII, COX-2, FASL and 4-1BB.

[0736] In some embodiments of the compositions of the disclosure, the inducible promoter is isolated or derived from the promoter of a gene involved in CD metabolism and differentiation. In some embodiments of the compositions of the disclosure, the inducible promoter is isolated or derived from the promoter of Nr4a1, Nr4a3, Tnfrsf9 (4-1BB), Sema7a, Zfp3612, Gadd45b, Dusp5, Dusp6 and Neto2.

### Inducible Transgene

[0737] In some embodiments, the inducible transgene construct comprises or drives expression of a signaling component downstream of an inhibitory checkpoint signal (as provided, for example, in Tables 1 and 2), a transcription factor (as provided, for example, in Table 3), a cytokine or a cytokine receptor, a chemokine or a chemokine receptor, a cell death or apoptosis receptor/ligand (as provided, for example, in Table 4), a metabolic sensing molecule (as provided, for example, in Table 5), a protein conferring sensitivity to a cancer therapy (as provided, for example, in Table 6 and/or 9), and an oncogene or a tumor suppressor gene (as provided, for example, in Table 7). Exemplary cytokines, cytokine receptors, chemokines and chemokine receptors of the disclosure include, but are not limited to, the cytokines and cytokine receptors as well as chemokines and chemokine receptors Provided in Table 8.

TABLE 9
Exemplary therapeutic proteins (and proteins to enhance CAR-T efficacy).

| Gene Name | Gene Description | Protein SEQ ID NO |
|---|---|---|
| A1BG | Alpha-1-B glycoprotein | SEQ ID NOS: 1-2 |
| A2M | Alpha-2-macroglobulin | SEQ ID NOS: 3-6 |
| A2ML1 | Alpha-2-macroglobulin-like 1 | SEQ ID NOS: 7-12 |
| A4GNT | Alpha-1,4-N-acetylglucosaminyltransferase | SEQ ID NO: 13 |
| AADACL2 | Arylacetamide deacetylase-like 2 | SEQ ID NOS: 14-15 |
| AANAT | Aralkylamine N-acetyltransferase | SEQ ID NOS: 16-19 |
| ABCG1 | ATP-binding cassette, sub-family G | SEQ ID NOS: 20-26 |
| | (WHITE), member 1 | |
| ABHD1 | Abhydrolase domain containing 1 | SEQ ID NOS: 27-31 |
| ABHD10 | Abhydrolase domain containing 10 | SEQ ID NOS: 32-35 |
| ABHD14A | Abhydrolase domain containing 14A | SEQ ID NOS: 36-40 |
| ABHD15 | Abhydrolase domain containing 15 | SEQ ID NO: 41 |
| ABI3BP | ABI family, member 3 (NESH) binding | SEQ ID NOS: 42-63 |
| | protein | |
| AC008641.1 | | SEQ ID NO: 73 |
| AC009133.22 | | SEQ ID NO: 76 |
| AC009491.2 | | SEQ ID NO: 77 |
| AC011513.3 | | SEQ ID NOS: 92-93 |
| AC136352.5 | | SEQ ID NO: 88 |
| AC145212.4 | MaFF-interacting protein | SEQ ID NO: 90 |
| AC233755.1 | | SEQ ID NO: 91 |
| ACACB | Acetyl-CoA carboxylase beta | SEQ ID NOS: 94-100 |
| ACAN | Aggrecan | SEQ ID NOS: 101-108 |
| ACE | Angiotensin I converting enzyme | SEQ ID NOS: 109-121 |
| ACHE | Acetylcholinesterase (Yt blood group) | SEQ ID NOS: 122-134 |
| ACP2 | Acid phosphatase 2, lysosomal | SEQ ID NOS: 135-142 |
| ACP5 | Acid phosphatase 5, tartrate resistant | SEQ ID NOS: 143-151 |
| ACP6 | Acid phosphatase 6, lysophosphatidic | SEQ ID NOS: 152-158 |
| ACPP | Acid phosphatase, prostate | SEQ ID NOS: 163-167 |
| ACR | Acrosin | SEQ ID NOS: 168-169 |
| ACRBP | Acrosin binding protein | SEQ ID NOS: 170-174 |
| ACRV1 | Acrosomal vesicle protein 1 | SEQ ID NOS: 175-178 |
| ACSF2 | Acyl-CoA synthetase family member 2 | SEQ ID NOS: 179-187 |
| ACTL10 | Actin-like 10 | SEQ ID NO: 188 |
| ACVR1 | Activin A receptor, type I | SEQ ID NOS: 189-197 |
| ACVR1C | Activin A receptor, type IC | SEQ ID NOS: 198-201 |
| ACVRL1 | Activin A receptor type II-like 1 | SEQ ID NOS: 202-207 |
| ACYP1 | Acylphosphatase 1, erythrocyte (common) | SEQ ID NOS: 208-213 |
| | type | |
| ACYP2 | Acylphosphatase 2, muscle type | SEQ ID NOS: 214-221 |
| ADAM10 | ADAM metallopeptidase domain 10 | SEQ ID NOS: 230-237 |
| ADAM12 | ADAM metallopeptidase domain 12 | SEQ ID NOS: 238-240 |
| ADAM15 | ADAM metallopeptidase domain 15 | SEQ ID NOS: 241-252 |
| ADAM17 | ADAM metallopeptidase domain 17 | SEQ ID NOS: 253-255 |
| ADAM18 | ADAM metallopeptidase domain 18 | SEQ ID NOS: 256-260 |
| ADAM22 | ADAM metallopeptidase domain 22 | SEQ ID NOS: 261-269 |
| ADAM28 | ADAM metallopeptidase domain 28 | SEQ ID NOS: 270-275 |
| ADAM29 | ADAM metallopeptidase domain 29 | SEQ ID NOS: 276-284 |
| ADAM32 | ADAM metallopeptidase domain 32 | SEQ ID NOS: 285-291 |
| ADAM33 | ADAM metallopeptidase domain 33 | SEQ ID NOS: 292-296 |
| ADAM7 | ADAM metallopeptidase domain 7 | SEQ ID NOS: 297-300 |
| ADAM8 | ADAM metallopeptidase domain 8 | SEQ ID NOS: 301-305 |
| ADAM9 | ADAM metallopeptidase domain 9 | SEQ ID NOS: 306-311 |
| ADAMDEC1 | AD AM-like, decysin 1 | SEQ ID NOS: 312-314 |
| ADAMTS1 | ADAM metallopeptidase with | SEQ ID NOS: 315-318 |
| | thrombospondin type 1 motif, 1 | |
| ADAMTS10 | ADAM metallopeptidase with | SEQ ID NOS: 319-324 |
| | thrombospondin type 1 motif, 10 | |
| ADAMTS12 | ADAM metallopeptidase with | SEQ ID NOS: 325-327 |
| | thrombospondin type 1 motif, 12 | |
| ADAMTS13 | ADAM metallopeptidase with | SEQ ID NOS: 328-335 |
| | thrombospondin type 1 motif, 13 | |
| ADAMTS14 | ADAM metallopeptidase with | SEQ ID NOS: 336-337 |
| | thrombospondin type 1 motif, 14 | |
| ADAMTS15 | ADAM metallopeptidase with | SEQ ID NO: 338 |
| | thrombospondin type 1 motif, 15 | |
| ADAMTS16 | ADAM metallopeptidase with | SEQ ID NOS: 339-340 |
| | thrombospondin type 1 motif, 16 | |
| ADAMTS17 | ADAM metallopeptidase with | SEQ ID NOS: 341-344 |
| | thrombospondin type 1 motif, 17 | |
| ADAMTS18 | ADAM metallopeptidase with | SEQ ID NOS: 345-348 |
| | thrombospondin type 1 motif, 18 | |
| ADAMTS19 | ADAM metallopeptidase with | SEQ ID NOS: 349-352 |
| | thrombospondin type 1 motif, 19 | |
| ADAMTS2 | ADAM metallopeptidase with | SEQ ID NOS: 353-355 |
| | thrombospondin type 1 motif, 2 | |
| ADAMTS20 | ADAM metallopeptidase with | SEQ ID NOS: 356-359 |
| | thrombospondin type 1 motif, 20 | |
| ADAMTS3 | ADAM metallopeptidase with | SEQ ID NOS: 360-361 |
| | thrombospondin type 1 motif, 3 | |
| ADAMTS5 | ADAM metallopeptidase with | SEQ ID NO: 362 |
| | thrombospondin type 1 motif, 5 | |
| ADAMTS6 | ADAM metallopeptidase with | SEQ ID NOS: 363-364 |
| | thrombospondin type 1 motif, 6 | |
| ADAMTS7 | ADAM metallopeptidase with | SEQ ID NO: 365 |
| | thrombospondin type 1 motif, 7 | |
| ADAMTS8 | ADAM metallopeptidase with | SEQ ID NO: 366 |
| | thrombospondin type 1 motif, 8 | |
| ADAMTS9 | ADAM metallopeptidase with | SEQ ID NOS: 367-371 |
| | thrombospondin type 1 motif, 9 | |
| ADAMTSL1 | ADAMTS-like 1 | SEQ ID NOS: 372-382 |
| ADAMTSL2 | ADAMTS-like 2 | SEQ ID NOS: 383-385 |
| ADAMTSL3 | ADAMTS-like 3 | SEQ ID NOS: 386-387 |
| ADAMTSL4 | ADAMTS-like 4 | SEQ ID NOS: 388-391 |
| ADAMTSL5 | ADAMTS-like 5 | SEQ ID NOS: 392-397 |
| ADCK1 | AarF domain containing kinase 1 | SEQ ID NOS: 398-402 |
| ADCYAP1 | Adenylate cyclase activating polypeptide 1 | SEQ ID NOS: 403-404 |
| | (pituitary) | |
| ADCYAP1R1 | Adenylate cyclase activating polypeptide 1 | SEQ ID NOS: 405-411 |
| | (pituitary) receptor type I | |
| ADGRA3 | Adhesion G protein-coupled receptor A3 | SEQ ID NOS: 412-416 |
| ADGRB2 | Adhesion G protein-coupled receptor B2 | SEQ ID NOS: 417-425 |
| ADGRD1 | Adhesion G protein-coupled receptor D1 | SEQ ID NOS: 426-431 |
| ADGRE3 | Adhesion G protein-coupled receptor E3 | SEQ ID NOS: 432-436 |
| ADGRE5 | Adhesion G protein-coupled receptor E5 | SEQ ID NOS: 437-442 |
| ADGRF1 | Adhesion G protein-coupled receptor F1 | SEQ ID NOS: 443-447 |
| ADGRG1 | Adhesion G protein-coupled receptor G1 | SEQ ID NOS: 448-512 |
| ADGRG5 | Adhesion G protein-coupled receptor G5 | SEQ ID NOS: 513-515 |
| ADGRG6 | Adhesion G protein-coupled receptor G6 | SEQ ID NOS: 516-523 |
| ADGRV1 | Adhesion G protein-coupled receptor V1 | SEQ ID NOS: 524-540 |
| ADI1 | Acireductone dioxygenase 1 | SEQ ID NOS: 541-543 |
| ADIG | Adipogenin | SEQ ID NOS: 544-547 |
| ADIPOQ | Adiponectin, C1Q and collagen domain | SEQ ID NOS: 548-549 |
| | containing | |
| ADM | Adrenomedullin | SEQ ID NOS: 550-557 |
| ADM2 | Adrenomedullin 2 | SEQ ID NOS: 558-559 |
| ADM5 | Adrenomedullin 5 (putative) | SEQ ID NO: 560 |
| ADPGK | ADP-dependent glucokinase | SEQ ID NOS: 561-570 |
| ADPRHL2 | ADP-ribosylhydrolase like 2 | SEQ ID NO: 571 |
| AEBP1 | AE binding protein 1 | SEQ ID NOS: 572-579 |
| AFM | Afamin | SEQ ID NO: 584 |
| AFP | Alpha-fetoprotein | SEQ ID NOS: 585-586 |
| AGA | Aspartylglucosaminidase | SEQ ID NOS: 587-589 |
| AGER | Advanced glycosylation end product- | SEQ ID NOS: 590-600 |
| | specific receptor | |
| AGK | Acylglycerol kinase | SEQ ID NOS: 601-606 |
| AGPS | Alkylglycerone phosphate synthase | SEQ ID NOS: 607-610 |
| AGR2 | Anterior gradient 2, protein disulphide | SEQ ID NOS: 611-614 |
| | isomerase family member | |
| AGR3 | Anterior gradient 3, protein disulphide | SEQ ID NOS: 615-617 |
| | isomerase family member | |
| AGRN | Agrin | SEQ ID NOS: 618-621 |
| AGRP | Agouti related neuropeptide | SEQ ID NO: 622 |
| AGT | Angiotensinogen (serpin peptidase inhibitor, | SEQ ID NO: 623 |
| | clade A, member 8) | |
| AGTPBP1 | ATP/GTP binding protein 1 | SEQ ID NOS: 624-627 |
| AGTRAP | Angiotensin II receptor-associated protein | SEQ ID NOS: 628-635 |
| AHCYL2 | Adenosylhomocysteinase-like 2 | SEQ ID NOS: 636-642 |
| AHSG | Alpha-2-HS-glycoprotein | SEQ ID NOS: 643-644 |
| AIG1 | Androgen-induced 1 | SEQ ID NOS: 645-653 |
| AK4 | Adenylate kinase 4 | SEQ ID NOS: 654-657 |
| AKAP10 | A kinase (PRKA) anchor protein 10 | SEQ ID NOS: 658-666 |
| AKR1C1 | Aldo-keto reductase family 1, member C1 | SEQ ID NOS: 667-669 |
| AL356289.1 | | SEQ ID NO: 677 |
| AL589743.1 | | SEQ ID NO: 678 |
| ALAS2 | 5′-aminolevulinate synthase 2 | SEQ ID NOS: 684-691 |
| ALB | Albumin | SEQ ID NOS: 692-701 |
| ALDH9A1 | Aldehyde dehydrogenase 9 family, member | SEQ ID NO: 702 |
| | A1 | |
| ALDOA | Aldolase A, fructose-bisphosphate | SEQ ID NOS: 703-717 |
| ALG1 | ALG1, chitobiosyldiphosphodolichol beta- | SEQ ID NOS: 718-723 |
| | mannosyltransferase | |
| ALG5 | ALG5, dolichyl-phosphate beta- | SEQ ID NOS: 724-725 |
| | glucosyltransferase | |
| ALG9 | ALG9, alpha-1,2-mannosyltransferase | SEQ ID NOS: 726-736 |
| ALKBH1 | AlkB homolog 1, histone H2A dioxygenase | SEQ ID NOS: 746-748 |
| ALKBH5 | AlkB homolog 5, RNA demethylase | SEQ ID NOS: 749-750 |
| ALPI | Alkaline phosphatase, intestinal | SEQ ID NOS: 751-752 |
| ALPL | Alkaline phosphatase, liver/bone/kidney | SEQ ID NOS: 753-757 |
| ALPP | Alkaline phosphatase, placental | SEQ ID NO: 758 |
| ALPPL2 | Alkaline phosphatase, placental-like 2 | SEQ ID NO: 759 |
| AMBN | Ameloblastin (enamel matrix protein) | SEQ ID NOS: 760-762 |
| AMBP | Alpha-1-microglobulin/bikunin precursor | SEQ ID NOS: 763-765 |
| AMELX | Amelogenin, X-linked | SEQ ID NOS: 766-768 |
| AMELY | Amelogenin, Y-linked | SEQ ID NOS: 769-770 |
| AMH | Anti-Mullerian hormone | SEQ ID NO: 771 |
| AMICA1 | Adhesion molecule, interacts with CXADR | SEQ ID NOS: 7348- |
| | antigen 1 | 7356 |
| AMPD1 | Adenosine monophosphate deaminase 1 | SEQ ID NOS: 772-774 |
| AMTN | Amelotin | SEQ ID NOS: 775-776 |
| AMY1A | Amylase, alpha 1A (salivary) | SEQ ID NOS: 777-779 |
| AMY1B | Amylase, alpha 1B (salivary) | SEQ ID NOS: 780-783 |
| AMY1C | Amylase, alpha 1C (salivary) | SEQ ID NO: 784 |
| AMY2A | Amylase, alpha 2A (pancreatic) | SEQ ID NOS: 785-787 |
| AMY2B | Amylase, alpha 2B (pancreatic) | SEQ ID NOS: 788-792 |
| ANG | Angiogenin, ribonuclease, RNase A family, | SEQ ID NOS: 793-794 |
| | 5 | |
| ANGEL1 | Angel homolog 1 (Drosophila) | SEQ ID NOS: 795-798 |
| ANGPT1 | Angiopoietin 1 | SEQ ID NOS: 799-803 |
| ANGPT2 | Angiopoietin 2 | SEQ ID NOS: 804-807 |
| ANGPT4 | Angiopoietin 4 | SEQ ID NO: 808 |
| ANGPTL1 | Angiopoietin-like 1 | SEQ ID NOS: 809-811 |
| ANGPTL2 | Angiopoietin-like 2 | SEQ ID NOS: 812-813 |
| ANGPTL3 | Angiopoietin-like 3 | SEQ ID NO: 814 |
| ANGPTL4 | Angiopoietin-like 4 | SEQ ID NOS: 815-822 |
| ANGPTL5 | Angiopoietin-like 5 | SEQ ID NOS: 823-824 |
| ANGPTL6 | Angiopoietin-like 6 | SEQ ID NOS: 825-827 |
| ANGPTL7 | Angiopoietin-like 7 | SEQ ID NO: 828 |
| ANK1 | Ankyrin 1, erythrocytic | SEQ ID NOS: 833-843 |
| ANKDD1A | Ankyrin repeat and death domain containing | SEQ ID NOS: 844-850 |
| | 1A | |
| ANKRD54 | Ankyrin repeat domain 54 | SEQ ID NOS: 851-859 |
| ANKRD60 | Ankyrin repeat domain 60 | SEQ ID NO: 860 |
| ANO7 | Anoctamin 7 | SEQ ID NOS: 861-864 |
| ANO1 | #N/A | SEQ ID NO: 865 |
| ANTXR1 | Anthrax toxin receptor 1 | SEQ ID NOS: 866-869 |
| AOAH | Acyloxyacyl hydrolase (neutrophil) | SEQ ID NOS: 870-874 |
| AOC1 | Amine oxidase, copper containing 1 | SEQ ID NOS: 875-880 |
| AOC2 | Amine oxidase, copper containing 2 (retina- | SEQ ID NOS: 881-882 |
| | specific) | |
| AOC3 | Amine oxidase, copper containing 3 | SEQ ID NOS: 883-889 |
| AP000721.4 | | SEQ ID NO: 890 |
| APBB1 | Amyloid beta (A4) precursor protein- | SEQ ID NOS: 891-907 |
| | binding, family B, member 1 (Fe65) | |
| APCDD1 | Adenomatosis polyposis coli down- | SEQ ID NOS: 908-913 |
| | regulated 1 | |
| APCS | Amyloid P component, serum | SEQ ID NO: 914 |
| APELA | Apelin receptor early endogenous ligand | SEQ ID NOS: 915-917 |
| APLN | Apelin | SEQ ID NO: 918 |
| APLP2 | Amyloid beta (A4) precursor-like protein 2 | SEQ ID NOS: 919-928 |
| APOA1 | Apolipoprotein A-I | SEQ ID NOS: 929-933 |
| APOA1BP | Apolipoprotein A-I binding protein | SEQ ID NOS: 9177- |
| | | 9179 |
| APOA2 | Apolipoprotein A-II | SEQ ID NOS: 934-942 |
| APOA4 | Apolipoprotein A-IV | SEQ ID NO: 943 |
| APOA5 | Apolipoprotein A-V | SEQ ID NOS: 944-946 |
| APOB | Apolipoprotein B | SEQ ID NOS: 947-948 |
| APOC1 | Apolipoprotein C-I | SEQ ID NOS: 949-957 |
| APOC2 | Apolipoprotein C-II | SEQ ID NOS: 958-962 |
| APOC3 | Apolipoprotein C-III | SEQ ID NOS: 963-966 |
| APOC4 | Apolipoprotein C-IV | SEQ ID NOS: 967-968 |
| APOC4- | APOC4-APOC2 readthrough (NMD | SEQ ID NOS: 969-970 |
| APOC2 | candidate) | |
| APOD | Apolipoprotein D | SEQ ID NOS: 971-974 |
| APOE | Apolipoprotein E | SEQ ID NOS: 975-978 |
| APOF | Apolipoprotein F | SEQ ID NO: 979 |
| APOH | Apolipoprotein H (beta-2-glycoprotein I) | SEQ ID NOS: 980-983 |
| APOL1 | Apolipoprotein L, 1 | SEQ ID NOS: 984-994 |
| APOL3 | Apolipoprotein L, 3 | SEQ ID NOS: 995-1009 |
| APOM | Apolipoprotein M | SEQ ID NOS: 1010- |
| | | 1012 |
| APOOL | Apolipoprotein O-like | SEQ ID NOS: 1013- |
| | | 1015 |
| ARCN1 | Archain 1 | SEQ ID NOS: 1016- |
| | | 1020 |
| ARFIP2 | ADP-ribosylation factor interacting protein | SEQ ID NOS: 1021- |
| | 2 | 1027 |
| ARHGAP36 | Rho GTPase activating protein 36 | SEQ ID NOS: 1028- |
| | | 1033 |
| ARHGAP6 | Rho GTPase activating protein 6 | SEQ ID NOS: 1043- |
| | | 1048 |
| ARHGEF4 | Rho guanine nucleotide exchange factor | SEQ ID NOS: 1049- |
| | (GEF) 4 | 1059 |
| ARL16 | ADP-ribosylation factor-like 16 | SEQ ID NOS: 1060- |
| | | 1068 |
| ARMC5 | Armadillo repeat containing 5 | SEQ ID NOS: 1069- |
| | | 1075 |
| ARNTL | Aryl hydrocarbon receptor nuclear | SEQ ID NOS: 1076- |
| | translocator-like | 1090 |
| ARSA | Arylsulfatase A | SEQ ID NOS: 1091- |
| | | 1096 |
| ARSB | Arylsulfatase B | SEQ ID NOS: 1097- |
| | | 1100 |
| ARSE | Arylsulfatase E (chondrodysplasia punctata | SEQ ID NOS: 1101- |
| | 1) | 1104 |
| ARSG | Arylsulfatase G | SEQ ID NOS: 1105- |
| | | 1108 |
| ARSI | Arylsulfatase family, member I | SEQ ID NOS: 1109- |
| | | 1111 |
| ARSK | Arylsulfatase family, member K | SEQ ID NOS: 1112- |
| | | 1116 |
| ART3 | ADP-ribosyltransferase 3 | SEQ ID NOS: 1117- |
| | | 1124 |
| ART4 | ADP-ribosyltransferase 4 (Dombrock blood | SEQ ID NOS: 1125- |
| | group) | 1128 |
| ART5 | ADP-ribosyltransferase 5 | SEQ ID NOS: 1129- |
| | | 1133 |
| ARTN | Artemin | SEQ ID NOS: 1134- |
| | | 1144 |
| ASAH1 | N-acylsphingosine amidohydrolase (acid | SEQ ID NOS: 1145- |
| | ceramidase) 1 | 1195 |
| ASAH2 | N-acylsphingosine amidohydrolase (non- | SEQ ID NOS: 1196- |
| | lysosomal ceramidase) 2 | 1201 |
| ASCL1 | Achaete-scute family bHLH transcription | SEQ ID NO: 1202 |
| | factor 1 | |
| ASIP | Agouti signaling protein | SEQ ID NOS: 1203- |
| | | 1204 |
| ASPN | Asporin | SEQ ID NOS: 1205- |
| | | 1206 |
| ASTL | Astacin-like metallo-endopeptidase (M12 | SEQ ID NO: 1207 |
| | family) | |
| ATAD5 | ATPase family, AAA domain containing 5 | SEQ ID NOS: 1208- |
| | | 1209 |
| ATAT1 | Alpha tubulin acetyltransferase 1 | SEQ ID NOS: 1210- |
| | | 1215 |
| ATG2A | Autophagy related 2A | SEQ ID NOS: 1216- |
| | | 1218 |
| ATG5 | Autophagy related 5 | SEQ ID NOS: 1219- |
| | | 1227 |
| ATMIN | ATM interactor | SEQ ID NOS: 1228- |
| | | 1231 |
| ATP13A1 | ATPase type 13A1 | SEQ ID NOS: 1232- |
| | | 1234 |
| ATP5F1 | ATP synthase, H+ transporting, | SEQ ID NOS: 1235- |
| | mitochondrial Fo complex, subunit Bl | 1236 |
| ATP6AP1 | ATPase, H+ transporting, lysosomal | SEQ ID NOS: 1237- |
| | accessory protein 1 | 1244 |
| ATP6AP2 | ATPase, H+ transporting, lysosomal | SEQ ID NOS: 1245- |
| | accessory protein 2 | 1267 |
| ATPAF1 | ATP synthase mitochondrial F1 complex | SEQ ID NOS: 1268- |
| | assembly factor 1 | 1278 |
| AUH | AU RNA binding protein/enoyl-CoA | SEQ ID NOS: 1279- |
| | hydratase | 1280 |
| AVP | Arginine vasopressin | SEQ ID NO: 1281 |
| AXIN2 | Axin 2 | SEQ ID NOS: 1282- |
| | | 1289 |
| AZGP1 | Alpha-2-glycoprotein 1, zinc-binding | SEQ ID NOS: 1290- |
| | | 1292 |
| AZU1 | Azurocidin 1 | SEQ ID NOS: 1293- |
| | | 1294 |
| B2M | Beta-2-microglobulin | SEQ ID NOS: 1295- |
| | | 1301 |
| B3GALNT1 | Beta-1,3-N-acetylgalactosaminyltransferase | SEQ ID NOS: 1302- |
| | 1 (globoside blood group) | 1314 |
| B3GALNT2 | Beta-1,3-N-acetylgalactosaminyltransferase | SEQ ID NOS: 1315- |
| | 2 | 1317 |
| B3GALT1 | UDP-Gal:betaGlcNAc beta 1,3- | SEQ ID NO: 1318 |
| | galactosyltransferase, polypeptide 1 | |
| B3GALT4 | UDP-Gal:betaGlcNAc beta 1,3- | SEQ ID NO: 1319 |
| | galactosyltransferase, polypeptide 4 | |
| B3GALT5 | UDP-Gal:betaGlcNAc beta 1,3- | SEQ ID NOS: 1320- |
| | galactosyltransferase, polypeptide 5 | 1324 |
| B3GALT6 | UDP-Gal:betaGal beta 1,3- | SEQ ID NO: 1325 |
| | galactosyltransferase polypeptide 6 | |
| B3GAT3 | Beta-1,3-glucuronyltransferase 3 | SEQ ID NOS: 1326- |
| | | 1330 |
| B3GLCT | Beta 3-glucosyltransferase | SEQ ID NO: 1331 |
| B3GNT3 | UDP-GlcNAc:betaGal beta-1,3-N- | SEQ ID NOS: 1332- |
| | acetylglucosaminyltransferase 3 | 1335 |
| B3GNT4 | UDP-GlcNAc:betaGal beta-1,3-N- | SEQ ID NOS: 1336- |
| | acetylglucosaminyltransferase 4 | 1339 |
| B3GNT6 | UDP-GlcNAc:betaGal beta-1,3-N- | SEQ ID NOS: 1340- |
| | acetylglucosaminyltransferase 6 | 1341 |
| B3GNT7 | UDP-GlcNAc:betaGal beta-1,3-N- | SEQ ID NO: 1342 |
| | acetylglucosaminyltransferase 7 | |
| B3GNT8 | UDP-GlcNAc:betaGal beta-1,3-N- | SEQ ID NO: 1343 |
| | acetylglucosaminyltransferase 8 | |
| B3GNT9 | UDP-GlcNAc:betaGal beta-1,3-N- | SEQ ID NO: 1344 |
| | acetylglucosaminyltransferase 9 | |
| B4GALNT1 | Beta-1,4-N-acetyl-galactosaminyl | SEQ ID NOS: 1345- |
| | transferase 1 | 1356 |
| B4GALNT3 | Beta-1,4-N-acetyl-galactosaminyl | SEQ ID NOS: 1357- |
| | transferase 3 | 1358 |
| B4GALNT4 | Beta-1,4-N-acetyl-galactosaminyl | SEQ ID NOS: 1359- |
| | transferase 4 | 1361 |
| B4GALT4 | UDP-Gal:betaGlcNAc beta 1,4- | SEQ ID NOS: 1362- |
| | galactosyltransferase, polypeptide 4 | 1374 |
| B4GALT5 | UDP-Gal:betaGlcNAc beta 1,4- | SEQ ID NO: 1375 |
| | galactosyltransferase, polypeptide 5 | |
| B4GALT6 | UDP-Gal:betaGlcNAc beta 1,4- | SEQ ID NOS: 1376- |
| | galactosyltransferase, polypeptide 6 | 1379 |
| B4GAT1 | Beta-1,4-glucuronyltransferase 1 | SEQ ID NO: 1380 |
| B9D1 | B9 protein domain 1 | SEQ ID NOS: 1381- |
| | | 1397 |
| BACE2 | Beta-site APP-cleaving enzyme 2 | SEQ ID NOS: 1398- |
| | | 1400 |
| BAGE5 | B melanoma antigen family, member 5 | SEQ ID NO: 1401 |
| BCAM | Basal cell adhesion molecule (Lutheran | SEQ ID NOS: 1402- |
| | blood group) | 1405 |
| BCAN | Brevican | SEQ ID NOS: 1406- |
| | | 1412 |
| BCAP29 | B-cell receptor-associated protein 29 | SEQ ID NOS: 1413- |
| | | 1425 |
| BCAR1 | Breast cancer anti-estrogen resistance 1 | SEQ ID NOS: 1426- |
| | | 1443 |
| BCHE | Butyrylcholinesterase | SEQ ID NOS: 1444- |
| | | 1448 |
| BCKDHB | Branched chain keto acid dehydrogenase | SEQ ID NOS: 1449- |
| | E1, beta polypeptide | 1451 |
| BDNF | Brain-derived neurotrophic factor | SEQ ID NOS: 1452- |
| | | 1469 |
| BGLAP | Bone gamma-carboxyglutamate (gla) | SEQ ID NO: 1470 |
| | protein | |
| BGN | Biglycan | SEQ ID NOS: 1471- |
| | | 1472 |
| BLVRB | Biliverdin reductase B | SEQ ID NOS: 1473- |
| | | 1477 |
| BMP1 | Bone morphogenetic protein 1 | SEQ ID NOS: 1478- |
| | | 1489 |
| BMP10 | Bone morphogenetic protein 10 | SEQ ID NO: 1490 |
| BMP15 | Bone morphogenetic protein 15 | SEQ ID NO: 1491 |
| BMP2 | Bone morphogenetic protein 2 | SEQ ID NO: 1492 |
| BMP3 | Bone morphogenetic protein 3 | SEQ ID NO: 1493 |
| BMP4 | Bone morphogenetic protein 4 | SEQ ID NOS: 1494- |
| | | 1501 |
| BMP6 | Bone morphogenetic protein 6 | SEQ ID NO: 1502 |
| BMP7 | Bone morphogenetic protein 7 | SEQ ID NOS: 1503- |
| | | 1506 |
| BMP8A | Bone morphogenetic protein 8a | SEQ ID NO: 1507 |
| BMP8B | Bone morphogenetic protein 8b | SEQ ID NO: 1508 |
| BMPER | BMP binding endothelial regulator | SEQ ID NOS: 1509- |
| | | 1512 |
| BNC1 | Basonuclin 1 | SEQ ID NOS: 1513- |
| | | 1514 |
| BOC | BOC cell adhesion associated, oncogene | SEQ ID NOS: 1515- |
| | regulated | 1525 |
| BOD1 | Biorientation of chromosomes in cell | SEQ ID NOS: 1526- |
| | division 1 | 1530 |
| BOLA1 | BolA family member 1 | SEQ ID NOS: 1531- |
| | | 1533 |
| BPI | Bactericidal/permeability-increasing protein | SEQ ID NOS: 1534- |
| | | 1537 |
| BPIFA1 | BPI fold containing family A, member 1 | SEQ ID NOS: 1538- |
| | | 1541 |
| BPIFA2 | BPI fold containing family A, member 2 | SEQ ID NOS: 1542- |
| | | 1543 |
| BPIFA3 | BPI fold containing family A, member 3 | SEQ ID NOS: 1544- |
| | | 1545 |
| BPIFB1 | BPI fold containing family B, member 1 | SEQ ID NOS: 1546- |
| | | 1547 |
| BPIFB2 | BPI fold containing family B, member 2 | SEQ ID NO: 1548 |
| BPIFB3 | BPI fold containing family B, member 3 | SEQ ID NO: 1549 |
| BPIFB4 | BPI fold containing family B, member 4 | SEQ ID NOS: 1550- |
| | | 1551 |
| BPIFB6 | BPI fold containing family B, member 6 | SEQ ID NOS: 1552- |
| | | 1553 |
| BPIFC | BPI fold containing family C | SEQ ID NOS: 1554- |
| | | 1557 |
| BRF1 | BRF1, RNA polymerase III transcription | SEQ ID NOS: 1558- |
| | initiation factor 90 kDa subunit | 1573 |
| BRINP1 | Bone morphogenetic protein/retinoic acid | SEQ ID NOS: 1574- |
| | inducible neural-specific 1 | 1575 |
| BRINP2 | Bone morphogenetic protein/retinoic acid | SEQ ID NO: 1576 |
| | inducible neural-specific 2 | |
| BRINP3 | Bone morphogenetic protein/retinoic acid | SEQ ID NOS: 1577- |
| | inducible neural-specific 3 | 1579 |
| BSG | Basigin (Ok blood group) | SEQ ID NOS: 1580- |
| | | 1590 |
| BSPH1 | Binder of sperm protein homolog 1 | SEQ ID NO: 1591 |
| BST1 | Bone marrow stromal cell antigen 1 | SEQ ID NOS: 1592- |
| | | 1596 |
| BTBD17 | BTB (POZ) domain containing 17 | SEQ ID NO: 1597 |
| BTD | Biotinidase | SEQ ID NOS: 1598- |
| | | 1607 |
| BTN2A2 | Butyrophilin, subfamily 2, member A2 | SEQ ID NOS: 1608- |
| | | 1621 |
| BTN3A1 | Butyrophilin, subfamily 3, member A1 | SEQ ID NOS: 1622- |
| | | 1628 |
| BTN3A2 | Butyrophilin, subfamily 3, member A2 | SEQ ID NOS: 1629- |
| | | 1639 |
| BTN3A3 | Butyrophilin, subfamily 3, member A3 | SEQ ID NOS: 1640- |
| | | 1648 |
| C10orf10 | Chromosome 10 open reading frame 10 | SEQ ID NOS: 4169- |
| | | 4170 |
| C10orf99 | Chromosome 10 open reading frame 99 | SEQ ID NO: 1650 |
| C11orf1 | Chromosome 11 open reading frame 1 | SEQ ID NOS: 1651- |
| | | 1655 |
| C11orf24 | Chromosome 11 open reading frame 24 | SEQ ID NOS: 1656- |
| | | 1658 |
| C11orf45 | Chromosome 11 open reading frame 45 | SEQ ID NOS: 1659- |
| | | 1660 |
| C11orf94 | Chromosome 11 open reading frame 94 | SEQ ID NO: 1661 |
| C12orf10 | Chromosome 12 open reading frame 10 | SEQ ID NOS: 1662- |
| | | 1665 |
| C12orf49 | Chromosome 12 open reading frame 49 | SEQ ID NOS: 1666- |
| | | 1669 |
| C12orf73 | Chromosome 12 open reading frame 73 | SEQ ID NOS: 1670- |
| | | 1679 |
| C12orf76 | Chromosome 12 open reading frame 76 | SEQ ID NOS: 1680- |
| | | 1687 |
| C14orf80 | Chromosome 14 open reading frame 80 | SEQ ID NOS: 13083- |
| | | 13096 |
| C14orf93 | Chromosome 14 open reading frame 93 | SEQ ID NOS: 1688- |
| | | 1703 |
| C16orf89 | Chromosome 16 open reading frame 89 | SEQ ID NOS: 1704- |
| | | 1706 |
| C16orf90 | Chromosome 16 open reading frame 90 | SEQ ID NOS: 1707- |
| | | 1708 |
| C17orf67 | Chromosome 17 open reading frame 67 | SEQ ID NO: 1709 |
| C17orf75 | Chromosome 17 open reading frame 75 | SEQ ID NOS: 1710- |
| | | 1718 |
| C17orf99 | Chromosome 17 open reading frame 99 | SEQ ID NOS: 1719- |
| | | 1721 |
| C18orf54 | Chromosome 18 open reading frame 54 | SEQ ID NOS: 1722- |
| | | 1726 |
| C19orf47 | Chromosome 19 open reading frame 47 | SEQ ID NOS: 1727- |
| | | 1734 |
| C19orf70 | Chromosome 19 open reading frame 70 | SEQ ID NOS: 1735- |
| | | 1738 |
| C19orf80 | Chromosome 19 open reading frame 80 | SEQ ID NOS: 829-832 |
| C1GALT1 | Core 1 synthase, glycoprotein-N- | SEQ ID NOS: 1739- |
| | acetylgalactosamine 3-beta- | 1743 |
| | galactosyltransferase 1 | |
| C1orf127 | Chromosome 1 open reading frame 127 | SEQ ID NOS: 1744- |
| | | 1747 |
| C1orf159 | Chromosome 1 open reading frame 159 | SEQ ID NOS: 1748- |
| | | 1760 |
| C1orf198 | Chromosome 1 open reading frame 198 | SEQ ID NOS: 1761- |
| | | 1765 |
| C1orf234 | Chromosome 1 open reading frame 234 | SEQ ID NOS: 13118- |
| | | 13120 |
| C1orf54 | Chromosome 1 open reading frame 54 | SEQ ID NOS: 1766- |
| | | 1768 |
| C1orf56 | Chromosome 1 open reading frame 56 | SEQ ID NO: 1769 |
| C1QA | Complement component 1, q | SEQ ID NOS: 1770- |
| | subcomponent, A chain | 1772 |
| C1QB | Complement component 1, q | SEQ ID NOS: 1773- |
| | subcomponent, B chain | 1776 |
| C1QC | Complement component 1, q | SEQ ID NOS: 1777- |
| | subcomponent, C chain | 1779 |
| C1QL1 | Complement component 1, q | SEQ ID NO: 1780 |
| | subcomponent-like 1 | |
| C1QL2 | Complement component 1, q | SEQ ID NO: 1781 |
| | subcomponent-like 2 | |
| C1QL3 | Complement component 1, q | SEQ ID NOS: 1782- |
| | subcomponent-like 3 | 1783 |
| C1QL4 | Complement component 1, q | SEQ ID NO: 1784 |
| | subcomponent-like 4 | |
| C1QTNF1 | C1q and tumor necrosis factor related | SEQ ID NOS: 1785- |
| | protein 1 | 1794 |
| C1QTNF2 | C1q and tumor necrosis factor related | SEQ ID NO: 1796 |
| | protein 2 | |
| C1QTNF3 | C1q and tumor necrosis factor related | SEQ ID NOS: 1797- |
| | protein 3 | 1798 |
| C1QTNF4 | C1q and tumor necrosis factor related | SEQ ID NOS: 1799- |
| | protein 4 | 1800 |
| C1QTNF5 | C1q and tumor necrosis factor related | SEQ ID NOS: 1801- |
| | protein 5 | 1803 |
| C1QTNF7 | C1q and tumor necrosis factor related | SEQ ID NOS: 1804- |
| | protein 7 | 1808 |
| C1QTNF8 | C1q and tumor necrosis factor related | SEQ ID NOS: 1809- |
| | protein 8 | 1810 |
| C1QTNF9 | C1q and tumor necrosis factor related | SEQ ID NOS: 1811- |
| | protein 9 | 1812 |
| C1QTNF9B | C1q and tumor necrosis factor related | SEQ ID NOS: 1813- |
| | protein 9B | 1815 |
| C1R | Complement component 1, r subcomponent | SEQ ID NOS: 1816- |
| | | 1824 |
| C1RL | Complement component 1, r subcomponent- | SEQ ID NOS: 1825- |
| | like | 1833 |
| C1S | Complement component 1, s subcomponent | SEQ ID NOS: 1834- |
| | | 1843 |
| C2 | Complement component 2 | SEQ ID NOS: 1844- |
| | | 1858 |
| C21orf33 | Chromosome 21 open reading frame 33 | SEQ ID NOS: 1859- |
| | | 1867 |
| C21orf62 | Chromosome 21 open reading frame 62 | SEQ ID NOS: 1868- |
| | | 1871 |
| C22orf15 | Chromosome 22 open reading frame 15 | SEQ ID NOS: 1872- |
| | | 1874 |
| C22orf46 | Chromosome 22 open reading frame 46 | SEQ ID NO: 1875 |
| C2CD2 | C2 calcium-dependent domain containing 2 | SEQ ID NOS: 1876- |
| | | 1878 |
| C2orf40 | Chromosome 2 open reading frame 40 | SEQ ID NOS: 1879- |
| | | 1881 |
| C2orf66 | Chromosome 2 open reading frame 66 | SEQ ID NO: 1882 |
| C2orf69 | Chromosome 2 open reading frame 69 | SEQ ID NO: 1883 |
| C2orf78 | Chromosome 2 open reading frame 78 | SEQ ID NO: 1884 |
| C3 | Complement component 3 | SEQ ID NOS: 1885- |
| | | 1889 |
| C3orf33 | Chromosome 3 open reading frame 33 | SEQ ID NOS: 1890- |
| | | 1894 |
| C3orf58 | Chromosome 3 open reading frame 58 | SEQ ID NOS: 1895- |
| | | 1898 |
| C4A | Complement component 4A (Rodgers blood | SEQ ID NOS: 1899- |
| | group) | 1900 |
| C4B | Complement component 4B (Chido blood | SEQ ID NOS: 1901- |
| | group) | 1902 |
| C4BPA | Complement component 4 binding protein, | SEQ ID NOS: 1903- |
| | alpha | 1905 |
| C4BPB | Complement component 4 binding protein, | SEQ ID NOS: 1906- |
| | beta | 1910 |
| C4orf26 | Chromosome 4 open reading frame 26 | SEQ ID NOS: 9751- |
| | | 9754 |
| C4orf48 | Chromosome 4 open reading frame 48 | SEQ ID NOS: 1911- |
| | | 1912 |
| C5 | Complement component 5 | SEQ ID NO: 1913 |
| C5orf46 | Chromosome 5 open reading frame 46 | SEQ ID NOS: 1914- |
| | | 1915 |
| C6 | Complement component 6 | SEQ ID NOS: 1916- |
| | | 1919 |
| C6orf120 | Chromosome 6 open reading frame 120 | SEQ ID NO: 1920 |
| C6orf15 | Chromosome 6 open reading frame 15 | SEQ ID NO: 1921 |
| C6orf25 | Chromosome 6 open reading frame 25 | SEQ ID NOS: 8832- |
| | | 8839 |
| C6orf58 | Chromosome 6 open reading frame 58 | SEQ ID NO: 1922 |
| C7 | Complement component 7 | SEQ ID NO: 1923 |
| C7orf57 | Chromosome 7 open reading frame 57 | SEQ ID NOS: 1924- |
| | | 1928 |
| C7orf73 | Chromosome 7 open reading frame 73 | SEQ ID NOS: 12924- |
| | | 12925 |
| C8A | Complement component 8, alpha | SEQ ID NO: 1929 |
| | polypeptide | |
| C8B | Complement component 8, beta polypeptide | SEQ ID NOS: 1930- |
| | | 1932 |
| C8G | Complement component 8, gamma | SEQ ID NOS: 1933- |
| | polypeptide | 1934 |
| C9 | Complement component 9 | SEQ ID NO: 1935 |
| C9orf47 | Chromosome 9 open reading frame 47 | SEQ ID NOS: 1936- |
| | | 1938 |
| CA10 | Carbonic anhydrase X | SEQ ID NOS: 1939- |
| | | 1945 |
| CA11 | Carbonic anhydrase XI | SEQ ID NOS: 1946- |
| | | 1947 |
| CA6 | Carbonic anhydrase VI | SEQ ID NOS: 1948- |
| | | 1952 |
| CA9 | Carbonic anhydrase IX | SEQ ID NOS: 1953- |
| | | 1954 |
| CABLES1 | Cdk5 and Abl enzyme substrate 1 | SEQ ID NOS: 1955- |
| | | 1960 |
| CABP1 | Calcium binding protein 1 | SEQ ID NOS: 1961- |
| | | 1964 |
| CACNA2D1 | Calcium channel, voltage-dependent, alpha | SEQ ID NOS: 1965- |
| | 2/delta subunit 1 | 1968 |
| CACNA2D4 | Calcium channel, voltage-dependent, alpha | SEQ ID NOS: 1969- |
| | 2/delta subunit 4 | 1982 |
| CADM3 | Cell adhesion molecule 3 | SEQ ID NOS: 1983- |
| | | 1985 |
| CALCA | Calcitonin-related polypeptide alpha | SEQ ID NOS: 1986- |
| | | 1990 |
| CALCB | Calcitonin-related polypeptide beta | SEQ ID NOS: 1991- |
| | | 1993 |
| CALCR | Calcitonin receptor | SEQ ID NOS: 1994- |
| | | 2000 |
| CALCRL | Calcitonin receptor-like | SEQ ID NOS: 2001- |
| | | 2005 |
| CALR | Calreticulin | SEQ ID NOS: 2011- |
| | | 2014 |
| CALR3 | Calreticulin 3 | SEQ ID NOS: 2015- |
| | | 2016 |
| CALU | Calumenin | SEQ ID NOS: 2017- |
| | | 2022 |
| CAMK2D | Calcium/calmodulin-dependent protein | SEQ ID NOS: 2023- |
| | kinase II delta | 2034 |
| CAMP | Cathelicidin antimicrobial peptide | SEQ ID NO: 2035 |
| CANX | Calnexin | SEQ ID NOS: 2036- |
| | | 2050 |
| CARKD | Carbohydrate kinase domain containing | SEQ ID NOS: 9175- |
| | | 9176 |
| CARM1 | Coactivator-associated arginine | SEQ ID NOS: 2051- |
| | methyltransferase 1 | 2058 |
| CARNS1 | Carnosine synthase 1 | SEQ ID NOS: 2059- |
| | | 2061 |
| CARTPT | CART prepropeptide | SEQ ID NO: 2062 |
| CASQ1 | Calsequestrin 1 (fast-twitch, skeletal | SEQ ID NOS: 2063- |
| | muscle) | 2064 |
| CASQ2 | Calsequestrin 2 (cardiac muscle) | SEQ ID NO: 2065 |
| CATSPERG | Catsper channel auxiliary subunit gamma | SEQ ID NOS: 2066- |
| | | 2073 |
| CBLN1 | Cerebellin 1 precursor | SEQ ID NOS: 2074- |
| | | 2076 |
| CBLN2 | Cerebellin 2 precursor | SEQ ID NOS: 2077- |
| | | 2080 |
| CBLN3 | Cerebellin 3 precursor | SEQ ID NOS: 2081- |
| | | 2082 |
| CBLN4 | Cerebellin 4 precursor | SEQ ID NO: 2083 |
| CCBE1 | Collagen and calcium binding EGF domains | SEQ ID NOS: 2084- |
| | 1 | 2086 |
| CCDC108 | Coiled-coil domain containing 108 | SEQ ID NOS: 2659- |
| | | 2668 |
| CCDC112 | Coiled-coil domain containing 112 | SEQ ID NOS: 2087- |
| | | 2090 |
| CCDC129 | Coiled-coil domain containing 129 | SEQ ID NOS: 2091- |
| | | 2098 |
| CCDC134 | Coiled-coil domain containing 134 | SEQ ID NOS: 2099- |
| | | 2100 |
| CCDC149 | Coiled-coil domain containing 149 | SEQ ID NOS: 2101- |
| | | 2104 |
| CCDC3 | Coiled-coil domain containing 3 | SEQ ID NOS: 2105- |
| | | 2106 |
| CCDC80 | Coiled-coil domain containing 80 | SEQ ID NOS: 2107- |
| | | 2110 |
| CCDC85A | Coiled-coil domain containing 85A | SEQ ID NO: 2111 |
| CCDC88B | Coiled-coil domain containing 88B | SEQ ID NOS: 2112- |
| | | 2114 |
| CCER2 | Coiled-coil glutamate-rich protein 2 | SEQ ID NOS: 2115- |
| | | 2116 |
| CCK | Cholecystokinin | SEQ ID NOS: 2117- |
| | | 2119 |
| CCL1 | Chemokine (C-C motif) ligand 1 | SEQ ID NO: 2120 |
| CCL11 | Chemokine (C-C motif) ligand 11 | SEQ ID NO: 2121 |
| CCL13 | Chemokine (C-C motif) ligand 13 | SEQ ID NOS: 2122- |
| | | 2123 |
| CCL14 | Chemokine (C-C motif) ligand 14 | SEQ ID NOS: 2124- |
| | | 2127 |
| CCL15 | Chemokine (C-C motif) ligand 15 | SEQ ID NOS: 2128- |
| | | 2129 |
| CCL16 | Chemokine (C-C motif) ligand 16 | SEQ ID NOS: 2130- |
| | | 2132 |
| CCL17 | Chemokine (C-C motif) ligand 17 | SEQ ID NOS: 2133- |
| | | 2134 |
| CCL18 | Chemokine (C-C motif) ligand 18 | SEQ ID NO: 2135 |
| | (pulmonary and activation-regulated) | |
| CCL19 | Chemokine (C-C motif) ligand 19 | SEQ ID NOS: 2136- |
| | | 2137 |
| CCL2 | Chemokine (C-C motif) ligand 2 | SEQ ID NOS: 2138- |
| | | 2139 |
| CCL20 | Chemokine (C-C motif) ligand 20 | SEQ ID NOS: 2140- |
| | | 2142 |
| CCL21 | Chemokine (C-C motif) ligand 21 | SEQ ID NOS: 2143- |
| | | 2144 |
| CCL22 | Chemokine (C-C motif) ligand 22 | SEQ ID NO: 2145 |
| CCL23 | Chemokine (C-C motif) ligand 23 | SEQ ID NOS: 2146- |
| | | 2148 |
| CCL24 | Chemokine (C-C motif) ligand 24 | SEQ ID NOS: 2149- |
| | | 2150 |
| CCL25 | Chemokine (C-C motif) ligand 25 | SEQ ID NOS: 2151- |
| | | 2154 |
| CCL26 | Chemokine (C-C motif) ligand 26 | SEQ ID NOS: 2155- |
| | | 2156 |
| CCL27 | Chemokine (C-C motif) ligand 27 | SEQ ID NO: 2157 |
| CCL28 | Chemokine (C-C motif) ligand 28 | SEQ ID NOS: 2158- |
| | | 2160 |
| CCL3 | Chemokine (C-C motif) ligand 3 | SEQ ID NO: 2161 |
| CCL3L3 | Chemokine (C-C motif) ligand 3-like 3 | SEQ ID NO: 2162 |
| CCL4 | Chemokine (C-C motif) ligand 4 | SEQ ID NOS: 2163- |
| | | 2164 |
| CCL4L2 | Chemokine (C-C motif) ligand 4-like 2 | SEQ ID NOS: 2165- |
| | | 2174 |
| CCL5 | Chemokine (C-C motif) ligand 5 | SEQ ID NOS: 2175- |
| | | 2177 |
| CCL7 | Chemokine (C-C motif) ligand 7 | SEQ ID NOS: 2178- |
| | | 2180 |
| CCL8 | Chemokine (C-C motif) ligand 8 | SEQ ID NO: 2181 |
| CCNB1IP1 | Cyclin Bl interacting protein 1, E3 | SEQ ID NOS: 2182- |
| | ubiquitin protein ligase | 2193 |
| CCNL1 | Cyclin L1 | SEQ ID NOS: 2194- |
| | | 2202 |
| CCNL2 | Cyclin L2 | SEQ ID NOS: 2203- |
| | | 2210 |
| CD14 | CD14 molecule | SEQ ID NOS: 2211- |
| | | 2215 |
| CD160 | CD160 molecule | SEQ ID NOS: 2216- |
| | | 2220 |
| CD164 | CD164 molecule, sialomucin | SEQ ID NOS: 2221- |
| | | 2226 |
| CD177 | CD177 molecule | SEQ ID NOS: 2227- |
| | | 2229 |
| CD1E | CD1e molecule | SEQ ID NOS: 2230- |
| | | 2243 |
| CD2 | CD2 molecule | SEQ ID NOS: 2244- |
| | | 2245 |
| CD200 | CD200 molecule | SEQ ID NOS: 2246- |
| | | 2252 |
| CD200R1 | CD200 receptor 1 | SEQ ID NOS: 2253- |
| | | 2257 |
| CD22 | CD22 molecule | SEQ ID NOS: 2258- |
| | | 2275 |
| CD226 | CD226 molecule | SEQ ID NOS: 2276- |
| | | 2283 |
| CD24 | CD24 molecule | SEQ ID NOS: 2284- |
| | | 2290 |
| CD276 | CD276 molecule | SEQ ID NOS: 2291- |
| | | 2306 |
| CD300A | CD300a molecule | SEQ ID NOS: 2307- |
| | | 2311 |
| CD300LB | CD300 molecule-like family member b | SEQ ID NOS: 2312- |
| | | 2313 |
| CD300LF | CD300 molecule-like family member f | SEQ ID NOS: 2314- |
| | | 2322 |
| CD300LG | CD300 molecule-like family member g | SEQ ID NOS: 2323- |
| | | 2328 |
| CD3D | CD3d molecule, delta (CD3-TCR complex) | SEQ ID NOS: 2329- |
| | | 2332 |
| CD4 | CD4 molecule | SEQ ID NOS: 2333- |
| | | 2335 |
| CD40 | CD40 molecule, TNF receptor superfamily | SEQ ID NOS: 2336- |
| | member 5 | 2339 |
| CD44 | CD44 molecule (Indian blood group) | SEQ ID NOS: 2340- |
| | | 2366 |
| CD48 | CD48 molecule | SEQ ID NOS: 2367- |
| | | 2369 |
| CD5 | CD5 molecule | SEQ ID NOS: 2370- |
| | | 2371 |
| CD55 | CD55 molecule, decay accelerating factor | SEQ ID NOS: 2372- |
| | for complement (Cromer blood group) | 2382 |
| CD59 | CD59 molecule, complement regulatory | SEQ ID NOS: 2383- |
| | protein | 2393 |
| CD5L | CD5 molecule-like | SEQ ID NO: 2394 |
| CD6 | CD6 molecule | SEQ ID NOS: 2395- |
| | | 2402 |
| CD68 | CD68 molecule | SEQ ID NOS: 2403- |
| | | 2406 |
| CD7 | CD7 molecule | SEQ ID NOS: 2407- |
| | | 2412 |
| CD79A | CD79a molecule, immunoglobulin- | SEQ ID NOS: 2413- |
| | associated alpha | 2415 |
| CD80 | CD80 molecule | SEQ ID NOS: 2416- |
| | | 2418 |
| CD86 | CD86 molecule | SEQ ID NOS: 2419- |
| | | 2425 |
| CD8A | CD8a molecule | SEQ ID NOS: 2426- |
| | | 2429 |
| CD8B | CD8b molecule | SEQ ID NOS: 2430- |
| | | 2435 |
| CD99 | CD99 molecule | SEQ ID NOS: 2436- |
| | | 2444 |
| CDC23 | Cell division cycle 23 | SEQ ID NOS: 2445- |
| | | 2449 |
| CDC40 | Cell division cycle 40 | SEQ ID NOS: 2450- |
| | | 2452 |
| CDC45 | Cell division cycle 45 | SEQ ID NOS: 2453- |
| | | 2459 |
| CDCP1 | CUB domain containing protein 1 | SEQ ID NOS: 2460- |
| | | 2461 |
| CDCP2 | CUB domain containing protein 2 | SEQ ID NOS: 2462- |
| | | 2463 |
| CDH1 | Cadherin 1, type 1 | SEQ ID NOS: 2464- |
| | | 2471 |
| CDH11 | Cadherin 11, type 2, OB-cadherin | SEQ ID NOS: 2472- |
| | (osteoblast) | 2481 |
| CDH13 | Cadherin 13 | SEQ ID NOS: 2482- |
| | | 2491 |
| CDH17 | Cadherin 17, LI cadherin (liver-intestine) | SEQ ID NOS: 2492- |
| | | 2496 |
| CDH18 | Cadherin 18, type 2 | SEQ ID NOS: 2497- |
| | | 2503 |
| CDH19 | Cadherin 19, type 2 | SEQ ID NOS: 2504- |
| | | 2508 |
| CDH23 | Cadherin-related 23 | SEQ ID NOS: 2509- |
| | | 2524 |
| CDH5 | Cadherin 5, type 2 (vascular endothelium) | SEQ ID NOS: 2525- |
| | | 2532 |
| CDHR1 | Cadherin-related family member 1 | SEQ ID NOS: 2533- |
| | | 2538 |
| CDHR4 | Cadherin-related family member 4 | SEQ ID NOS: 2539- |
| | | 2543 |
| CDHR5 | Cadherin-related family member 5 | SEQ ID NOS: 2544- |
| | | 2550 |
| CDKN2A | Cyclin-dependent kinase inhibitor 2A | SEQ ID NOS: 2551- |
| | | 2561 |
| CDNF | Cerebral dopamine neurotrophic factor | SEQ ID NOS: 2562- |
| | | 2563 |
| CDON | Cell adhesion associated, oncogene | SEQ ID NOS: 2564- |
| | regulated | 2571 |
| CDSN | Corneodesmosin | SEQ ID NO: 2572 |
| CEACAM16 | Carcinoembryonic antigen-related cell | SEQ ID NOS: 2573- |
| | adhesion molecule 16 | 2574 |
| CEACAM18 | Carcinoembryonic antigen-related cell | SEQ ID NO: 2575 |
| | adhesion molecule 18 | |
| CEACAM19 | Carcinoembryonic antigen-related cell | SEQ ID NOS: 2576- |
| | adhesion molecule 19 | 2582 |
| CEACAM5 | Carcinoembryonic antigen-related cell | SEQ ID NOS: 2583- |
| | adhesion molecule 5 | 2590 |
| CEACAM7 | Carcinoembryonic antigen-related cell | SEQ ID NOS: 2591- |
| | adhesion molecule 7 | 2593 |
| CEACAM8 | Carcinoembryonic antigen-related cell | SEQ ID NOS: 2594- |
| | adhesion molecule 8 | 2595 |
| CECR1 | Cat eye syndrome chromosome region, | SEQ ID NOS: 222-229 |
| | candidate 1 | |
| CECR5 | Cat eye syndrome chromosome region, | SEQ ID NOS: 6411- |
| | candidate 5 | 6413 |
| CEL | Carboxyl ester lipase | SEQ ID NO: 2596 |
| CELA2A | Chymotrypsin-like elastase family, member | SEQ ID NO: 2597 |
| | 2A | |
| CELA2B | Chymotrypsin-like elastase family, member | SEQ ID NOS: 2598- |
| | 2B | 2599 |
| CELA3A | Chymotrypsin-like elastase family, member | SEQ ID NOS: 2600- |
| | 3A | 2602 |
| CELA3B | Chymotrypsin-like elastase family, member | SEQ ID NOS: 2603- |
| | 3B | 2605 |
| CEMIP | Cell migration inducing protein, hyaluronan | SEQ ID NOS: 2606- |
| | binding | 2610 |
| CEP89 | Centrosomal protein 89 kDa | SEQ ID NOS: 2611- |
| | | 2616 |
| CER1 | Cerberus 1, DAN family BMP antagonist | SEQ ID NO: 2617 |
| CERCAM | Cerebral endothelial cell adhesion molecule | SEQ ID NOS: 2618- |
| | | 2625 |
| CERS1 | Ceramide synthase 1 | SEQ ID NOS: 2626- |
| | | 2630 |
| CES1 | Carboxylesterase 1 | SEQ ID NOS: 2631- |
| | | 2636 |
| CES3 | Carboxylesterase 3 | SEQ ID NOS: 2637- |
| | | 2641 |
| CES4A | Carboxylesterase 4A | SEQ ID NOS: 2642- |
| | | 2647 |
| CES5A | Carboxylesterase 5A | SEQ ID NOS: 2648- |
| | | 2655 |
| CETP | Cholesteryl ester transfer protein, plasma | SEQ ID NOS: 2656- |
| | | 2658 |
| CFB | Complement factor B | SEQ ID NOS: 2669- |
| | | 2673 |
| CFC1 | Cripto, FRL-1, cryptic family 1 | SEQ ID NOS: 2674- |
| | | 2676 |
| CFC1B | Cripto, FRL-1, cryptic family 1B | SEQ ID NOS: 2677- |
| | | 2679 |
| CFD | Complement factor D (adipsin) | SEQ ID NOS: 2680- |
| | | 2681 |
| CFDP1 | Craniofacial development protein 1 | SEQ ID NOS: 2682- |
| | | 2685 |
| CFH | Complement factor H | SEQ ID NOS: 2686- |
| | | 2688 |
| CFHR1 | Complement factor H-related 1 | SEQ ID NOS: 2689- |
| | | 2690 |
| CFHR2 | Complement factor H-related 2 | SEQ ID NOS: 2691- |
| | | 2692 |
| CFHR3 | Complement factor H-related 3 | SEQ ID NOS: 2693- |
| | | 2697 |
| CFHR4 | Complement factor H-related 4 | SEQ ID NOS: 2698- |
| | | 2701 |
| CFHR5 | Complement factor H-related 5 | SEQ ID NO: 2702 |
| CFI | Complement factor I | SEQ ID NOS: 2703- |
| | | 2707 |
| CFP | Complement factor properdin | SEQ ID NOS: 2708- |
| | | 2711 |
| CGA | Glycoprotein hormones, alpha polypeptide | SEQ ID NOS: 2712- |
| | | 2716 |
| CGB | Chorionic gonadotropin, beta polypeptide | SEQ ID NO: 2721 |
| CGB1 | Chorionic gonadotropin, beta polypeptide 1 | SEQ ID NOS: 2717- |
| | | 2718 |
| CGB2 | Chorionic gonadotropin, beta polypeptide 2 | SEQ ID NOS: 2719- |
| | | 2720 |
| CGB5 | Chorionic gonadotropin, beta polypeptide 5 | SEQ ID NO: 2722 |
| CGB7 | Chorionic gonadotropin, beta polypeptide 7 | SEQ ID NOS: 2723- |
| | | 2725 |
| CGB8 | Chorionic gonadotropin, beta polypeptide 8 | SEQ ID NO: 2726 |
| CGREF1 | Cell growth regulator with EF-hand domain | SEQ ID NOS: 2727- |
| | 1 | 2734 |
| CH507-9B2.3 | | SEQ ID NOS: 5532- |
| | | 5538 |
| CHAD | Chondroadherin | SEQ ID NOS: 2735- |
| | | 2737 |
| CHADL | Chondroadherin-like | SEQ ID NOS: 2738- |
| | | 2740 |
| CHEK2 | Checkpoint kinase 2 | SEQ ID NOS: 2741- |
| | | 2762 |
| CHGA | Chromogranin A | SEQ ID NOS: 2763- |
| | | 2765 |
| CHGB | Chromogranin B | SEQ ID NOS: 2766- |
| | | 2767 |
| CHI3L1 | Chitinase 3-like 1 (cartilage glycoprotein- | SEQ ID NOS: 2768- |
| | 39) | 2769 |
| CHI3L2 | Chitinase 3-like 2 | SEQ ID NOS: 2770- |
| | | 2783 |
| CHIA | Chitinase, acidic | SEQ ID NOS: 2784- |
| | | 2792 |
| CHID1 | Chitinase domain containing 1 | SEQ ID NOS: 2793- |
| | | 2811 |
| CHIT1 | Chitinase 1 (chitotriosidase) | SEQ ID NOS: 2812- |
| | | 2815 |
| CHL1 | Cell adhesion molecule L1-like | SEQ ID NOS: 2816- |
| | | 2824 |
| CHN1 | Chimerin 1 | SEQ ID NOS: 2825- |
| | | 2835 |
| CHPF | Chondroitin polymerizing factor | SEQ ID NOS: 2836- |
| | | 2838 |
| CHPF2 | Chondroitin polymerizing factor 2 | SEQ ID NOS: 2839- |
| | | 2842 |
| CHRD | Chordin | SEQ ID NOS: 2843- |
| | | 2848 |
| CHRDL1 | Chordin-like 1 | SEQ ID NOS: 2849- |
| | | 2853 |
| CHRDL2 | Chordin-like 2 | SEQ ID NOS: 2854- |
| | | 2862 |
| CHRNA2 | Cholinergic receptor, nicotinic, alpha 2 | SEQ ID NOS: 2863- |
| | (neuronal) | 2871 |
| CHRNA5 | Cholinergic receptor, nicotinic, alpha 5 | SEQ ID NOS: 2872- |
| | (neuronal) | 2875 |
| CHRNB1 | Cholinergic receptor, nicotinic, beta 1 | SEQ ID NOS: 2876- |
| | (muscle) | 2881 |
| CHRND | Cholinergic receptor, nicotinic, delta | SEQ ID NOS: 2882- |
| | (muscle) | 2887 |
| CHST1 | Carbohydrate (keratan sulfate Gal-6) | SEQ ID NO: 2888 |
| | sulfotransferase 1 | |
| CHST10 | Carbohydrate sulfotransferase 10 | SEQ ID NOS: 2889- |
| | | 2896 |
| CHST11 | Carbohydrate (chondroitin 4) | SEQ ID NOS: 2897- |
| | sulfotransferase 11 | 2901 |
| CHST13 | Carbohydrate (chondroitin 4) | SEQ ID NOS: 2902- |
| | sulfotransferase 13 | 2903 |
| CHST4 | Carbohydrate (N-acetylglucosamine 6-O) | SEQ ID NOS: 2904- |
| | sulfotransferase 4 | 2905 |
| CHST5 | Carbohydrate (N-acetylglucosamine 6-O) | SEQ ID NOS: 2906- |
| | sulfotransferase 5 | 2907 |
| CHST6 | Carbohydrate (N-acetylglucosamine 6-O) | SEQ ID NOS: 2908- |
| | sulfotransferase 6 | 2909 |
| CHST7 | Carbohydrate (N-acetylglucosamine 6-O) | SEQ ID NO: 2910 |
| | sulfotransferase 7 | |
| CHST8 | Carbohydrate (N-acetylgalactosamine 4-O) | SEQ ID NOS: 2911- |
| | sulfotransferase 8 | 2914 |
| CHSY1 | Chondroitin sulfate synthase 1 | SEQ ID NOS: 2915- |
| | | 2916 |
| CHSY3 | Chondroitin sulfate synthase 3 | SEQ ID NO: 2917 |
| CHTF8 | Chromosome transmission fidelity factor 8 | SEQ ID NOS: 2918- |
| | | 2928 |
| CILP | Cartilage intermediate layer protein, | SEQ ID NO: 2929 |
| | nucleotide pyrophosphohydrolase | |
| CILP2 | Cartilage intermediate layer protein 2 | SEQ ID NOS: 2930- |
| | | 2931 |
| CIRH1A | Cirrhosis, autosomal recessive 1A (cirhin) | SEQ ID NOS: 13974- |
| | | 13983 |
| CKLF | Chemokine-like factor | SEQ ID NOS: 2932- |
| | | 2937 |
| CKMT1A | Creatine kinase, mitochondrial 1A | SEQ ID NOS: 2938- |
| | | 2943 |
| CKMT1B | Creatine kinase, mitochondrial 1B | SEQ ID NOS: 2944- |
| | | 2953 |
| CLCA1 | Chloride channel accessory 1 | SEQ ID NOS: 2954- |
| | | 2955 |
| CLCF1 | Cardiotrophin-like cytokine factor 1 | SEQ ID NOS: 2956- |
| | | 2957 |
| CLDN15 | Claudin 15 | SEQ ID NOS: 2958- |
| | | 2963 |
| CLDN7 | Claudin 7 | SEQ ID NOS: 2964- |
| | | 2970 |
| CLDND1 | Claudin domain containing 1 | SEQ ID NOS: 2971- |
| | | 2996 |
| CLEC11A | C-type lectin domain family 11, member A | SEQ ID NOS: 2997- |
| | | 2999 |
| CLEC16A | C-type lectin domain family 16, member A | SEQ ID NOS: 3000- |
| | | 3005 |
| CLEC18A | C-type lectin domain family 18, member A | SEQ ID NOS: 3006- |
| | | 3011 |
| CLEC18B | C-type lectin domain family 18, member B | SEQ ID NOS: 3012- |
| | | 3015 |
| CLEC18C | C-type lectin domain family 18, member C | SEQ ID NOS: 3016- |
| | | 3022 |
| CLEC19A | C-type lectin domain family 19, member A | SEQ ID NOS: 3023- |
| | | 3026 |
| CLEC2B | C-type lectin domain family 2, member B | SEQ ID NOS: 3027- |
| | | 3028 |
| CLEC3A | C-type lectin domain family 3, member A | SEQ ID NOS: 3029- |
| | | 3030 |
| CLEC3B | C-type lectin domain family 3, member B | SEQ ID NOS: 3031- |
| | | 3032 |
| CLGN | Calmegin | SEQ ID NOS: 3033- |
| | | 3035 |
| CLN5 | Ceroid-lipofuscinosis, neuronal 5 | SEQ ID NOS: 3036- |
| | | 3047 |
| CLPS | Colipase, pancreatic | SEQ ID NOS: 3048- |
| | | 3050 |
| CLPSL1 | Colipase-like 1 | SEQ ID NOS: 3051- |
| | | 3052 |
| CLPSL2 | Colipase-like 2 | SEQ ID NOS: 3053- |
| | | 3054 |
| CLPX | Caseinolytic mitochondrial matrix peptidase | SEQ ID NOS: 3055- |
| | chaperone subunit | 3057 |
| CLSTN3 | Calsyntenin 3 | SEQ ID NOS: 3058- |
| | | 3064 |
| CLU | Clusterin | SEQ ID NOS: 3065- |
| | | 3078 |
| CLUL1 | Clusterin-like 1 (retinal) | SEQ ID NOS: 3079- |
| | | 3086 |
| CMA1 | Chymase 1, mast cell | SEQ ID NOS: 3087- |
| | | 3088 |
| CMPK1 | Cytidine monophosphate (UMP-CMP) | SEQ ID NOS: 3089- |
| | kinase 1, cytosolic | 3092 |
| CNBD1 | Cyclic nucleotide binding domain | SEQ ID NOS: 3093- |
| | containing 1 | 3096 |
| CNDP1 | Carnosine dipeptidase 1 (metallopeptidase | SEQ ID NOS: 3097- |
| | M20 family) | 3099 |
| CNPY2 | Canopy FGF signaling regulator 2 | SEQ ID NOS: 3107- |
| | | 3111 |
| CNPY3 | Canopy FGF signaling regulator 3 | SEQ ID NOS: 3112- |
| | | 3113 |
| CNPY4 | Canopy FGF signaling regulator 4 | SEQ ID NOS: 3114- |
| | | 3116 |
| CNTFR | Ciliary neurotrophic factor receptor | SEQ ID NOS: 3117- |
| | | 3120 |
| CNTN1 | Contactin 1 | SEQ ID NOS: 3121- |
| | | 3130 |
| CNTN2 | Contactin 2 (axonal) | SEQ ID NOS: 3131- |
| | | 3142 |
| CNTN3 | Contactin 3 (plasmacytoma associated) | SEQ ID NO: 3143 |
| CNTN4 | Contactin 4 | SEQ ID NOS: 3144- |
| | | 3152 |
| CNTN5 | Contactin 5 | SEQ ID NOS: 3153- |
| | | 3158 |
| CNTNAP2 | Contactin associated protein-like 2 | SEQ ID NOS: 3159- |
| | | 3162 |
| CNTNAP3 | Contactin associated protein-like 3 | SEQ ID NOS: 3163- |
| | | 3167 |
| CNTNAP3B | Contactin associated protein-like 3B | SEQ ID NOS: 3168- |
| | | 3176 |
| COASY | CoA synthase | SEQ ID NOS: 3177- |
| | | 3186 |
| COCH | Cochlin | SEQ ID NOS: 3187- |
| | | 3198 |
| COG3 | Component of oligomeric golgi complex 3 | SEQ ID NOS: 3199- |
| | | 3202 |
| COL10A1 | Collagen, type X, alpha 1 | SEQ ID NOS: 3203- |
| | | 3206 |
| COL11A1 | Collagen, type XI, alpha 1 | SEQ ID NOS: 3207- |
| | | 3217 |
| COL11A2 | Collagen, type XI, alpha 2 | SEQ ID NOS: 3218- |
| | | 3222 |
| COL12A1 | Collagen, type XII, alpha 1 | SEQ ID NOS: 3223- |
| | | 3230 |
| COL14A1 | Collagen, type XIV, alpha 1 | SEQ ID NOS: 3231- |
| | | 3238 |
| COL15A1 | Collagen, type XV, alpha 1 | SEQ ID NOS: 3239- |
| | | 3240 |
| COL16A1 | Collagen, type XVI, alpha 1 | SEQ ID NOS: 3241- |
| | | 3245 |
| COL18A1 | Collagen, type XVIII, alpha 1 | SEQ ID NOS: 3246- |
| | | 3250 |
| COL19A1 | Collagen, type XIX, alpha 1 | SEQ ID NOS: 3251- |
| | | 3253 |
| COL1A1 | Collagen, type I, alpha 1 | SEQ ID NOS: 3254- |
| | | 3255 |
| COL1A2 | Collagen, type I, alpha 2 | SEQ ID NOS: 3256- |
| | | 3257 |
| COL20A1 | Collagen, type XX, alpha 1 | SEQ ID NOS: 3258- |
| | | 3261 |
| COL21A1 | Collagen, type XXI, alpha 1 | SEQ ID NOS: 3262- |
| | | 3267 |
| COL22A1 | Collagen, type XXII, alpha 1 | SEQ ID NOS: 3268- |
| | | 3270 |
| COL24A1 | Collagen, type XXIV, alpha 1 | SEQ ID NOS: 3271- |
| | | 3274 |
| COL26A1 | Collagen, type XXVI, alpha 1 | SEQ ID NOS: 3275- |
| | | 3276 |
| COL27A1 | Collagen, type XXVII, alpha 1 | SEQ ID NOS: 3277- |
| | | 3279 |
| COL28A1 | Collagen, type XXVIII, alpha 1 | SEQ ID NOS: 3280- |
| | | 3284 |
| COL2A1 | Collagen, type II, alpha 1 | SEQ ID NOS: 3285- |
| | | 3286 |
| COL3A1 | Collagen, type III, alpha 1 | SEQ ID NOS: 3287- |
| | | 3289 |
| COL4A1 | Collagen, type IV, alpha 1 | SEQ ID NOS: 3290- |
| | | 3292 |
| COL4A2 | Collagen, type IV, alpha 2 | SEQ ID NOS: 3293- |
| | | 3295 |
| COL4A3 | Collagen, type IV, alpha 3 (Goodpasture | SEQ ID NOS: 3296- |
| | antigen) | 3299 |
| COL4A4 | Collagen, type IV, alpha 4 | SEQ ID NOS: 3300- |
| | | 3301 |
| COL4A5 | Collagen, type IV, alpha 5 | SEQ ID NOS: 3302- |
| | | 3308 |
| COL4A6 | Collagen, type IV, alpha 6 | SEQ ID NOS: 3309- |
| | | 3314 |
| COL5A1 | Collagen, type V, alpha 1 | SEQ ID NOS: 3315- |
| | | 3317 |
| COL5A2 | Collagen, type V, alpha 2 | SEQ ID NOS: 3318- |
| | | 3319 |
| COL5A3 | Collagen, type V, alpha 3 | SEQ ID NO: 3320 |
| COL6A1 | Collagen, type VI, alpha 1 | SEQ ID NOS: 3321- |
| | | 3322 |
| COL6A2 | Collagen, type VI, alpha 2 | SEQ ID NOS: 3323- |
| | | 3328 |
| COL6A3 | Collagen, type VI, alpha 3 | SEQ ID NOS: 3329- |
| | | 3337 |
| COL6A5 | Collagen, type VI, alpha 5 | SEQ ID NOS: 3338- |
| | | 3342 |
| COL6A6 | Collagen, type VI, alpha 6 | SEQ ID NOS: 3343- |
| | | 3345 |
| COL7A1 | Collagen, type VII, alpha 1 | SEQ ID NOS: 3346- |
| | | 3347 |
| COL8A1 | Collagen, type VIII, alpha 1 | SEQ ID NOS: 3348- |
| | | 3351 |
| COL8A2 | Collagen, type VIII, alpha 2 | SEQ ID NOS: 3352- |
| | | 3354 |
| COL9A1 | Collagen, type IX, alpha 1 | SEQ ID NOS: 3355- |
| | | 3358 |
| COL9A2 | Collagen, type IX, alpha 2 | SEQ ID NOS: 3359- |
| | | 3362 |
| COL9A3 | Collagen, type IX, alpha 3 | SEQ ID NOS: 3363- |
| | | 3364 |
| COLEC10 | Collectin sub-family member 10 (C-type | SEQ ID NO: 3365 |
| | lectin) | |
| COLEC11 | Collectin sub-family member 11 | SEQ ID NOS: 3366- |
| | | 3375 |
| COLGALT1 | Collagen beta(1-O)galactosyltransferase 1 | SEQ ID NOS: 3376- |
| | | 3378 |
| COLGALT2 | Collagen beta(1-O)galactosyltransferase 2 | SEQ ID NOS: 3379- |
| | | 3381 |
| COLQ | Collagen-like tail subunit (single strand of | SEQ ID NOS: 3382- |
| | homotrimer) of asymmetric | 3386 |
| | acetylcholinesterase | |
| COMP | Cartilage oligomeric matrix protein | SEQ ID NOS: 3387- |
| | | 3389 |
| C0PS6 | COP9 signalosome subunit 6 | SEQ ID NOS: 3390- |
| | | 3393 |
| COQ6 | Coenzyme Q6 monooxygenase | SEQ ID NOS: 3394- |
| | | 3401 |
| CORT | Cortistatin | SEQ ID NO: 3402 |
| CP | Ceruloplasmin (ferroxidase) | SEQ ID NOS: 3403- |
| | | 3407 |
| CPA1 | Carboxypeptidase A1 (pancreatic) | SEQ ID NOS: 3408- |
| | | 3412 |
| CPA2 | Carboxypeptidase A2 (pancreatic) | SEQ ID NOS: 3413- |
| | | 3414 |
| CPA3 | Carboxypeptidase A3 (mast cell) | SEQ ID NO: 3415 |
| CPA4 | Carboxypeptidase A4 | SEQ ID NOS: 3416- |
| | | 3421 |
| CPA6 | Carboxypeptidase A6 | SEQ ID NOS: 3422- |
| | | 3424 |
| CPAMD8 | C3 and PZP-like, alpha-2-macroglobulin | SEQ ID NOS: 3425- |
| | domain containing 8 | 3430 |
| CPB1 | Carboxypeptidase B1 (tissue) | SEQ ID NOS: 3431- |
| | | 3435 |
| CPB2 | Carboxypeptidase B2 (plasma) | SEQ ID NOS: 3436- |
| | | 3438 |
| CPE | Carboxypeptidase E | SEQ ID NOS: 3439- |
| | | 3443 |
| CPM | Carboxypeptidase M | SEQ ID NOS: 3444- |
| | | 3453 |
| CPN1 | Carboxypeptidase N, polypeptide 1 | SEQ ID NOS: 3454- |
| | | 3455 |
| CPN2 | Carboxypeptidase N, polypeptide 2 | SEQ ID NOS: 3456- |
| | | 3457 |
| CPO | Carboxypeptidase O | SEQ ID NO: 3458 |
| CPQ | Carboxypeptidase Q | SEQ ID NOS: 3459- |
| | | 3464 |
| CPVL | Carboxypeptidase, vitellogenic-like | SEQ ID NOS: 3465- |
| | | 3475 |
| CPXM1 | Carboxypeptidase X (M14 family), member | SEQ ID NO: 3476 |
| | 1 | |
| CPXM2 | Carboxypeptidase X (M14 family), member | SEQ ID NOS: 3477- |
| | 2 | 3478 |
| CPZ | Carboxypeptidase Z | SEQ ID NOS: 3479- |
| | | 3482 |
| CR1L | Complement component (3b/4b) receptor 1- | SEQ ID NOS: 3483- |
| | like | 3484 |
| CRB2 | Crumbs family member 2 | SEQ ID NOS: 3485- |
| | | 3487 |
| CREG1 | Cellular repressor of E1A-stimulated genes | SEQ ID NO: 3488 |
| | 1 | |
| CREG2 | Cellular repressor of E1A-stimulated genes | SEQ ID NO: 3489 |
| | 2 | |
| CRELD1 | Cysteine-rich with EGF-like domains 1 | SEQ ID NOS: 3490- |
| | | 3495 |
| CRELD2 | Cysteine-rich with EGF-like domains 2 | SEQ ID NOS: 3496- |
| | | 3500 |
| CRH | Corticotropin releasing hormone | SEQ ID NO: 3501 |
| CRHBP | Corticotropin releasing hormone binding | SEQ ID NOS: 3502- |
| | protein | 3503 |
| CRHR1 | Corticotropin releasing hormone receptor 1 | SEQ ID NOS: 3504- |
| | | 3515 |
| CRHR2 | Corticotropin releasing hormone receptor 2 | SEQ ID NOS: 3516- |
| | | 3522 |
| CRISP1 | Cysteine-rich secretory protein 1 | SEQ ID NOS: 3523- |
| | | 3526 |
| CRISP2 | Cysteine-rich secretory protein 2 | SEQ ID NOS: 3527- |
| | | 3529 |
| CRISP3 | Cysteine-rich secretory protein 3 | SEQ ID NOS: 3530- |
| | | 3533 |
| CRISPLD2 | Cysteine-rich secretory protein LCCL | SEQ ID NOS: 3534- |
| | domain containing 2 | 3541 |
| CRLF1 | Cytokine receptor-like factor 1 | SEQ ID NOS: 3542- |
| | | 3543 |
| CRP | C-reactive protein, pentraxin-related | SEQ ID NOS: 3544- |
| | | 3548 |
| CRTAC1 | Cartilage acidic protein 1 | SEQ ID NOS: 3549- |
| | | 3553 |
| CRTAP | Cartilage associated protein | SEQ ID NOS: 3554- |
| | | 3555 |
| CRY2 | Cryptochrome circadian clock 2 | SEQ ID NOS: 3556- |
| | | 3559 |
| CSAD | Cysteine sulfinic acid decarboxylase | SEQ ID NOS: 3560- |
| | | 3572 |
| CSF1 | Colony stimulating factor 1 (macrophage) | SEQ ID NOS: 3573- |
| | | 3580 |
| CSF1R | Colony stimulating factor 1 receptor | SEQ ID NOS: 3581- |
| | | 3585 |
| CSF2 | Colony stimulating factor 2 (granulocyte- | SEQ ID NO: 3586 |
| | macrophage) | |
| CSF2RA | Colony stimulating factor 2 receptor, alpha, | SEQ ID NOS: 3587- |
| | low-affinity (granulocyte-macrophage) | 3598 |
| CSF3 | Colony stimulating factor 3 (granulocyte) | SEQ ID NOS: 3599- |
| | | 3605 |
| CSGALNACT1 | Chondroitin sulfate N- | SEQ ID NOS: 3606- |
| | acetylgalactosaminyltransferase 1 | 3614 |
| CSH1 | Chorionic somatomammotropin hormone 1 | SEQ ID NOS: 3615- |
| | (placental lactogen) | 3618 |
| CSH2 | Chorionic somatomammotropin hormone 2 | SEQ ID NOS: 3619- |
| | | 3623 |
| CSHL1 | Chorionic somatomammotropin hormone- | SEQ ID NOS: 3624- |
| | like 1 | 3630 |
| CSN1S1 | Casein alpha s1 | SEQ ID NOS: 3631- |
| | | 3636 |
| CSN2 | Casein beta | SEQ ID NO: 3637 |
| CSN3 | Casein kappa | SEQ ID NO: 3638 |
| CST1 | Cystatin SN | SEQ ID NOS: 3639- |
| | | 3640 |
| CST11 | Cystatin 11 | SEQ ID NOS: 3641- |
| | | 3642 |
| CST2 | Cystatin SA | SEQ ID NO: 3643 |
| CST3 | Cystatin C | SEQ ID NOS: 3644- |
| | | 3646 |
| CST4 | Cystatin S | SEQ ID NO: 3647 |
| CST5 | Cystatin D | SEQ ID NO: 3648 |
| CST6 | Cystatin E/M | SEQ ID NO: 3649 |
| CST7 | Cystatin F (leukocystatin) | SEQ ID NO: 3650 |
| CST8 | Cystatin 8 (cystatin-related epididymal | SEQ ID NOS: 3651- |
| | specific) | 3652 |
| CST9 | Cystatin 9 (testatin) | SEQ ID NO: 3653 |
| CST9L | Cystatin 9-like | SEQ ID NO: 3654 |
| CSTL1 | Cy statin-like 1 | SEQ ID NOS: 3655- |
| | | 3657 |
| CT55 | Cancer/testis antigen 55 | SEQ ID NOS: 3658- |
| | | 3659 |
| CTB-60B18.6 | | SEQ ID NOS: 74-75 |
| CTBS | Chitobiase, di-N-acetyl- | SEQ ID NOS: 3660- |
| | | 3662 |
| CTD- | | SEQ ID NO: 4160 |
| 2313N18.7 | | |
| CTD- | | SEQ ID NOS: 81-84 |
| 2370N5.3 | | |
| CTGF | Connective tissue growth factor | SEQ ID NO: 3663 |
| CTHRC1 | Collagen triple helix repeat containing 1 | SEQ ID NOS: 3664- |
| | | 3667 |
| CTLA4 | Cytotoxic T-lymphocyte-associated protein | SEQ ID NOS: 3668- |
| | 4 | 3671 |
| CTNS | Cystinosin, lysosomal cystine transporter | SEQ ID NOS: 3672- |
| | | 3679 |
| CTRB1 | Chymotrypsinogen B1 | SEQ ID NOS: 3680- |
| | | 3682 |
| CTRB2 | Chymotrypsinogen B2 | SEQ ID NOS: 3683- |
| | | 3686 |
| CTRC | Chymotrypsin C (caldecrin) | SEQ ID NOS: 3687- |
| | | 3688 |
| CTRL | Chymotrypsin-like | SEQ ID NOS: 3689- |
| | | 3691 |
| CTSA | Cathepsin A | SEQ ID NOS: 3692- |
| | | 3700 |
| CTSB | Cathepsin B | SEQ ID NOS: 3701- |
| | | 3725 |
| CTSC | Cathepsin C | SEQ ID NOS: 3726- |
| | | 3730 |
| CTSD | Cathepsin D | SEQ ID NOS: 3731- |
| | | 3741 |
| CTSE | Cathepsin E | SEQ ID NOS: 3742- |
| | | 3743 |
| CTSF | Cathepsin F | SEQ ID NOS: 3744- |
| | | 3747 |
| CTSG | Cathepsin G | SEQ ID NO: 3748 |
| CTSH | Cathepsin H | SEQ ID NOS: 3749- |
| | | 3754 |
| CTSK | Cathepsin K | SEQ ID NOS: 3755- |
| | | 3756 |
| CTSL | Cathepsin L | SEQ ID NOS: 3757- |
| | | 3759 |
| CTSO | Cathepsin O | SEQ ID NO: 3760 |
| CTSS | Cathepsin S | SEQ ID NOS: 3761- |
| | | 3765 |
| CTSV | Cathepsin V | SEQ ID NOS: 3766- |
| | | 3767 |
| CTSW | Cathepsin W | SEQ ID NOS: 3768- |
| | | 3770 |
| CTSZ | Cathepsin Z | SEQ ID NO: 3771 |
| CUBN | Cubilin (intrinsic factor-cobalamin receptor) | SEQ ID NOS: 3772- |
| | | 3775 |
| CUTA | CutA divalent cation tolerance homolog | SEQ ID NOS: 3776- |
| | (E. coli) | 3785 |
| CX3CL1 | Chemokine (C-X3-C motif) ligand 1 | SEQ ID NOS: 3786- |
| | | 3789 |
| CXADR | Coxsackie virus and adenovirus receptor | SEQ ID NOS: 3790- |
| | | 3794 |
| CXCL1 | Chemokine (C-X-C motif) ligand 1 | SEQ ID NO: 3795 |
| | (melanoma growth stimulating activity, | |
| | alpha) | |
| CXCL10 | Chemokine (C-X-C motif) ligand 10 | SEQ ID NO: 3796 |
| CXCL11 | Chemokine (C-X-C motif) ligand 11 | SEQ ID NOS: 3797- |
| | | 3798 |
| CXCL12 | Chemokine (C-X-C motif) ligand 12 | SEQ ID NOS: 3799- |
| | | 3804 |
| CXCL13 | Chemokine (C-X-C motif) ligand 13 | SEQ ID NO: 3805 |
| CXCL14 | Chemokine (C-X-C motif) ligand 14 | SEQ ID NOS: 3806- |
| | | 3807 |
| CXCL17 | Chemokine (C-X-C motif) ligand 17 | SEQ ID NOS: 3808- |
| | | 3809 |
| CXCL2 | Chemokine (C-X-C motif) ligand 2 | SEQ ID NO: 3810 |
| CXCL3 | Chemokine (C-X-C motif) ligand 3 | SEQ ID NO: 3811 |
| CXCL5 | Chemokine (C-X-C motif) ligand 5 | SEQ ID NO: 3812 |
| CXCL6 | Chemokine (C-X-C motif) ligand 6 | SEQ ID NOS: 3813- |
| | | 3814 |
| CXCL8 | Chemokine (C-X-C motif) ligand 8 | SEQ ID NOS: 3815- |
| | | 3816 |
| CXCL9 | Chemokine (C-X-C motif) ligand 9 | SEQ ID NO: 3817 |
| CXorf36 | Chromosome X open reading frame 36 | SEQ ID NOS: 3818- |
| | | 3819 |
| CYB5D2 | Cytochrome b5 domain containing 2 | SEQ ID NOS: 3820- |
| | | 3823 |
| CYHR1 | Cysteine/histidine-rich 1 | SEQ ID NOS: 3824- |
| | | 3831 |
| CYP17A1 | Cytochrome P450, family 17, subfamily A, | SEQ ID NOS: 3832- |
| | polypeptide 1 | 3836 |
| CYP20A1 | Cytochrome P450, family 20, subfamily A, | SEQ ID NOS: 3837- |
| | polypeptide 1 | 3843 |
| CYP21A2 | Cytochrome P450, family 21, subfamily A, | SEQ ID NOS: 3844- |
| | polypeptide 2 | 3851 |
| CYP26B1 | Cytochrome P450, family 26, subfamily B, | SEQ ID NOS: 3852- |
| | polypeptide 1 | 3856 |
| CYP2A6 | Cytochrome P450, family 2, subfamily A, | SEQ ID NOS: 3857- |
| | polypeptide 6 | 3858 |
| CYP2A7 | Cytochrome P450, family 2, subfamily A, | SEQ ID NOS: 3859- |
| | polypeptide 7 | 3861 |
| CYP2B6 | Cytochrome P450, family 2, subfamily B, | SEQ ID NOS: 3862- |
| | polypeptide 6 | 3865 |
| CYP2C18 | Cytochrome P450, family 2, subfamily C, | SEQ ID NOS: 3866- |
| | polypeptide 18 | 3867 |
| CYP2C19 | Cytochrome P450, family 2, subfamily C, | SEQ ID NOS: 3868- |
| | polypeptide 19 | 3869 |
| CYP2C8 | Cytochrome P450, family 2, subfamily C, | SEQ ID NOS: 3870- |
| | polypeptide 8 | 3877 |
| CYP2C9 | Cytochrome P450, family 2, subfamily C, | SEQ ID NOS: 3878- |
| | polypeptide 9 | 3880 |
| CYP2E1 | Cytochrome P450, family 2, subfamily E, | SEQ ID NOS: 3881- |
| | polypeptide 1 | 3886 |
| CYP2F1 | Cytochrome P450, family 2, subfamily F, | SEQ ID NOS: 3887- |
| | polypeptide 1 | 3890 |
| CYP2J2 | Cytochrome P450, family 2, subfamily J, | SEQ ID NO: 3891 |
| | polypeptide 2 | |
| CYP2R1 | Cytochrome P450, family 2, subfamily R, | SEQ ID NOS: 3892- |
| | polypeptide 1 | 3897 |
| CYP2S1 | Cytochrome P450, family 2, subfamily S, | SEQ ID NOS: 3898- |
| | polypeptide 1 | 3903 |
| CYP2W1 | Cytochrome P450, family 2, subfamily W, | SEQ ID NOS: 3904- |
| | polypeptide 1 | 3906 |
| CYP46A1 | Cytochrome P450, family 46, subfamily A, | SEQ ID NOS: 3907- |
| | polypeptide 1 | 3911 |
| CYP4F11 | Cytochrome P450, family 4, subfamily F, | SEQ ID NOS: 3912- |
| | polypeptide 11 | 3916 |
| CYP4F2 | Cytochrome P450, family 4, subfamily F, | SEQ ID NOS: 3917- |
| | polypeptide 2 | 3921 |
| CYR61 | Cysteine-rich, angiogenic inducer, 61 | SEQ ID NO: 3922 |
| CYTL1 | Cytokine-like 1 | SEQ ID NOS: 3923- |
| | | 3925 |
| D2HGDH | D-2-hydroxyglutarate dehydrogenase | SEQ ID NOS: 3926- |
| | | 3934 |
| DAG1 | Dystroglycan 1 (dystrophin-associated | SEQ ID NOS: 3935- |
| | glycoprotein 1) | 3949 |
| DAND5 | DAN domain family member 5, BMP | SEQ ID NOS: 3950- |
| | antagonist | 3951 |
| DAO | D-amino-acid oxidase | SEQ ID NOS: 3952- |
| | | 3957 |
| DAZAP2 | DAZ associated protein 2 | SEQ ID NOS: 3958- |
| | | 3966 |
| DBH | Dopamine beta-hydroxylase (dopamine | SEQ ID NOS: 3967- |
| | beta-monooxygenase) | 3968 |
| DBNL | Drebrin-like | SEQ ID NOS: 3969- |
| | | 3986 |
| DCD | Dermcidin | SEQ ID NOS: 3987- |
| | | 3989 |
| DCN | Decorin | SEQ ID NOS: 3990- |
| | | 4008 |
| DDIAS | DNA damage-induced apoptosis suppressor | SEQ ID NOS: 4009- |
| | | 4018 |
| DDOST | Dolichyl-diphosphooligosaccharide--protein | SEQ ID NOS: 4019- |
| | glycosyltransferase subunit (non-catalytic) | 4022 |
| DDR1 | Discoidin domain receptor tyrosine kinase 1 | SEQ ID NOS: 4023- |
| | | 4068 |
| DDR2 | Discoidin domain receptor tyrosine kinase 2 | SEQ ID NOS: 4069- |
| | | 4074 |
| DDT | D-dopachrome tautomerase | SEQ ID NOS: 4075- |
| | | 4080 |
| DDX17 | DEAD (Asp-Glu-Ala-Asp) box helicase 17 | SEQ ID NOS: 4081- |
| | | 4085 |
| DDX20 | DEAD (Asp-Glu-Ala-Asp) box polypeptide | SEQ ID NOS: 4086- |
| | 20 | 4088 |
| DDX25 | DEAD (Asp-Glu-Ala-Asp) box helicase 25 | SEQ ID NOS: 4089- |
| | | 4095 |
| DDX28 | DEAD (Asp-Glu-Ala-Asp) box polypeptide | SEQ ID NO: 4096 |
| | 28 | |
| DEAF1 | DEAF1 transcription factor | SEQ ID NOS: 4097- |
| | | 4099 |
| DEF8 | Differentially expressed in FDCP 8 | SEQ ID NOS: 4100- |
| | homolog (mouse) | 4119 |
| DEFA1 | Defensin, alpha 1 | SEQ ID NOS: 4120- |
| | | 4121 |
| DEFA1B | Defensin, alpha 1B | SEQ ID NO: 4122 |
| DEFA3 | Defensin, alpha 3, neutrophil-specific | SEQ ID NO: 4123 |
| DEFA4 | Defensin, alpha 4, corticostatin | SEQ ID NO: 4124 |
| DEFA5 | Defensin, alpha 5, Paneth cell-specific | SEQ ID NO: 4125 |
| DEFA6 | Defensin, alpha 6, Paneth cell-specific | SEQ ID NO: 4126 |
| DEFB1 | Defensin, beta 1 | SEQ ID NO: 4127 |
| DEFB103A | Defensin, beta 103A | SEQ ID NO: 4128 |
| DEFB103B | Defensin, beta 103B | SEQ ID NO: 4129 |
| DEFB104A | Defensin, beta 104A | SEQ ID NO: 4130 |
| DEFB104B | Defensin, beta 104B | SEQ ID NO: 4131 |
| DEFB105A | Defensin, beta 105A | SEQ ID NO: 4132 |
| DEFB105B | Defensin, beta 105B | SEQ ID NO: 4133 |
| DEFB106A | Defensin, beta 106A | SEQ ID NO: 4134 |
| DEFB106B | Defensin, beta 106B | SEQ ID NO: 4135 |
| DEFB107A | Defensin, beta 107A | SEQ ID NO: 4136 |
| DEFB107B | Defensin, beta 107B | SEQ ID NO: 4137 |
| DEFB108B | Defensin, beta 108B | SEQ ID NO: 4138 |
| DEFB110 | Defensin, beta 110 | SEQ ID NOS: 4139- |
| | | 4140 |
| DEFB113 | Defensin, beta 113 | SEQ ID NO: 4141 |
| DEFB114 | Defensin, beta 114 | SEQ ID NO: 4142 |
| DEFB115 | Defensin, beta 115 | SEQ ID NO: 4143 |
| DEFB116 | Defensin, beta 116 | SEQ ID NO: 4144 |
| DEFB118 | Defensin, beta 118 | SEQ ID NO: 4145 |
| DEFB119 | Defensin, beta 119 | SEQ ID NOS: 4146- |
| | | 4148 |
| DEFB121 | Defensin, beta 121 | SEQ ID NO: 4149 |
| DEFB123 | Defensin, beta 123 | SEQ ID NO: 4150 |
| DEFB124 | Defensin, beta 124 | SEQ ID NO: 4151 |
| DEFB125 | Defensin, beta 125 | SEQ ID NO: 4152 |
| DEFB126 | Defensin, beta 126 | SEQ ID NO: 4153 |
| DEFB127 | Defensin, beta 127 | SEQ ID NO: 4154 |
| DEFB128 | Defensin, beta 128 | SEQ ID NO: 4155 |
| DEFB129 | Defensin, beta 129 | SEQ ID NO: 4156 |
| DEFB130 | Defensin, beta 130 | SEQ ID NO: 4157 |
| DEFB131 | Defensin, beta 131 | SEQ ID NO: 4159 |
| DEFB132 | Defensin, beta 132 | SEQ ID NO: 4161 |
| DEFB133 | Defensin, beta 133 | SEQ ID NO: 4162 |
| DEFB134 | Defensin, beta 134 | SEQ ID NOS: 4163- |
| | | 4164 |
| DEFB135 | Defensin, beta 135 | SEQ ID NO: 4165 |
| DEFB136 | Defensin, beta 136 | SEQ ID NO: 4166 |
| DEFB4A | Defensin, beta 4A | SEQ ID NO: 4167 |
| DEFB4B | Defensin, beta 4B | SEQ ID NO: 4168 |
| DFNA5 | Deafness, autosomal dominant 5 | SEQ ID NOS: 6271- |
| | | 6279 |
| DFNB31 | Deafness, autosomal recessive 31 | SEQ ID NOS: 14251- |
| | | 14254 |
| DGCR2 | DiGeorge syndrome critical region gene 2 | SEQ ID NOS: 4171- |
| | | 4174 |
| DHH | Desert hedgehog | SEQ ID NO: 4175 |
| DHRS4 | Dehydrogenase/reductase (SDR family) | SEQ ID NOS: 4176- |
| | member 4 | 4183 |
| DHRS4L2 | Dehydrogenase/reductase (SDR family) | SEQ ID NOS: 4184- |
| | member 4 like 2 | 4193 |
| DHRS7 | Dehydrogenase/reductase (SDR family) | SEQ ID NOS: 4194- |
| | member 7 | 4201 |
| DHRS7C | Dehydrogenase/reductase (SDR family) | SEQ ID NOS: 4202- |
| | member 7C | 4204 |
| DHRS9 | Dehydrogenase/reductase (SDR family) | SEQ ID NOS: 4205- |
| | member 9 | 4212 |
| DHRSX | Dehydrogenase/reductase (SDR family) X- | SEQ ID NOS: 4213- |
| | linked | 4217 |
| DHX29 | DEAH (Asp-Glu-Ala-His) box polypeptide | SEQ ID NOS: 4218- |
| | 29 | 4220 |
| DHX30 | DEAH (Asp-Glu-Ala-His) box helicase 30 | SEQ ID NOS: 4221- |
| | | 4228 |
| DHX8 | DEAH (Asp-Glu-Ala-His) box polypeptide | SEQ ID NOS: 4229- |
| | 8 | 4233 |
| DIO2 | Deiodinase, iodothyronine, type II | SEQ ID NOS: 4234- |
| | | 4243 |
| DIXDC1 | DIX domain containing 1 | SEQ ID NOS: 4244- |
| | | 4247 |
| DKK1 | Dickkopf WNT signaling pathway inhibitor | SEQ ID NO: 4248 |
| | 1 | |
| DKK2 | Dickkopf WNT signaling pathway inhibitor | SEQ ID NOS: 4249- |
| | 2 | 4251 |
| DKK3 | Dickkopf WNT signaling pathway inhibitor | SEQ ID NOS: 4252- |
| | 3 | 4257 |
| DKK4 | Dickkopf WNT signaling pathway inhibitor | SEQ ID NO: 4258 |
| | 4 | |
| DKKL1 | Dickkopf-like 1 | SEQ ID NOS: 4259- |
| | | 4264 |
| DLG4 | Discs, large homolog 4 (Drosophila) | SEQ ID NOS: 4265- |
| | | 4273 |
| DLK1 | Delta-like 1 homolog (Drosophila) | SEQ ID NOS: 4274- |
| | | 4277 |
| DLL1 | Delta-like 1 (Drosophila) | SEQ ID NOS: 4278- |
| | | 4279 |
| DLL3 | Delta-like 3 (Drosophila) | SEQ ID NOS: 4280- |
| | | 4282 |
| DMBT1 | Deleted in malignant brain tumors 1 | SEQ ID NOS: 4283- |
| | | 4289 |
| DMKN | Dermokine | SEQ ID NOS: 4290- |
| | | 4336 |
| DMP1 | Dentin matrix acidic phosphoprotein 1 | SEQ ID NOS: 4337- |
| | | 4338 |
| DMRTA2 | DMRT-like family A2 | SEQ ID NOS: 4339- |
| | | 4340 |
| DNAAF5 | Dynein, axonemal, assembly factor 5 | SEQ ID NOS: 4341- |
| | | 4344 |
| DNAH14 | Dynein, axonemal, heavy chain 14 | SEQ ID NOS: 4345- |
| | | 4359 |
| DNAJB11 | DnaJ (Hsp40) homolog, subfamily B, | SEQ ID NOS: 4360- |
| | member 11 | 4361 |
| DNAJB9 | DnaJ (Hsp40) homolog, subfamily B, | SEQ ID NO: 4362 |
| | member 9 | |
| DNAJC25- | DNAJC25-GNG10 readthrough | SEQ ID NO: 4363 |
| GNG10 | | |
| DNAJC3 | DnaJ (Hsp40) homolog, subfamily C, | SEQ ID NOS: 4364- |
| | member 3 | 4365 |
| DNASE1 | Deoxyribonuclease I | SEQ ID NOS: 4366- |
| | | 4376 |
| DNASE1L1 | Deoxyribonuclease I-like 1 | SEQ ID NOS: 4377- |
| | | 4387 |
| DNASE1L2 | Deoxyribonuclease I-like 2 | SEQ ID NOS: 4388- |
| | | 4393 |
| DNASE1L3 | Deoxyribonuclease I-like 3 | SEQ ID NOS: 4394- |
| | | 4399 |
| DNASE2 | Deoxyribonuclease II, lysosomal | SEQ ID NOS: 4400- |
| | | 4401 |
| DNASE2B | Deoxyribonuclease II beta | SEQ ID NOS: 4402- |
| | | 4403 |
| DPEP1 | Dipeptidase 1 (renal) | SEQ ID NOS: 4404- |
| | | 4408 |
| DPEP2 | Dipeptidase 2 | SEQ ID NOS: 4409- |
| | | 4415 |
| DPEP3 | Dipeptidase 3 | SEQ ID NO: 4416 |
| DPF3 | D4, zinc and double PHD fingers, family 3 | SEQ ID NOS: 4417- |
| | | 4423 |
| DPP4 | Dipeptidyl-peptidase 4 | SEQ ID NOS: 4424- |
| | | 4428 |
| DPP7 | Dipeptidyl-peptidase 7 | SEQ ID NOS: 4429- |
| | | 4434 |
| DPT | Dermatopontin | SEQ ID NO: 4435 |
| DRAXIN | Dorsal inhibitory axon guidance protein | SEQ ID NO: 4436 |
| DSE | Dermatan sulfate epimerase | SEQ ID NOS: 4437- |
| | | 4445 |
| DSG2 | Desmoglein 2 | SEQ ID NOS: 4446- |
| | | 4447 |
| DSPP | Dentin sialophosphoprotein | SEQ ID NOS: 4448- |
| | | 4449 |
| DST | Dystonin | SEQ ID NOS: 4450- |
| | | 4468 |
| DUOX1 | Dual oxidase 1 | SEQ ID NOS: 4469- |
| | | 4473 |
| DYNLT3 | Dynein, light chain, Tctex-type 3 | SEQ ID NOS: 4474- |
| | | 4476 |
| E2F5 | E2F transcription factor 5, p130-binding | SEQ ID NOS: 4477- |
| | | 4483 |
| EBAG9 | Estrogen receptor binding site associated, | SEQ ID NOS: 4484- |
| | antigen, 9 | 4492 |
| EBI3 | Epstein-Barr virus induced 3 | SEQ ID NO: 4493 |
| ECHDC1 | Ethylmalonyl-CoA decarboxylase 1 | SEQ ID NOS: 4494- |
| | | 4512 |
| ECM1 | Extracellular matrix protein 1 | SEQ ID NOS: 4513- |
| | | 4515 |
| ECM2 | Extracellular matrix protein 2, female organ | SEQ ID NOS: 4516- |
| | and adipocyte specific | 4519 |
| ECSIT | ECSIT signalling integrator | SEQ ID NOS: 4520- |
| | | 4531 |
| EDDM3A | Epididymal protein 3A | SEQ ID NO: 4532 |
| EDDM3B | Epididymal protein 3B | SEQ ID NO: 4533 |
| EDEM2 | ER degradation enhancer, mannosidase | SEQ ID NOS: 4534- |
| | alpha-like 2 | 4535 |
| EDEM3 | ER degradation enhancer, mannosidase | SEQ ID NOS: 4536- |
| | alpha-like 3 | 4538 |
| EDIL3 | EGF-like repeats and discoidin I-like | SEQ ID NOS: 4539- |
| | domains 3 | 4540 |
| EDN1 | Endothelin 1 | SEQ ID NO: 4541 |
| EDN2 | Endothelin 2 | SEQ ID NO: 4542 |
| EDN3 | Endothelin 3 | SEQ ID NOS: 4543- |
| | | 4548 |
| EDNRB | Endothelin receptor type B | SEQ ID NOS: 4549- |
| | | 4557 |
| EFEMP1 | EGF containing fibulin-like extracellular | SEQ ID NOS: 4558- |
| | matrix protein 1 | 4568 |
| EFEMP2 | EGF containing fibulin-like extracellular | SEQ ID NOS: 4569- |
| | matrix protein 2 | 4580 |
| EFNA1 | Ephrin-A1 | SEQ ID NOS: 4581- |
| | | 4582 |
| EFNA2 | Ephrin-A2 | SEQ ID NO: 4583 |
| EFNA4 | Ephrin-A4 | SEQ ID NOS: 4584- |
| | | 4586 |
| EGFL6 | EGF-like-domain, multiple 6 | SEQ ID NOS: 4587- |
| | | 4588 |
| EGFL7 | EGF-like-domain, multiple 7 | SEQ ID NOS: 4589- |
| | | 4593 |
| EGFL8 | EGF-like-domain, multiple 8 | SEQ ID NOS: 4594- |
| | | 4596 |
| EGFLAM | EGF-like, fibronectin type III and laminin G | SEQ ID NOS: 4597- |
| | domains | 4605 |
| EGFR | Epidermal growth factor receptor | SEQ ID NOS: 4606- |
| | | 4613 |
| EHBP1 | EH domain binding protein 1 | SEQ ID NOS: 4614- |
| | | 4625 |
| EHF | Ets homologous factor | SEQ ID NOS: 4626- |
| | | 4635 |
| EHMT1 | Euchromatic histone-lysine N- | SEQ ID NOS: 4636- |
| | methyltransferase 1 | 4661 |
| EHMT2 | Euchromatic histone-lysine N- | SEQ ID NOS: 4662- |
| | methyltransferase 2 | 4666 |
| EIF2AK1 | Eukaryotic translation initiation factor 2- | SEQ ID NOS: 4667- |
| | alpha kinase 1 | 4670 |
| ELANE | Elastase, neutrophil expressed | SEQ ID NOS: 4671- |
| | | 4672 |
| ELN | Elastin | SEQ ID NOS: 4673- |
| | | 4695 |
| ELP2 | Elongator acetyltransferase complex subunit | SEQ ID NOS: 4696- |
| | 2 | 4708 |
| ELSPBP1 | Epididymal sperm binding protein 1 | SEQ ID NOS: 4709- |
| | | 4714 |
| EMC1 | ER membrane protein complex subunit 1 | SEQ ID NOS: 4715- |
| | | 4721 |
| EMC10 | ER membrane protein complex subunit 10 | SEQ ID NOS: 4722- |
| | | 4728 |
| EMC9 | ER membrane protein complex subunit 9 | SEQ ID NOS: 4729- |
| | | 4732 |
| EMCN | Endomucin | SEQ ID NOS: 4733- |
| | | 4737 |
| EMID1 | EMI domain containing 1 | SEQ ID NOS: 4738- |
| | | 4744 |
| EMILIN1 | Elastin microfibril interfacer 1 | SEQ ID NOS: 4745- |
| | | 4746 |
| EMILIN2 | Elastin microfibril interfacer 2 | SEQ ID NO: 4747 |
| EMILIN3 | Elastin microfibril interfacer 3 | SEQ ID NO: 4748 |
| ENAM | Enamelin | SEQ ID NO: 4749 |
| ENDOG | Endonuclease G | SEQ ID NO: 4750 |
| ENDOU | Endonuclease, polyU-specific | SEQ ID NOS: 4751- |
| | | 4753 |
| ENHO | Energy homeostasis associated | SEQ ID NO: 4754 |
| ENO4 | Enolase family member 4 | SEQ ID NOS: 4755- |
| | | 4759 |
| ENPP6 | Ectonucleotide | SEQ ID NOS: 4760- |
| | pyrophosphatase/phosphodiesterase 6 | 4761 |
| ENPP7 | Ectonucleotide | SEQ ID NOS: 4762- |
| | pyrophosphatase/phosphodiesterase 7 | 4763 |
| ENTPD5 | Ectonucleoside triphosphate | SEQ ID NOS: 4764- |
| | diphosphohydrolase 5 | 4768 |
| ENTPD8 | Ectonucleoside triphosphate | SEQ ID NOS: 4769- |
| | diphosphohydrolase 8 | 4772 |
| EOGT | EGF domain-specific O-linked N- | SEQ ID NOS: 4773- |
| | acetylglucosamine (GlcNAc) transferase | 4780 |
| EPCAM | Epithelial cell adhesion molecule | SEQ ID NOS: 4781- |
| | | 4784 |
| EPDR1 | Ependymin related 1 | SEQ ID NOS: 4785- |
| | | 4788 |
| EPGN | Epithelial mitogen | SEQ ID NOS: 4789- |
| | | 4797 |
| EPHA10 | EPH receptor A10 | SEQ ID NOS: 4798- |
| | | 4805 |
| EPHA3 | EPH receptor A3 | SEQ ID NOS: 4806- |
| | | 4808 |
| EPHA4 | EPH receptor A4 | SEQ ID NOS: 4809- |
| | | 4818 |
| EPHA7 | EPH receptor A7 | SEQ ID NOS: 4819- |
| | | 4820 |
| EPHA8 | EPH receptor A8 | SEQ ID NOS: 4821- |
| | | 4822 |
| EPHB2 | EPH receptor B2 | SEQ ID NOS: 4823- |
| | | 4827 |
| EPHB4 | EPH receptor B4 | SEQ ID NOS: 4828- |
| | | 4830 |
| EPHX3 | Epoxide hydrolase 3 | SEQ ID NOS: 4831- |
| | | 4834 |
| EPO | Erythropoietin | SEQ ID NO: 4835 |
| EPPIN | Epididymal peptidase inhibitor | SEQ ID NOS: 4836- |
| | | 4838 |
| EPPIN- | EPPIN-WFDC6 readthrough | SEQ ID NO: 4839 |
| WFDC6 | | |
| EPS15 | Epidermal growth factor receptor pathway | SEQ ID NOS: 4840- |
| | substrate 15 | 4842 |
| EPS8L1 | EPS8-like 1 | SEQ ID NOS: 4843- |
| | | 4848 |
| EPX | Eosinophil peroxidase | SEQ ID NO: 4849 |
| EPYC | Epiphycan | SEQ ID NOS: 4850- |
| | | 4851 |
| EQTN | Equatorin, sperm acrosome associated | SEQ ID NOS: 4852- |
| | | 4854 |
| ERAP1 | Endoplasmic reticulum aminopeptidase 1 | SEQ ID NOS: 4855- |
| | | 4859 |
| ERAP2 | Endoplasmic reticulum aminopeptidase 2 | SEQ ID NOS: 4860- |
| | | 4867 |
| ERBB3 | Erb-b2 receptor tyrosine kinase 3 | SEQ ID NOS: 4868- |
| | | 4881 |
| ERLIN1 | ER lipid raft associated 1 | SEQ ID NOS: 4885- |
| | | 4887 |
| ERLIN2 | ER lipid raft associated 2 | SEQ ID NOS: 4888- |
| | | 4896 |
| ERN1 | Endoplasmic reticulum to nucleus signaling | SEQ ID NOS: 4897- |
| | 1 | 4898 |
| ERN2 | Endoplasmic reticulum to nucleus signaling | SEQ ID NOS: 4899- |
| | 2 | 4903 |
| ERO1A | Endoplasmic reticulum oxidoreductase | SEQ ID NOS: 4904- |
| | alpha | 4910 |
| ERO1B | Endoplasmic reticulum oxidoreductase beta | SEQ ID NOS: 4911- |
| | | 4913 |
| ERP27 | Endoplasmic reticulum protein 27 | SEQ ID NOS: 4914- |
| | | 4915 |
| ERP29 | Endoplasmic reticulum protein 29 | SEQ ID NOS: 4916- |
| | | 4919 |
| ERP44 | Endoplasmic reticulum protein 44 | SEQ ID NO: 4920 |
| ERV3-1 | Endogenous retrovirus group 3, member 1 | SEQ ID NO: 4921 |
| ESM1 | Endothelial cell-specific molecule 1 | SEQ ID NOS: 4922- |
| | | 4924 |
| ESRP1 | Epithelial splicing regulatory protein 1 | SEQ ID NOS: 4925- |
| | | 4933 |
| EXOG | Endo/exonuclease (5′-3′), endonuclease G- | SEQ ID NOS: 4934- |
| | like | 4947 |
| EXTL1 | Exostosin-like glycosyltransferase 1 | SEQ ID NO: 4948 |
| EXTL2 | Exostosin-like glycosyltransferase 2 | SEQ ID NOS: 4949- |
| | | 4953 |
| F10 | Coagulation factor X | SEQ ID NOS: 4954- |
| | | 4957 |
| F11 | Coagulation factor XI | SEQ ID NOS: 4958- |
| | | 4962 |
| F12 | Coagulation factor XII (Hageman factor) | SEQ ID NO: 4963 |
| F13B | Coagulation factor XIII, B polypeptide | SEQ ID NO: 4964 |
| F2 | Coagulation factor II (thrombin) | SEQ ID NOS: 4965- |
| | | 4967 |
| F2R | Coagulation factor II (thrombin) receptor | SEQ ID NOS: 4968- |
| | | 4969 |
| F2RL3 | Coagulation factor II (thrombin) receptor- | SEQ ID NOS: 4970- |
| | like 3 | 4971 |
| F5 | Coagulation factor V (proaccelerin, labile | SEQ ID NOS: 4972- |
| | factor) | 4973 |
| F7 | Coagulation factor VII (serum prothrombin | SEQ ID NOS: 4974- |
| | conversion accelerator) | 4977 |
| F8 | Coagulation factor VIII, procoagulant | SEQ ID NOS: 4978- |
| | component | 4983 |
| F9 | Coagulation factor IX | SEQ ID NOS: 4984- |
| | | 4985 |
| FABP6 | Fatty acid binding protein 6, ileal | SEQ ID NOS: 4986- |
| | | 4988 |
| FAM107B | Family with sequence similarity 107, | SEQ ID NOS: 4989- |
| | member B | 5010 |
| FAM131A | Family with sequence similarity 131, | SEQ ID NOS: 5011- |
| | member A | 5019 |
| FAM132A | Family with sequence similarity 132, | SEQ ID NO: 1795 |
| | member A | |
| FAM132B | Family with sequence similarity 132, | SEQ ID NOS: 4882- |
| | member B | 4884 |
| FAM150A | Family with sequence similarity 150, | SEQ ID NOS: 737-738 |
| | member A | |
| FAM150B | Family with sequence similarity 150, | SEQ ID NOS: 739-745 |
| | member B | |
| FAM171A1 | Family with sequence similarity 171, | SEQ ID NOS: 5020- |
| | member A1 | 5021 |
| FAM171B | Family with sequence similarity 171, | SEQ ID NOS: 5022- |
| | member B | 5023 |
| FAM172A | Family with sequence similarity 172, | SEQ ID NOS: 5024- |
| | member A | 5028 |
| FAM175A | Family with sequence similarity 175, | SEQ ID NOS: 64-71 |
| | member A | |
| FAM177A1 | Family with sequence similarity 177, | SEQ ID NOS: 5029- |
| | member A1 | 5038 |
| FAM179B | Family with sequence similarity 179, | SEQ ID NOS: 13628- |
| | member B | 13633 |
| FAM180A | Family with sequence similarity 180, | SEQ ID NOS: 5039- |
| | member A | 5041 |
| FAM189A1 | Family with sequence similarity 189, | SEQ ID NOS: 5042- |
| | member A1 | 5043 |
| FAM198A | Family with sequence similarity 198, | SEQ ID NOS: 5044- |
| | member A | 5046 |
| FAM19A1 | Family with sequence similarity 19 | SEQ ID NOS: 5047- |
| | (chemokine (C-C motif)-like), member A1 | 5049 |
| FAM19A2 | Family with sequence similarity 19 | SEQ ID NOS: 5050- |
| | (chemokine (C-C motif)-like), member A2 | 5057 |
| FAM19A3 | Family with sequence similarity 19 | SEQ ID NOS: 5058- |
| | (chemokine (C-C motif)-like), member A3 | 5059 |
| FAM19A4 | Family with sequence similarity 19 | SEQ ID NOS: 5060- |
| | (chemokine (C-C motif)-like), member A4 | 5062 |
| FAM19A5 | Family with sequence similarity 19 | SEQ ID NOS: 5063- |
| | (chemokine (C-C motif)-like), member A5 | 5066 |
| FAM20A | Family with sequence similarity 20, | SEQ ID NOS: 5067- |
| | member A | 5070 |
| FAM20C | Family with sequence similarity 20, | SEQ ID NO: 5071 |
| | member C | |
| FAM213A | Family with sequence similarity 213, | SEQ ID NOS: 5072- |
| | member A | 5077 |
| FAM26D | Family with sequence similarity 26, | SEQ ID NOS: 2006- |
| | member D | 2010 |
| FAM46B | Family with sequence similarity 46, | SEQ ID NO: 5078 |
| | member B | |
| FAM57A | Family with sequence similarity 57, | SEQ ID NOS: 5079- |
| | member A | 5084 |
| FAM78A | Family with sequence similarity 78, | SEQ ID NOS: 5085- |
| | member A | 5087 |
| FAM96A | Family with sequence similarity 96, | SEQ ID NOS: 5088- |
| | member A | 5092 |
| FAM9B | Family with sequence similarity 9, member | SEQ ID NOS: 5093- |
| | B | 5096 |
| FAP | Fibroblast activation protein, alpha | SEQ ID NOS: 5097- |
| | | 5103 |
| FAS | Fas cell surface death receptor | SEQ ID NOS: 5104- |
| | | 5113 |
| FAT1 | FAT atypical cadherin 1 | SEQ ID NOS: 5114- |
| | | 5120 |
| FBLN1 | Fibulin 1 | SEQ ID NOS: 5121- |
| | | 5133 |
| FBLN2 | Fibulin 2 | SEQ ID NOS: 5134- |
| | | 5139 |
| FBLN5 | Fibulin 5 | SEQ ID NOS: 5140- |
| | | 5145 |
| FBLN7 | Fibulin 7 | SEQ ID NOS: 5146- |
| | | 5151 |
| FBN1 | Fibrillin 1 | SEQ ID NOS: 5152- |
| | | 5155 |
| FBN2 | Fibrillin 2 | SEQ ID NOS: 5156- |
| | | 5161 |
| FBN3 | Fibrillin 3 | SEQ ID NOS: 5162- |
| | | 5166 |
| FBXW7 | F-box and WD repeat domain containing 7, | SEQ ID NOS: 5167- |
| | E3 ubiquitin protein ligase | 5177 |
| FCAR | Fc fragment of IgA receptor | SEQ ID NOS: 5178- |
| | | 5187 |
| FCGBP | Fc fragment of IgG binding protein | SEQ ID NOS: 5188- |
| | | 5190 |
| FCGR1B | Fc fragment of IgG, high affinity Ib, | SEQ ID NOS: 5191- |
| | receptor (CD64) | 5196 |
| FCGR3A | Fc fragment of IgG, low affinity IIIa, | SEQ ID NOS: 5197- |
| | receptor (CD16a) | 5203 |
| FCGRT | Fc fragment of IgG, receptor, transporter, | SEQ ID NOS: 5204- |
| | alpha | 5214 |
| FCMR | Fc fragment of IgM receptor | SEQ ID NOS: 5215- |
| | | 5221 |
| FCN1 | Ficolin (collagen/fibrinogen domain | SEQ ID NOS: 5222- |
| | containing) 1 | 5223 |
| FCN2 | Ficolin (collagen/fibrinogen domain | SEQ ID NOS: 5224- |
| | containing lectin) 2 | 5225 |
| FCN3 | Ficolin (collagen/fibrinogen domain | SEQ ID NOS: 5226- |
| | containing) 3 | 5227 |
| FCRL1 | Fc receptor-like 1 | SEQ ID NOS: 5228- |
| | | 5230 |
| FCRL3 | Fc receptor-like 3 | SEQ ID NOS: 5231- |
| | | 5236 |
| FCRL5 | Fc receptor-like 5 | SEQ ID NOS: 5237- |
| | | 5239 |
| FCRLA | Fc receptor-like A | SEQ ID NOS: 5240- |
| | | 5251 |
| FCRLB | Fc receptor-like B | SEQ ID NOS: 5252- |
| | | 5256 |
| FDCSP | Follicular dendritic cell secreted protein | SEQ ID NO: 5257 |
| FETUB | Fetuin B | SEQ ID NOS: 5258- |
| | | 5264 |
| FGA | Fibrinogen alpha chain | SEQ ID NOS: 5265- |
| | | 5267 |
| FGB | Fibrinogen beta chain | SEQ ID NOS: 5268- |
| | | 5270 |
| FGF10 | Fibroblast growth factor 10 | SEQ ID NOS: 5271- |
| | | 5272 |
| FGF17 | Fibroblast growth factor 17 | SEQ ID NOS: 5273- |
| | | 5274 |
| FGF18 | Fibroblast growth factor 18 | SEQ ID NO: 5275 |
| FGF19 | Fibroblast growth factor 19 | SEQ ID NO: 5276 |
| FGF21 | Fibroblast growth factor 21 | SEQ ID NOS: 5277- |
| | | 5278 |
| FGF22 | Fibroblast growth factor 22 | SEQ ID NOS: 5279- |
| | | 5280 |
| FGF23 | Fibroblast growth factor 23 | SEQ ID NO: 5281 |
| FGF3 | Fibroblast growth factor 3 | SEQ ID NO: 5282 |
| FGF4 | Fibroblast growth factor 4 | SEQ ID NO: 5283 |
| FGF5 | Fibroblast growth factor 5 | SEQ ID NOS: 5284- |
| | | 5286 |
| FGF7 | Fibroblast growth factor 7 | SEQ ID NOS: 5287- |
| | | 5291 |
| FGF8 | Fibroblast growth factor 8 (androgen- | SEQ ID NOS: 5292- |
| | induced) | 5297 |
| FGFBP1 | Fibroblast growth factor binding protein 1 | SEQ ID NO: 5298 |
| FGFBP2 | Fibroblast growth factor binding protein 2 | SEQ ID NO: 5299 |
| FGFBP3 | Fibroblast growth factor binding protein 3 | SEQ ID NO: 5300 |
| FGFR1 | Fibroblast growth factor receptor 1 | SEQ ID NOS: 5301- |
| | | 5322 |
| FGFR2 | Fibroblast growth factor receptor 2 | SEQ ID NOS: 5323- |
| | | 5344 |
| FGFR3 | Fibroblast growth factor receptor 3 | SEQ ID NOS: 5345- |
| | | 5352 |
| FGFR4 | Fibroblast growth factor receptor 4 | SEQ ID NOS: 5353- |
| | | 5362 |
| FGFRL1 | Fibroblast growth factor receptor-like 1 | SEQ ID NOS: 5363- |
| | | 5368 |
| FGG | Fibrinogen gamma chain | SEQ ID NOS: 5369- |
| | | 5374 |
| FGL1 | Fibrinogen-like 1 | SEQ ID NOS: 5375- |
| | | 5381 |
| FGL2 | Fibrinogen-like 2 | SEQ ID NOS: 5382- |
| | | 5383 |
| FHL1 | Four and a half LIM domains 1 | SEQ ID NOS: 5384- |
| | | 5411 |
| FHOD3 | Formin homology 2 domain containing 3 | SEQ ID NOS: 5412- |
| | | 5418 |
| FIBIN | Fin bud initiation factor homolog | SEQ ID NO: 5419 |
| | (zebrafish) | |
| FICD | FIC domain containing | SEQ ID NOS: 5420- |
| | | 5423 |
| FIGF | C-fos induced growth factor (vascular | SEQ ID NO: 14054 |
| | endothelial growth factor D) | |
| FJX1 | Four jointed box 1 | SEQ ID NO: 5424 |
| FKBP10 | FK506 binding protein 10, 65 kDa | SEQ ID NOS: 5425- |
| | | 5430 |
| FKBP11 | FK506 binding protein 11, 19 kDa | SEQ ID NOS: 5431- |
| | | 5437 |
| FKBP14 | FK506 binding protein 14, 22 kDa | SEQ ID NOS: 5438- |
| | | 5440 |
| FKBP2 | FK506 binding protein 2, 13 kDa | SEQ ID NOS: 5441- |
| | | 5444 |
| FKBP7 | FK506 binding protein 7 | SEQ ID NOS: 5445- |
| | | 5450 |
| FKBP9 | FK506 binding protein 9, 63 kDa | SEQ ID NOS: 5451- |
| | | 5454 |
| FLT1 | Fms-related tyrosine kinase 1 | SEQ ID NOS: 5455- |
| | | 5463 |
| FLT4 | Fms-related tyrosine kinase 4 | SEQ ID NOS: 5464- |
| | | 5468 |
| FMO1 | Flavin containing monooxygenase 1 | SEQ ID NOS: 5469- |
| | | 5473 |
| FMO2 | Flavin containing monooxygenase 2 (non- | SEQ ID NOS: 5474- |
| | functional) | 5476 |
| FMO3 | Flavin containing monooxygenase 3 | SEQ ID NOS: 5477- |
| | | 5479 |
| FMO5 | Flavin containing monooxygenase 5 | SEQ ID NOS: 5480- |
| | | 5486 |
| FMOD | Fibromodulin | SEQ ID NO: 5487 |
| FN1 | Fibronectin 1 | SEQ ID NOS: 5488- |
| | | 5500 |
| FNDC1 | Fibronectin type III domain containing 1 | SEQ ID NOS: 5501- |
| | | 5502 |
| FNDC7 | Fibronectin type III domain containing 7 | SEQ ID NOS: 5503- |
| | | 5504 |
| FOCAD | Focadhesin | SEQ ID NOS: 5505- |
| | | 5511 |
| FOLR2 | Folate receptor 2 (fetal) | SEQ ID NOS: 5512- |
| | | 5521 |
| FOLR3 | Folate receptor 3 (gamma) | SEQ ID NOS: 5522- |
| | | 5526 |
| FOXRED2 | FAD-dependent oxidoreductase domain | SEQ ID NOS: 5527- |
| | containing 2 | 5530 |
| FP325331.1 | Uncharacterized protein | SEQ ID NO: 5531 |
| | UNQ6126/PRO20091 | |
| FPGS | Folylpolyglutamate synthase | SEQ ID NOS: 5539- |
| | | 5545 |
| FRAS1 | Fraser extracellular matrix complex subunit | SEQ ID NOS: 5546- |
| | 1 | 5551 |
| FREM1 | FRAS1 related extracellular matrix 1 | SEQ ID NOS: 5552- |
| | | 5556 |
| FREM3 | FRAS1 related extracellular matrix 3 | SEQ ID NO: 5557 |
| FRMPD2 | FERM and PDZ domain containing 2 | SEQ ID NOS: 5558- |
| | | 5561 |
| FRZB | Frizzled-related protein | SEQ ID NO: 5562 |
| FSHB | Follicle stimulating hormone, beta | SEQ ID NOS: 5563- |
| | polypeptide | 5565 |
| FSHR | Follicle stimulating hormone receptor | SEQ ID NOS: 5566- |
| | | 5569 |
| FST | Follistatin | SEQ ID NOS: 5570- |
| | | 5573 |
| FSTL1 | Follistatin-like 1 | SEQ ID NOS: 5574- |
| | | 5577 |
| FSTL3 | Follistatin-like 3 (secreted glycoprotein) | SEQ ID NOS: 5578- |
| | | 5583 |
| FSTL4 | Follistatin-like 4 | SEQ ID NOS: 5584- |
| | | 5586 |
| FSTL5 | Follistatin-like 5 | SEQ ID NOS: 5587- |
| | | 5589 |
| FTCDNL1 | Formiminotransferase cyclodeaminase N- | SEQ ID NOS: 5590- |
| | terminal like | 5593 |
| FUCA1 | Fucosidase, alpha-L- 1, tissue | SEQ ID NO: 5594 |
| FUCA2 | Fucosidase, alpha-L- 2, plasma | SEQ ID NOS: 5595- |
| | | 5596 |
| FURIN | Furin (paired basic amino acid cleaving | SEQ ID NOS: 5597- |
| | enzyme) | 5603 |
| FUT10 | Fucosyltransferase 10 (alpha (1,3) | SEQ ID NOS: 5604- |
| | fucosyltransferase) | 5606 |
| FUT11 | Fucosyltransferase 11 (alpha (1,3) | SEQ ID NOS: 5607- |
| | fucosyltransferase) | 5608 |
| FXN | Frataxin | SEQ ID NOS: 5609- |
| | | 5616 |
| FXR1 | Fragile X mental retardation, autosomal | SEQ ID NOS: 5617- |
| | homolog 1 | 5629 |
| FXYD3 | FXYD domain containing ion transport | SEQ ID NOS: 5630- |
| | regulator 3 | 5642 |
| GABBR1 | Gamma-aminobutyric acid (GABA) B | SEQ ID NOS: 5643- |
| | receptor, 1 | 5654 |
| GABRA1 | Gamma-aminobutyric acid (GABA) A | SEQ ID NOS: 5655- |
| | receptor, alpha 1 | 5670 |
| GABRA2 | Gamma-aminobutyric acid (GABA) A | SEQ ID NOS: 5671- |
| | receptor, alpha 2 | 5685 |
| GABRA5 | Gamma-aminobutyric acid (GABA) A | SEQ ID NOS: 5686- |
| | receptor, alpha 5 | 5694 |
| GABRG3 | Gamma-aminobutyric acid (GABA) A | SEQ ID NOS: 5695- |
| | receptor, gamma 3 | 5700 |
| GABRP | Gamma-aminobutyric acid (GABA) A | SEQ ID NOS: 5701- |
| | receptor, pi | 5709 |
| GAL | Galanin/GMAP prepropeptide | SEQ ID NO: 5710 |
| GAL3ST1 | Galactose-3-O-sulfotransferase 1 | SEQ ID NOS: 5711- |
| | | 5732 |
| GAL3ST2 | Galactose-3-O-sulfotransferase 2 | SEQ ID NO: 5733 |
| GAL3ST3 | Galactose-3-O-sulfotransferase 3 | SEQ ID NOS: 5734- |
| | | 5735 |
| GALC | Galactosylceramidase | SEQ ID NOS: 5736- |
| | | 5745 |
| GALNS | Galactosamine (N-acetyl)-6-sulfatase | SEQ ID NOS: 5746- |
| | | 5751 |
| GALNT10 | Polypeptide N- | SEQ ID NOS: 5752- |
| | acetylgalactosaminyltransferase 10 | 5755 |
| GALNT12 | Polypeptide N- | SEQ ID NOS: 5756- |
| | acetylgalactosaminyltransferase 12 | 5757 |
| GALNT15 | Polypeptide N- | SEQ ID NOS: 5758- |
| | acetylgalactosaminyltransferase 15 | 5761 |
| GALNT2 | Polypeptide N- | SEQ ID NO: 5762 |
| | acetylgalactosaminyltransferase 2 | |
| GALNT6 | Polypeptide N- | SEQ ID NOS: 5763- |
| | acetylgalactosaminyltransferase 6 | 5774 |
| GALNT8 | Polypeptide N- | SEQ ID NOS: 5775- |
| | acetylgalactosaminyltransferase 8 | 5778 |
| GALNTL6 | Polypeptide N- | SEQ ID NOS: 5779- |
| | acetylgalactosaminyltransferase-like 6 | 5782 |
| GALP | Galanin-like peptide | SEQ ID NOS: 5783- |
| | | 5785 |
| GANAB | Glucosidase, alpha; neutral AB | SEQ ID NOS: 5786- |
| | | 5794 |
| GARS | Glycyl-tRNA synthetase | SEQ ID NOS: 5795- |
| | | 5798 |
| GAS1 | Growth arrest-specific 1 | SEQ ID NO: 5799 |
| GAS6 | Growth arrest-specific 6 | SEQ ID NO: 5800 |
| GAST | Gastrin | SEQ ID NO: 5801 |
| GBA | Glucosidase, beta, acid | SEQ ID NOS: 5811- |
| | | 5814 |
| GBGT1 | Globoside alpha-1,3-N- | SEQ ID NOS: 5815- |
| | acetylgalactosaminyltransferase 1 | 5823 |
| GC | Group-specific component (vitamin D | SEQ ID NOS: 5824- |
| | binding protein) | 5828 |
| GCG | Glucagon | SEQ ID NOS: 5829- |
| | | 5830 |
| GCGR | Glucagon receptor | SEQ ID NOS: 5831- |
| | | 5833 |
| GCNT7 | Glucosaminyl (N-acetyl) transferase family | SEQ ID NOS: 5834- |
| | member 7 | 5835 |
| GCSH | Glycine cleavage system protein H | SEQ ID NOS: 5836- |
| | (aminomethyl carrier) | 5844 |
| GDF1 | Growth differentiation factor 1 | SEQ ID NO: 5845 |
| GDF10 | Growth differentiation factor 10 | SEQ ID NO: 5846 |
| GDF11 | Growth differentiation factor 11 | SEQ ID NOS: 5847- |
| | | 5848 |
| GDF15 | Growth differentiation factor 15 | SEQ ID NOS: 5849- |
| | | 5851 |
| GDF2 | Growth differentiation factor 2 | SEQ ID NO: 5852 |
| GDF3 | Growth differentiation factor 3 | SEQ ID NO: 5853 |
| GDF5 | Growth differentiation factor 5 | SEQ ID NOS: 5854- |
| | | 5855 |
| GDF6 | Growth differentiation factor 6 | SEQ ID NOS: 5856- |
| | | 5858 |
| GDF7 | Growth differentiation factor 7 | SEQ ID NO: 5859 |
| GDF9 | Growth differentiation factor 9 | SEQ ID NOS: 5860- |
| | | 5864 |
| GDNF | Glial cell derived neurotrophic factor | SEQ ID NOS: 5865- |
| | | 5872 |
| GFOD2 | Glucose-fructose oxidoreductase domain | SEQ ID NOS: 5873- |
| | containing 2 | 5878 |
| GFPT2 | Glutamine-fructose-6-phosphate | SEQ ID NOS: 5879- |
| | transaminase 2 | 5881 |
| GFRA2 | GDNF family receptor alpha 2 | SEQ ID NOS: 5882- |
| | | 5888 |
| GFRA4 | GDNF family receptor alpha 4 | SEQ ID NOS: 5889- |
| | | 5891 |
| GGA2 | Golgi-associated, gamma adaptin ear | SEQ ID NOS: 5892- |
| | containing, ARF binding protein 2 | 5900 |
| GGH | Gamma-glutamyl hydrolase (conjugase, | SEQ ID NO: 5901 |
| | folylpolygammaglutamyl hydrolase) | |
| GGT1 | Gamma-glutamyltransferase 1 | SEQ ID NOS: 5902- |
| | | 5924 |
| GGT5 | Gamma-glutamyltransferase 5 | SEQ ID NOS: 5925- |
| | | 5929 |
| GH1 | Growth hormone 1 | SEQ ID NOS: 5930- |
| | | 5934 |
| GH2 | Growth hormone 2 | SEQ ID NOS: 5935- |
| | | 5939 |
| GHDC | GH3 domain containing | SEQ ID NOS: 5940- |
| | | 5947 |
| GHRH | Growth hormone releasing hormone | SEQ ID NOS: 5948- |
| | | 5950 |
| GHRHR | Growth hormone releasing hormone | SEQ ID NOS: 5951- |
| | receptor | 5956 |
| GHRL | Ghrelin/obestatin prepropeptide | SEQ ID NOS: 5957- |
| | | 5967 |
| GIF | Gastric intrinsic factor (vitamin B synthesis) | SEQ ID NOS: 5968- |
| | | 5969 |
| GIP | Gastric inhibitory polypeptide | SEQ ID NO: 5970 |
| GKN1 | Gastrokine 1 | SEQ ID NO: 5971 |
| GKN2 | Gastrokine 2 | SEQ ID NOS: 5972- |
| | | 5973 |
| GLA | Galactosidase, alpha | SEQ ID NOS: 5974- |
| | | 5975 |
| GLB1 | Galactosidase, beta 1 | SEQ ID NOS: 5976- |
| | | 5984 |
| GLB1L | Galactosidase, beta 1-like | SEQ ID NOS: 5985- |
| | | 5992 |
| GLB1L2 | Galactosidase, beta 1-like 2 | SEQ ID NOS: 5993- |
| | | 5994 |
| GLCE | Glucuronic acid epimerase | SEQ ID NOS: 5995- |
| | | 5996 |
| GLG1 | Golgi glycoprotein 1 | SEQ ID NOS: 5997- |
| | | 6004 |
| GLIPR1 | GLI pathogenesis-related 1 | SEQ ID NOS: 6005- |
| | | 6008 |
| GLIPR1L1 | GLI pathogenesis-related 1 like 1 | SEQ ID NOS: 6009- |
| | | 6012 |
| GLIS3 | GLIS family zinc finger 3 | SEQ ID NOS: 6013- |
| | | 6021 |
| GLMP | Glycosylated lysosomal membrane protein | SEQ ID NOS: 6022- |
| | | 6030 |
| GLRB | Glycine receptor, beta | SEQ ID NOS: 6031- |
| | | 6036 |
| GLS | Glutaminase | SEQ ID NOS: 6037- |
| | | 6044 |
| GLT6D1 | Glycosyltransferase 6 domain containing 1 | SEQ ID NOS: 6045- |
| | | 6046 |
| GLTPD2 | Glycolipid transfer protein domain | SEQ ID NO: 6047 |
| | containing 2 | |
| GLUD1 | Glutamate dehydrogenase 1 | SEQ ID NO: 6048 |
| GM2A | GM2 ganglioside activator | SEQ ID NOS: 6049- |
| | | 6051 |
| GML | Glycosylphosphatidylinositol anchored | SEQ ID NOS: 6052- |
| | molecule like | 6053 |
| GNAS | GNAS complex locus | SEQ ID NOS: 6054- |
| | | 6075 |
| GNLY | Granulysin | SEQ ID NOS: 6076- |
| | | 6079 |
| GNPTG | N-acetylglucosamine-1-phosphate | SEQ ID NOS: 6080- |
| | transferase, gamma subunit | 6084 |
| GNRH1 | Gonadotropin-releasing hormone 1 | SEQ ID NOS: 6085- |
| | (luteinizing-releasing hormone) | 6086 |
| GNRH2 | Gonadotropin-releasing hormone 2 | SEQ ID NOS: 6087- |
| | | 6090 |
| GNS | Glucosamine (N-acetyl)-6-sulfatase | SEQ ID NOS: 6091- |
| | | 6096 |
| GOLM1 | Golgi membrane protein 1 | SEQ ID NOS: 6097- |
| | | 6101 |
| GORAB | Golgin, RAB6-interacting | SEQ ID NOS: 6102- |
| | | 6104 |
| GOT2 | Glutamic-oxaloacetic transaminase 2, | SEQ ID NOS: 6105- |
| | mitochondrial | 6107 |
| GP2 | Glycoprotein 2 (zymogen granule | SEQ ID NOS: 6108- |
| | membrane) | 6116 |
| GP6 | Glycoprotein VI (platelet) | SEQ ID NOS: 6117- |
| | | 6120 |
| GPC2 | Glypican 2 | SEQ ID NOS: 6121- |
| | | 6122 |
| GPC5 | Glypican 5 | SEQ ID NOS: 6123- |
| | | 6125 |
| GPC6 | Glypican 6 | SEQ ID NOS: 6126- |
| | | 6127 |
| GPD2 | Glycerol-3-phosphate dehydrogenase 2 | SEQ ID NOS: 6128- |
| | (mitochondrial) | 6136 |
| GPER1 | G protein-coupled estrogen receptor 1 | SEQ ID NOS: 6137- |
| | | 6143 |
| GPHA2 | Glycoprotein hormone alpha 2 | SEQ ID NOS: 6144- |
| | | 6146 |
| GPHB5 | Glycoprotein hormone beta 5 | SEQ ID NOS: 6147- |
| | | 6148 |
| GPIHBP1 | Glycosylphosphatidylinositol anchored high | SEQ ID NO: 6149 |
| | density lipoprotein binding protein 1 | |
| GPLD1 | Glycosylphosphatidylinositol specific | SEQ ID NO: 6150 |
| | phospholipase D1 | |
| GPNMB | Glycoprotein (transmembrane) nmb | SEQ ID NOS: 6151- |
| | | 6153 |
| GPR162 | G protein-coupled receptor 162 | SEQ ID NOS: 6154- |
| | | 6157 |
| GPX3 | Glutathione peroxidase 3 | SEQ ID NOS: 6158- |
| | | 6165 |
| GPX4 | Glutathione peroxidase 4 | SEQ ID NOS: 6166- |
| | | 6176 |
| GPX5 | Glutathione peroxidase 5 | SEQ ID NOS: 6177- |
| | | 6178 |
| GPX6 | Glutathione peroxidase 6 | SEQ ID NOS: 6179- |
| | | 6181 |
| GPX7 | Glutathione peroxidase 7 | SEQ ID NO: 6182 |
| GREM1 | Gremlin 1, DAN family BMP antagonist | SEQ ID NOS: 6183- |
| | | 6185 |
| GREM2 | Gremlin 2, DAN family BMP antagonist | SEQ ID NO: 6186 |
| GRHL3 | Grainyhead-like transcription factor 3 | SEQ ID NOS: 6187- |
| | | 6192 |
| GRIA2 | Glutamate receptor, ionotropic, AMPA 2 | SEQ ID NOS: 6193- |
| | | 6204 |
| GRIA3 | Glutamate receptor, ionotropic, AMPA 3 | SEQ ID NOS: 6205- |
| | | 6210 |
| GRIA4 | Glutamate receptor, ionotropic, AMPA 4 | SEQ ID NOS: 6211- |
| | | 6222 |
| GRIK2 | Glutamate receptor, ionotropic, kainate 2 | SEQ ID NOS: 6223- |
| | | 6231 |
| GRIN2B | Glutamate receptor, ionotropic, N-methyl | SEQ ID NOS: 6232- |
| | D-aspartate 2B | 6235 |
| GRM2 | Glutamate receptor, metabotropic 2 | SEQ ID NOS: 6236- |
| | | 6239 |
| GRM3 | Glutamate receptor, metabotropic 3 | SEQ ID NOS: 6240- |
| | | 6244 |
| GRM5 | Glutamate receptor, metabotropic 5 | SEQ ID NOS: 6245- |
| | | 6249 |
| CRN | Granulin | SEQ ID NOS: 6250- |
| | | 6265 |
| GRP | Gastrin-releasing peptide | SEQ ID NOS: 6266- |
| | | 6270 |
| GSG1 | Germ cell associated 1 | SEQ ID NOS: 6280- |
| | | 6288 |
| GSN | Gelsolin | SEQ ID NOS: 6289- |
| | | 6297 |
| GTDC1 | Glycosyltransferase-like domain containing | SEQ ID NOS: 6298- |
| | 1 | 6311 |
| GTPBP10 | GTP-binding protein 10 (putative) | SEQ ID NOS: 6312- |
| | | 6320 |
| GUCA2A | Guanylate cyclase activator 2A (guanylin) | SEQ ID NO: 6321 |
| GUCA2B | Guanylate cyclase activator 2B | SEQ ID NO: 6322 |
| | (uroguanylin) | |
| GUSB | Glucuronidase, beta | SEQ ID NOS: 6323- |
| | | 6327 |
| GVQW1 | GVQW motif containing 1 | SEQ ID NO: 6328 |
| GXYLT1 | Glucoside xylosyltransferase 1 | SEQ ID NOS: 6329- |
| | | 6330 |
| GXYLT2 | Glucoside xylosyltransferase 2 | SEQ ID NOS: 6331- |
| | | 6333 |
| GYLTL1B | Glycosyltransferase-like 1B | SEQ ID NOS: 7702- |
| | | 7707 |
| GYPB | Glycophorin B (MNS blood group) | SEQ ID NOS: 6334- |
| | | 6342 |
| GZMA | Granzyme A (granzyme 1, cytotoxic T- | SEQ ID NO: 6343 |
| | lymphocyte-associated serine esterase 3) | |
| GZMB | Granzyme B (granzyme 2, cytotoxic T- | SEQ ID NOS: 6344- |
| | lymphocyte-associated serine esterase 1) | 6352 |
| GZMH | Granzyme H (cathepsin G-like 2, protein h- | SEQ ID NOS: 6353- |
| | CCPX) | 6355 |
| GZMK | Granzyme K (granzyme 3; tryptase II) | SEQ ID NO: 6356 |
| GZMM | Granzyme M (lymphocyte met-ase 1) | SEQ ID NOS: 6357- |
| | | 6358 |
| H6PD | Hexose-6-phosphate dehydrogenase | SEQ ID NOS: 6359- |
| | (glucose 1-dehydrogenase) | 6360 |
| HABP2 | Hyaluronan binding protein 2 | SEQ ID NOS: 6361- |
| | | 6362 |
| HADHB | Hydroxyacyl-CoA dehydrogenase/3- | SEQ ID NOS: 6363- |
| | ketoacyl-CoA thiolase/enoyl-CoA hydratase | 6369 |
| | (trifunctional protein), beta subunit | |
| HAMP | Hepcidin antimicrobial peptide | SEQ ID NOS: 6370- |
| | | 6371 |
| HAPLN1 | Hyaluronan and proteoglycan link protein 1 | SEQ ID NOS: 6372- |
| | | 6378 |
| HAPLN2 | Hyaluronan and proteoglycan link protein 2 | SEQ ID NOS: 6379- |
| | | 6380 |
| HAPLN3 | Hyaluronan and proteoglycan link protein 3 | SEQ ID NOS: 6381- |
| | | 6384 |
| HAPLN4 | Hyaluronan and proteoglycan link protein 4 | SEQ ID NO: 6385 |
| HARS2 | Histidyl-tRNA synthetase 2, mitochondrial | SEQ ID NOS: 6386- |
| | | 6401 |
| HAVCR1 | Hepatitis A virus cellular receptor 1 | SEQ ID NOS: 6402- |
| | | 6406 |
| HCCS | Holocytochrome c synthase | SEQ ID NOS: 6407- |
| | | 6409 |
| HCRT | Hypocretin (orexin) neuropeptide precursor | SEQ ID NO: 6410 |
| HEATR5A | HEAT repeat containing 5A | SEQ ID NOS: 6414- |
| | | 6420 |
| HEPH | Hephaestin | SEQ ID NOS: 6421- |
| | | 6428 |
| HEXA | Hexosaminidase A (alpha polypeptide) | SEQ ID NOS: 6429- |
| | | 6438 |
| HEXB | Hexosaminidase B (beta polypeptide) | SEQ ID NOS: 6439- |
| | | 6444 |
| HFE2 | Hemochromatosis type 2 (juvenile) | SEQ ID NOS: 6445- |
| | | 6451 |
| HGF | Hepatocyte growth factor (hepapoietin A; | SEQ ID NOS: 6452- |
| | scatter factor) | 6462 |
| HGFAC | HGF activator | SEQ ID NOS: 6463- |
| | | 6464 |
| HHIP | Hedgehog interacting protein | SEQ ID NOS: 6465- |
| | | 6466 |
| HHIPL1 | HHIP-like 1 | SEQ ID NOS: 6467- |
| | | 6468 |
| HHIPL2 | HHIP-like 2 | SEQ ID NO: 6469 |
| HHLA1 | HERV-H LTR-associating 1 | SEQ ID NOS: 6470- |
| | | 6471 |
| HHLA2 | HERV-H LTR-associating 2 | SEQ ID NOS: 6472- |
| | | 6482 |
| HIBADH | 3-hydroxyisobutyrate dehydrogenase | SEQ ID NOS: 6483- |
| | | 6485 |
| HINT2 | Histidine triad nucleotide binding protein 2 | SEQ ID NO: 6486 |
| HLA-A | Major histocompatibility complex, class I, | SEQ ID NOS: 6487- |
| | A | 6491 |
| HLA-C | Major histocompatibility complex, class I, C | SEQ ID NOS: 6492- |
| | | 6496 |
| HLA-DOA | Major histocompatibility complex, class II, | SEQ ID NOS: 6497- |
| | DO alpha | 6498 |
| HLA-DPA1 | Major histocompatibility complex, class II, | SEQ ID NOS: 6499- |
| | DP alpha 1 | 6502 |
| HLA-DQA1 | Major histocompatibility complex, class II, | SEQ ID NOS: 6503- |
| | DQ alpha 1 | 6508 |
| HLA-DQB1 | Major histocompatibility complex, class II, | SEQ ID NOS: 6509- |
| | DQ beta 1 | 6514 |
| HLA-DQB2 | Major histocompatibility complex, class II, | SEQ ID NOS: 6515- |
| | DQ beta 2 | 6518 |
| HMCN1 | Hemicentin 1 | SEQ ID NOS: 6519- |
| | | 6520 |
| HMCN2 | Hemicentin 2 | SEQ ID NOS: 6521- |
| | | 6524 |
| HMGCL | 3-hydroxymethyl-3-methylglutaryl-CoA | SEQ ID NOS: 6525- |
| | lyase | 6528 |
| HMHA1 | Histocompatibility (minor) HA-1 | SEQ ID NOS: 1034- |
| | | 1042 |
| HMSD | Histocompatibility (minor) serpin domain | SEQ ID NOS: 6529- |
| | containing | 6530 |
| HP | Haptoglobin | SEQ ID NOS: 6531- |
| | | 6544 |
| HPR | Haptoglobin-related protein | SEQ ID NOS: 6545- |
| | | 6547 |
| HPSE | Heparanase | SEQ ID NOS: 6548- |
| | | 6554 |
| HPSE2 | Heparanase 2 (inactive) | SEQ ID NOS: 6555- |
| | | 6560 |
| HPX | Hemopexin | SEQ ID NOS: 6561- |
| | | 6562 |
| HRC | Histidine rich calcium binding protein | SEQ ID NOS: 6563- |
| | | 6565 |
| HRG | Histidine-rich glycoprotein | SEQ ID NO: 6566 |
| HRSP12 | Heat-responsive protein 12 | SEQ ID NOS: 11389- |
| | | 11392 |
| HS2ST1 | Heparan sulfate 2-O-sulfotransferase 1 | SEQ ID NOS: 6567- |
| | | 6569 |
| HS3ST1 | Heparan sulfate (glucosamine) 3-O- | SEQ ID NOS: 6570- |
| | sulfotransferase 1 | 6572 |
| HS6ST1 | Heparan sulfate 6-O-sulfotransferase 1 | SEQ ID NO: 6573 |
| HS6ST3 | Heparan sulfate 6-O-sulfotransferase 3 | SEQ ID NOS: 6574- |
| | | 6575 |
| HSD11B1L | Hydroxysteroid (11-beta) dehydrogenase 1- | SEQ ID NOS: 6576- |
| | like | 6594 |
| HSD17B11 | Hydroxysteroid (17-beta) dehydrogenase 11 | SEQ ID NOS: 6595- |
| | | 6596 |
| HSD17B7 | Hydroxysteroid (17-beta) dehydrogenase 7 | SEQ ID NOS: 6597- |
| | | 6601 |
| HSP90B1 | Heat shock protein 90 kDa beta (Grp94), | SEQ ID NOS: 6602- |
| | member 1 | 6607 |
| HSPA13 | Heat shock protein 70 kDa family, member | SEQ ID NO: 6608 |
| | 13 | |
| HSPA5 | Heat shock 70 kDa protein 5 (glucose- | SEQ ID NO: 6609 |
| | regulated protein, 78 kDa) | |
| HSPG2 | Heparan sulfate proteoglycan 2 | SEQ ID NOS: 6610- |
| | | 6614 |
| HTATIP2 | HIV-1 Tat interactive protein 2, 30 kDa | SEQ ID NOS: 6615- |
| | | 6622 |
| HTN1 | Histatin 1 | SEQ ID NOS: 6623- |
| | | 6625 |
| HTN3 | Histatin 3 | SEQ ID NOS: 6626- |
| | | 6628 |
| HTRA1 | HtrA serine peptidase 1 | SEQ ID NOS: 6629- |
| | | 6630 |
| HTRA3 | HtrA serine peptidase 3 | SEQ ID NOS: 6631- |
| | | 6632 |
| HTRA4 | HtrA serine peptidase 4 | SEQ ID NO: 6633 |
| HYAL1 | Hyaluronoglucosaminidase 1 | SEQ ID NOS: 6634- |
| | | 6642 |
| HYAL2 | Hyaluronoglucosaminidase 2 | SEQ ID NOS: 6643- |
| | | 6651 |
| HYAL3 | Hyaluronoglucosaminidase 3 | SEQ ID NOS: 6652- |
| | | 6658 |
| HYOU1 | Hypoxia up-regulated 1 | SEQ ID NOS: 6659- |
| | | 6673 |
| IAPP | Islet amyloid polypeptide | SEQ ID NOS: 6674- |
| | | 6678 |
| IBSP | Integrin-binding sialoprotein | SEQ ID NO: 6679 |
| ICAM1 | Intercellular adhesion molecule 1 | SEQ ID NOS: 6680- |
| | | 6682 |
| ICAM2 | Intercellular adhesion molecule 2 | SEQ ID NOS: 6683- |
| | | 6693 |
| ICAM4 | Intercellular adhesion molecule 4 | SEQ ID NOS: 6694- |
| | (Landsteiner-Wiener blood group) | 6696 |
| ID1 | Inhibitor of DNA binding 1, dominant | SEQ ID NOS: 6697- |
| | negative helix-loop-helix protein | 6698 |
| IDE | Insulin-degrading enzyme | SEQ ID NOS: 6699- |
| | | 6702 |
| IDNK | IdnK, gluconokinase homolog (E. coli) | SEQ ID NOS: 6703- |
| | | 6708 |
| IDS | Iduronate 2-sulfatase | SEQ ID NOS: 6709- |
| | | 6714 |
| IDUA | Iduronidase, alpha-L- | SEQ ID NOS: 6715- |
| | | 6720 |
| IFI27L2 | Interferon, alpha-inducible protein 27-like 2 | SEQ ID NOS: 6721- |
| | | 6722 |
| IFI30 | Interferon, gamma-inducible protein 30 | SEQ ID NOS: 6723- |
| | | 6724 |
| IFNA1 | Interferon, alpha 1 | SEQ ID NO: 6725 |
| IFNA10 | Interferon, alpha 10 | SEQ ID NO: 6726 |
| IFNA13 | Interferon, alpha 13 | SEQ ID NOS: 6727- |
| | | 6728 |
| IFNA14 | Interferon, alpha 14 | SEQ ID NO: 6729 |
| IFNA16 | Interferon, alpha 16 | SEQ ID NO: 6730 |
| IFNA17 | Interferon, alpha 17 | SEQ ID NO: 6731 |
| IFNA2 | Interferon, alpha 2 | SEQ ID NO: 6732 |
| IFNA21 | Interferon, alpha 21 | SEQ ID NO: 6733 |
| IFNA4 | Interferon, alpha 4 | SEQ ID NO: 6734 |
| IFNA5 | Interferon, alpha 5 | SEQ ID NO: 6735 |
| IFNA6 | Interferon, alpha 6 | SEQ ID NOS: 6736- |
| | | 6737 |
| IFNA7 | Interferon, alpha 7 | SEQ ID NO: 6738 |
| IFNA8 | Interferon, alpha 8 | SEQ ID NO: 6739 |
| IFNAR1 | Interferon (alpha, beta and omega) receptor | SEQ ID NOS: 6740- |
| | 1 | 6741 |
| IFNB1 | Interferon, beta 1, fibroblast | SEQ ID NO: 6742 |
| IFNE | Interferon, epsilon | SEQ ID NO: 6743 |
| IFNG | Interferon, gamma | SEQ ID NO: 6744 |
| IFNGR1 | Interferon gamma receptor 1 | SEQ ID NOS: 6745- |
| | | 6755 |
| IFNL1 | Interferon, lambda 1 | SEQ ID NO: 6756 |
| IFNL2 | Interferon, lambda 2 | SEQ ID NO: 6757 |
| IFNL3 | Interferon, lambda 3 | SEQ ID NOS: 6758- |
| | | 6759 |
| IFNLR1 | Interferon, lambda receptor 1 | SEQ ID NOS: 6760- |
| | | 6764 |
| IFNW1 | Interferon, omega 1 | SEQ ID NO: 6765 |
| IGF1 | Insulin-like growth factor 1 (somatomedin | SEQ ID NOS: 6766- |
| | C) | 6771 |
| IGF2 | Insulin-like growth factor 2 | SEQ ID NOS: 6772- |
| | | 6779 |
| IGFALS | Insulin-like growth factor binding protein, | SEQ ID NOS: 6780- |
| | acid labile subunit | 6782 |
| IGFBP1 | Insulin-like growth factor binding protein 1 | SEQ ID NOS: 6783- |
| | | 6785 |
| IGFBP2 | Insulin-like growth factor binding protein 2, | SEQ ID NOS: 6786- |
| | 36 kDa | 6789 |
| IGFBP3 | Insulin-like growth factor binding protein 3 | SEQ ID NOS: 6790- |
| | | 6797 |
| IGFBP4 | Insulin-like growth factor binding protein 4 | SEQ ID NO: 6798 |
| IGFBP5 | Insulin-like growth factor binding protein 5 | SEQ ID NOS: 6799- |
| | | 6800 |
| IGFBP6 | Insulin-like growth factor binding protein 6 | SEQ ID NOS: 6801- |
| | | 6803 |
| IGFBP7 | Insulin-like growth factor binding protein 7 | SEQ ID NOS: 6804- |
| | | 6805 |
| IGFBPL1 | Insulin-like growth factor binding protein- | SEQ ID NO: 6806 |
| | like 1 | |
| IGFL1 | IGF-like family member 1 | SEQ ID NO: 6807 |
| IGFL2 | IGF-like family member 2 | SEQ ID NOS: 6808- |
| | | 6810 |
| IGFL3 | IGF-like family member 3 | SEQ ID NO: 6811 |
| IGFLR1 | IGF-like family receptor 1 | SEQ ID NOS: 6812- |
| | | 6820 |
| IGIP | IgA-inducing protein | SEQ ID NO: 6821 |
| IGLON5 | IgLON family member 5 | SEQ ID NO: 6822 |
| IGSF1 | Immunoglobulin superfamily, member 1 | SEQ ID NOS: 6823- |
| | | 6828 |
| IGSF10 | Immunoglobulin superfamily, member 10 | SEQ ID NOS: 6829- |
| | | 6830 |
| IGSF11 | Immunoglobulin superfamily, member 11 | SEQ ID NOS: 6831- |
| | | 6838 |
| IGSF21 | Immunoglobin superfamily, member 21 | SEQ ID NO: 6839 |
| IGSF8 | Immunoglobulin superfamily, member 8 | SEQ ID NOS: 6840- |
| | | 6843 |
| IGSF9 | Immunoglobulin superfamily, member 9 | SEQ ID NOS: 6844- |
| | | 6846 |
| IHH | Indian hedgehog | SEQ ID NO: 6847 |
| IL10 | Interleukin 10 | SEQ ID NOS: 6848- |
| | | 6849 |
| IL11 | Interleukin 11 | SEQ ID NOS: 6850- |
| | | 6853 |
| IL11RA | Interleukin 11 receptor, alpha | SEQ ID NOS: 6854- |
| | | 6864 |
| IL12B | Interleukin 12B | SEQ ID NO: 6865 |
| IL12RB1 | Interleukin 12 receptor, beta 1 | SEQ ID NOS: 6866- |
| | | 6871 |
| IL12RB2 | Interleukin 12 receptor, beta 2 | SEQ ID NOS: 6872- |
| | | 6876 |
| IL13 | Interleukin 13 | SEQ ID NOS: 6877- |
| | | 6878 |
| IL13RA1 | Interleukin 13 receptor, alpha 1 | SEQ ID NOS: 6879- |
| | | 6880 |
| IL15RA | Interleukin 15 receptor, alpha | SEQ ID NOS: 6881- |
| | | 6898 |
| IL17A | Interleukin 17A | SEQ ID NO: 6899 |
| IL17B | Interleukin 17B | SEQ ID NO: 6900 |
| IL17C | Interleukin 17C | SEQ ID NO: 6901 |
| IL17D | Interleukin 17D | SEQ ID NOS: 6902- |
| | | 6904 |
| IL17F | Interleukin 17F | SEQ ID NO: 6905 |
| IL17RA | Interleukin 17 receptor A | SEQ ID NOS: 6906- |
| | | 6907 |
| IL17RC | Interleukin 17 receptor C | SEQ ID NOS: 6908- |
| | | 6923 |
| IL17RE | Interleukin 17 receptor E | SEQ ID NOS: 6924- |
| | | 6930 |
| IL18BP | Interleukin 18 binding protein | SEQ ID NOS: 6931- |
| | | 6941 |
| IL18R1 | Interleukin 18 receptor 1 | SEQ ID NOS: 6942- |
| | | 6945 |
| IL18RAP | Interleukin 18 receptor accessory protein | SEQ ID NOS: 6946- |
| | | 6948 |
| IL19 | Interleukin 19 | SEQ ID NOS: 6949- |
| | | 6951 |
| IL1R1 | Interleukin 1 receptor, type I | SEQ ID NOS: 6952- |
| | | 6964 |
| IL1R2 | Interleukin 1 receptor, type II | SEQ ID NOS: 6965- |
| | | 6968 |
| IL1RAP | Interleukin 1 receptor accessory protein | SEQ ID NOS: 6969- |
| | | 6982 |
| IL1RL1 | Interleukin 1 receptor-like 1 | SEQ ID NOS: 6983- |
| | | 6988 |
| IL1RL2 | Interleukin 1 receptor-like 2 | SEQ ID NOS: 6989- |
| | | 6991 |
| IL1RN | Interleukin 1 receptor antagonist | SEQ ID NOS: 6992- |
| | | 6996 |
| IL2 | Interleukin 2 | SEQ ID NO: 6997 |
| IL20 | Interleukin 20 | SEQ ID NOS: 6998- |
| | | 7000 |
| IL20RA | Interleukin 20 receptor, alpha | SEQ ID NOS: 7001- |
| | | 7007 |
| IL21 | Interleukin 21 | SEQ ID NOS: 7008- |
| | | 7009 |
| IL22 | Interleukin 22 | SEQ ID NOS: 7010- |
| | | 7011 |
| IL22RA2 | Interleukin 22 receptor, alpha 2 | SEQ ID NOS: 7012- |
| | | 7014 |
| IL23A | Interleukin 23, alpha subunit p19 | SEQ ID NO: 7015 |
| IL24 | Interleukin 24 | SEQ ID NOS: 7016- |
| | | 7021 |
| IL25 | Interleukin 25 | SEQ ID NOS: 7022- |
| | | 7023 |
| IL26 | Interleukin 26 | SEQ ID NO: 7024 |
| IL27 | Interleukin 27 | SEQ ID NOS: 7025- |
| | | 7026 |
| IL2RB | Interleukin 2 receptor, beta | SEQ ID NOS: 7027- |
| | | 7031 |
| IL3 | Interleukin 3 | SEQ ID NO: 7032 |
| IL31 | Interleukin 31 | SEQ ID NO: 7033 |
| IL31RA | Interleukin 31 receptor A | SEQ ID NOS: 7034- |
| | | 7041 |
| IL32 | Interleukin 32 | SEQ ID NOS: 7042- |
| | | 7071 |
| IL34 | Interleukin 34 | SEQ ID NOS: 7072- |
| | | 7075 |
| IL3RA | Interleukin 3 receptor, alpha (low affinity) | SEQ ID NOS: 7076- |
| | | 7078 |
| IL4 | Interleukin 4 | SEQ ID NOS: 7079- |
| | | 7081 |
| IL4I1 | Interleukin 4 induced 1 | SEQ ID NOS: 7082- |
| | | 7089 |
| IL4R | Interleukin 4 receptor | SEQ ID NOS: 7090- |
| | | 7103 |
| IL5 | Interleukin 5 | SEQ ID NOS: 7104- |
| | | 7105 |
| IL5RA | Interleukin 5 receptor, alpha | SEQ ID NOS: 7106- |
| | | 7115 |
| IL6 | Interleukin 6 | SEQ ID NOS: 7116- |
| | | 7122 |
| IL6R | Interleukin 6 receptor | SEQ ID NOS: 7123- |
| | | 7128 |
| IL6ST | Interleukin 6 signal transducer | SEQ ID NOS: 7129- |
| | | 7138 |
| IL7 | Interleukin 7 | SEQ ID NOS: 7139- |
| | | 7146 |
| IL7R | Interleukin 7 receptor | SEQ ID NOS: 7147- |
| | | 7153 |
| IL9 | Interleukin 9 | SEQ ID NO: 7154 |
| ILDR1 | Immunoglobulin-like domain containing | SEQ ID NOS: 7155- |
| | receptor 1 | 7159 |
| ILDR2 | Immunoglobulin-like domain containing | SEQ ID NOS: 7160- |
| | receptor 2 | 7166 |
| IMP4 | IMP4, U3 small nucleolar ribonucleoprotein | SEQ ID NOS: 7167- |
| | | 7172 |
| IMPG1 | Interphotoreceptor matrix proteoglycan 1 | SEQ ID NOS: 7173- |
| | | 7176 |
| INHA | Inhibin, alpha | SEQ ID NO: 7177 |
| INHBA | Inhibin, beta A | SEQ ID NOS: 7178- |
| | | 7180 |
| INHBB | Inhibin, beta B | SEQ ID NO: 7181 |
| INHBC | Inhibin, beta C | SEQ ID NO: 7182 |
| INHBE | Inhibin, beta E | SEQ ID NOS: 7183- |
| | | 7184 |
| INPP5A | Inositol polyphosphate-5-phosphatase A | SEQ ID NOS: 7185- |
| | | 7189 |
| INS | Insulin | SEQ ID NOS: 7190- |
| | | 7194 |
| INS-IGF2 | INS-IGF2 readthrough | SEQ ID NOS: 7195- |
| | | 7196 |
| INSL3 | Insulin-like 3 (Leydig cell) | SEQ ID NOS: 7197- |
| | | 7199 |
| INSL4 | Insulin-like 4 (placenta) | SEQ ID NO: 7200 |
| INSL5 | Insulin-like 5 | SEQ ID NO: 7201 |
| INSL6 | Insulin-like 6 | SEQ ID NO: 7202 |
| INTS3 | Integrator complex subunit 3 | SEQ ID NOS: 7203- |
| | | 7208 |
| IPO11 | Importin 11 | SEQ ID NOS: 7209- |
| | | 7217 |
| IPO9 | Importin 9 | SEQ ID NOS: 7218- |
| | | 7219 |
| IQCF6 | IQ motif containing F6 | SEQ ID NOS: 7220- |
| | | 7221 |
| IRAK3 | Interleukin-1 receptor-associated kinase 3 | SEQ ID NOS: 7222- |
| | | 7224 |
| IRS4 | Insulin receptor substrate 4 | SEQ ID NO: 7225 |
| ISLR | Immunoglobulin superfamily containing | SEQ ID NOS: 7226- |
| | leucine-rich repeat | 7229 |
| ISLR2 | Immunoglobulin superfamily containing | SEQ ID NOS: 7230- |
| | leucine-rich repeat 2 | 7239 |
| ISM1 | Isthmin 1, angiogenesis inhibitor | SEQ ID NO: 7240 |
| ISM2 | Isthmin 2 | SEQ ID NOS: 7241- |
| | | 7246 |
| ITGA4 | Integrin, alpha 4 (antigen CD49D, alpha 4 | SEQ ID NOS: 7247- |
| | subunit of VLA-4 receptor) | 7249 |
| ITGA9 | Integrin, alpha 9 | SEQ ID NOS: 7250- |
| | | 7252 |
| ITGAL | Integrin, alpha L (antigen CD11A (p180), | SEQ ID NOS: 7253- |
| | lymphocyte function-associated antigen 1; | 7262 |
| | alpha polypeptide) | |
| ITGAX | Integrin, alpha X (complement component 3 | SEQ ID NOS: 7263- |
| | receptor 4 subunit) | 7265 |
| ITGB1 | Integrin, beta 1 (fibronectin receptor, beta | SEQ ID NOS: 7266- |
| | polypeptide, antigen CD29 includes MDF2, | 7281 |
| | MSK12) | |
| ITGB2 | Integrin, beta 2 (complement component 3 | SEQ ID NOS: 7282- |
| | receptor 3 and 4 subunit) | 7298 |
| ITGB3 | Integrin, beta 3 (platelet glycoprotein IIIa, | SEQ ID NOS: 7299- |
| | antigen CD61) | 7301 |
| ITGB7 | Integrin, beta 7 | SEQ ID NOS: 7302- |
| | | 7309 |
| ITGBL1 | Integrin, beta-like 1 (with EGF-like repeat | SEQ ID NOS: 7310- |
| | domains) | 7315 |
| ITIH1 | Inter-alpha-trypsin inhibitor heavy chain 1 | SEQ ID NOS: 7316- |
| | | 7321 |
| ITIH2 | Inter-alpha-trypsin inhibitor heavy chain 2 | SEQ ID NOS: 7322- |
| | | 7324 |
| ITIH3 | Inter-alpha-trypsin inhibitor heavy chain 3 | SEQ ID NOS: 7325- |
| | | 7327 |
| ITIH4 | Inter-alpha-trypsin inhibitor heavy chain | SEQ ID NOS: 7328- |
| | family, member 4 | 7331 |
| ITIH5 | Inter-alpha-trypsin inhibitor heavy chain | SEQ ID NOS: 7332- |
| | family, member 5 | 7335 |
| ITIH6 | Inter-alpha-trypsin inhibitor heavy chain | SEQ ID NO: 7336 |
| | family, member 6 | |
| ITLN1 | Intelectin 1 (galactofuranose binding) | SEQ ID NO: 7337 |
| ITLN2 | Intelectin 2 | SEQ ID NO: 7338 |
| IZUMO1R | IZUMO1 receptor, JUNO | SEQ ID NOS: 7339- |
| | | 7340 |
| IZUMO4 | IZUMO family member 4 | SEQ ID NOS: 7341- |
| | | 7347 |
| JCHAIN | Joining chain of multimeric IgA and IgM | SEQ ID NOS: 7357- |
| | | 7362 |
| JMJD8 | Jumonji domain containing 8 | SEQ ID NOS: 7363- |
| | | 7367 |
| JSRP1 | Junctional sarcoplasmic reticulum protein 1 | SEQ ID NO: 7368 |
| KANSL2 | KAT8 regulatory NSL complex subunit 2 | SEQ ID NOS: 7369- |
| | | 7379 |
| KAZALD1 | Kazal-type serine peptidase inhibitor | SEQ ID NO: 7380 |
| | domain 1 | |
| KCNIP3 | Kv channel interacting protein 3, calsenilin | SEQ ID NOS: 7381- |
| | | 7383 |
| KCNK7 | Potassium channel, two pore domain | SEQ ID NOS: 7384- |
| | subfamily K, member 7 | 7389 |
| KCNN4 | Potassium channel, calcium activated | SEQ ID NOS: 7390- |
| | intermediate/small conductance subfamily | 7395 |
| | N alpha, member 4 | |
| KCNU1 | Potassium channel, subfamily U, member 1 | SEQ ID NOS: 7396- |
| | | 7400 |
| KCP | Kielin/chordin-like protein | SEQ ID NOS: 7401- |
| | | 7404 |
| KDELC1 | KDEL (Lys-Asp-Glu-Leu) containing 1 | SEQ ID NO: 7405 |
| KDELC2 | KDEL (Lys-Asp-Glu-Leu) containing 2 | SEQ ID NOS: 7406- |
| | | 7409 |
| KDM1A | Lysine (K)-specific demethylase 1A | SEQ ID NOS: 7410- |
| | | 7413 |
| KDM3B | Lysine (K)-specific demethylase 3B | SEQ ID NOS: 7414- |
| | | 7417 |
| KDM6A | Lysine (K)-specific demethylase 6A | SEQ ID NOS: 7418- |
| | | 7427 |
| KDM7A | Lysine (K)-specific demethylase 7A | SEQ ID NOS: 7428- |
| | | 7429 |
| KDSR | 3-ketodihydrosphingosine reductase | SEQ ID NOS: 7430- |
| | | 7436 |
| KERA | Keratocan | SEQ ID NO: 7437 |
| KIAA0100 | KJAA0100 | SEQ ID NOS: 7438- |
| | | 7443 |
| KIAA0319 | KJAA0319 | SEQ ID NOS: 7444- |
| | | 7449 |
| KIAA1324 | KIAA1324 | SEQ ID NOS: 7450- |
| | | 7458 |
| KIFC2 | Kinesin family member C2 | SEQ ID NOS: 7459- |
| | | 7461 |
| KIR2DL4 | Killer cell immunoglobulin-like receptor, | SEQ ID NOS: 7462- |
| | two domains, long cytoplasmic tail, 4 | 7468 |
| KIR3DX1 | Killer cell immunoglobulin-like receptor, | SEQ ID NOS: 7469- |
| | three domains, X1 | 7473 |
| KIRREL2 | Kin of IRRE like 2 (Drosophila) | SEQ ID NOS: 7474- |
| | | 7478 |
| KISS1 | KiSS-1 metastasis-suppressor | SEQ ID NOS: 7479- |
| | | 7480 |
| KLHL11 | Kelch-like family member 11 | SEQ ID NO: 7481 |
| KLHL22 | Kelch-like family member 22 | SEQ ID NOS: 7482- |
| | | 7488 |
| KLK1 | Kallikrein 1 | SEQ ID NOS: 7489- |
| | | 7490 |
| KLK10 | Kallikrein-related peptidase 10 | SEQ ID NOS: 7491- |
| | | 7495 |
| KLK11 | Kallikrein-related peptidase 11 | SEQ ID NOS: 7496- |
| | | 7504 |
| KLK12 | Kallikrein-related peptidase 12 | SEQ ID NOS: 7505- |
| | | 7511 |
| KLK13 | Kallikrein-related peptidase 13 | SEQ ID NOS: 7512- |
| | | 7520 |
| KLK14 | Kallikrein-related peptidase 14 | SEQ ID NOS: 7521- |
| | | 7522 |
| KLK15 | Kallikrein-related peptidase 15 | SEQ ID NOS: 7523- |
| | | 7527 |
| KLK2 | Kallikrein-related peptidase 2 | SEQ ID NOS: 7528- |
| | | 7540 |
| KLK3 | Kallikrein-related peptidase 3 | SEQ ID NOS: 7541- |
| | | 7552 |
| KLK4 | Kallikrein-related peptidase 4 | SEQ ID NOS: 7553- |
| | | 7557 |
| KLK5 | Kallikrein-related peptidase 5 | SEQ ID NOS: 7558- |
| | | 7561 |
| KLK6 | Kallikrein-related peptidase 6 | SEQ ID NOS: 7562- |
| | | 7568 |
| KLK7 | Kallikrein-related peptidase 7 | SEQ ID NOS: 7569- |
| | | 7573 |
| KLK8 | Kallikrein-related peptidase 8 | SEQ ID NOS: 7574- |
| | | 7581 |
| KLK9 | Kallikrein-related peptidase 9 | SEQ ID NOS: 7582- |
| | | 7583 |
| KLKB1 | Kallikrein B, plasma (Fletcher factor) 1 | SEQ ID NOS: 7584- |
| | | 7588 |
| KNDC1 | Kinase non-catalytic C-lobe domain | SEQ ID NOS: 7593- |
| | (KIND) containing 1 | 7594 |
| KNG1 | Kininogen 1 | SEQ ID NOS: 7595- |
| | | 7599 |
| KRBA2 | KRAB-A domain containing 2 | SEQ ID NOS: 7600- |
| | | 7603 |
| KREMEN2 | Kringle containing transmembrane protein 2 | SEQ ID NOS: 7604- |
| | | 7609 |
| KRTDAP | Keratinocyte differentiation-associated | SEQ ID NOS: 7610- |
| | protein | 7611 |
| L1CAM | L1 cell adhesion molecule | SEQ ID NOS: 7612- |
| | | 7621 |
| L3MBTL2 | L(3)mbt-like 2 (Drosophila) | SEQ ID NOS: 7622- |
| | | 7626 |
| LA16c- | | SEQ ID NO: 72 |
| 380H5.3 | | |
| LACE1 | Lactation elevated 1 | SEQ ID NOS: 580-583 |
| LACRT | Lacritin | SEQ ID NOS: 7627- |
| | | 7629 |
| LACTB | Lactamase, beta | SEQ ID NOS: 7630- |
| | | 7632 |
| LAG3 | Lymphocyte-activation gene 3 | SEQ ID NOS: 7633- |
| | | 7634 |
| LAIR2 | Leukocyte-associated immunoglobulin-like | SEQ ID NOS: 7635- |
| | receptor 2 | 7638 |
| LALBA | Lactalbumin, alpha- | SEQ ID NOS: 7639- |
| | | 7640 |
| LAMA1 | Laminin, alpha 1 | SEQ ID NOS: 7641- |
| | | 7642 |
| LAMA2 | Laminin, alpha 2 | SEQ ID NOS: 7643- |
| | | 7646 |
| LAMA3 | Laminin, alpha 3 | SEQ ID NOS: 7647- |
| | | 7656 |
| LAMA4 | Laminin, alpha 4 | SEQ ID NOS: 7657- |
| | | 7671 |
| LAMA5 | Laminin, alpha 5 | SEQ ID NOS: 7672- |
| | | 7674 |
| LAMB1 | Laminin, beta 1 | SEQ ID NOS: 7675- |
| | | 7679 |
| LAMB2 | Laminin, beta 2 (laminin S) | SEQ ID NOS: 7680- |
| | | 7682 |
| LAMB3 | Laminin, beta 3 | SEQ ID NOS: 7683- |
| | | 7687 |
| LAMB4 | Laminin, beta 4 | SEQ ID NOS: 7688- |
| | | 7691 |
| LAMC1 | Laminin, gamma 1 (formerly LAMB2) | SEQ ID NOS: 7692- |
| | | 7693 |
| LAMC2 | Laminin, gamma 2 | SEQ ID NOS: 7694- |
| | | 7695 |
| LAMC3 | Laminin, gamma 3 | SEQ ID NOS: 7696- |
| | | 7697 |
| LAMP3 | Lysosomal-associated membrane protein 3 | SEQ ID NOS: 7698- |
| | | 7701 |
| LAT | Linker for activation of T cells | SEQ ID NOS: 7708- |
| | | 7717 |
| LAT2 | Linker for activation of T cells family, | SEQ ID NOS: 7718- |
| | member 2 | 7726 |
| LBP | Lipopolysaccharide binding protein | SEQ ID NO: 7727 |
| LCAT | Lecithin-cholesterol acyltransferase | SEQ ID NOS: 7728- |
| | | 7734 |
| LCN1 | Lipocalin 1 | SEQ ID NOS: 7735- |
| | | 7736 |
| LCN10 | Lipocalin 10 | SEQ ID NOS: 7737- |
| | | 7742 |
| LCN12 | Lipocalin 12 | SEQ ID NOS: 7743- |
| | | 7745 |
| LCN15 | Lipocalin 15 | SEQ ID NO: 7746 |
| LCN2 | Lipocalin 2 | SEQ ID NOS: 7747- |
| | | 7749 |
| LCN6 | Lipocalin 6 | SEQ ID NOS: 7750- |
| | | 7751 |
| LCN8 | Lipocalin 8 | SEQ ID NOS: 7752- |
| | | 7753 |
| LCN9 | Lipocalin 9 | SEQ ID NOS: 7754- |
| | | 7755 |
| LCORL | Ligand dependent nuclear receptor | SEQ ID NOS: 7756- |
| | corepressor-like | 7761 |
| LDLR | Low density lipoprotein receptor | SEQ ID NOS: 7762- |
| | | 7770 |
| LDLRAD2 | Low density lipoprotein receptor class A | SEQ ID NOS: 7771- |
| | domain containing 2 | 7772 |
| LEAP2 | Liver expressed antimicrobial peptide 2 | SEQ ID NO: 7773 |
| LECT2 | Leukocyte cell-derived chemotaxin 2 | SEQ ID NOS: 7774- |
| | | 7777 |
| LEFTY1 | Left-right determination factor 1 | SEQ ID NOS: 7778- |
| | | 7779 |
| LEFTY2 | Left-right determination factor 2 | SEQ ID NOS: 7780- |
| | | 7781 |
| LEP | Leptin | SEQ ID NO: 7782 |
| LFNG | LFNG O-fucosylpeptide 3-beta-N- | SEQ ID NOS: 7783- |
| | acetylglucosaminyltransferase | 7788 |
| LGALS3BP | Lectin, galactoside-binding, soluble, 3 | SEQ ID NOS: 7789- |
| | binding protein | 7803 |
| LGI1 | Leucine-rich, glioma inactivated 1 | SEQ ID NOS: 7804- |
| | | 7822 |
| LGI2 | Leucine-rich repeat LGI family, member 2 | SEQ ID NOS: 7823- |
| | | 7824 |
| LGI3 | Leucine-rich repeat LGI family, member 3 | SEQ ID NOS: 7825- |
| | | 7828 |
| LGI4 | Leucine-rich repeat LGI family, member 4 | SEQ ID NOS: 7829- |
| | | 7832 |
| LGMN | Legumain | SEQ ID NOS: 7833- |
| | | 7846 |
| LGR4 | Leucine-rich repeat containing G protein- | SEQ ID NOS: 7847- |
| | coupled receptor 4 | 7849 |
| LHB | Luteinizing hormone beta polypeptide | SEQ ID NO: 7850 |
| LHCGR | Luteinizing hormone/choriogonadotropin | SEQ ID NOS: 7851- |
| | receptor | 7855 |
| LIF | Leukemia inhibitory factor | SEQ ID NOS: 7856- |
| | | 7857 |
| LIFR | Leukemia inhibitory factor receptor alpha | SEQ ID NOS: 7858- |
| | | 7862 |
| LILRA1 | Leukocyte immunoglobulin-like receptor, | SEQ ID NOS: 7863- |
| | subfamily A (with TM domain), member 1 | 7864 |
| LILRA2 | Leukocyte immunoglobulin-like receptor, | SEQ ID NOS: 7865- |
| | subfamily A (with TM domain), member 2 | 7871 |
| LILRB3 | Leukocyte immunoglobulin-like receptor, | SEQ ID NOS: 7872- |
| | subfamily B (with TM and ITIM domains), | 7876 |
| | member 3 | |
| LIME1 | Lek interacting transmembrane adaptor 1 | SEQ ID NOS: 7877- |
| | | 7882 |
| LINGO1 | Leucine rich repeat and Ig domain | SEQ ID NOS: 7883- |
| | containing 1 | 7893 |
| LIPA | Lipase A, lysosomal acid, cholesterol | SEQ ID NOS: 7894- |
| | esterase | 7898 |
| LIPC | Lipase, hepatic | SEQ ID NOS: 7899- |
| | | 7902 |
| LIPF | Lipase, gastric | SEQ ID NOS: 7903- |
| | | 7906 |
| LIPG | Lipase, endothelial | SEQ ID NOS: 7907- |
| | | 7912 |
| LIPH | Lipase, member H | SEQ ID NOS: 7913- |
| | | 7917 |
| LIPK | Lipase, family member K | SEQ ID NO: 7918 |
| LIPM | Lipase, family member M | SEQ ID NOS: 7919- |
| | | 7920 |
| LIPN | Lipase, family member N | SEQ ID NO: 7921 |
| LMAN2 | Lectin, mannose-binding 2 | SEQ ID NOS: 7922- |
| | | 7926 |
| LMNTD1 | Lamin tail domain containing 1 | SEQ ID NOS: 7927- |
| | | 7937 |
| LNX1 | Ligand of numb-protein X 1, E3 ubiquitin | SEQ ID NOS: 7938- |
| | protein ligase | 7944 |
| LOX | Lysyl oxidase | SEQ ID NOS: 7945- |
| | | 7947 |
| LOXL1 | Lysyl oxidase-like 1 | SEQ ID NOS: 7948- |
| | | 7949 |
| LOXL2 | Lysyl oxidase-like 2 | SEQ ID NOS: 7950- |
| | | 7958 |
| LOXL3 | Lysyl oxidase-like 3 | SEQ ID NOS: 7959- |
| | | 7965 |
| LOXL4 | Lysyl oxidase-like 4 | SEQ ID NO: 7966 |
| LPA | Lipoprotein, Lp(a) | SEQ ID NOS: 7967- |
| | | 7969 |
| LPL | Lipoprotein lipase | SEQ ID NOS: 7970- |
| | | 7974 |
| LPO | Lactoperoxidase | SEQ ID NOS: 7975- |
| | | 7981 |
| LRAT | Lecithin retinol acyltransferase | SEQ ID NOS: 7982- |
| | (phosphatidylcholine--retinol O- | 7984 |
| | acyltransferase) | |
| LRCH3 | Leucine-rich repeats and calponin | SEQ ID NOS: 7985- |
| | homology (CH) domain containing 3 | 7993 |
| LRCOL1 | Leucine rich colipase-like 1 | SEQ ID NOS: 7994- |
| | | 7997 |
| LRFN4 | Leucine rich repeat and fibronectin type III | SEQ ID NOS: 7998- |
| | domain containing 4 | 7999 |
| LRFN5 | Leucine rich repeat and fibronectin type III | SEQ ID NOS: 8000- |
| | domain containing 5 | 8002 |
| LRG1 | Leucine-rich alpha-2-glycoprotein 1 | SEQ ID NO: 8003 |
| LRP1 | Low density lipoprotein receptor-related | SEQ ID NOS: 8004- |
| | protein 1 | 8009 |
| LRP11 | Low density lipoprotein receptor-related | SEQ ID NOS: 8010- |
| | protein 11 | 8011 |
| LRP1B | Low density lipoprotein receptor-related | SEQ ID NOS: 8012- |
| | protein 1B | 8015 |
| LRP2 | Low density lipoprotein receptor-related | SEQ ID NOS: 8016- |
| | protein 2 | 8017 |
| LRP4 | Low density lipoprotein receptor-related | SEQ ID NOS: 8018- |
| | protein 4 | 8019 |
| LRPAP1 | Low density lipoprotein receptor-related | SEQ ID NOS: 8020- |
| | protein associated protein 1 | 8021 |
| LRRC17 | Leucine rich repeat containing 17 | SEQ ID NOS: 8022- |
| | | 8024 |
| LRRC32 | Leucine rich repeat containing 32 | SEQ ID NOS: 8025- |
| | | 8028 |
| LRRC3B | Leucine rich repeat containing 3B | SEQ ID NOS: 8029- |
| | | 8033 |
| LRRC4B | Leucine rich repeat containing 4B | SEQ ID NOS: 8034- |
| | | 8036 |
| LRRC70 | Leucine rich repeat containing 70 | SEQ ID NOS: 8037- |
| | | 8038 |
| LRRN3 | Leucine rich repeat neuronal 3 | SEQ ID NOS: 8039- |
| | | 8042 |
| LRRTM1 | Leucine rich repeat transmembrane | SEQ ID NOS: 8043- |
| | neuronal 1 | 8049 |
| LRRTM2 | Leucine rich repeat transmembrane | SEQ ID NOS: 8050- |
| | neuronal 2 | 8052 |
| LRRTM4 | Leucine rich repeat transmembrane | SEQ ID NOS: 8053- |
| | neuronal 4 | 8058 |
| LRTM2 | Leucine-rich repeats and transmembrane | SEQ ID NOS: 8059- |
| | domains 2 | 8063 |
| LSR | Lipolysis stimulated lipoprotein receptor | SEQ ID NOS: 8064- |
| | | 8074 |
| LST1 | Leukocyte specific transcript 1 | SEQ ID NOS: 8075- |
| | | 8092 |
| LTA | Lymphotoxin alpha | SEQ ID NOS: 8093- |
| | | 8094 |
| LTBP1 | Latent transforming growth factor beta | SEQ ID NOS: 8095- |
| | binding protein 1 | 8104 |
| LTBP2 | Latent transforming growth factor beta | SEQ ID NOS: 8105- |
| | binding protein 2 | 8108 |
| LTBP3 | Latent transforming growth factor beta | SEQ ID NOS: 8109- |
| | binding protein 3 | 8121 |
| LTBP4 | Latent transforming growth factor beta | SEQ ID NOS: 8122- |
| | binding protein 4 | 8137 |
| LTBR | Lymphotoxin beta receptor (TNFR | SEQ ID NOS: 8138- |
| | superfamily, member 3) | 8143 |
| LTF | Lactotransferrin | SEQ ID NOS: 8144- |
| | | 8148 |
| LTK | Leukocyte receptor tyrosine kinase | SEQ ID NOS: 8149- |
| | | 8152 |
| LUM | Lumican | SEQ ID NO: 8153 |
| LUZP2 | Leucine zipper protein 2 | SEQ ID NOS: 8154- |
| | | 8157 |
| LVRN | Laeverin | SEQ ID NOS: 8158- |
| | | 8163 |
| LY6E | Lymphocyte antigen 6 complex, locus E | SEQ ID NOS: 8164- |
| | | 8177 |
| LY6G5B | Lymphocyte antigen 6 complex, locus G5B | SEQ ID NOS: 8178- |
| | | 8179 |
| LY6G6D | Lymphocyte antigen 6 complex, locus G6D | SEQ ID NOS: 8180- |
| | | 8181 |
| LY6G6E | Lymphocyte antigen 6 complex, locus G6E | SEQ ID NOS: 8182- |
| | (pseudogene) | 8185 |
| LY6H | Lymphocyte antigen 6 complex, locus H | SEQ ID NOS: 8186- |
| | | 8189 |
| LY6K | Lymphocyte antigen 6 complex, locus K | SEQ ID NOS: 8190- |
| | | 8193 |
| LY86 | Lymphocyte antigen 86 | SEQ ID NOS: 8195- |
| | | 8196 |
| LY96 | Lymphocyte antigen 96 | SEQ ID NOS: 8197- |
| | | 8198 |
| LYG1 | Lysozyme G-like 1 | SEQ ID NOS: 8199- |
| | | 8200 |
| LYG2 | Lysozyme G-like 2 | SEQ ID NOS: 8201- |
| | | 8206 |
| LYNX1 | Ly6/neurotoxin 1 | SEQ ID NOS: 8207- |
| | | 8211 |
| LYPD1 | LY6/PLAUR domain containing 1 | SEQ ID NOS: 8212- |
| | | 8214 |
| LYPD2 | LY6/PLAUR domain containing 2 | SEQ ID NO: 8215 |
| LYPD4 | LY6/PLAUR domain containing 4 | SEQ ID NOS: 8216- |
| | | 8218 |
| LYPD6 | LY6/PLAUR domain containing 6 | SEQ ID NOS: 8219- |
| | | 8223 |
| LYPD6B | LY6/PLAUR domain containing 6B | SEQ ID NOS: 8224- |
| | | 8230 |
| LYPD8 | LY6/PLAUR domain containing 8 | SEQ ID NOS: 8231- |
| | | 8232 |
| LYZ | Lysozyme | SEQ ID NOS: 8233- |
| | | 8235 |
| LYZL4 | Lysozyme-like 4 | SEQ ID NOS: 8236- |
| | | 8237 |
| LYZL6 | Lysozyme-like 6 | SEQ ID NOS: 8238- |
| | | 8240 |
| M6PR | Mannose-6-phosphate receptor (cation | SEQ ID NOS: 8241- |
| | dependent) | 8251 |
| MAD1L1 | MAD1 mitotic arrest deficient-like 1 (yeast) | SEQ ID NOS: 8252- |
| | | 8264 |
| MAG | Myelin associated glycoprotein | SEQ ID NOS: 8265- |
| | | 8270 |
| MAGT1 | Magnesium transporter 1 | SEQ ID NOS: 8271- |
| | | 8274 |
| MALSU1 | Mitochondrial assembly of ribosomal large | SEQ ID NO: 8275 |
| | subunit 1 | |
| MAMDC2 | MAM domain containing 2 | SEQ ID NO: 8276 |
| MAN2B1 | Mannosidase, alpha, class 2B, member 1 | SEQ ID NOS: 8277- |
| | | 8282 |
| MAN2B2 | Mannosidase, alpha, class 2B, member 2 | SEQ ID NOS: 8283- |
| | | 8285 |
| MANBA | Mannosidase, beta A, lysosomal | SEQ ID NOS: 8286- |
| | | 8299 |
| MANEAL | Mannosidase, endo-alpha-like | SEQ ID NOS: 8300- |
| | | 8304 |
| MANF | Mesencephalic astrocyte-derived | SEQ ID NOS: 8305- |
| | neurotrophic factor | 8306 |
| MANSC1 | MANSC domain containing 1 | SEQ ID NOS: 8307- |
| | | 8310 |
| MAP3K9 | Mitogen-activated protein kinase 9 | SEQ ID NOS: 8311- |
| | | 8316 |
| MASP1 | Mannan-binding lectin serine peptidase 1 | SEQ ID NOS: 8317- |
| | (C4/C2 activating component of Ra-reactive | 8324 |
| | factor) | |
| MASP2 | Mannan-binding lectin serine peptidase 2 | SEQ ID NOS: 8325- |
| | | 8326 |
| MATN1 | Matrilin 1, cartilage matrix protein | SEQ ID NO: 8327 |
| MATN2 | Matrilin 2 | SEQ ID NOS: 8328- |
| | | 8340 |
| MATN3 | Matrilin 3 | SEQ ID NOS: 8341- |
| | | 8342 |
| MATN4 | Matrilin 4 | SEQ ID NOS: 8343- |
| | | 8347 |
| MATR3 | Matrin 3 | SEQ ID NOS: 8348- |
| | | 8375 |
| MAU2 | MAU2 sister chromatid cohesion factor | SEQ ID NOS: 8376- |
| | | 8378 |
| MAZ | MYC-associated zinc finger protein (purine- | SEQ ID NOS: 8379- |
| | binding transcription factor) | 8393 |
| MBD6 | Methyl-CpG binding domain protein 6 | SEQ ID NOS: 8394- |
| | | 8405 |
| MBL2 | Mannose-binding lectin (protein C) 2, | SEQ ID NO: 8406 |
| | soluble | |
| MBNL1 | Muscleblind-like splicing regulator 1 | SEQ ID NOS: 8407- |
| | | 8425 |
| MCCC1 | Methylcrotonoyl-CoA carboxylase 1 (alpha) | SEQ ID NOS: 8426- |
| | | 8437 |
| MCCD1 | Mitochondrial coiled-coil domain 1 | SEQ ID NO: 8438 |
| MCEE | Methylmalonyl CoA epimerase | SEQ ID NOS: 8439- |
| | | 8442 |
| MCF2L | MCF.2 cell line derived transforming | SEQ ID NOS: 8443- |
| | sequence-like | 8464 |
| MCFD2 | Multiple coagulation factor deficiency 2 | SEQ ID NOS: 8465- |
| | | 8476 |
| MDFIC | MyoD family inhibitor domain containing | SEQ ID NOS: 8477- |
| | | 8484 |
| MDGA1 | MAM domain containing | SEQ ID NOS: 8485- |
| | glycosylphosphatidylinositol anchor 1 | 8490 |
| MDK | Midkine (neurite growth-promoting factor | SEQ ID NOS: 8491- |
| | 2) | 8500 |
| MED20 | Mediator complex subunit 20 | SEQ ID NOS: 8501- |
| | | 8505 |
| MEGF10 | Multiple EGF-like-domains 10 | SEQ ID NOS: 8506- |
| | | 8509 |
| MEGF6 | Multiple EGF-like-domains 6 | SEQ ID NOS: 8510- |
| | | 8513 |
| MEI1 | Meiotic double-stranded break formation | SEQ ID NOS: 8514- |
| | protein 1 | 8517 |
| MEI4 | Meiotic double-stranded break formation | SEQ ID NO: 8518 |
| | protein 4 | |
| MEIS1 | Meis homeobox 1 | SEQ ID NOS: 8519- |
| | | 8524 |
| MEIS3 | Meis homeobox 3 | SEQ ID NOS: 8525- |
| | | 8534 |
| MEPE | Matrix extracellular phosphoglycoprotein | SEQ ID NOS: 8538- |
| | | 8544 |
| MESDC2 | Mesoderm development candidate 2 | SEQ ID NOS: 8545- |
| | | 8549 |
| MEST | Mesoderm specific transcript | SEQ ID NOS: 8550- |
| | | 8563 |
| MET | MET proto-oncogene, receptor tyrosine | SEQ ID NOS: 8564- |
| | kinase | 8569 |
| METRN | Meteorin, glial cell differentiation regulator | SEQ ID NOS: 8570- |
| | | 8574 |
| METRNL | Meteorin, glial cell differentiation regulator- | SEQ ID NOS: 8575- |
| | like | 8578 |
| METTL17 | Methyltransferase like 17 | SEQ ID NOS: 8579- |
| | | 8589 |
| METTL24 | Methyltransferase like 24 | SEQ ID NO: 8590 |
| METTL7B | Methyltransferase like 7B | SEQ ID NOS: 8591- |
| | | 8592 |
| METTL9 | Methyltransferase like 9 | SEQ ID NOS: 8593- |
| | | 8601 |
| MEX3C | Mex-3 RNA binding family member C | SEQ ID NOS: 8602- |
| | | 8604 |
| MFAP2 | Microfibrillar-associated protein 2 | SEQ ID NOS: 8605- |
| | | 8606 |
| MFAP3 | Microfibrillar-associated protein 3 | SEQ ID NOS: 8607- |
| | | 8611 |
| MFAP3L | Microfibrillar-associated protein 3-like | SEQ ID NOS: 8612- |
| | | 8621 |
| MFAP4 | Microfibrillar-associated protein 4 | SEQ ID NOS: 8622- |
| | | 8624 |
| MFAP5 | Microfibrillar associated protein 5 | SEQ ID NOS: 8625- |
| | | 8635 |
| MFGE8 | Milk fat globule-EGF factor 8 protein | SEQ ID NOS: 8636- |
| | | 8642 |
| MFI2 | Antigen p97 (melanoma associated) | SEQ ID NOS: 8535- |
| | identified by monoclonal antibodies 133.2 | 8537 |
| | and 96.5 | |
| MFNG | MFNG O-fucosylpeptide 3-beta-N- | SEQ ID NOS: 8643- |
| | acetylglucosaminyltransferase | 8650 |
| MGA | MGA, MAX dimerization protein | SEQ ID NOS: 8651- |
| | | 8659 |
| MGAT2 | Mannosyl (alpha-1,6-)-glycoprotein beta- | SEQ ID NO: 8660 |
| | 1,2-N-acetylglucosaminyltransferase | |
| MGAT3 | Mannosyl (beta-1,4-)-glycoprotein beta-1,4- | SEQ ID NOS: 8661- |
| | N-acetylglucosaminyltransferase | 8663 |
| MGAT4A | Mannosyl (alpha-1,3-)-glycoprotein beta- | SEQ ID NOS: 8664- |
| | 1,4-N-acetylglucosaminyltransferase, | 8668 |
| | isozyme A | |
| MGAT4B | Mannosyl (alpha-1,3-)-glycoprotein beta- | SEQ ID NOS: 8669- |
| | 1,4-N-acetylglucosaminyltransferase, | 8679 |
| | isozyme B | |
| MGAT4D | MGAT4 family, member D | SEQ ID NOS: 8680- |
| | | 8685 |
| MGLL | Monoglyceride lipase | SEQ ID NOS: 8686- |
| | | 8695 |
| MGP | Matrix Gla protein | SEQ ID NOS: 8696- |
| | | 8698 |
| MGST2 | Microsomal glutathione S-transferase 2 | SEQ ID NOS: 8699- |
| | | 8702 |
| MIA | Melanoma inhibitory activity | SEQ ID NOS: 8703- |
| | | 8708 |
| MIA2 | Melanoma inhibitory activity 2 | SEQ ID NO: 8709 |
| MIA3 | Melanoma inhibitory activity family, | SEQ ID NOS: 8710- |
| | member 3 | 8714 |
| MICU1 | Mitochondrial calcium uptake 1 | SEQ ID NOS: 8715- |
| | | 8724 |
| MIER1 | Mesoderm induction early response 1, | SEQ ID NOS: 8725- |
| | transcriptional regulator | 8733 |
| MINOS1- | MINOS1-NBL1 readthrough | SEQ ID NOS: 8734- |
| NBL1 | | 8736 |
| MINPP1 | Multiple inositol-polyphosphate | SEQ ID NOS: 8737- |
| | phosphatase 1 | 8739 |
| MLEC | Malectin | SEQ ID NOS: 8740- |
| | | 8743 |
| MLN | Motilin | SEQ ID NOS: 8744- |
| | | 8746 |
| MLXIP | MLX interacting protein | SEQ ID NOS: 8747- |
| | | 8752 |
| MLXIPL | MLX interacting protein-like | SEQ ID NOS: 8753- |
| | | 8760 |
| MMP1 | Matrix metallopeptidase 1 | SEQ ID NO: 8761 |
| MMP10 | Matrix metallopeptidase 10 | SEQ ID NOS: 8762- |
| | | 8763 |
| MMP11 | Matrix metallopeptidase 11 | SEQ ID NOS: 8764- |
| | | 8767 |
| MMP12 | Matrix metallopeptidase 12 | SEQ ID NO: 8768 |
| MMP13 | Matrix metallopeptidase 13 | SEQ ID NOS: 8769- |
| | | 8771 |
| MMP14 | Matrix metallopeptidase 14 (membrane- | SEQ ID NOS: 8772- |
| | inserted) | 8774 |
| MMP17 | Matrix metallopeptidase 17 (membrane- | SEQ ID NOS: 8775- |
| | inserted) | 8782 |
| MMP19 | Matrix metallopeptidase 19 | SEQ ID NOS: 8783- |
| | | 8788 |
| MMP2 | Matrix metallopeptidase 2 | SEQ ID NOS: 8789- |
| | | 8796 |
| MMP20 | Matrix metallopeptidase 20 | SEQ ID NO: 8797 |
| MMP21 | Matrix metallopeptidase 21 | SEQ ID NO: 8798 |
| MMP25 | Matrix metallopeptidase 25 | SEQ ID NOS: 8799- |
| | | 8800 |
| MMP26 | Matrix metallopeptidase 26 | SEQ ID NOS: 8801- |
| | | 8802 |
| MMP27 | Matrix metallopeptidase 27 | SEQ ID NO: 8803 |
| MMP28 | Matrix metallopeptidase 28 | SEQ ID NOS: 8804- |
| | | 8809 |
| MMP3 | Matrix metallopeptidase 3 | SEQ ID NOS: 8810- |
| | | 8812 |
| MMP7 | Matrix metallopeptidase 7 | SEQ ID NO: 8813 |
| MMP8 | Matrix metallopeptidase 8 | SEQ ID NOS: 8814- |
| | | 8819 |
| MMP9 | Matrix metallopeptidase 9 | SEQ ID NO: 8820 |
| MMRN1 | Multimerin 1 | SEQ ID NOS: 8821- |
| | | 8823 |
| MMRN2 | Multimerin 2 | SEQ ID NOS: 8824- |
| | | 8828 |
| MOXD1 | Monooxygenase, DBH-like 1 | SEQ ID NOS: 8829- |
| | | 8831 |
| MPO | Myeloperoxidase | SEQ ID NOS: 8840- |
| | | 8841 |
| MPPED1 | Metallophosphoesterase domain containing | SEQ ID NOS: 8842- |
| | 1 | 8845 |
| MPZL1 | Myelin protein zero-like 1 | SEQ ID NOS: 8846- |
| | | 8850 |
| MR1 | Major histocompatibility complex, class I- | SEQ ID NOS: 8851- |
| | related | 8856 |
| MRPL2 | Mitochondrial ribosomal protein L2 | SEQ ID NOS: 8857- |
| | | 8861 |
| MRPL21 | Mitochondrial ribosomal protein L21 | SEQ ID NOS: 8862- |
| | | 8868 |
| MRPL22 | Mitochondrial ribosomal protein L22 | SEQ ID NOS: 8869- |
| | | 8873 |
| MRPL24 | Mitochondrial ribosomal protein L24 | SEQ ID NOS: 8874- |
| | | 8878 |
| MRPL27 | Mitochondrial ribosomal protein L27 | SEQ ID NOS: 8879- |
| | | 8884 |
| MRPL32 | Mitochondrial ribosomal protein L32 | SEQ ID NOS: 8885- |
| | | 8887 |
| MRPL34 | Mitochondrial ribosomal protein L34 | SEQ ID NOS: 8888- |
| | | 8892 |
| MRPL35 | Mitochondrial ribosomal protein L35 | SEQ ID NOS: 8893- |
| | | 8896 |
| MRPL52 | Mitochondrial ribosomal protein L52 | SEQ ID NOS: 8897- |
| | | 8907 |
| MRPL55 | Mitochondrial ribosomal protein L55 | SEQ ID NOS: 8908- |
| | | 8933 |
| MRPS14 | Mitochondrial ribosomal protein S14 | SEQ ID NOS: 8934- |
| | | 8935 |
| MRPS22 | Mitochondrial ribosomal protein S22 | SEQ ID NOS: 8936- |
| | | 8944 |
| MRPS28 | Mitochondrial ribosomal protein S28 | SEQ ID NOS: 8945- |
| | | 8952 |
| MS4A14 | Membrane-spanning 4-domains, subfamily | SEQ ID NOS: 8953- |
| | A, member 14 | 8963 |
| MS4A3 | Membrane-spanning 4-domains, subfamily | SEQ ID NOS: 8964- |
| | A, member 3 (hematopoietic cell-specific) | 8968 |
| MSH3 | MutS homolog 3 | SEQ ID NO: 8969 |
| MSH5 | MutS homolog 5 | SEQ ID NOS: 8970- |
| | | 8981 |
| MSLN | Mesothelin | SEQ ID NOS: 8982- |
| | | 8989 |
| MSMB | Microseminoprotein, beta- | SEQ ID NOS: 8990- |
| | | 8991 |
| MSRA | Methionine sulfoxide reductase A | SEQ ID NOS: 8992- |
| | | 8999 |
| MSRB2 | Methionine sulfoxide reductase B2 | SEQ ID NOS: 9000- |
| | | 9001 |
| MSRB3 | Methionine sulfoxide reductase B3 | SEQ ID NOS: 9002- |
| | | 9015 |
| MST1 | Macrophage stimulating 1 | SEQ ID NOS: 9016- |
| | | 9017 |
| MSTN | Myostatin | SEQ ID NO: 9018 |
| MT1G | Metallothionein 1G | SEQ ID NOS: 9019- |
| | | 9022 |
| MTHFD2 | Methylenetetrahydrofolate dehydrogenase | SEQ ID NOS: 9023- |
| | (NADP+ dependent) 2, | 9027 |
| | methenyltetrahydrofolate cyclohydrolase | |
| MTMR14 | Myotubularin related protein 14 | SEQ ID NOS: 9028- |
| | | 9038 |
| MTRNR2L11 | MT-RNR2-like 11 (pseudogene) | SEQ ID NO: 9039 |
| MTRR | 5-methyltetrahydrofolate-homocysteine | SEQ ID NOS: 9040- |
| | methyltransferase reductase | 9052 |
| MTTP | Microsomal triglyceride transfer protein | SEQ ID NOS: 9053- |
| | | 9063 |
| MTX2 | Metaxin 2 | SEQ ID NOS: 9064- |
| | | 9068 |
| MUC1 | Mucin 1, cell surface associated | SEQ ID NOS: 9069- |
| | | 9094 |
| MUC13 | Mucin 13, cell surface associated | SEQ ID NOS: 9095- |
| | | 9096 |
| MUC20 | Mucin 20, cell surface associated | SEQ ID NOS: 9097- |
| | | 9101 |
| MUC3A | Mucin 3A, cell surface associated | SEQ ID NOS: 9102- |
| | | 9104 |
| MUC5AC | Mucin 5AC, oligomeric mucus/gel-forming | SEQ ID NO: 9105 |
| MUC5B | Mucin 5B, oligomeric mucus/gel-forming | SEQ ID NOS: 9106- |
| | | 9107 |
| MUC6 | Mucin 6, oligomeric mucus/gel-forming | SEQ ID NOS: 9108- |
| | | 9111 |
| MUC7 | Mucin 7, secreted | SEQ ID NOS: 9112- |
| | | 9115 |
| MUCL1 | Mucin-like 1 | SEQ ID NOS: 9116- |
| | | 9118 |
| MXRA5 | Matrix-remodelling associated 5 | SEQ ID NO: 9119 |
| MXRA7 | Matrix-remodelling associated 7 | SEQ ID NOS: 9120- |
| | | 9126 |
| MYDGF | Myeloid-derived growth factor | SEQ ID NOS: 9127- |
| | | 9129 |
| MYL1 | Myosin, light chain 1, alkali; skeletal, fast | SEQ ID NOS: 9130- |
| | | 9131 |
| MYOC | Myocilin, trabecular meshwork inducible | SEQ ID NOS: 9132- |
| | glucocorticoid response | 9133 |
| MYRFL | Myelin regulatory factor-like | SEQ ID NOS: 9134- |
| | | 9138 |
| MZB1 | Marginal zone B and B1 cell-specific | SEQ ID NOS: 9139- |
| | protein | 9143 |
| N4BP2L2 | NEDD4 binding protein 2-like 2 | SEQ ID NOS: 9144- |
| | | 9149 |
| NAA38 | N(alpha)-acetyltransferase 38, NatC | SEQ ID NOS: 9150- |
| | auxiliary subunit | 9155 |
| NAAA | N-acylethanolamine acid amidase | SEQ ID NOS: 9156- |
| | | 9161 |
| NAGA | N-acetylgalactosaminidase, alpha- | SEQ ID NOS: 9162- |
| | | 9164 |
| NAGLU | N-acetylglucosaminidase, alpha | SEQ ID NOS: 9165- |
| | | 9169 |
| NAGS | N-acetylglutamate synthase | SEQ ID NOS: 9170- |
| | | 9171 |
| NAPSA | Napsin A aspartic peptidase | SEQ ID NOS: 9172- |
| | | 9174 |
| NBL1 | Neuroblastoma 1, DAN family BMP | SEQ ID NOS: 9180- |
| | antagonist | 9193 |
| NCAM1 | Neural cell adhesion molecule 1 | SEQ ID NOS: 9194- |
| | | 9213 |
| NCAN | Neurocan | SEQ ID NOS: 9214- |
| | | 9215 |
| NCBP2-AS2 | NCBP2 antisense RNA 2 (head to head) | SEQ ID NO: 9216 |
| NCSTN | Nicastrin | SEQ ID NOS: 9217- |
| | | 9226 |
| NDNF | Neuron-derived neurotrophic factor | SEQ ID NOS: 9227- |
| | | 9229 |
| NDP | Norrie disease (pseudoglioma) | SEQ ID NOS: 9230- |
| | | 9232 |
| NDUFA10 | NADH dehydrogenase (ubiquinone) 1 alpha | SEQ ID NOS: 9233- |
| | subcomplex, 10, 42 kDa | 9242 |
| NDUFB5 | NADH dehydrogenase (ubiquinone) 1 beta | SEQ ID NOS: 9243- |
| | subcomplex, 5, 16 kDa | 9251 |
| NDUFS8 | NADH dehydrogenase (ubiquinone) Fe—S | SEQ ID NOS: 9252- |
| | protein 8, 23 kDa (NADH-coenzyme Q | 9261 |
| | reductase) | |
| NDUFV1 | NADH dehydrogenase (ubiquinone) | SEQ ID NOS: 9262- |
| | flavoprotein 1, 51 kDa | 9275 |
| NECAB3 | N-terminal EF-hand calcium binding | SEQ ID NOS: 9276- |
| | protein 3 | 9285 |
| NELL1 | Neural EGFL like 1 | SEQ ID NOS: 9289- |
| | | 9292 |
| NELL2 | Neural EGFL like 2 | SEQ ID NOS: 9293- |
| | | 9307 |
| NENF | Neudesin neurotrophic factor | SEQ ID NO: 9308 |
| NETO1 | Neuropilin (NRP) and tolloid (TLL)-like 1 | SEQ ID NOS: 9309- |
| | | 9312 |
| NFASC | Neurofascin | SEQ ID NOS: 9313- |
| | | 9327 |
| NFE2L1 | Nuclear factor, erythroid 2-like 1 | SEQ ID NOS: 9328- |
| | | 9346 |
| NFE2L3 | Nuclear factor, erythroid 2-like 3 | SEQ ID NOS: 9347- |
| | | 9348 |
| NGEF | Neuronal guanine nucleotide exchange | SEQ ID NOS: 9349- |
| | factor | 9354 |
| NGF | Nerve growth factor (beta polypeptide) | SEQ ID NO: 9355 |
| NGLY1 | N-glycanase 1 | SEQ ID NOS: 9356- |
| | | 9362 |
| NGRN | Neugrin, neurite outgrowth associated | SEQ ID NOS: 9363- |
| | | 9364 |
| NHLRC3 | NHL repeat containing 3 | SEQ ID NOS: 9365- |
| | | 9367 |
| NIDI | Nidogen 1 | SEQ ID NOS: 9368- |
| | | 9369 |
| NID2 | Nidogen 2 (osteonidogen) | SEQ ID NOS: 9370- |
| | | 9372 |
| NKG7 | Natural killer cell granule protein 7 | SEQ ID NOS: 9373- |
| | | 9377 |
| NLGN3 | Neuroligin 3 | SEQ ID NOS: 9378- |
| | | 9382 |
| NLGN4Y | Neuroligin 4, Y-linked | SEQ ID NOS: 9383- |
| | | 9389 |
| NLRP5 | NLR family, pyrin domain containing 5 | SEQ ID NOS: 9390- |
| | | 9392 |
| NMB | Neuromedin B | SEQ ID NOS: 9393- |
| | | 9394 |
| NME1 | NME/NM23 nucleoside diphosphate kinase | SEQ ID NOS: 9395- |
| | 1 | 9401 |
| NME1-NME2 | NME1-NME2 readthrough | SEQ ID NOS: 9402- |
| | | 9404 |
| NME3 | NME/NM23 nucleoside diphosphate kinase | SEQ ID NOS: 9405- |
| | 3 | 9409 |
| NMS | Neuromedin S | SEQ ID NO: 9410 |
| NMU | Neuromedin U | SEQ ID NOS: 9411- |
| | | 9414 |
| NOA1 | Nitric oxide associated 1 | SEQ ID NO: 9415 |
| NODAL | Nodal growth differentiation factor | SEQ ID NOS: 9416- |
| | | 9417 |
| NOG | Noggin | SEQ ID NO: 9418 |
| NOMO3 | NODAL modulator 3 | SEQ ID NOS: 9419- |
| | | 9425 |
| NOS1AP | Nitric oxide synthase 1 (neuronal) adaptor | SEQ ID NOS: 9426- |
| | protein | 9430 |
| NOTCH3 | Notch 3 | SEQ ID NOS: 9431- |
| | | 9434 |
| NOTUM | Notum pectinacetylesterase homolog | SEQ ID NOS: 9435- |
| | (Drosophila) | 9437 |
| NOV | Nephroblastoma overexpressed | SEQ ID NO: 9438 |
| NPB | Neuropeptide B | SEQ ID NOS: 9439- |
| | | 9440 |
| NPC2 | Niemann-Pick disease, type C2 | SEQ ID NOS: 9441- |
| | | 9449 |
| NPFF | Neuropeptide FF-amide peptide precursor | SEQ ID NO: 9450 |
| NPFFR2 | Neuropeptide FF receptor 2 | SEQ ID NOS: 9451- |
| | | 9454 |
| NPHS1 | Nephrosis 1, congenital, Finnish type | SEQ ID NOS: 9455- |
| | (nephrin) | 9456 |
| NPNT | Nephronectin | SEQ ID NOS: 9457- |
| | | 9467 |
| NPPA | Natriuretic peptide A | SEQ ID NOS: 9468- |
| | | 9470 |
| NPPB | Natriuretic peptide B | SEQ ID NO: 9471 |
| NPPC | Natriuretic peptide C | SEQ ID NOS: 9472- |
| | | 9473 |
| NPS | Neuropeptide S | SEQ ID NO: 9474 |
| NPTX1 | Neuronal pentraxin I | SEQ ID NO: 9475 |
| NPTX2 | Neuronal pentraxin II | SEQ ID NO: 9476 |
| NPTXR | Neuronal pentraxin receptor | SEQ ID NOS: 9477- |
| | | 9478 |
| NPVF | Neuropeptide VF precursor | SEQ ID NO: 9479 |
| NPW | Neuropeptide W | SEQ ID NOS: 9480- |
| | | 9482 |
| NPY | Neuropeptide Y | SEQ ID NOS: 9483- |
| | | 9485 |
| NQO2 | NAD(P)H dehydrogenase, quinone 2 | SEQ ID NOS: 9486- |
| | | 9494 |
| NRCAM | Neuronal cell adhesion molecule | SEQ ID NOS: 9495- |
| | | 9507 |
| NRG1 | Neuregulin 1 | SEQ ID NOS: 9508- |
| | | 9525 |
| NRN1L | Neuritin 1-like | SEQ ID NOS: 9526- |
| | | 9528 |
| NRP1 | Neuropilin 1 | SEQ ID NOS: 9529- |
| | | 9542 |
| NRP2 | Neuropilin 2 | SEQ ID NOS: 9543- |
| | | 9549 |
| NRTN | Neurturin | SEQ ID NO: 9550 |
| NRXN1 | Neurexin 1 | SEQ ID NOS: 9551- |
| | | 9581 |
| NRXN2 | Neurexin 2 | SEQ ID NOS: 9582- |
| | | 9590 |
| NT5C3A | 5′-nucleotidase, cytosolic IIIA | SEQ ID NOS: 9591- |
| | | 9601 |
| NT5DC3 | 5′-nucleotidase domain containing 3 | SEQ ID NOS: 9602- |
| | | 9604 |
| NT5E | 5′-nucleotidase, ecto (CD73) | SEQ ID NOS: 9605- |
| | | 9609 |
| NTF3 | Neurotrophin 3 | SEQ ID NOS: 9610- |
| | | 9611 |
| NTF4 | Neurotrophin 4 | SEQ ID NOS: 9612- |
| | | 9613 |
| NTM | Neurotrimin | SEQ ID NOS: 9614- |
| | | 9623 |
| NTN1 | Netrin 1 | SEQ ID NOS: 9624- |
| | | 9625 |
| NTN3 | Netrin 3 | SEQ ID NO: 9626 |
| NTN4 | Netrin 4 | SEQ ID NOS: 9627- |
| | | 9631 |
| NTN5 | Netrin 5 | SEQ ID NOS: 9632- |
| | | 9633 |
| NTNG1 | Netrin G1 | SEQ ID NOS: 9634- |
| | | 9640 |
| NTNG2 | Netrin G2 | SEQ ID NOS: 9641- |
| | | 9642 |
| NTS | Neurotensin | SEQ ID NOS: 9643- |
| | | 9644 |
| NUBPL | Nucleotide binding protein-like | SEQ ID NOS: 9645- |
| | | 9651 |
| NUCB1 | Nucleobindin 1 | SEQ ID NOS: 9652- |
| | | 9658 |
| NUCB2 | Nucleobindin 2 | SEQ ID NOS: 9659- |
| | | 9674 |
| NUDT19 | Nudix (nucleoside diphosphate linked | SEQ ID NO: 9675 |
| | moiety X)-type motif 19 | |
| NUDT9 | Nudix (nucleoside diphosphate linked | SEQ ID NOS: 9676- |
| | moiety X)-type motif 9 | 9680 |
| NUP155 | Nucleoporin 155 kDa | SEQ ID NOS: 9681- |
| | | 9684 |
| NUP214 | Nucleoporin 214 kDa | SEQ ID NOS: 9685- |
| | | 9696 |
| NUP85 | Nucleoporin 85 kDa | SEQ ID NOS: 9697- |
| | | 9711 |
| NXPE3 | Neurexophilin and PC-esterase domain | SEQ ID NOS: 9712- |
| | family, member 3 | 9716 |
| NXPE4 | Neurexophilin and PC-esterase domain | SEQ ID NOS: 9717- |
| | family, member 4 | 9718 |
| NXPH1 | Neurexophilin 1 | SEQ ID NOS: 9719- |
| | | 9722 |
| NXPH2 | Neurexophilin 2 | SEQ ID NO: 9723 |
| NXPH3 | Neurexophilin 3 | SEQ ID NOS: 9724- |
| | | 9725 |
| NXPH4 | Neurexophilin 4 | SEQ ID NOS: 9726- |
| | | 9727 |
| NYX | Nyctalopin | SEQ ID NOS: 9728- |
| | | 9729 |
| OAF | Out at first homolog | SEQ ID NOS: 9730- |
| | | 9731 |
| OBP2A | Odorant binding protein 2A | SEQ ID NOS: 9732- |
| | | 9738 |
| OBP2B | Odorant binding protein 2B | SEQ ID NOS: 9739- |
| | | 9742 |
| OC90 | Otoconin 90 | SEQ ID NO: 9743 |
| OCLN | Occludin | SEQ ID NOS: 9744- |
| | | 9746 |
| ODAM | Odontogenic, ameloblast asssociated | SEQ ID NOS: 9747- |
| | | 9750 |
| OGG1 | 8-oxoguanine DNA glvcosylase | SEQ ID NOS: 9755- |
| | | 9768 |
| OGN | Osteoglycin | SEQ ID NOS: 9769- |
| | | 9771 |
| OIT3 | Oncoprotein induced transcript 3 | SEQ ID NOS: 9772- |
| | | 9773 |
| OLFM1 | Olfactomedin 1 | SEQ ID NOS: 9774- |
| | | 9784 |
| OLFM2 | Olfactomedin 2 | SEQ ID NOS: 9785- |
| | | 9788 |
| OLFM3 | Olfactomedin 3 | SEQ ID NOS: 9789- |
| | | 9791 |
| OLFM4 | Olfactomedin 4 | SEQ ID NO: 9792 |
| OLFML1 | Olfactomedin-like 1 | SEQ ID NOS: 9793- |
| | | 9796 |
| OLFML2A | Olfactomedin-like 2A | SEQ ID NOS: 9797- |
| | | 9799 |
| OLFML2B | Olfactomedin-like 2B | SEQ ID NOS: 9800- |
| | | 9804 |
| OLFML3 | Olfactomedin-like 3 | SEQ ID NOS: 9805- |
| | | 9807 |
| OMD | Osteomodulin | SEQ ID NO: 9808 |
| OMG | Oligodendrocyte myelin glycoprotein | SEQ ID NO: 9809 |
| OOSP2 | Oocyte secreted protein 2 | SEQ ID NOS: 9810- |
| | | 9811 |
| OPCML | Opioid binding protein/cell adhesion | SEQ ID NOS: 9812- |
| | molecule-like | 9816 |
| OPTC | Opticin | SEQ ID NOS: 9818- |
| | | 9819 |
| ORAI1 | ORAI calcium release-activated calcium | SEQ ID NO: 9820 |
| | modulator 1 | |
| ORM1 | Orosomucoid 1 | SEQ ID NO: 9821 |
| ORM2 | Orosomucoid 2 | SEQ ID NO: 9822 |
| ORMDL2 | ORMDL sphingolipid biosynthesis | SEQ ID NOS: 9823- |
| | regulator 2 | 9826 |
| OS9 | Osteosarcoma amplified 9, endoplasmic | SEQ ID NOS: 9827- |
| | reticulum lectin | 9841 |
| OSCAR | Osteoclast associated, immunoglobulin-like | SEQ ID NOS: 9842- |
| | receptor | 9852 |
| OSM | Oncostatin M | SEQ ID NOS: 9853- |
| | | 9855 |
| OSMR | Oncostatin M receptor | SEQ ID NOS: 9856- |
| | | 9860 |
| OSTN | Osteocrin | SEQ ID NOS: 9861- |
| | | 9862 |
| OTOA | Otoancorin | SEQ ID NOS: 9863- |
| | | 9868 |
| OTOG | Otogelin | SEQ ID NOS: 9869- |
| | | 9871 |
| OTOGL | Otogelin-like | SEQ ID NOS: 9872- |
| | | 9878 |
| OTOL1 | Otolin 1 | SEQ ID NO: 9879 |
| OTOR | Otoraplin | SEQ ID NO: 9880 |
| OTOS | Otospiralin | SEQ ID NOS: 9881- |
| | | 9882 |
| OVCH1 | Ovochymase 1 | SEQ ID NOS: 9883- |
| | | 9885 |
| OVCH2 | Ovochymase 2 (gene/pseudogene) | SEQ ID NOS: 9886- |
| | | 9887 |
| OVGP1 | Oviductal glycoprotein 1, 120 kDa | SEQ ID NO: 9888 |
| OXCT1 | 3-oxoacid CoA transferase 1 | SEQ ID NOS: 9889- |
| | | 9892 |
| OXCT2 | 3-oxoacid CoA transferase 2 | SEQ ID NO: 9893 |
| OXNAD1 | Oxidoreductase NAD-binding domain | SEQ ID NOS: 9894- |
| | containing 1 | 9900 |
| OXT | Oxytocin/neurophysin I prepropeptide | SEQ ID NO: 9901 |
| P3H1 | Prolyl 3-hydroxylase 1 | SEQ ID NOS: 9902- |
| | | 9906 |
| P3H2 | Prolyl 3-hydroxylase 2 | SEQ ID NOS: 9907- |
| | | 9910 |
| P3H3 | Prolyl 3-hydroxylase 3 | SEQ ID NO: 9911 |
| P3H4 | Prolyl 3-hydroxylase family member 4 | SEQ ID NOS: 9912- |
| | (non-enzymatic) | 9916 |
| P4HA1 | Prolyl 4-hydroxylase, alpha polypeptide I | SEQ ID NOS: 9917- |
| | | 9921 |
| P4HA2 | Prolyl 4-hydroxylase, alpha polypeptide II | SEQ ID NOS: 9922- |
| | | 9936 |
| P4HA3 | Prolyl 4-hydroxylase, alpha polypeptide III | SEQ ID NOS: 9937- |
| | | 9941 |
| P4HB | Prolyl 4-hydroxylase, beta polypeptide | SEQ ID NOS: 9942- |
| | | 9953 |
| PAEP | Progestagen-associated endometrial protein | SEQ ID NOS: 9954- |
| | | 9962 |
| PAM | Peptidylglycine alpha-amidating | SEQ ID NOS: 9963- |
| | monooxygenase | 9976 |
| PAMR1 | Peptidase domain containing associated | SEQ ID NOS: 9977- |
| | with muscle regeneration 1 | 9983 |
| PAPL | Iron/zinc purple acid phosphatase-like | SEQ ID NOS: 159-162 |
| | protein | |
| PAPLN | Papilin, proteoglycan-like sulfated | SEQ ID NOS: 9984- |
| | glycoprotein | 9991 |
| PAPPA | Pregnancy-associated plasma protein A, | SEQ ID NO: 9992 |
| | pappalysin 1 | |
| PAPPA2 | Pappalysin 2 | SEQ ID NOS: 9993- |
| | | 9994 |
| PARP15 | Poly (ADP-ribose) polymerase family, | SEQ ID NOS: 9995- |
| | member 15 | 9998 |
| PARVB | Parvin, beta | SEQ ID NOS: 9999- |
| | | 10003 |
| PATE1 | Prostate and testis expressed 1 | SEQ ID NOS: 10004- |
| | | 10005 |
| PATE2 | Prostate and testis expressed 2 | SEQ ID NOS: 10006- |
| | | 10007 |
| PATE3 | Prostate and testis expressed 3 | SEQ ID NO: 10008 |
| PATE4 | Prostate and testis expressed 4 | SEQ ID NOS: 10009- |
| | | 10010 |
| PATL2 | Protein associated with topoisomerase II | SEQ ID NOS: 10011- |
| | homolog 2 (yeast) | 10016 |
| PAX2 | Paired box 2 | SEQ ID NOS: 10017- |
| | | 10022 |
| PAX4 | Paired box 4 | SEQ ID NOS: 10023- |
| | | 10029 |
| PCCB | Propionyl CoA carboxylase, beta | SEQ ID NOS: 10030- |
| | polypeptide | 10044 |
| PCDH1 | Protocadherin 1 | SEQ ID NOS: 10045- |
| | | 10050 |
| PCDH12 | Protocadherin 12 | SEQ ID NOS: 10051- |
| | | 10052 |
| PCDH15 | Protocadherin-related 15 | SEQ ID NOS: 10053- |
| | | 10086 |
| PCDHA1 | Protocadherin alpha 1 | SEQ ID NOS: 10087- |
| | | 10089 |
| PCDHA10 | Protocadherin alpha 10 | SEQ ID NOS: 10090- |
| | | 10092 |
| PCDHA11 | Protocadherin alpha 11 | SEQ ID NOS: 10093- |
| | | 10095 |
| PCDHA6 | Protocadherin alpha 6 | SEQ ID NOS: 10096- |
| | | 10098 |
| PCDHB12 | Protocadherin beta 12 | SEQ ID NOS: 10099- |
| | | 10101 |
| PCDHGA11 | Protocadherin gamma subfamily A, 11 | SEQ ID NOS: 10102- |
| | | 10104 |
| PCF11 | PCF11 cleavage and polyadenylation factor | SEQ ID NOS: 10105- |
| | subunit | 10109 |
| PCOLCE | Procollagen C-endopeptidase enhancer | SEQ ID NO: 10110 |
| PCOLCE2 | Procollagen C-endopeptidase enhancer 2 | SEQ ID NOS: 10111- |
| | | 10114 |
| PCSK1 | Proprotein convertase subtilisin/kexin type | SEQ ID NOS: 10115- |
| | 1 | 10117 |
| PCSK1N | Proprotein convertase subtilisin/kexin type | SEQ ID NO: 10118 |
| | 1 inhibitor | |
| PCSK2 | Proprotein convertase subtilisin/kexin type | SEQ ID NOS: 10119- |
| | 2 | 10121 |
| PCSK4 | Proprotein convertase subtilisin/kexin type | SEQ ID NOS: 10122- |
| | 4 | 10124 |
| PCSK5 | Proprotein convertase subtilisin/kexin type | SEQ ID NOS: 10125- |
| | 5 | 10129 |
| PCSK9 | Proprotein convertase subtilisin/kexin type | SEQ ID NO: 10130 |
| | 9 | |
| PCYOX1 | Prenylcysteine oxidase 1 | SEQ ID NOS: 10131- |
| | | 10135 |
| PCYOX1L | Prenylcysteine oxidase 1 like | SEQ ID NOS: 10136- |
| | | 10140 |
| PDDC1 | Parkinson disease 7 domain containing 1 | SEQ ID NOS: 5802- |
| | | 5810 |
| PDE11A | Phosphodiesterase 11A | SEQ ID NOS: 10141- |
| | | 10146 |
| PDE2A | Phosphodiesterase 2A, cGMP-stimulated | SEQ ID NOS: 10147- |
| | | 10168 |
| PDE7A | Phosphodiesterase 7A | SEQ ID NOS: 10169- |
| | | 10172 |
| PDF | Peptide deformylase (mitochondrial) | SEQ ID NO: 10173 |
| PDGFA | Platelet-derived growth factor alpha | SEQ ID NOS: 10174- |
| | polypeptide | 10177 |
| PDGFB | Platelet-derived growth factor beta | SEQ ID NOS: 10178- |
| | polypeptide | 10181 |
| PDGFC | Platelet derived growth factor C | SEQ ID NOS: 10182- |
| | | 10185 |
| PDGFD | Platelet derived growth factor D | SEQ ID NOS: 10186- |
| | | 10188 |
| PDGFRA | Platelet-derived growth factor receptor, | SEQ ID NOS: 10189- |
| | alpha polypeptide | 10195 |
| PDGFRB | Platelet-derived growth factor receptor, beta | SEQ ID NOS: 10196- |
| | polypeptide | 10199 |
| PDGFRL | Platelet-derived growth factor receptor-like | SEQ ID NOS: 10200- |
| | | 10201 |
| PDHA1 | Pyruvate dehydrogenase (lipoamide) alpha | SEQ ID NOS: 10202- |
| | 1 | 10210 |
| PDIA2 | Protein disulfide isomerase family A, | SEQ ID NOS: 10211- |
| | member 2 | 10214 |
| PDIA3 | Protein disulfide isomerase family A, | SEQ ID NOS: 10215- |
| | member 3 | 10218 |
| PDIA4 | Protein disulfide isomerase family A, | SEQ ID NOS: 10219- |
| | member 4 | 10220 |
| PDIA5 | Protein disulfide isomerase family A, | SEQ ID NOS: 10221- |
| | member 5 | 10224 |
| PDIA6 | Protein disulfide isomerase family A, | SEQ ID NOS: 10225- |
| | member 6 | 10231 |
| PDILT | Protein disulfide isomerase-like, testis | SEQ ID NOS: 10232- |
| | expressed | 10233 |
| PDYN | Prodynorphin | SEQ ID NOS: 10234- |
| | | 10236 |
| PDZD8 | PDZ domain containing 8 | SEQ ID NO: 10237 |
| PDZRN4 | PDZ domain containing ring finger 4 | SEQ ID NOS: 10238- |
| | | 10240 |
| PEAR1 | Platelet endothelial aggregation receptor 1 | SEQ ID NOS: 10241- |
| | | 10244 |
| PEBP4 | Phosphatidylethanolamine-binding protein 4 | SEQ ID NOS: 10245- |
| | | 10246 |
| PECAM1 | Platelet/endothelial cell adhesion molecule | SEQ ID NOS: 10247- |
| | 1 | 10250 |
| PENK | Proenkephalin | SEQ ID NOS: 10251- |
| | | 10256 |
| PET117 | PET117 homolog | SEQ ID NO: 10257 |
| PF4 | Platelet factor 4 | SEQ ID NO: 10258 |
| PF4V1 | Platelet factor 4 variant 1 | SEQ ID NO: 10259 |
| PFKP | Phosphofructokinase, platelet | SEQ ID NOS: 10260- |
| | | 10268 |
| PFN1 | Profilin 1 | SEQ ID NOS: 10269- |
| | | 10271 |
| PGA3 | Pepsinogen 3, group I (pepsinogen A) | SEQ ID NOS: 10272- |
| | | 10275 |
| PGA4 | Pepsinogen 4, group I (pepsinogen A) | SEQ ID NOS: 10276- |
| | | 10278 |
| PGA5 | Pepsinogen 5, group I (pepsinogen A) | SEQ ID NOS: 10279- |
| | | 10281 |
| PGAM5 | PGAM family member 5, serine/threonine | SEQ ID NOS: 10282- |
| | protein phosphatase, mitochondrial | 10285 |
| PGAP3 | Post-GPI attachment to proteins 3 | SEQ ID NOS: 10286- |
| | | 10293 |
| PGC | Progastricsin (pepsinogen C) | SEQ ID NOS: 10294- |
| | | 10297 |
| PGF | Placental growth factor | SEQ ID NOS: 10298- |
| | | 10301 |
| PGLYRP1 | Peptidoglycan recognition protein 1 | SEQ ID NO: 10302 |
| PGLYRP2 | Peptidoglycan recognition protein 2 | SEQ ID NOS: 10303- |
| | | 10306 |
| PGLYRP3 | Peptidoglycan recognition protein 3 | SEQ ID NO: 10307 |
| PGLYRP4 | Peptidoglycan recognition protein 4 | SEQ ID NOS: 10308- |
| | | 10309 |
| PHACTR1 | Phosphatase and actin regulator 1 | SEQ ID NOS: 10310- |
| | | 10316 |
| PHB | Prohibitin | SEQ ID NOS: 10317- |
| | | 10325 |
| PI15 | Peptidase inhibitor 15 | SEQ ID NOS: 10326- |
| | | 10327 |
| PI3 | Peptidase inhibitor 3, skin-derived | SEQ ID NO: 10328 |
| PIANP | PILR alpha associated neural protein | SEQ ID NOS: 10329- |
| | | 10334 |
| PIGK | Phosphatidylinositol glycan anchor | SEQ ID NOS: 10335- |
| | biosynthesis, class K | 10338 |
| PIGL | Phosphatidylinositol glycan anchor | SEQ ID NOS: 10339- |
| | biosynthesis, class L | 10346 |
| PIGT | Phosphatidylinositol glycan anchor | SEQ ID NOS: 10347- |
| | biosynthesis, class T | 10400 |
| PIGZ | Phosphatidylinositol glycan anchor | SEQ ID NOS: 10401- |
| | biosynthesis, class Z | 10403 |
| PIK3AP1 | Phosphoinositide-3-kinase adaptor protein 1 | SEQ ID NOS: 10404- |
| | | 10406 |
| PIK3IP1 | Phosphoinositide-3-kinase interacting | SEQ ID NOS: 10407- |
| | protein 1 | 10410 |
| PILRA | Paired immunoglobin-like type 2 receptor | SEQ ID NOS: 10411- |
| | alpha | 10415 |
| PILRB | Paired immunoglobin-like type 2 receptor | SEQ ID NOS: 10416- |
| | beta | 10427 |
| PINLYP | Phospholipase A2 inhibitor and | SEQ ID NOS: 10428- |
| | LY6/PLAUR domain containing | 10432 |
| PIP | Prolactin-induced protein | SEQ ID NO: 10433 |
| PIWIL4 | Piwi-like RNA-mediated gene silencing 4 | SEQ ID NOS: 10434- |
| | | 10438 |
| PKDCC | Protein kinase domain containing, | SEQ ID NOS: 10439- |
| | cytoplasmic | 10440 |
| PKHD1 | Polycystic kidney and hepatic disease 1 | SEQ ID NOS: 10441- |
| | (autosomal recessive) | 10442 |
| PLA1A | Phospholipase A1 member A | SEQ ID NOS: 10443- |
| | | 10447 |
| PLA2G10 | Phospholipase A2, group X | SEQ ID NOS: 10448- |
| | | 10449 |
| PLA2G12A | Phospholipase A2, group XIIA | SEQ ID NOS: 10450- |
| | | 10452 |
| PLA2G12B | Phospholipase A2, group XIIB | SEQ ID NO: 10453 |
| PLA2G15 | Phospholipase A2, group XV | SEQ ID NOS: 10454- |
| | | 10461 |
| PLA2G1B | Phospholipase A2, group IB (pancreas) | SEQ ID NOS: 10462- |
| | | 10464 |
| PLA2G2A | Phospholipase A2, group IIA (platelets, | SEQ ID NOS: 10465- |
| | synovial fluid) | 10466 |
| PLA2G2C | Phospholipase A2, group IIC | SEQ ID NOS: 10467- |
| | | 10468 |
| PLA2G2D | Phospholipase A2, group IID | SEQ ID NOS: 10469- |
| | | 10470 |
| PLA2G2E | Phospholipase A2, group IIE | SEQ ID NO: 10471 |
| PLA2G3 | Phospholipase A2, group III | SEQ ID NO: 10472 |
| PLA2G5 | Phospholipase A2, group V | SEQ ID NO: 10473 |
| PLA2G7 | Phospholipase A2, group VII (platelet- | SEQ ID NOS: 10474- |
| | activating factor acetylhydrolase, plasma) | 10475 |
| PLA2R1 | Phospholipase A2 receptor 1, 180 kDa | SEQ ID NOS: 10476- |
| | | 10477 |
| PLAC1 | Placenta-specific 1 | SEQ ID NO: 10478 |
| PLAC9 | Placenta-specific 9 | SEQ ID NOS: 10479- |
| | | 10481 |
| PLAT | Plasminogen activator, tissue | SEQ ID NOS: 10482- |
| | | 10490 |
| PLAU | Plasminogen activator, urokinase | SEQ ID NOS: 10491- |
| | | 10493 |
| PLAUR | Plasminogen activator, urokinase receptor | SEQ ID NOS: 10494- |
| | | 10505 |
| PLBD1 | Phospholipase B domain containing 1 | SEQ ID NOS: 10506- |
| | | 10508 |
| PLBD2 | Phospholipase B domain containing 2 | SEQ ID NOS: 10509- |
| | | 10511 |
| PLG | Plasminogen | SEQ ID NOS: 10512- |
| | | 10514 |
| PLGLB1 | Plasminogen-like B1 | SEQ ID NOS: 10515- |
| | | 10518 |
| PLGLB2 | Plasminogen-like B2 | SEQ ID NOS: 10519- |
| | | 10520 |
| PLOD1 | Procollagen-lysine, 2-oxoglutarate 5- | SEQ ID NOS: 10521- |
| | dioxygenase 1 | 10523 |
| PLOD2 | Procollagen-lysine, 2-oxoglutarate 5- | SEQ ID NOS: 10524- |
| | dioxygenase 2 | 10529 |
| PLOD3 | Procollagen-lysine, 2-oxoglutarate 5- | SEQ ID NOS: 10530- |
| | dioxygenase 3 | 10536 |
| PLTP | Phospholipid transfer protein | SEQ ID NOS: 10537- |
| | | 10541 |
| PLXNA4 | Plexin A4 | SEQ ID NOS: 10542- |
| | | 10545 |
| PLXNB2 | Plexin B2 | SEQ ID NOS: 10546- |
| | | 10554 |
| PM20D1 | Peptidase M20 domain containing 1 | SEQ ID NO: 10555 |
| PMCH | Pro-melanin-concentrating hormone | SEQ ID NO: 10556 |
| PMEL | Premelanosome protein | SEQ ID NOS: 10557- |
| | | 10568 |
| PMEPA1 | Prostate transmembrane protein, androgen | SEQ ID NOS: 10569- |
| | induced 1 | 10575 |
| PNLIP | Pancreatic lipase | SEQ ID NO: 10576 |
| PNLIPRP1 | Pancreatic lipase-related protein 1 | SEQ ID NOS: 10577- |
| | | 10585 |
| PNLIPRP3 | Pancreatic lipase-related protein 3 | SEQ ID NO: 10586 |
| PNOC | Prepronociceptin | SEQ ID NOS: 10587- |
| | | 10589 |
| PNP | Purine nucleoside phosphorylase | SEQ ID NOS: 10590- |
| | | 10593 |
| PNPLA4 | Patatin-like phospholipase domain | SEQ ID NOS: 10594- |
| | containing 4 | 10597 |
| PODNL1 | Podocan-like 1 | SEQ ID NOS: 10598- |
| | | 10609 |
| POFUT1 | Protein O-fucosyltransferase 1 | SEQ ID NOS: 10610- |
| | | 10611 |
| POFUT2 | Protein O-fucosyltransferase 2 | SEQ ID NOS: 10612- |
| | | 10617 |
| POGLUT1 | Protein O-glucosyltransferase 1 | SEQ ID NOS: 10618- |
| | | 10622 |
| POLL | Polymerase (DNA directed), lambda | SEQ ID NOS: 10623- |
| | | 10635 |
| POMC | Proopiomelanocortin | SEQ ID NOS: 10636- |
| | | 10640 |
| POMGNT2 | Protein O-linked mannose N- | SEQ ID NOS: 10641- |
| | acetylglucosaminyltransferase 2 (beta 1,4-) | 10642 |
| PON1 | Paraoxonase 1 | SEQ ID NOS: 10643- |
| | | 10644 |
| PON2 | Paraoxonase 2 | SEQ ID NOS: 10645- |
| | | 10657 |
| PON3 | Paraoxonase 3 | SEQ ID NOS: 10658- |
| | | 10663 |
| POSTN | Periostin, osteoblast specific factor | SEQ ID NOS: 10664- |
| | | 10669 |
| PPBP | Pro-platelet basic protein (chemokine (C-X- | SEQ ID NO: 10670 |
| | C motif) ligand 7) | |
| PPIB | Peptidylprolyl isomerase B (cyclophilin B) | SEQ ID NO: 10671 |
| PPIC | Peptidylprolyl isomerase C (cyclophilin C) | SEQ ID NO: 10672 |
| PPOX | Protoporphyrinogen oxidase | SEQ ID NOS: 10673- |
| | | 10683 |
| PPP1CA | Protein phosphatase 1, catalytic subunit, | SEQ ID NOS: 10684- |
| | alpha isozyme | 10689 |
| PPT1 | Palmitoyl-protein thioesterase 1 | SEQ ID NOS: 10690- |
| | | 10706 |
| PPT2 | Palmitoyl-protein thioesterase 2 | SEQ ID NOS: 10707- |
| | | 10714 |
| PPY | Pancreatic polypeptide | SEQ ID NOS: 10715- |
| | | 10719 |
| PRAC2 | Prostate cancer susceptibility candidate 2 | SEQ ID NOS: 10720- |
| | | 10721 |
| PRADC1 | Protease-associated domain containing 1 | SEQ ID NO: 10722 |
| PRAP1 | Proline-rich acidic protein 1 | SEQ ID NOS: 10723- |
| | | 10724 |
| PRB1 | Proline-rich protein BstNI subfamily 1 | SEQ ID NOS: 10725- |
| | | 10728 |
| PRB2 | Proline-rich protein BstNI subfamily 2 | SEQ ID NOS: 10729- |
| | | 10730 |
| PRB3 | Proline-rich protein BstNI subfamily 3 | SEQ ID NOS: 10731- |
| | | 10732 |
| PRB4 | Proline-rich protein BstNI subfamily 4 | SEQ ID NOS: 10733- |
| | | 10736 |
| PRCD | Progressive rod-cone degeneration | SEQ ID NOS: 10737- |
| | | 10738 |
| PRCP | Prolylcarboxypeptidase (angiotensinase C) | SEQ ID NOS: 10739- |
| | | 10750 |
| PRDM12 | PR domain containing 12 | SEQ ID NO: 10751 |
| PRDX4 | Peroxiredoxin 4 | SEQ ID NOS: 10752- |
| | | 10755 |
| PRELP | Proline/arginine-rich end leucine-rich repeat | SEQ ID NO: 10756 |
| | protein | |
| PRF1 | Perforin 1 (pore forming protein) | SEQ ID NOS: 10757- |
| | | 10759 |
| PRG2 | Proteoglycan 2, bone marrow (natural killer | SEQ ID NOS: 10760- |
| | cell activator, eosinophil granule major | 10762 |
| | basic protein) | |
| PRG3 | Proteoglycan 3 | SEQ ID NO: 10763 |
| PRG4 | Proteoglycan 4 | SEQ ID NOS: 10764- |
| | | 10769 |
| PRH1 | Proline-rich protein HaeIII subfamily 1 | SEQ ID NOS: 10770- |
| | | 10772 |
| PRH2 | Proline-rich protein HaeIII subfamily 2 | SEQ ID NOS: 10773- |
| | | 10774 |
| PRKAG1 | Protein kinase, AMP-activated, gamma 1 | SEQ ID NOS: 10775- |
| | non-catalytic subunit | 10789 |
| PRKCSH | Protein kinase C substrate 80K-H | SEQ ID NOS: 10790- |
| | | 10799 |
| PRKD1 | Protein kinase D1 | SEQ ID NOS: 10800- |
| | | 10805 |
| PRL | Prolactin | SEQ ID NOS: 10806- |
| | | 10808 |
| PRLH | Prolactin releasing hormone | SEQ ID NO: 10809 |
| PRLR | Prolactin receptor | SEQ ID NOS: 10810- |
| | | 10828 |
| PRNP | Prion protein | SEQ ID NOS: 10829- |
| | | 10832 |
| PRNT | Prion protein (testis specific) | SEQ ID NO: 10833 |
| PROC | Protein C (inactivator of coagulation factors | SEQ ID NOS: 10834- |
| | Va and VIIIa) | 10841 |
| PROK1 | Prokineticin 1 | SEQ ID NO: 10842 |
| PROK2 | Prokineticin 2 | SEQ ID NOS: 10843- |
| | | 10844 |
| PROL1 | Proline rich, lacrimal 1 | SEQ ID NO: 9817 |
| PROM1 | Prominin 1 | SEQ ID NOS: 10845- |
| | | 10856 |
| PROS1 | Protein S (alpha) | SEQ ID NOS: 10857- |
| | | 10860 |
| PROZ | Protein Z, vitamin K-dependent plasma | SEQ ID NOS: 10861- |
| | glycoprotein | 10862 |
| PRR27 | Proline rich 27 | SEQ ID NOS: 10863- |
| | | 10866 |
| PRR4 | Proline rich 4 (lacrimal) | SEQ ID NOS: 10867- |
| | | 10869 |
| PRRG2 | Proline rich Gla (G-carboxyglutamic acid) 2 | SEQ ID NOS: 10870- |
| | | 10872 |
| PRRT3 | Proline-rich transmembrane protein 3 | SEQ ID NOS: 10873- |
| | | 10875 |
| PRRT4 | Proline-rich transmembrane protein 4 | SEQ ID NOS: 10876- |
| | | 10882 |
| PRSS1 | Protease, serine, 1 (trypsin 1) | SEQ ID NOS: 10883- |
| | | 10886 |
| PRSS12 | Protease, serine, 12 (neurotrypsin, | SEQ ID NO: 10887 |
| | motopsin) | |
| PRSS16 | Protease, serine, 16 (thymus) | SEQ ID NOS: 10888- |
| | | 10895 |
| PRSS2 | Protease, serine, 2 (trypsin 2) | SEQ ID NOS: 10896- |
| | | 10899 |
| PRSS21 | Protease, serine, 21 (testisin) | SEQ ID NOS: 10900- |
| | | 10905 |
| PRSS22 | Protease, serine, 22 | SEQ ID NOS: 10906- |
| | | 10908 |
| PRSS23 | Protease, serine, 23 | SEQ ID NOS: 10909- |
| | | 10912 |
| PRSS27 | Protease, serine 27 | SEQ ID NOS: 10913- |
| | | 10915 |
| PRSS3 | Protease, serine, 3 | SEQ ID NOS: 10916- |
| | | 10920 |
| PRSS33 | Protease, serine, 33 | SEQ ID NOS: 10921- |
| | | 10924 |
| PRSS35 | Protease, serine, 35 | SEQ ID NO: 10925 |
| PRSS36 | Protease, serine, 36 | SEQ ID NOS: 10926- |
| | | 10929 |
| PRSS37 | Protease, serine, 37 | SEQ ID NOS: 10930- |
| | | 10933 |
| PRSS38 | Protease, serine, 38 | SEQ ID NO: 10934 |
| PRSS42 | Protease, serine, 42 | SEQ ID NOS: 10935- |
| | | 10936 |
| PRSS48 | Protease, serine, 48 | SEQ ID NOS: 10937- |
| | | 10938 |
| PRSS50 | Protease, serine, 50 | SEQ ID NO: 10939 |
| PRSS53 | Protease, serine, 53 | SEQ ID NO: 10940 |
| PRSS54 | Protease, serine, 54 | SEQ ID NOS: 10941- |
| | | 10945 |
| PRSS55 | Protease, serine, 55 | SEQ ID NOS: 10946- |
| | | 10948 |
| PRSS56 | Protease, serine, 56 | SEQ ID NOS: 10949- |
| | | 10950 |
| PRSS57 | Protease, serine, 57 | SEQ ID NOS: 10951- |
| | | 10952 |
| PRSS58 | Protease, serine, 58 | SEQ ID NOS: 10953- |
| | | 10954 |
| PRSS8 | Protease, serine, 8 | SEQ ID NOS: 10955- |
| | | 10958 |
| PRTG | Protogenin | SEQ ID NOS: 10959- |
| | | 10962 |
| PRTN3 | Proteinase 3 | SEQ ID NOS: 10963- |
| | | 10964 |
| PSAP | Prosaposin | SEQ ID NOS: 10965- |
| | | 10968 |
| PSAPL1 | Prosaposin-like 1 (gene/pseudogene) | SEQ ID NO: 10969 |
| PSG1 | Pregnancy specific beta-1-glycoprotein 1 | SEQ ID NOS: 10970- |
| | | 10977 |
| PSG11 | Pregnancy specific beta-1-glycoprotein 11 | SEQ ID NOS: 10978- |
| | | 10982 |
| PSG2 | Pregnancy specific beta-1-glycoprotein 2 | SEQ ID NOS: 10983- |
| | | 10984 |
| PSG3 | Pregnancy specific beta-1-glycoprotein 3 | SEQ ID NOS: 10985- |
| | | 10988 |
| PSG4 | Pregnancy specific beta-1-glycoprotein 4 | SEQ ID NOS: 10989- |
| | | 11000 |
| PSG5 | Pregnancy specific beta-1-glycoprotein 5 | SEQ ID NOS: 11001- |
| | | 11006 |
| PSG6 | Pregnancy specific beta-1-glycoprotein 6 | SEQ ID NOS: 11007- |
| | | 11012 |
| PSG7 | Pregnancy specific beta-1-glycoprotein 7 | SEQ ID NOS: 11013- |
| | (gene/pseudogene) | 11015 |
| PSG8 | Pregnancy specific beta-1-glycoprotein 8 | SEQ ID NOS: 11016- |
| | | 11020 |
| PSG9 | Pregnancy specific beta-1-glycoprotein 9 | SEQ ID NOS: 11021- |
| | | 11028 |
| PSMD1 | Proteasome 26S subunit, non-ATPase 1 | SEQ ID NOS: 11029- |
| | | 11036 |
| PSORS1C2 | Psoriasis susceptibility 1 candidate 2 | SEQ ID NO: 11037 |
| PSPN | Persephin | SEQ ID NOS: 11038- |
| | | 11039 |
| PTGDS | Prostaglandin D2 synthase 21 kDa (brain) | SEQ ID NOS: 11040- |
| | | 11044 |
| PTGIR | Prostaglandin I2 (prostacyclin) receptor (IP) | SEQ ID NOS: 11045- |
| | | 11049 |
| PTGS1 | Prostaglandin-endoperoxide synthase 1 | SEQ ID NOS: 11050- |
| | (prostaglandin G/H synthase and | 11058 |
| | cyclooxygenase) | |
| PTGS2 | Prostaglandin-endoperoxide synthase 2 | SEQ ID NOS: 11059- |
| | (prostaglandin G/H synthase and | 11060 |
| | cyclooxygenase) | |
| PTH | Parathyroid hormone | SEQ ID NOS: 11061- |
| | | 11062 |
| PTH2 | Parathyroid hormone 2 | SEQ ID NO: 11063 |
| PTHLH | Parathyroid hormone-like hormone | SEQ ID NOS: 11064- |
| | | 11072 |
| PTK7 | Protein tyrosine kinase 7 (inactive) | SEQ ID NOS: 11073- |
| | | 11088 |
| PTN | Pleiotrophin | SEQ ID NOS: 11089- |
| | | 11090 |
| PTPRA | Protein tyrosine phosphatase, receptor type, | SEQ ID NOS: 11091- |
| | A | 11098 |
| PTPRB | Protein tyrosine phosphatase, receptor type, | SEQ ID NOS: 11099- |
| | B | 11106 |
| PTPRC | Protein tyrosine phosphatase, receptor type, | SEQ ID NOS: 11107- |
| | C | 11117 |
| PTPRCAP | Protein tyrosine phosphatase, receptor type, | SEQ ID NO: 11118 |
| | C-associated protein | |
| PTPRD | Protein tyrosine phosphatase, receptor type, | SEQ ID NOS: 11119- |
| | D | 11130 |
| PTPRF | Protein tyrosine phosphatase, receptor type, | SEQ ID NOS: 11131- |
| | F | 11138 |
| PTPRJ | Protein tyrosine phosphatase, receptor type, | SEQ ID NOS: 11139- |
| | J | 11144 |
| PTPRO | Protein tyrosine phosphatase, receptor type, | SEQ ID NOS: 11145- |
| | O | 11153 |
| PTPRS | Protein tyrosine phosphatase, receptor type, | SEQ ID NOS: 11154- |
| | S | 11161 |
| PTTG1IP | Pituitary tumor-transforming 1 interacting | SEQ ID NOS: 11162- |
| | protein | 11165 |
| PTX3 | Pentraxin 3, long | SEQ ID NO: 11166 |
| PTX4 | Pentraxin 4, long | SEQ ID NOS: 11167- |
| | | 11169 |
| PVR | Poliovirus receptor | SEQ ID NOS: 11170- |
| | | 11175 |
| PVRL1 | Poliovirus receptor-related 1 (herpesvirus | SEQ ID NOS: 9286- |
| | entry mediator C) | 9288 |
| PXDN | Peroxidasin | SEQ ID NOS: 11176- |
| | | 11180 |
| PXDNL | Peroxidasin-like | SEQ ID NOS: 11181- |
| | | 11183 |
| PXYLP1 | 2-phosphoxylose phosphatase 1 | SEQ ID NOS: 11184- |
| | | 11196 |
| PYY | Peptide YY | SEQ ID NOS: 11197- |
| | | 11198 |
| PZP | Pregnancy-zone protein | SEQ ID NOS: 11199- |
| | | 11200 |
| QPCT | Glutaminyl-peptide cyclotransferase | SEQ ID NOS: 11201- |
| | | 11203 |
| QPRT | Quinolinate phosphoribosyltransferase | SEQ ID NOS: 11204- |
| | | 11205 |
| QRFP | Pyroglutamylated RFamide peptide | SEQ ID NOS: 11206- |
| | | 11207 |
| QSOX1 | Quiescin Q6 sulfhydryl oxidase 1 | SEQ ID NOS: 11208- |
| | | 11211 |
| R3HDML | R3H domain containing-like | SEQ ID NO: 11212 |
| RAB26 | RAB26, member RAS oncogene family | SEQ ID NOS: 11213- |
| | | 11216 |
| RAB36 | RAB36, member RAS oncogene family | SEQ ID NOS: 11217- |
| | | 11219 |
| RAB9B | RAB9B, member RAS oncogene family | SEQ ID NO: 11220 |
| RAET1E | Retinoic acid early transcript 1E | SEQ ID NOS: 11221- |
| | | 11226 |
| RAET1G | Retinoic acid early transcript 1G | SEQ ID NOS: 11227- |
| | | 11229 |
| RAMP2 | Receptor (G protein-coupled) activity | SEQ ID NOS: 11230- |
| | modifying protein 2 | 11234 |
| RAPGEF5 | Rap guanine nucleotide exchange factor | SEQ ID NOS: 11235- |
| | (GEF) 5 | 11241 |
| RARRES1 | Retinoic acid receptor responder (tazarotene | SEQ ID NOS: 11242- |
| | induced) 1 | 11243 |
| RARRES2 | Retinoic acid receptor responder (tazarotene | SEQ ID NOS: 11244- |
| | induced) 2 | 11247 |
| RASA2 | RAS p21 protein activator 2 | SEQ ID NOS: 11248- |
| | | 11250 |
| RBM3 | RNA binding motif (RNP1, RRM) protein 3 | SEQ ID NOS: 11251- |
| | | 11253 |
| RBP3 | Retinol binding protein 3, interstitial | SEQ ID NO: 11254 |
| RBP4 | Retinol binding protein 4, plasma | SEQ ID NOS: 11255- |
| | | 11258 |
| RCN1 | Reticulocalbin 1, EF-hand calcium binding | SEQ ID NOS: 11259- |
| | domain | 11262 |
| RCN2 | Reticulocalbin 2, EF-hand calcium binding | SEQ ID NOS: 11263- |
| | domain | 11266 |
| RCN3 | Reticulocalbin 3, EF-hand calcium binding | SEQ ID NOS: 11267- |
| | domain | 11270 |
| RCOR1 | REST corepressor 1 | SEQ ID NOS: 11271- |
| | | 11272 |
| RDH11 | Retinol dehydrogenase 11 (all-trans/9- | SEQ ID NOS: 11273- |
| | cis/11-cis) | 11280 |
| RDH12 | Retinol dehydrogenase 12 (all-trans/9- | SEQ ID NOS: 11281- |
| | cis/11-cis) | 11282 |
| RDH13 | Retinol dehydrogenase 13 (all-trans/9-cis) | SEQ ID NOS: 11283- |
| | | 11291 |
| RDH5 | Retinol dehydrogenase 5 (11-cis/9-cis) | SEQ ID NOS: 11292- |
| | | 11296 |
| RDH8 | Retinol dehydrogenase 8 (all-trans) | SEQ ID NOS: 11297- |
| | | 11298 |
| REG1A | Regenerating islet-derived 1 alpha | SEQ ID NO: 11299 |
| REG1B | Regenerating islet-derived 1 beta | SEQ ID NOS: 11300- |
| | | 11301 |
| REG3A | Regenerating islet-derived 3 alpha | SEQ ID NOS: 11302- |
| | | 11304 |
| REG3G | Regenerating islet-derived 3 gamma | SEQ ID NOS: 11305- |
| | | 11307 |
| REG4 | Regenerating islet-derived family, member | SEQ ID NOS: 11308- |
| | 4 | 11311 |
| RELN | Reelin | SEQ ID NOS: 11312- |
| | | 11315 |
| RELT | RELT tumor necrosis factor receptor | SEQ ID NOS: 11316- |
| | | 11319 |
| REN | Renin | SEQ ID NOS: 11320- |
| | | 11321 |
| REPIN1 | Replication initiator 1 | SEQ ID NOS: 11322- |
| | | 11335 |
| REPS2 | RALBP1 associated Eps domain containing | SEQ ID NOS: 11336- |
| | 2 | 11337 |
| RET | Ret proto-oncogene | SEQ ID NOS: 11338- |
| | | 11343 |
| RETN | Resistin | SEQ ID NOS: 11344- |
| | | 11346 |
| RETNLB | Resistin like beta | SEQ ID NO: 11347 |
| RETSAT | Retinol saturase (all-trans-retinol 13,14- | SEQ ID NOS: 11348- |
| | reductase) | 11352 |
| RFNG | RFNG O-fucosylpeptide 3-beta-N- | SEQ ID NOS: 11353- |
| | acetylglucosaminyltransferase | 11355 |
| RGCC | Regulator of cell cycle | SEQ ID NO: 11356 |
| RGL4 | Ral guanine nucleotide dissociation | SEQ ID NOS: 11357- |
| | stimulator-like 4 | 11363 |
| RGMA | Repulsive guidance molecule family | SEQ ID NOS: 11364- |
| | member a | 11373 |
| RGMB | Repulsive guidance molecule family | SEQ ID NOS: 11374- |
| | member b | 11375 |
| RHOQ | Ras homolog family member Q | SEQ ID NOS: 11376- |
| | | 11380 |
| RIC3 | RIC3 acetylcholine receptor chaperone | SEQ ID NOS: 11381- |
| | | 11388 |
| RIMS1 | Regulating synaptic membrane exocytosis 1 | SEQ ID NOS: 11393- |
| | | 11408 |
| RIPPLY1 | Ripply transcriptional repressor 1 | SEQ ID NOS: 11409- |
| | | 11410 |
| RLN1 | Relaxin 1 | SEQ ID NO: 11411 |
| RLN2 | Relaxin 2 | SEQ ID NOS: 11412- |
| | | 11413 |
| RLN3 | Relaxin 3 | SEQ ID NOS: 11414- |
| | | 11415 |
| RMDN1 | Regulator of microtubule dynamics 1 | SEQ ID NOS: 11416- |
| | | 11429 |
| RNASE1 | Ribonuclease, RNase A family, 1 | SEQ ID NOS: 11430- |
| | (pancreatic) | 11434 |
| RNASE10 | Ribonuclease, RNase A family, 10 (non- | SEQ ID NOS: 11435- |
| | active) | 11436 |
| RNASE11 | Ribonuclease, RNase A family, 11 (non- | SEQ ID NOS: 11437- |
| | active) | 11447 |
| RNASE12 | Ribonuclease, RNase A family, 12 (non- | SEQ ID NO: 11448 |
| | active) | |
| RNASE13 | Ribonuclease, RNase A family, 13 (non- | SEQ ID NO: 11449 |
| | active) | |
| RNASE2 | Ribonuclease, RNase A family, 2 (liver, | SEQ ID NO: 11450 |
| | eosinophil-derived neurotoxin) | |
| RNASE3 | Ribonuclease, RNase A family, 3 | SEQ ID NO: 11451 |
| RNASE4 | Ribonuclease, RNase A family, 4 | SEQ ID NOS: 11452- |
| | | 11454 |
| RNASE6 | Ribonuclease, RNase A family, k6 | SEQ ID NO: 11455 |
| RNASE7 | Ribonuclease, RNase A family, 7 | SEQ ID NOS: 11456- |
| | | 11457 |
| RNASE8 | Ribonuclease, RNase A family, 8 | SEQ ID NO: 11458 |
| RNASE9 | Ribonuclease, RNase A family, 9 (non- | SEQ ID NOS: 11459- |
| | active) | 11469 |
| RNASEH1 | Ribonuclease H1 | SEQ ID NOS: 11470- |
| | | 11472 |
| RNASET2 | Ribonuclease T2 | SEQ ID NOS: 11473- |
| | | 11480 |
| RNF146 | Ring finger protein 146 | SEQ ID NOS: 11481- |
| | | 11492 |
| RNF148 | Ring finger protein 148 | SEQ ID NOS: 11493- |
| | | 11494 |
| RNF150 | Ring finger protein 150 | SEQ ID NOS: 11495- |
| | | 11499 |
| RNF167 | Ring finger protein 167 | SEQ ID NOS: 11500- |
| | | 11510 |
| RNF220 | Ring finger protein 220 | SEQ ID NOS: 11511- |
| | | 11517 |
| RNF34 | Ring finger protein 34, E3 ubiquitin protein | SEQ ID NOS: 11518- |
| | ligase | 11525 |
| RNLS | Renalase, FAD-dependent amine oxidase | SEQ ID NOS: 11526- |
| | | 11528 |
| RNPEP | Arginyl aminopeptidase (aminopeptidase B) | SEQ ID NOS: 11529- |
| | | 11534 |
| ROR1 | Receptor tyrosine kinase-like orphan | SEQ ID NOS: 11535- |
| | receptor 1 | 11537 |
| RP11- | | SEQ ID NO: 4158 |
| 1236K1.1 | | |
| RP11-14J7.7 | | SEQ ID NOS: 674-675 |
| RP11- | | SEQ ID NOS: 85-87 |
| 196G11.1 | | |
| RP11- | | SEQ ID NO: 683 |
| 350O14.18 | | |
| RP11- | | SEQ ID NO: 8194 |
| 520P18.5 | | |
| RP11- | | SEQ ID NO: 89 |
| 812E19.9 | | |
| RP11- | | SEQ ID NO: 676 |
| 903H12.5 | | |
| RP11- | | SEQ ID NOS: 78-80 |
| 977G19.10 | | |
| RP4-576H24.4 | | SEQ ID NOS: 670-672 |
| RP4-608O15.3 | Complement factor H-related protein 2 | SEQ ID NO: 1649 |
| RPL3 | Ribosomal protein L3 | SEQ ID NOS: 11538- |
| | | 11543 |
| RPLP2 | Ribosomal protein, large, P2 | SEQ ID NOS: 11544- |
| | | 11546 |
| RPN2 | Ribophorin II | SEQ ID NOS: 11547- |
| | | 11553 |
| RPS27L | Ribosomal protein S27-like | SEQ ID NOS: 11554- |
| | | 11559 |
| RQCD1 | RCD1 required for cell differentiation1 | SEQ ID NOS: 3100- |
| | homolog (S. pombe) | 3106 |
| RS1 | Retinoschisin 1 | SEQ ID NO: 11560 |
| RSF1 | Remodeling and spacing factor 1 | SEQ ID NOS: 11561- |
| | | 11567 |
| RSPO1 | R-spondin 1 | SEQ ID NOS: 11568- |
| | | 11571 |
| RSPO2 | R-spondin 2 | SEQ ID NOS: 11572- |
| | | 11579 |
| RSPO3 | R-spondin 3 | SEQ ID NOS: 11580- |
| | | 11581 |
| RSPO4 | R-spondin 4 | SEQ ID NOS: 11582- |
| | | 11583 |
| RSPRY1 | Ring finger and SPRY domain containing 1 | SEQ ID NOS: 11584- |
| | | 11590 |
| RTBDN | Retbindin | SEQ ID NOS: 11591- |
| | | 11603 |
| RTN4RL1 | Reticulon 4 receptor-like 1 | SEQ ID NO: 11604 |
| RTN4RL2 | Reticulon 4 receptor-like 2 | SEQ ID NOS: 11605- |
| | | 11607 |
| SAA1 | Serum amyloid A1 | SEQ ID NOS: 11608- |
| | | 11610 |
| SAA2 | Serum amyloid A2 | SEQ ID NOS: 11611- |
| | | 11616 |
| SAA4 | Serum amyloid A4, constitutive | SEQ ID NO: 11617 |
| SAP30 | Sin3A-associated protein, 30 kDa | SEQ ID NO: 11618 |
| SAR1A | Secretion associated, Ras related GTPase | SEQ ID NOS: 11619- |
| | 1A | 11625 |
| SARAF | Store-operated calcium entry-associated | SEQ ID NOS: 11626- |
| | regulatory factor | 11636 |
| SARM1 | Sterile alpha and TIR motif containing 1 | SEQ ID NOS: 11637- |
| | | 11640 |
| SATB1 | SATB homeobox 1 | SEQ ID NOS: 11641- |
| | | 11653 |
| SAXO2 | Stabilizer of axonemal microtubules 2 | SEQ ID NOS: 11654- |
| | | 11658 |
| SBSN | Suprabasin | SEQ ID NOS: 11659- |
| | | 11661 |
| SBSPON | Somatomedin B and thrombospondin, type | SEQ ID NO: 11662 |
| | 1 domain containing | |
| SCARF1 | Scavenger receptor class F, member 1 | SEQ ID NOS: 11663- |
| | | 11667 |
| SCG2 | Secretogranin II | SEQ ID NOS: 11668- |
| | | 11670 |
| SCG3 | Secretogranin III | SEQ ID NOS: 11671- |
| | | 11673 |
| SCG5 | Secretogranin V | SEQ ID NOS: 11674- |
| | | 11678 |
| SCGB1A1 | Secretoglobin, family 1A, member 1 | SEQ ID NOS: 11679- |
| | (uteroglobin) | 11680 |
| SCGB1C1 | Secretoglobin, family 1C, member 1 | SEQ ID NO: 11681 |
| SCGB1C2 | Secretoglobin, family 1C, member 2 | SEQ ID NO: 11682 |
| SCGB1D1 | Secretoglobin, family 1D, member 1 | SEQ ID NO: 11683 |
| SCGB1D2 | Secretoglobin, family 1D, member 2 | SEQ ID NO: 11684 |
| SCGB1D4 | Secretoglobin, family 1D, member 4 | SEQ ID NO: 11685 |
| SCGB2A1 | Secretoglobin, family 2A, member 1 | SEQ ID NO: 11686 |
| SCGB2A2 | Secretoglobin, family 2A, member 2 | SEQ ID NOS: 11687- |
| | | 11688 |
| SCGB2B2 | Secretoglobin, family 2B, member 2 | SEQ ID NOS: 11689- |
| | | 11690 |
| SCGB3A1 | Secretoglobin, family 3A, member 1 | SEQ ID NO: 11691 |
| SCGB3A2 | Secretoglobin, family 3A, member 2 | SEQ ID NOS: 11692- |
| | | 11693 |
| SCN1B | Sodium channel, voltage gated, type I beta | SEQ ID NOS: 11694- |
| | subunit | 11699 |
| SCN3B | Sodium channel, voltage gated, type III beta | SEQ ID NOS: 11700- |
| | subunit | 11704 |
| SCPEP1 | Serine carboxypeptidase 1 | SEQ ID NOS: 11705- |
| | | 11712 |
| SCRG1 | Stimulator of chondrogenesis 1 | SEQ ID NOS: 11713- |
| | | 11714 |
| SCT | Secretin | SEQ ID NO: 11715 |
| SCUBE1 | Signal peptide, CUB domain, EGF-like 1 | SEQ ID NOS: 11716- |
| | | 11719 |
| SCUBE2 | Signal peptide, CUB domain, EGF-like 2 | SEQ ID NOS: 11720- |
| | | 11726 |
| SCUBE3 | Signal peptide, CUB domain, EGF-like 3 | SEQ ID NO: 11727 |
| SDC1 | Syndecan 1 | SEQ ID NOS: 11728- |
| | | 11732 |
| SDF2 | Stromal cell-derived factor 2 | SEQ ID NOS: 11733- |
| | | 11735 |
| SDF2L1 | Stromal cell-derived factor 2-like 1 | SEQ ID NO: 11736 |
| SDF4 | Stromal cell derived factor 4 | SEQ ID NOS: 11737- |
| | | 11740 |
| SDHAF2 | Succinate dehydrogenase complex assembly | SEQ ID NOS: 11741- |
| | factor 2 | 11748 |
| SDHAF4 | Succinate dehydrogenase complex assembly | SEQ ID NO: 11749 |
| | factor 4 | |
| SDHB | Succinate dehydrogenase complex, subunit | SEQ ID NOS: 11750- |
| | B, iron sulfur (Ip) | 11752 |
| SDHD | Succinate dehydrogenase complex, subunit | SEQ ID NOS: 11753- |
| | D, integral membrane protein | 11762 |
| SEC14L3 | SEC14-like lipid binding 3 | SEQ ID NOS: 11763- |
| | | 11769 |
| SEC16A | SEC16 homolog A, endoplasmic reticulum | SEQ ID NOS: 11770- |
| | export factor | 11776 |
| SEC16B | SEC16 homolog B, endoplasmic reticulum | SEQ ID NOS: 11777- |
| | export factor | 11780 |
| SEC22C | SEC22 homolog C, vesicle trafficking | SEQ ID NOS: 11781- |
| | protein | 11793 |
| SEC31A | SEC31 homolog A, COPII coat complex | SEQ ID NOS: 11794- |
| | component | 11823 |
| SECISBP2 | SECIS binding protein 2 | SEQ ID NOS: 11824- |
| | | 11828 |
| SECTM1 | Secreted and transmembrane 1 | SEQ ID NOS: 11829- |
| | | 11836 |
| SEL1L | Sel-1 suppressor of lin-12-like (C. elegans) | SEQ ID NOS: 11837- |
| | | 11839 |
| SELM | Selenoprotein M | SEQ ID NOS: 11847- |
| | | 11849 |
| SELO | Selenoprotein O | SEQ ID NOS: 11854- |
| | | 11855 |
| SEMA3A | Sema domain, immunoglobulin domain | SEQ ID NOS: 11862- |
| | (Ig), short basic domain, secreted, | 11866 |
| | (semaphorin) 3A | |
| SEMA3B | Sema domain, immunoglobulin domain | SEQ ID NOS: 11867- |
| | (Ig), short basic domain, secreted, | 11873 |
| | (semaphorin) 3B | |
| SEMA3C | Sema domain, immunoglobulin domain | SEQ ID NOS: 11874- |
| | (Ig), short basic domain, secreted, | 11878 |
| | (semaphorin) 3C | |
| SEMA3E | Sema domain, immunoglobulin domain | SEQ ID NOS: 11879- |
| | (Ig), short basic domain, secreted, | 11883 |
| | (semaphorin) 3E | |
| SEMA3F | Sema domain, immunoglobulin domain | SEQ ID NOS: 11884- |
| | (Ig), short basic domain, secreted, | 11890 |
| | (semaphorin) 3F | |
| SEMA3G | Sema domain, immunoglobulin domain | SEQ ID NOS: 11891- |
| | (Ig), short basic domain, secreted, | 11893 |
| | (semaphorin) 3G | |
| SEMA4A | Sema domain, immunoglobulin domain | SEQ ID NOS: 11894- |
| | (Ig), transmembrane domain (TM) and short | 11902 |
| | cytoplasmic domain, (semaphorin) 4A | |
| SEMA4B | Sema domain, immunoglobulin domain | SEQ ID NOS: 11903- |
| | (Ig), transmembrane domain (TM) and short | 11913 |
| | cytoplasmic domain, (semaphorin) 4B | |
| SEMA4C | Sema domain, immunoglobulin domain | SEQ ID NOS: 11914- |
| | (Ig), transmembrane domain (TM) and short | 11916 |
| | cytoplasmic domain, (semaphorin) 4C | |
| SEMA4D | Sema domain, immunoglobulin domain | SEQ ID NOS: 11917- |
| | (Ig), transmembrane domain (TM) and short | 11930 |
| | cytoplasmic domain, (semaphorin) 4D | |
| SEMA4F | Sema domain, immunoglobulin domain | SEQ ID NOS: 11931- |
| | (Ig), transmembrane domain (TM) and short | 11939 |
| | cytoplasmic domain, (semaphorin) 4F | |
| SEMA4G | Sema domain, immunoglobulin domain | SEQ ID NOS: 11940- |
| | (Ig), transmembrane domain (TM) and short | 11947 |
| | cytoplasmic domain, (semaphorin) 4G | |
| SEMA5A | Sema domain, seven thrombospondin | SEQ ID NOS: 11948- |
| | repeats (type 1 and type 1-like), | 11949 |
| | transmembrane domain (TM) and short | |
| | cytoplasmic domain, (semaphorin) 5A | |
| SEMA6A | Sema domain, transmembrane domain | SEQ ID NOS: 11950- |
| | (TM), and cytoplasmic domain, | 11957 |
| | (semaphorin) 6A | |
| SEMA6C | Sema domain, transmembrane domain | SEQ ID NOS: 11958- |
| | (TM), and cytoplasmic domain, | 11963 |
| | (semaphorin) 6C | |
| SEMA6D | Sema domain, transmembrane domain | SEQ ID NOS: 11964- |
| | (TM), and cytoplasmic domain, | 11977 |
| | (semaphorin) 6D | |
| SEMG1 | Semenogelin I | SEQ ID NO: 11978 |
| SEMG2 | Semenogelin II | SEQ ID NO: 11979 |
| SEPN1 | Selenoprotein N, 1 | SEQ ID NOS: 11850- |
| | | 11853 |
| SEPP1 | Selenoprotein P, plasma, 1 | SEQ ID NOS: 11856- |
| | | 11861 |
| SEPT15 | 15 kDa selenoprotein | SEQ ID NOS: 11840- |
| | | 11846 |
| SEPT9 | Septin 9 | SEQ ID NOS: 11980- |
| | | 12016 |
| SERPINA1 | Serpin peptidase inhibitor, clade A (alpha-1 | SEQ ID NOS: 12017- |
| | antiproteinase, antitrypsin), member 1 | 12033 |
| SERPINA10 | Serpin peptidase inhibitor, clade A (alpha-1 | SEQ ID NOS: 12034- |
| | anti proteinase, antitrypsin), member 10 | 12037 |
| SERPINA11 | Serpin peptidase inhibitor, clade A (alpha-1 | SEQ ID NO: 12038 |
| | antiproteinase, antitrypsin), member 11 | |
| SERPINA12 | Serpin peptidase inhibitor, clade A (alpha-1 | SEQ ID NOS: 12039- |
| | anti proteinase, antitrypsin), member 12 | 12040 |
| SERPINA3 | Serpin peptidase inhibitor, clade A (alpha-1 | SEQ ID NOS: 673- |
| | antiproteinase, antitrypsin), member 3 | 12047 |
| SERPINA4 | Serpin peptidase inhibitor, clade A (alpha-1 | SEQ ID NOS: 12048- |
| | antiproteinase, antitrypsin), member 4 | 12050 |
| SERPINA5 | Serpin peptidase inhibitor, clade A (alpha-1 | SEQ ID NOS: 12051- |
| | antiproteinase, antitrypsin), member 5 | 12062 |
| SERPINA6 | Serpin peptidase inhibitor, clade A (alpha-1 | SEQ ID NOS: 12063- |
| | antiproteinase, antitrypsin), member 6 | 12065 |
| SERPINA7 | Serpin peptidase inhibitor, clade A (alpha-1 | SEQ ID NOS: 12066- |
| | antiproteinase, antitrypsin), member 7 | 12067 |
| SERPINA9 | Serpin peptidase inhibitor, clade A (alpha-1 | SEQ ID NOS: 12068- |
| | antiproteinase, antitrypsin), member 9 | 12074 |
| SERPINB2 | Serpin peptidase inhibitor, clade B | SEQ ID NOS: 12075- |
| | (ovalbumin), member 2 | 12079 |
| SERPINC1 | Serpin peptidase inhibitor, clade C | SEQ ID NOS: 12080- |
| | (antithrombin), member 1 | 12081 |
| SERPIND1 | Serpin peptidase inhibitor, clade D (heparin | SEQ ID NOS: 12082- |
| | cofactor), member 1 | 12083 |
| SERPINE1 | Serpin peptidase inhibitor, clade E (nexin. | SEQ ID NO: 12084 |
| | plasminogen activator inhibitor type 1), | |
| | member 1 | |
| SERPINE2 | Serpin peptidase inhibitor, clade E (nexin, | SEQ ID NOS: 12085- |
| | plasminogen activator inhibitor type 1), | 12091 |
| | member 2 | |
| SERPINE3 | Serpin peptidase inhibitor, clade E (nexin, | SEQ ID NOS: 12092- |
| | plasminogen activator inhibitor type 1), | 12095 |
| | member 3 | |
| SERPINF1 | Serpin peptidase inhibitor, clade F (alpha-2 | SEQ ID NOS: 12096- |
| | antiplasmin, pigment epithelium derived | 12104 |
| | factor), member 1 | |
| SERPINF2 | Serpin peptidase inhibitor, clade F (alpha-2 | SEQ ID NOS: 12105- |
| | antiplasmin, pigment epithelium derived | 12109 |
| | factor), member 2 | |
| SERPING1 | Serpin peptidase inhibitor, clade G (C1 | SEQ ID NOS: 12110- |
| | inhibitor), member 1 | 12120 |
| SERPINH1 | Serpin peptidase inhibitor, clade H (heat | SEQ ID NOS: 12121- |
| | shock protein 47), member 1, (collagen | 12135 |
| | binding protein 1) | |
| SERPINI1 | Serpin peptidase inhibitor, clade I | SEQ ID NOS: 12136- |
| | (neuroserpin), member 1 | 12140 |
| SERPINI2 | Serpin peptidase inhibitor, clade I (pancpin), | SEQ ID NOS: 12141- |
| | member 2 | 12147 |
| SETD8 | SET domain containing (lysine | SEQ ID NOS: 7589- |
| | methyltransferase) 8 | 7592 |
| SEZ6L2 | Seizure related 6 homolog (mouse)-like 2 | SEQ ID NOS: 12148- |
| | | 12154 |
| SFRP1 | Secreted frizzled-related protein 1 | SEQ ID NOS: 12155- |
| | | 12156 |
| SFRP2 | Secreted frizzled-related protein 2 | SEQ ID NO: 12157 |
| SFRP4 | Secreted frizzled-related protein 4 | SEQ ID NOS: 12158- |
| | | 12159 |
| SFRP5 | Secreted frizzled-related protein 5 | SEQ ID NO: 12160 |
| SFTA2 | Surfactant associated 2 | SEQ ID NOS: 12161- |
| | | 12162 |
| SFTPA1 | Surfactant protein A1 | SEQ ID NOS: 12163- |
| | | 12167 |
| SFTPA2 | Surfactant protein A2 | SEQ ID NOS: 12168- |
| | | 12172 |
| SFTPB | Surfactant protein B | SEQ ID NOS: 12173- |
| | | 12177 |
| SFTPD | Surfactant protein D | SEQ ID NOS: 12178- |
| | | 12179 |
| SFXN5 | Sideroflexin 5 | SEQ ID NOS: 12180- |
| | | 12184 |
| SGCA | Sarcoglycan, alpha (50 kDa dystrophin- | SEQ ID NOS: 12185- |
| | associated glycoprotein) | 12192 |
| SGSH | N-sulfoglucosamine sulfohydrolase | SEQ ID NOS: 12193- |
| | | 12201 |
| SH3RF3 | SH3 domain containing ring finger 3 | SEQ ID NO: 12202 |
| SHBG | Sex hormone-binding globulin | SEQ ID NOS: 12203- |
| | | 12221 |
| SHE | Src homology 2 domain containing E | SEQ ID NOS: 12222- |
| | | 12224 |
| SHH | Sonic hedgehog | SEQ ID NOS: 12225- |
| | | 12228 |
| SHKBP1 | SH3KBP1 binding protein 1 | SEQ ID NOS: 12229- |
| | | 12244 |
| SIAE | Sialic acid acetylesterase | SEQ ID NOS: 12245- |
| | | 12247 |
| SIDT2 | SID1 transmembrane family, member 2 | SEQ ID NOS: 12248- |
| | | 12257 |
| SIGLEC10 | Sialic acid binding Ig-like lectin 10 | SEQ ID NOS: 12258- |
| | | 12266 |
| SIGLEC6 | Sialic acid binding Ig-like lectin 6 | SEQ ID NOS: 12267- |
| | | 12272 |
| SIGLEC7 | Sialic acid binding Ig-like lectin 7 | SEQ ID NOS: 12273- |
| | | 12277 |
| SIGLECL1 | SIGLEC family like 1 | SEQ ID NOS: 12278- |
| | | 12283 |
| SIGMAR1 | Sigma non-opioid intracellular receptor 1 | SEQ ID NOS: 12284- |
| | | 12287 |
| SIL1 | SIL1 nucleotide exchange factor | SEQ ID NOS: 12288- |
| | | 12296 |
| SIRPB1 | Signal-regulatory protein beta 1 | SEQ ID NOS: 12297- |
| | | 12309 |
| SIRPD | Signal-regulatory protein delta | SEQ ID NOS: 12310- |
| | | 12312 |
| SLAMF1 | Signaling lymphocytic activation molecule | SEQ ID NOS: 12313- |
| | family member 1 | 12315 |
| SLAMF7 | SLAM family member 7 | SEQ ID NOS: 12316- |
| | | 12324 |
| SLC10A3 | Solute carrier family 10, member 3 | SEQ ID NOS: 12325- |
| | | 12329 |
| SLC15A3 | Solute carrier family 15 (oligopeptide | SEQ ID NOS: 12330- |
| | transporter), member 3 | 12335 |
| SLC25A14 | Solute carrier family 25 (mitochondrial | SEQ ID NOS: 12336- |
| | carrier, brain), member 14 | 12342 |
| SLC25A25 | Solute carrier family 25 (mitochondrial | SEQ ID NOS: 12343- |
| | carrier; phosphate carrier), member 25 | 12349 |
| SLC2A5 | Solute carrier family 2 (facilitated | SEQ ID NOS: 12350- |
| | glucose/fructose transporter), member 5 | 12358 |
| SLC35E3 | Solute carrier family 35, member E3 | SEQ ID NOS: 12359- |
| | | 12360 |
| SLC39A10 | Solute carrier family 39 (zinc transporter), | SEQ ID NOS: 12361- |
| | member 10 | 12367 |
| SLC39A14 | Solute carrier family 39 (zinc transporter), | SEQ ID NOS: 12368- |
| | member 14 | 12378 |
| SLC39A4 | Solute carrier family 39 (zinc transporter), | SEQ ID NOS: 12379- |
| | member 4 | 12381 |
| SLC39A5 | Solute carrier family 39 (zinc transporter), | SEQ ID NOS: 12382- |
| | member 5 | 12388 |
| SLC3A1 | Solute carrier family 3 (amino acid | SEQ ID NOS: 12389- |
| | transporter heavy chain), member 1 | 12398 |
| SLC51A | Solute carrier family 51, alpha subunit | SEQ ID NOS: 12399- |
| | | 12403 |
| SLC52A2 | Solute carrier family 52 (riboflavin | SEQ ID NOS: 12404- |
| | transporter), member 2 | 12414 |
| SLC5A6 | Solute carrier family 5 | SEQ ID NOS: 12415- |
| | (sodium/multivitamin and iodide | 12425 |
| | cotransporter), member 6 | |
| SLC6A9 | Solute carrier family 6 (neurotransmitter | SEQ ID NOS: 12426- |
| | transporter, glycine), member 9 | 12433 |
| SLC8A1 | Solute carrier family 8 (sodium/calcium | SEQ ID NOS: 12434- |
| | exchanger), member 1 | 12445 |
| SLC8B1 | Solute carrier family 8 | SEQ ID NOS: 12446- |
| | (sodium/lithium/calcium exchanger), | 12456 |
| | member B1 | |
| SLC9A6 | Solute carrier family 9, subfamily A | SEQ ID NOS: 12457- |
| | (NHE6, cation proton antiporter 6), member | 12468 |
| | 6 | |
| SLCO1A2 | Solute carrier organic anion transporter | SEQ ID NOS: 12469- |
| | family, member 1A2 | 12481 |
| SLIT1 | Slit guidance ligand 1 | SEQ ID NOS: 12482- |
| | | 12485 |
| SLIT2 | Slit guidance ligand 2 | SEQ ID NOS: 12486- |
| | | 12494 |
| SLIT3 | Slit guidance ligand 3 | SEQ ID NOS: 12495- |
| | | 12497 |
| SLITRK3 | SLIT and NTRK-like family, member 3 | SEQ ID NOS: 12498- |
| | | 12500 |
| SLPI | Secretory leukocyte peptidase inhibitor | SEQ ID NO: 12501 |
| SLTM | SAFB-like, transcription modulator | SEQ ID NOS: 12502- |
| | | 12515 |
| SLURP1 | Secreted LY6/PLAUR domain containing 1 | SEQ ID NO: 12516 |
| SMARCA2 | SWI/SNF related, matrix associated, actin | SEQ ID NOS: 12517- |
| | dependent regulator of chromatin, subfamily | 12562 |
| | a, member 2 | |
| SMG6 | SMG6 nonsense mediated mRNA decay | SEQ ID NOS: 12563- |
| | factor | 12574 |
| SMIM7 | Small integral membrane protein 7 | SEQ ID NOS: 12575- |
| | | 12591 |
| SMOC1 | SPARC related modular calcium binding 1 | SEQ ID NOS: 12592- |
| | | 12593 |
| SMOC2 | SPARC related modular calcium binding 2 | SEQ ID NOS: 12594- |
| | | 12598 |
| SMPDL3A | Sphingomyelin phosphodiesterase, acid-like | SEQ ID NOS: 12599- |
| | 3A | 12600 |
| SMPDL3B | Sphingomyelin phosphodiesterase, acid-like | SEQ ID NOS: 12601- |
| | 3B | 12605 |
| SMR3A | Submaxillary gland androgen regulated | SEQ ID NO: 12606 |
| | protein 3A | |
| SMR3B | Submaxillary gland androgen regulated | SEQ ID NOS: 12607- |
| | protein 3B | 12609 |
| SNED1 | Sushi, nidogen and EGF-like domains 1 | SEQ ID NOS: 12610- |
| | | 12616 |
| SNTB1 | Syntrophin, beta 1 (dystrophin-associated | SEQ ID NOS: 12617- |
| | protein A1, 59 kDa, basic component 1) | 12619 |
| SNTB2 | Syntrophin, beta 2 (dystrophin-associated | SEQ ID NOS: 12620- |
| | protein A1, 59 kDa, basic component 2) | 12624 |
| SNX14 | Sorting nexin 14 | SEQ ID NOS: 12625- |
| | | 12636 |
| SOD3 | Superoxide dismutase 3, extracellular | SEQ ID NOS: 12637- |
| | | 12638 |
| SOST | Sclerostin | SEQ ID NO: 12639 |
| SOSTDC1 | Sclerostin domain containing 1 | SEQ ID NOS: 12640- |
| | | 12641 |
| SOWAHA | Sosondowah ankyrin repeat domain family | SEQ ID NO: 12642 |
| | member A | |
| SPACA3 | Sperm acrosome associated 3 | SEQ ID NOS: 12643- |
| | | 12645 |
| SPACA4 | Sperm acrosome associated 4 | SEQ ID NO: 12646 |
| SPACA5 | Sperm acrosome associated 5 | SEQ ID NOS: 12647- |
| | | 12648 |
| SPACA5B | Sperm acrosome associated 5B | SEQ ID NO: 12649 |
| SPACA7 | Sperm acrosome associated 7 | SEQ ID NOS: 12650- |
| | | 12653 |
| SPAG11A | Sperm associated antigen 11A | SEQ ID NOS: 12654- |
| | | 12662 |
| SPAG11B | Sperm associated antigen 11B | SEQ ID NOS: 12663- |
| | | 12671 |
| SPARC | Secreted protein, acidic, cysteine-rich | SEQ ID NOS: 12672- |
| | (osteonectin) | 12676 |
| SPARCL1 | SPARC-like 1 (hevin) | SEQ ID NOS: 12677- |
| | | 12686 |
| SPATA20 | Spermatogenesis associated 20 | SEQ ID NOS: 12687- |
| | | 12700 |
| SPESP1 | Sperm equatorial segment protein 1 | SEQ ID NO: 12701 |
| SPINK1 | Serine peptidase inhibitor, Kazal type 1 | SEQ ID NOS: 12702- |
| | | 12703 |
| SPINK13 | Serine peptidase inhibitor, Kazal type 13 | SEQ ID NOS: 12704- |
| | (putative) | 12706 |
| SPINK14 | Serine peptidase inhibitor, Kazal type 14 | SEQ ID NOS: 12707- |
| | (putative) | 12708 |
| SPINK2 | Serine peptidase inhibitor, Kazal type 2 | SEQ ID NOS: 12709- |
| | (acrosin-trypsin inhibitor) | 12714 |
| SPINK4 | Serine peptidase inhibitor, Kazal type 4 | SEQ ID NOS: 12715- |
| | | 12716 |
| SPINK5 | Serine peptidase inhibitor, Kazal type 5 | SEQ ID NOS: 12717- |
| | | 12722 |
| SPINK6 | Serine peptidase inhibitor, Kazal type 6 | SEQ ID NOS: 12723- |
| | | 12725 |
| SPINK7 | Serine peptidase inhibitor, Kazal type 7 | SEQ ID NOS: 12726- |
| | (putative) | 12727 |
| SPINK8 | Serine peptidase inhibitor, Kazal type 8 | SEQ ID NO: 12728 |
| | (putative) | |
| SPINK9 | Serine peptidase inhibitor, Kazal type 9 | SEQ ID NOS: 12729- |
| | | 12730 |
| SPINT1 | Serine peptidase inhibitor, Kunitz type 1 | SEQ ID NOS: 12731- |
| | | 12738 |
| SPINT2 | Serine peptidase inhibitor, Kunitz type, 2 | SEQ ID NOS: 12739- |
| | | 12746 |
| SPINT3 | Serine peptidase inhibitor, Kunitz type, 3 | SEQ ID NO: 12747 |
| SPINT4 | Serine peptidase inhibitor, Kunitz type 4 | SEQ ID NO: 12748 |
| SPOCK1 | Sparc/osteonectin, cwcv and kazal-like | SEQ ID NOS: 12749- |
| | domains proteoglycan (testican) 1 | 12752 |
| SPOCK2 | Sparc/osteonectin, cwcv and kazal-like | SEQ ID NOS: 12753- |
| | domains proteoglycan (testican) 2 | 12756 |
| SPOCK3 | Sparc/osteonectin, cwcv and kazal-like | SEQ ID NOS: 12757- |
| | domains proteoglycan (testican) 3 | 12782 |
| SPON1 | Spondin 1, extracellular matrix protein | SEQ ID NO: 12783 |
| SPON2 | Spondin 2, extracellular matrix protein | SEQ ID NOS: 12784- |
| | | 12793 |
| SPP1 | Secreted phosphoprotein 1 | SEQ ID NOS: 12794- |
| | | 12798 |
| SPP2 | Secreted phosphoprotein 2, 24 kDa | SEQ ID NOS: 12799- |
| | | 12801 |
| SPRN | Shadow of prion protein homolog | SEQ ID NO: 12802 |
| | (zebrafish) | |
| SPRYD3 | SPRY domain containing 3 | SEQ ID NOS: 12803- |
| | | 12806 |
| SPRYD4 | SPRY domain containing 4 | SEQ ID NO: 12807 |
| SPTY2D1-AS1 | SPTY2D1 antisense RNA 1 | SEQ ID NOS: 12808- |
| | | 12813 |
| SPX | Spexin hormone | SEQ ID NOS: 12814- |
| | | 12815 |
| SRGN | Serglycin | SEQ ID NO: 12816 |
| SRL | Sarealumenin | SEQ ID NOS: 12817- |
| | | 12819 |
| SRP14 | Signal recognition particle 14 kDa | SEQ ID NOS: 12820- |
| | (homologous Alu RNA binding protein) | 12823 |
| SRPX | Sushi-repeat containing protein, X-linked | SEQ ID NOS: 12824- |
| | | 12827 |
| SRPX2 | Sushi-repeat containing protein, X-linked 2 | SEQ ID NOS: 12828- |
| | | 12831 |
| SSC4D | Scavenger receptor cysteine rich family, 4 | SEQ ID NO: 12832 |
| | domains | |
| SSC5D | Scavenger receptor cysteine rich family, 5 | SEQ ID NOS: 12833- |
| | domains | 12836 |
| SSPO | SCO-spondin | SEQ ID NO: 12837 |
| SSR2 | Signal sequence receptor, beta (translocon- | SEQ ID NOS: 12838- |
| | associated protein beta) | 12847 |
| SST | Somatostatin | SEQ ID NO: 12848 |
| ST3GAL1 | ST3 beta-galactoside alpha-2,3- | SEQ ID NOS: 12849- |
| | sialyltransferase 1 | 12856 |
| ST3GAL4 | ST3 beta-galactoside alpha-2,3- | SEQ ID NOS: 12857- |
| | sialyltransferase 4 | 12872 |
| ST6GAL1 | ST6 beta-galactosamide alpha-2,6- | SEQ ID NOS: 12873- |
| | sialyltranferase 1 | 12888 |
| ST6GALNAC2 | ST6 (alpha-N-acetyl-neuraminyl-2,3-beta- | SEQ ID NOS: 12889- |
| | galactosyl-1,3)-N-acetylgalactosaminide | 12893 |
| | alpha-2,6-sialyltransferase 2 | |
| ST6GALNAC5 | ST6 (alpha-N-acetyl-neuraminyl-2,3-beta- | SEQ ID NOS: 12894- |
| | galactosyl-1,3)-N-acetylgalactosaminide | 12895 |
| | alpha-2,6-sialyltransferase 5 | |
| ST6GALNAC6 | ST6 (alpha-N-acetyl-neuraminyl-2,3-beta- | SEQ ID NOS: 12896- |
| | galactosyl-1,3)-N-acetylgalactosaminide | 12903 |
| | alpha-2,6-sialyltransferase 6 | |
| ST8SIA2 | ST8 alpha-N-acetyl-neuraminide alpha-2,8- | SEQ ID NOS: 12904- |
| | sialyltransferase 2 | 12906 |
| ST8SIA4 | ST8 alpha-N-acetyl-neuraminide alpha-2,8- | SEQ ID NOS: 12907- |
| | sialyltransferase 4 | 12909 |
| ST8SIA6 | ST8 alpha-N-acetyl-neuraminide alpha-2,8- | SEQ ID NOS: 12910- |
| | sialyltransferase 6 | 12911 |
| STARD7 | StAR-related lipid transfer (START) | SEQ ID NOS: 12912- |
| | domain containing 7 | 12913 |
| STATH | Statherin | SEQ ID NOS: 12914- |
| | | 12916 |
| STC1 | Stanniocalcin 1 | SEQ ID NOS: 12917- |
| | | 12918 |
| STC2 | Stanniocalcin 2 | SEQ ID NOS: 12919- |
| | | 12921 |
| STMND1 | Stathmin domain containing 1 | SEQ ID NOS: 12922- |
| | | 12923 |
| STOML2 | Stomatin (EPB72)-like 2 | SEQ ID NOS: 12926- |
| | | 12929 |
| STOX1 | Storkhead box 1 | SEQ ID NOS: 12930- |
| | | 12934 |
| STRC | Stereocilin | SEQ ID NOS: 12935- |
| | | 12940 |
| SUCLG1 | Succinate-CoA ligase, alpha subunit | SEQ ID NOS: 12941- |
| | | 12942 |
| SUDS3 | SDS3 homolog, SIN3A corepressor | SEQ ID NO: 12943 |
| | complex component | |
| SULF1 | Sulfatase 1 | SEQ ID NOS: 12944- |
| | | 12954 |
| SULF2 | Sulfatase 2 | SEQ ID NOS: 12955- |
| | | 12959 |
| SUMF1 | Sulfatase modifying factor 1 | SEQ ID NOS: 12960- |
| | | 12964 |
| SUMF2 | Sulfatase modifying factor 2 | SEQ ID NOS: 12965- |
| | | 12978 |
| SUSD1 | Sushi domain containing 1 | SEQ ID NOS: 12979- |
| | | 12984 |
| SUSD5 | Sushi domain containing 5 | SEQ ID NOS: 12985- |
| | | 12986 |
| SVEP1 | Sushi, von Willebrand factor type A, EGF | SEQ ID NOS: 12987- |
| | and pentraxin domain containing 1 | 12989 |
| SWSAP1 | SWIM-type zinc finger 7 associated protein | SEQ ID NO: 12990 |
| | 1 | |
| SYAP1 | Synapse associated protein 1 | SEQ ID NO: 12991 |
| SYCN | Syncollin | SEQ ID NO: 12992 |
| TAC1 | Tachykinin, precursor 1 | SEQ ID NOS: 12993- |
| | | 12995 |
| TAC3 | Tachykinin 3 | SEQ ID NOS: 12996- |
| | | 13005 |
| TAC4 | Tachykinin 4 (hemokinin) | SEQ ID NOS: 13006- |
| | | 13011 |
| TAGLN2 | Transgelin 2 | SEQ ID NOS: 13012- |
| | | 13015 |
| TAPBP | TAP binding protein (tapasin) | SEQ ID NOS: 13016- |
| | | 13021 |
| TAPBPL | TAP binding protein-like | SEQ ID NOS: 13022- |
| | | 13023 |
| TBL2 | Transducin (beta)-like 2 | SEQ ID NOS: 13024- |
| | | 13036 |
| TBX10 | T-box 10 | SEQ ID NO: 13037 |
| TCF12 | Transcription factor 12 | SEQ ID NOS: 13038- |
| | | 13051 |
| TCN1 | Transcobalamin I (vitamin B12 binding | SEQ ID NO: 13052 |
| | protein, R binder family) | |
| TCN2 | Transcobalamin II | SEQ ID NOS: 13053- |
| | | 13056 |
| TCTN1 | Tectonic family member 1 | SEQ ID NOS: 13057- |
| | | 13075 |
| TCTN3 | Tectonic family member 3 | SEQ ID NOS: 13076- |
| | | 13080 |
| TDP2 | Tyrosyl-DNA phosphodiesterase 2 | SEQ ID NOS: 13081- |
| | | 13082 |
| TEK | TEK tyrosine kinase, endothelial | SEQ ID NOS: 13097- |
| | | 13101 |
| TEPP | Testis, prostate and placenta expressed | SEQ ID NOS: 13102- |
| | | 13103 |
| TEX101 | Testis expressed 101 | SEQ ID NOS: 13104- |
| | | 13105 |
| TEX264 | Testis expressed 264 | SEQ ID NOS: 13106- |
| | | 13117 |
| TF | Transferrin | SEQ ID NOS: 13121- |
| | | 13127 |
| TFAM | Transcription factor A, mitochondrial | SEQ ID NOS: 13128- |
| | | 13130 |
| TFF1 | Trefoil factor 1 | SEQ ID NO: 13131 |
| TFF2 | Trefoil factor 2 | SEQ ID NO: 13132 |
| TFF3 | Trefoil factor 3 (intestinal) | SEQ ID NOS: 13133- |
| | | 13135 |
| TFPI | Tissue factor pathway inhibitor (lipoprotein- | SEQ ID NOS: 13136- |
| | associated coagulation inhibitor) | 13145 |
| TFPI2 | Tissue factor pathway inhibitor 2 | SEQ ID NOS: 13146- |
| | | 13147 |
| TG | Thyroglobulin | SEQ ID NOS: 13148- |
| | | 13157 |
| TGFB1 | Transforming growth factor, beta 1 | SEQ ID NOS: 13158- |
| | | 13159 |
| TGFB2 | Transforming growth factor, beta 2 | SEQ ID NOS: 13160- |
| | | 13161 |
| TGFB3 | Transforming growth factor, beta 3 | SEQ ID NOS: 13162- |
| | | 13163 |
| TGFBI | Transforming growth factor, beta-induced, | SEQ ID NOS: 13164- |
| | 68 kDa | 13171 |
| TGFBR1 | Transforming growth factor, beta receptor 1 | SEQ ID NOS: 13172- |
| | | 13181 |
| TGFBR3 | Transforming growth factor, beta receptor | SEQ ID NOS: 13182- |
| | III | 13188 |
| THBS1 | Thrombospondin 1 | SEQ ID NOS: 13189- |
| | | 13190 |
| THBS2 | Thrombospondin 2 | SEQ ID NOS: 13191- |
| | | 13193 |
| THBS3 | Thrombospondin 3 | SEQ ID NOS: 13194- |
| | | 13198 |
| THBS4 | Thrombospondin 4 | SEQ ID NOS: 13199- |
| | | 13200 |
| THOC3 | THO complex 3 | SEQ ID NOS: 13201- |
| | | 13210 |
| THPO | Thrombopoietin | SEQ ID NOS: 13211- |
| | | 13216 |
| THSD4 | Thrombospondin, type I, domain containing | SEQ ID NOS: 13217- |
| | 4 | 13220 |
| THY1 | Thy-1 cell surface antigen | SEQ ID NOS: 13221- |
| | | 13226 |
| TIE1 | Tyrosine kinase with immunoglobulin-like | SEQ ID NOS: 13227- |
| | and EGF-like domains 1 | 13228 |
| TIMMDC1 | Translocase of inner mitochondrial | SEQ ID NOS: 13229- |
| | membrane domain containing 1 | 13236 |
| TIMP1 | TIMP metallopeptidase inhibitor 1 | SEQ ID NOS: 13237- |
| | | 13241 |
| TIMP2 | TIMP metallopeptidase inhibitor 2 | SEQ ID NOS: 13242- |
| | | 13246 |
| TIMP3 | TIMP metallopeptidase inhibitor 3 | SEQ ID NO: 13247 |
| TIMP4 | TIMP metallopeptidase inhibitor 4 | SEQ ID NO: 13248 |
| TINAGL1 | Tubulointerstitial nephritis antigen-like 1 | SEQ ID NOS: 13249- |
| | | 13251 |
| TINF2 | TERF1 (TRF1)-interacting nuclear factor 2 | SEQ ID NOS: 13252- |
| | | 13261 |
| TLL2 | Tolloid-like 2 | SEQ ID NO: 13262 |
| TLR1 | Toll-like receptor 1 | SEQ ID NOS: 13263- |
| | | 13268 |
| TLR3 | Toll-like receptor 3 | SEQ ID NOS: 13269- |
| | | 13271 |
| TM2D2 | TM2 domain containing 2 | SEQ ID NOS: 13272- |
| | | 13277 |
| TM2D3 | TM2 domain containing 3 | SEQ ID NOS: 13278- |
| | | 13285 |
| TM7SF3 | Transmembrane 7 superfamily member 3 | SEQ ID NOS: 13286- |
| | | 13300 |
| TM9SF1 | Transmembrane 9 superfamily member 1 | SEQ ID NOS: 13301- |
| | | 13311 |
| TMCO6 | Transmembrane and coiled-coil domains 6 | SEQ ID NOS: 13312- |
| | | 13319 |
| TMED1 | Transmembrane p24 trafficking protein 1 | SEQ ID NOS: 13320- |
| | | 13326 |
| TMED2 | Transmembrane p24 trafficking protein 2 | SEQ ID NOS: 13327- |
| | | 13329 |
| TMED3 | Transmembrane p24 trafficking protein 3 | SEQ ID NOS: 13330- |
| | | 13333 |
| TMED4 | Transmembrane p24 trafficking protein 4 | SEQ ID NOS: 13334- |
| | | 13336 |
| TMED5 | Transmembrane p24 trafficking protein 5 | SEQ ID NOS: 13337- |
| | | 13340 |
| TMED7 | Transmembrane p24 trafficking protein 7 | SEQ ID NOS: 13341- |
| | | 13342 |
| TMED7- | TMED7-TICAM2 readthrough | SEQ ID NOS: 13343- |
| TICAM2 | | 13344 |
| TMEM108 | Transmembrane protein 108 | SEQ ID NOS: 13345- |
| | | 13353 |
| TMEM116 | Transmembrane protein 116 | SEQ ID NOS: 13354- |
| | | 13365 |
| TMEM119 | Transmembrane protein 119 | SEQ ID NOS: 13366- |
| | | 13369 |
| TMEM155 | Transmembrane protein 155 | SEQ ID NOS: 13370- |
| | | 13373 |
| TMEM168 | Transmembrane protein 168 | SEQ ID NOS: 13374- |
| | | 13379 |
| TMEM178A | Transmembrane protein 178A | SEQ ID NOS: 13380- |
| | | 13381 |
| TMEM179 | Transmembrane protein 179 | SEQ ID NOS: 13382- |
| | | 13387 |
| TMEM196 | Transmembrane protein 196 | SEQ ID NOS: 13388- |
| | | 13392 |
| TMEM199 | Transmembrane protein 199 | SEQ ID NOS: 13393- |
| | | 13396 |
| TMEM205 | Transmembrane protein 205 | SEQ ID NOS: 13397- |
| | | 13410 |
| TMEM213 | Transmembrane protein 213 | SEQ ID NOS: 13411- |
| | | 13414 |
| TMEM25 | Transmembrane protein 25 | SEQ ID NOS: 13415- |
| | | 13431 |
| TMEM30C | Transmembrane protein 30C | SEQ ID NO: 13432 |
| TMEM38B | Transmembrane protein 38B | SEQ ID NOS: 13433- |
| | | 13437 |
| TMEM44 | Transmembrane protein 44 | SEQ ID NOS: 13438- |
| | | 13447 |
| TMEM52 | Transmembrane protein 52 | SEQ ID NOS: 13448- |
| | | 13452 |
| TMEM52B | Transmembrane protein 52B | SEQ ID NOS: 13453- |
| | | 13455 |
| TMEM59 | Transmembrane protein 59 | SEQ ID NOS: 13456- |
| | | 13463 |
| TMEM67 | Transmembrane protein 67 | SEQ ID NOS: 13464- |
| | | 13475 |
| TMEM70 | Transmembrane protein 70 | SEQ ID NOS: 13476- |
| | | 13478 |
| TMEM87A | Transmembrane protein 87A | SEQ ID NOS: 13479- |
| | | 13488 |
| TMEM94 | Transmembrane protein 94 | SEQ ID NOS: 13489- |
| | | 13504 |
| TMEM95 | Transmembrane protein 95 | SEQ ID NOS: 13505- |
| | | 13507 |
| TMIGD1 | Transmembrane and immunoglobulin | SEQ ID NOS: 13508- |
| | domain containing 1 | 13509 |
| TMPRSS12 | Transmembrane (C-terminal) protease, | SEQ ID NOS: 13510- |
| | serine 12 | 13511 |
| TMPRSS5 | Transmembrane protease, serine 5 | SEQ ID NOS: 13512- |
| | | 13523 |
| TMUB1 | Transmembrane and ubiquitin-like domain | SEQ ID NOS: 13524- |
| | containing 1 | 13530 |
| TMX2 | Thioredoxin-related transmembrane protein | SEQ ID NOS: 13531- |
| | 2 | 13538 |
| TMX3 | Thioredoxin-related transmembrane protein | SEQ ID NOS: 13539- |
| | 3 | 13546 |
| TNC | Tenascin C | SEQ ID NOS: 13547- |
| | | 13555 |
| TNFAIP6 | Tumor necrosis factor, alpha-induced | SEQ ID NO: 13556 |
| | protein 6 | |
| TNFRSF11A | Tumor necrosis factor receptor superfamily, | SEQ ID NOS: 13557- |
| | member 11a, NFKB activator | 13561 |
| TNFRSF11B | Tumor necrosis factor receptor superfamily, | SEQ ID NOS: 13562- |
| | member 11b | 13563 |
| TNFRSF12A | Tumor necrosis factor receptor superfamily, | SEQ ID NOS: 13564- |
| | member 12A | 13569 |
| TNFRSF14 | Tumor necrosis factor receptor superfamily, | SEQ ID NOS: 13570- |
| | member 14 | 13576 |
| TNFRSF18 | Tumor necrosis factor receptor superfamily, | SEQ ID NOS: 13577- |
| | member 18 | 13580 |
| TNFRSF1A | Tumor necrosis factor receptor superfamily, | SEQ ID NOS: 13581- |
| | member 1A | 13589 |
| TNFRSF1B | Tumor necrosis factor receptor superfamily, | SEQ ID NOS: 13590- |
| | member 1B | 13591 |
| TNFRSF25 | Tumor necrosis factor receptor superfamily, | SEQ ID NOS: 13592- |
| | member 25 | 13603 |
| TNFRSF6B | Tumor necrosis factor receptor superfamily, | SEQ ID NO: 13604 |
| | member 6b, decoy | |
| TNFSF11 | Tumor necrosis factor (ligand) superfamily, | SEQ ID NOS: 13605- |
| | member 11 | 13609 |
| TNFSF12 | Tumor necrosis factor (ligand) superfamily, | SEQ ID NOS: 13610- |
| | member 12 | 13611 |
| TNFSF12- | TNFSF12-TNFSF13 readthrough | SEQ ID NO: 13612 |
| TNFSF13 | | |
| TNFSF15 | Tumor necrosis factor (ligand) superfamily, | SEQ ID NOS: 13613- |
| | member 15 | 13614 |
| TNN | Tenascin N | SEQ ID NOS: 13615- |
| | | 13617 |
| TNR | Tenascin R | SEQ ID NOS: 13618- |
| | | 13620 |
| TNXB | Tenascin XB | SEQ ID NOS: 13621- |
| | | 13627 |
| TOMM7 | Translocase of outer mitochondrial | SEQ ID NOS: 13634- |
| | membrane 7 homolog (yeast) | 13637 |
| TOP1MT | Topoisomerase (DNA) I, mitochondrial | SEQ ID NOS: 13638- |
| | | 13652 |
| TOR1A | Torsin family 1, member A (torsin A) | SEQ ID NO: 13653 |
| TOR1B | Torsin family 1, member B (torsin B) | SEQ ID NOS: 13654- |
| | | 13655 |
| TOR2A | Torsin family 2, member A | SEQ ID NOS: 13656- |
| | | 13662 |
| TOR3A | Torsin family 3, member A | SEQ ID NOS: 13663- |
| | | 13667 |
| TPD52 | Tumor protein D52 | SEQ ID NOS: 13668- |
| | | 13680 |
| TPO | Thyroid peroxidase | SEQ ID NOS: 13681- |
| | | 13691 |
| TPP1 | Tripeptidyl peptidase I | SEQ ID NOS: 13692- |
| | | 13709 |
| TPSAB1 | Tryptase alpha/beta 1 | SEQ ID NOS: 13710- |
| | | 13712 |
| TPSB2 | Tryptase beta 2 (gene/pseudogene) | SEQ ID NOS: 13713- |
| | | 13715 |
| TPSD1 | Tryptase delta 1 | SEQ ID NOS: 13716- |
| | | 13717 |
| TPST1 | Tyrosylprotein sulfotransferase 1 | SEQ ID NOS: 13718- |
| | | 13720 |
| TPST2 | Tyrosylprotein sulfotransferase 2 | SEQ ID NOS: 13721- |
| | | 13729 |
| TRABD2A | TraB domain containing 2A | SEQ ID NOS: 13730- |
| | | 13732 |
| TRABD2B | TraB domain containing 2B | SEQ ID NO: 13733 |
| TREH | Trehalase (brush-border membrane | SEQ ID NOS: 13734- |
| | glycoprotein) | 13736 |
| TREM1 | Triggering receptor expressed on myeloid | SEQ ID NOS: 13737- |
| | cells 1 | 13740 |
| TREM2 | Triggering receptor expressed on myeloid | SEQ ID NOS: 13741- |
| | cells 2 | 13743 |
| TRH | Thyrotropin-releasing hormone | SEQ ID NOS: 13744- |
| | | 13745 |
| TRIM24 | Tripartite motif containing 24 | SEQ ID NOS: 13746- |
| | | 13747 |
| TRIM28 | Tripartite motif containing 28 | SEQ ID NOS: 13748- |
| | | 13753 |
| TRIO | Trio Rho guanine nucleotide exchange | SEQ ID NOS: 13754- |
| | factor | 13760 |
| TRNP1 | TMF1-regulated nuclear protein 1 | SEQ ID NOS: 13761- |
| | | 13762 |
| TSC22D4 | TSC22 domain family, member 4 | SEQ ID NOS: 13763- |
| | | 13766 |
| TSHB | Thyroid stimulating hormone, beta | SEQ ID NOS: 13767- |
| | | 13768 |
| TSHR | Thyroid stimulating hormone receptor | SEQ ID NOS: 13769- |
| | | 13776 |
| TSKU | Tsukushi, small leucine rich proteoglycan | SEQ ID NOS: 13777- |
| | | 13781 |
| TSLP | Thymic stromal lymphopoietin | SEQ ID NOS: 13782- |
| | | 13784 |
| TSPAN3 | Tetraspanin 3 | SEQ ID NOS: 13785- |
| | | 13790 |
| TSPAN31 | Tetraspanin 31 | SEQ ID NOS: 13791- |
| | | 13797 |
| TSPEAR | Thrombospondin-type laminin G domain | SEQ ID NOS: 13798- |
| | and EAR repeats | 13801 |
| TTC13 | Tetratricopeptide repeat domain 13 | SEQ ID NOS: 13802- |
| | | 13808 |
| TTC19 | Tetratricopeptide repeat domain 19 | SEQ ID NOS: 13809- |
| | | 13814 |
| TTC9B | Tetratricopeptide repeat domain 9B | SEQ ID NO: 13815 |
| TTLL11 | Tubulin tyrosine ligase-like family member | SEQ ID NOS: 13816- |
| | 11 | 13820 |
| TTR | Transthyretin | SEQ ID NOS: 13821- |
| | | 13823 |
| TWSG1 | Twisted gastrulation BMP signaling | SEQ ID NOS: 13824- |
| | modulator 1 | 13826 |
| TXNDC12 | Thioredoxin domain containing 12 | SEQ ID NOS: 13827- |
| | (endoplasmic reticulum) | 13829 |
| TXNDC15 | Thioredoxin domain containing 15 | SEQ ID NOS: 13830- |
| | | 13836 |
| TXNDC5 | Thioredoxin domain containing 5 | SEQ ID NOS: 13837- |
| | (endoplasmic reticulum) | 13838 |
| TXNRD2 | Thioredoxin reductase 2 | SEQ ID NOS: 13839- |
| | | 13851 |
| TYRP1 | Tyrosinase-related protein 1 | SEQ ID NOS: 13852- |
| | | 13854 |
| UBAC2 | UBA domain containing 2 | SEQ ID NOS: 13855- |
| | | 13859 |
| UBALD1 | UBA-like domain containing 1 | SEQ ID NOS: 13860- |
| | | 13868 |
| UBAP2 | Ubiquitin associated protein 2 | SEQ ID NOS: 13869- |
| | | 13875 |
| UBXN8 | UBX domain protein 8 | SEQ ID NOS: 13876- |
| | | 13882 |
| UCMA | Upper zone of growth plate and cartilage | SEQ ID NOS: 13883- |
| | matrix associated | 13884 |
| UCN | Urocortin | SEQ ID NO: 13885 |
| UCN2 | Urocortin 2 | SEQ ID NO: 13886 |
| UCN3 | Urocortin 3 | SEQ ID NO: 13887 |
| UGGT2 | UDP-glucose glycoprotein | SEQ ID NOS: 13888- |
| | glucosyltransferase 2 | 13893 |
| UGT1A10 | UDP glucuronosyltransferase 1 family, | SEQ ID NOS: 13894- |
| | polypeptide A10 | 13895 |
| UGT2A1 | UDP glucuronosyltransferase 2 family, | SEQ ID NOS: 13896- |
| | polypeptide A1, complex locus | 13900 |
| UGT2B11 | UDP glucuronosyltransferase 2 family, | SEQ ID NO: 13901 |
| | polypeptide B11 | |
| UGT2B28 | UDP glucuronosyltransferase 2 family, | SEQ ID NOS: 13902- |
| | polypeptide B28 | 13903 |
| UGT2B4 | UDP glucuronosyltransferase 2 family, | SEQ ID NOS: 13904- |
| | polypeptide B4 | 13907 |
| UGT2B7 | UDP glucuronosyltransferase 2 family, | SEQ ID NOS: 13908- |
| | polypeptide B7 | 13911 |
| UGT3A1 | UDP glycosyltransferase 3 family, | SEQ ID NOS: 13912- |
| | polypeptide A1 | 13917 |
| UGT3A2 | UDP glycosyltransferase 3 family, | SEQ ID NOS: 13918- |
| | polypeptide A2 | 13921 |
| UGT8 | UDP glycosyltransferase 8 | SEQ ID NOS: 13922- |
| | | 13924 |
| ULBP3 | UL16 binding protein 3 | SEQ ID NOS: 13925- |
| | | 13926 |
| UMOD | Uromodulin | SEQ ID NOS: 13927- |
| | | 13938 |
| UNC5C | Unc-5 netrin receptor C | SEQ ID NOS: 13939- |
| | | 13943 |
| UPK3B | Uroplakin 3B | SEQ ID NOS: 13944- |
| | | 13946 |
| USP11 | Ubiquitin specific peptidase 11 | SEQ ID NOS: 13947- |
| | | 13950 |
| USP14 | Ubiquitin specific peptidase 14 (tRNA- | SEQ ID NOS: 13951- |
| | guanine transglycosylase) | 13957 |
| USP3 | Ubiquitin specific peptidase 3 | SEQ ID NOS: 13958- |
| | | 13973 |
| UTS2 | Urotensin 2 | SEQ ID NOS: 13984- |
| | | 13986 |
| UTS2B | Urotensin 2B | SEQ ID NOS: 13987- |
| | | 13992 |
| UTY | Ubiquitously transcribed tetratricopeptide | SEQ ID NOS: 13993- |
| | repeat containing, Y-linked | 14005 |
| UXS1 | UDP-glucuronate decarboxylase 1 | SEQ ID NOS: 14006- |
| | | 14013 |
| VASH1 | Vasohibin 1 | SEQ ID NOS: 14014- |
| | | 14016 |
| VCAN | Versican | SEQ ID NOS: 14017- |
| | | 14023 |
| VEGFA | Vascular endothelial growth factor A | SEQ ID NOS: 14024- |
| | | 14049 |
| VEGFB | Vascular endothelial growth factor B | SEQ ID NOS: 14050- |
| | | 14052 |
| VEGFC | Vascular endothelial growth factor C | SEQ ID NO: 14053 |
| VGF | VGF nerve growth factor inducible | SEQ ID NOS: 14055- |
| | | 14057 |
| VIP | Vasoactive intestinal peptide | SEQ ID NOS: 14058- |
| | | 14060 |
| VIPR2 | Vasoactive intestinal peptide receptor 2 | SEQ ID NOS: 14061- |
| | | 14064 |
| VIT | Vitrin | SEQ ID NOS: 14065- |
| | | 14072 |
| VKORC1 | Vitamin K epoxide reductase complex, | SEQ ID NOS: 14073- |
| | subunit 1 | 14080 |
| VLDLR | Very low density lipoprotein receptor | SEQ ID NOS: 14081- |
| | | 14083 |
| VMO1 | Vitelline membrane outer layer 1 homolog | SEQ ID NOS: 14084- |
| | (chicken) | 14087 |
| VNN1 | Vanin 1 | SEQ ID NO: 14088 |
| VNN2 | Vanin 2 | SEQ ID NOS: 14089- |
| | | 14102 |
| VNN3 | Vanin 3 | SEQ ID NOS: 14103- |
| | | 14114 |
| VOPP1 | Vesicular, overexpressed in cancer, | SEQ ID NOS: 14115- |
| | prosurvival protein 1 | 14127 |
| VPREB1 | Pre-B lymphocyte 1 | SEQ ID NOS: 14128- |
| | | 14129 |
| VPREB3 | Pre-B lymphocyte 3 | SEQ ID NOS: 14130- |
| | | 14131 |
| VPS37B | Vacuolar protein sorting 37 homolog B | SEQ ID NOS: 14132- |
| | (S. cerevisiae) | 14134 |
| VPS51 | Vacuolar protein sorting 51 homolog | SEQ ID NOS: 14135- |
| | (S. cerevisiae) | 14146 |
| VSIG1 | V-set and immunoglobulin domain | SEQ ID NOS: 14147- |
| | containing 1 | 14149 |
| VSIG10 | V-set and immunoglobulin domain | SEQ ID NOS: 14150- |
| | containing 10 | 14151 |
| VSTM1 | V-set and transmembrane domain | SEQ ID NOS: 14152- |
| | containing 1 | 14158 |
| VSTM2A | V-set and transmembrane domain | SEQ ID NOS: 14159- |
| | containing 2A | 14162 |
| VSTM2B | V-set and transmembrane domain | SEQ ID NO: 14163 |
| | containing 2B | |
| VSTM2L | V-set and transmembrane domain | SEQ ID NOS: 14164- |
| | containing 2 like | 14166 |
| VSTM4 | V-set and transmembrane domain | SEQ ID NOS: 14167- |
| | containing 4 | 14168 |
| VTN | Vitronectin | SEQ ID NOS: 14169- |
| | | 14170 |
| VWA1 | Von Willebrand factor A domain containing | SEQ ID NOS: 14171- |
| | 1 | 14174 |
| VWA2 | Von Willebrand factor A domain containing | SEQ ID NOS: 14175- |
| | 2 | 14176 |
| VWA5B2 | Von Willebrand factor A domain containing | SEQ ID NOS: 14177- |
| | 5B2 | 14178 |
| VWA7 | Von Willebrand factor A domain containing | SEQ ID NO: 14179 |
| | 7 | |
| VWC2 | Von Willebrand factor C domain containing | SEQ ID NO: 14180 |
| | 2 | |
| VWC2L | Von Willebrand factor C domain containing | SEQ ID NOS: 14181- |
| | protein 2-like | 14182 |
| VWCE | Von Willebrand factor C and EGF domains | SEQ ID NOS: 14183- |
| | | 14187 |
| VWDE | Von Willebrand factor D and EGF domains | SEQ ID NOS: 14188- |
| | | 14193 |
| VWF | Von Willebrand factor | SEQ ID NOS: 14194- |
| | | 14196 |
| WDR25 | WD repeat domain 25 | SEQ ID NOS: 14197- |
| | | 14203 |
| WDR81 | WD repeat domain 81 | SEQ ID NOS: 14204- |
| | | 14213 |
| WDR90 | WD repeat domain 90 | SEQ ID NOS: 14214- |
| | | 14221 |
| WFDC1 | WAP four-disulfide core domain 1 | SEQ ID NOS: 14222- |
| | | 14224 |
| WFDC10A | WAP four-disulfide core domain 10A | SEQ ID NO: 14225 |
| WFDC10B | WAP four-disulfide core domain 10B | SEQ ID NOS: 14226- |
| | | 14227 |
| WFDC11 | WAP four-disulfide core domain 11 | SEQ ID NOS: 14228- |
| | | 14230 |
| WFDC12 | WAP four-disulfide core domain 12 | SEQ ID NO: 14231 |
| WFDC13 | WAP four-disulfide core domain 13 | SEQ ID NO: 14232 |
| WFDC2 | WAP four-disulfide core domain 2 | SEQ ID NOS: 14233- |
| | | 14237 |
| WFDC3 | WAP four-disulfide core domain 3 | SEQ ID NOS: 14238- |
| | | 14241 |
| WFDC5 | WAP four-disulfide core domain 5 | SEQ ID NOS: 14242- |
| | | 14243 |
| WFDC6 | WAP four-disulfide core domain 6 | SEQ ID NOS: 14244- |
| | | 14245 |
| WFDC8 | WAP four-disulfide core domain 8 | SEQ ID NOS: 14246- |
| | | 14247 |
| WFIKKN1 | WAP, follistatin/kazal, immunoglobulin, | SEQ ID NO: 14248 |
| | kunitz and netrin domain containing 1 | |
| WFIKKN2 | WAP, follistatin/kazal, immunoglobulin, | SEQ ID NOS: 14249- |
| | kunitz and netrin domain containing 2 | 14250 |
| WIF1 | WNT inhibitory factor 1 | SEQ ID NOS: 14255- |
| | | 14257 |
| WISP1 | WNT1 inducible signaling pathway protein | SEQ ID NOS: 14258- |
| | 1 | 14262 |
| WISP2 | WNT1 inducible signaling pathway protein | SEQ ID NOS: 14263- |
| | 2 | 14265 |
| WISP3 | WNT1 inducible signaling pathway protein | SEQ ID NOS: 14266- |
| | 3 | 14273 |
| WNK1 | WNK lysine deficient protein kinase 1 | SEQ ID NOS: 14274- |
| | | 14287 |
| WNT1 | Wingless-type MMTV integration site | SEQ ID NOS: 14288- |
| | family, member 1 | 14289 |
| WNT10B | Wingless-type MMTV integration site | SEQ ID NOS: 14290- |
| | family, member 10B | 14294 |
| WNT11 | Wingless-type MMTV integration site | SEQ ID NOS: 14295- |
| | family, member 11 | 14297 |
| WNT16 | Wingless-type MMTV integration site | SEQ ID NOS: 14298- |
| | family, member 16 | 14299 |
| WNT2 | Wingless-type MMTV integration site | SEQ ID NOS: 14300- |
| | family member 2 | 14302 |
| WNT3 | Wingless-type MMTV integration site | SEQ ID NO: 14303 |
| | family, member 3 | |
| WNT3A | Wingless-type MMTV integration site | SEQ ID NO: 14304 |
| | family, member 3A | |
| WNT5A | Wingless-type MMTV integration site | SEQ ID NOS: 14305- |
| | family, member 5A | 14308 |
| WNT5B | Wingless-type MMTV integration site | SEQ ID NOS: 14309- |
| | family, member 5B | 14315 |
| WNT6 | Wingless-type MMTV integration site | SEQ ID NO: 14316 |
| | family, member 6 | |
| WNT7A | Wingless-type MMTV integration site | SEQ ID NO: 14317 |
| | family, member 7A | |
| WNT7B | Wingless-type MMTV integration site | SEQ ID NOS: 14318- |
| | family, member 7B | 14322 |
| WNT8A | Wingless-type MMTV integration site | SEQ ID NOS: 14323- |
| | family, member 8A | 14326 |
| WNT8B | Wingless-type MMTV integration site | SEQ ID NO: 14327 |
| | family, member 8B | |
| WNT9A | Wingless-type MMTV integration site | SEQ ID NO: 14328 |
| | family, member 9A | |
| WNT9B | Wingless-type MMTV integration site | SEQ ID NOS: 14329- |
| | family, member 9B | 14331 |
| WSB1 | WD repeat and SOCS box containing 1 | SEQ ID NOS: 14332- |
| | | 14341 |
| WSCD1 | WSC domain containing 1 | SEQ ID NOS: 14342- |
| | | 14351 |
| WSCD2 | WSC domain containing 2 | SEQ ID NOS: 14352- |
| | | 14355 |
| XCL1 | Chemokine (C motif) ligand 1 | SEQ ID NO: 14356 |
| XCL2 | Chemokine (C motif) ligand 2 | SEQ ID NO: 14357 |
| XPNPEP2 | X-prolyl aminopeptidase (aminopeptidase | SEQ ID NOS: 14358- |
| | P) 2, membrane-bound | 14359 |
| XXbac- | | SEQ ID NOS: 679- 680 |
| BPG116M5.17 | | |
| XXbac- | | SEQ ID NO: 681 |
| BPG181M17.5 | | |
| XXbac- | | SEQ ID NO: 682 |
| BPG32J3.20 | | |
| XXYLT1 | Xyloside xylosyltransferase 1 | SEQ ID NOS: 14360- |
| | | 14365 |
| XYLT1 | Xylosyltransferase I | SEQ ID NO: 14366 |
| XYLT2 | Xylosyltransferase II | SEQ ID NOS: 14367- |
| | | 14372 |
| ZFYVE21 | Zinc finger, FYVE domain containing 21 | SEQ ID NOS: 14373- |
| | | 14377 |
| ZG16 | Zymogen granule protein 16 | SEQ ID NO: 14378 |
| ZG16B | Zymogen granule protein 16B | SEQ ID NOS: 14379- |
| | | 14382 |
| ZIC4 | Zic family member 4 | SEQ ID NOS: 14383- |
| | | 14391 |
| ZNF207 | Zinc finger protein 207 | SEQ ID NOS: 14392- |
| | | 14402 |
| ZNF26 | Zinc finger protein 26 | SEQ ID NOS: 14403- |
| | | 14406 |
| ZNF34 | Zinc finger protein 34 | SEQ ID NOS: 14407- |
| | | 14410 |
| ZNF419 | Zinc finger protein 419 | SEQIDNOS: 14411- |
| | | 14425 |
| ZNF433 | Zinc finger protein 433 | SEQ ID NOS: 14426- |
| | | 14435 |
| ZNF449 | Zinc finger protein 449 | SEQ ID NOS: 14436- |
| | | 14437 |
| ZNF488 | Zinc finger protein 488 | SEQ ID NOS: 14438- |
| | | 14439 |
| ZNF511 | Zinc finger protein 511 | SEQ ID NOS: 14440- |
| | | 14441 |
| ZNF570 | Zinc finger protein 570 | SEQ ID NOS: 14442- |
| | | 14447 |
| ZNF691 | Zinc finger protein 691 | SEQ ID NOS: 14448- |
| | | 14455 |
| ZNF98 | Zinc finger protein 98 | SEQ ID NOS: 14456- |
| | | 14459 |
| ZPBP | Zona pellucida binding protein | SEQ ID NOS: 14460- |
| | | 14463 |
| ZPBP2 | Zona pellucida binding protein 2 | SEQ ID NOS: 14464- |
| | | 14467 |
| ZSCAN29 | Zinc finger and SCAN domain containing | SEQ ID NOS: 14468- |
| | 29 | 14474 |

### Cas-Clover

[0738] The disclosure provides a composition comprising a guide RNA and a fusion protein or a sequence encoding the fusion protein wherein the fusion protein comprises a dCas9 and a Clo051 endonuclease or a nuclease domain thereof.

### Small Cas9 (SaCas9)

[0739] The disclosure provides compositions comprising a small, Cas9 (Cas9) operatively-linked to an effector. In certain embodiments, the disclosure provides a fusion protein comprising, consisting essentially of or consisting of a DNA localization component and an effector molecule, wherein the effector comprises a small, Cas9 (Cas9). In certain embodiments, a small Cas9 construct of the disclosure may comprise an effector comprising a type IIS endonuclease.

[0740] Amino acid sequence of Staphylococcus aureus Cas9 with an active catalytic site.

```
(SEQ ID NO: 18052)
      1 mkrnyilgld igitsvgygi idyetrdvid agvrlfkean
          vennegrrsk rgarrlkrrr
    61 rhriqrvkkl lfdynlltdh selsginpye arvkglsqkl
          seeefsaall hlakrrgvhn
  121 vneveedtgn elstkeqisr nskaleekyv aelqlerlkk
          dgevrgsinr fktsdyvkea
  181 kqllkvqkay hqldqsfidt yidlletrrt yyegpgegsp
          fgwkdikewy emlmghctyf
  241 peelrsvkya ynadlynaln dlnnlvitrd enekleyyek
          fqiienvfkq kkkptlkqia
  301 keilvneedi kgyrvtstgk peftnlkvyh dikditarke
          iienaelldq iakiltiyqs
  361 sediqeeltn lnseltqeei eqisnlkgyt gthnlslkai
          nlildelwht ndnqiaifnr
  421 lklvpkkvd1 sqqkeipttl vddfilspvv krsfiqsikv
          inaiikkygl pndiiielar
  481 eknskdaqkm inemqkrnrq tnerieeiir ttgkenakyl
          iekiklhdmq egkclyslea
  541 ipledllnnp fnyevdhiip rsysfdnsfn nkvlvkqeen
          skkgnrtpfq ylsssdskis
  601 yetfkkhiln lakgkgrisk tkkeylleer dinrfsvqkd
          finrnlvdtr yatrglmnll
  661 rsyfrvnnld vkvksinggf tsflrrkwkf kkernkgykh
          haedaliian adfifkewkk
  721 ldkakkvmen qmfeekqaes mpeieteqey keifitphqi
          khikdfkdyk yshrvdkkpn
  781 relindtlys trkddkgntl ivnnlnglyd kdndklkkli
          nkspekllmy hhdpqtyqkl
  841 klimeqygde knplykyyee tgnyltkysk kdngpvikki
          kyygnklnah lditddypns
  901 rnkvvklslk pyrfdvyldn gvykfvtvkn ldvikkenyy
          evnskcyeea kklkkisnqa
  961 efiasfynnd likingelyr vigvnndlln rievnmidit
          yreylenmnd krppriikti
1021 asktqsikky stdilgnlye vkskkhpqii kkg
```

Inactivated, Small Cas9 (dSaCas9)

[0741] The disclosure provides compositions comprising an inactivated, small, Cas9 (dSaCas9) operatively-linked to an effector. In certain embodiments, the disclosure provides a fusion protein comprising, consisting essentially of or consisting of a DNA localization component and an effector molecule, wherein the effector comprises a small, inactivated Cas9 (dSaCas9). In certain embodiments, a small, inactivated Cas9 (dSaCas9) construct of the disclosure may comprise an effector comprising a type IIS endonuclease.

[0742] dSaCas9 Sequence: D10A and N580A mutations (bold, capitalized, and underlined) inactivate the catalytic site.

```
(SEQ ID NO: 18053)
      1 mkrnyilglA igitsvgygi idyetrdvid agvrlfkean
          vennegrrsk rgarrlkrrr
    61 rhriqrvkkl lfdynlltdh selsginpye arvkglsqkl
          seeefsaall hlakrrgvhn
  121 vneveedtgn elstkeqisr nskaleekyv aelqlerlkk
          dgevrgsinr fktsdyvkea
  181 kqllkvqkay hqldqsfidt yidlletrrt yyegpgegsp
          fgwkdikewy emlmghctyf
  241 peelrsvkya ynadlynaln dlnnlvitrd enekleyyek
          fqiienvfkq kkkptlkqia
  301 keilvneedi kgyrvtstgk peftnlkvyh dikditarke
          iienaelldq iakiltiyqs
  361 sediqeeltn lnseltqeei eqisnlkgyt gthnlslkai
          nlildelwht ndnqiaifnr
  421 lklvpkkvd1 sqqkeipttl vddfilspvv krsfiqsikv
          inaiikkygl pndiiielar
  481 eknskdaqkm inemqkrnrq tnerieeiir ttgkenakyl
          iekiklhdmq egkclyslea
  541 ipledllnnp fnyevdhiip rsysfdnsfn nkvlvkqeeA
          skkgnrtpfq ylsssdskis
  601 yetfkkhiln lakgkgrisk tkkeylleer dinrfsvqkd
          finrnlvdtr yatrglmnll
  661 rsyfrvnnld vkvksinggf tsflrrkwkf kkernkgykh
          haedaliian adfifkewkk
  721 ldkakkvmen qmfeekqaes mpeieteqey keifitphqi
          khikdfkdyk yshrvdkkpn
  781 relindtlys trkddkgntl ivnnlnglyd kdndklkkli
          nkspekllmy hhdpqtyqkl
  841 klimeqygde knplykyyee tgnyltkysk kdngpvikki
          kyygnklnah lditddypns
  901 rnkvvklslk pyrfdvyldn gvykfvtvkn ldvikkenyy
          evnskcyeea kklkkisnqa
  961 efiasfynnd likingelyr vigvnndlln rievnmidit
          yreylenmnd krppriikti
1021 asktqsikky stdilgnlye vkskkhpqii kkg
```

Inactivated Cas9 (dCas9)

[0743] The disclosure provides compositions comprising an inactivated Cas9 (dCas9) operatively-linked to an effector. In certain embodiments, the disclosure provides a fusion protein comprising, consisting essentially of or consisting of a DNA localization component and an effector molecule, wherein the effector comprises an inactivated Cas9 (dCas9). In certain embodiments, an inactivated Cas9 (dCas9) construct of the disclosure may comprise an effector comprising a type IIS endonuclease.

[0744] In certain embodiments, the dCas9 of the disclosure comprises a dCas9 isolated or derived from Staphyloccocus pyogenes. In certain embodiments, the dCas9 comprises a dCas9 with substitutions at positions 10 and 840 of the amino acid sequence of the dCas9 which inactivate the catalytic site. In certain embodiments, these substitutions are D10A and H840A. In certain embodiments, the amino acid sequence of the dCas9 comprises the sequence of:

```
(SEQ ID NO: 18054)
      1 XDKKYSIGLA IGTNSVGWAV ITDEYKVPSK KFKVLGNTDR
          HSIKKNLIGA LLFDSGETAE
    61 ATRLKRTARR RYTRRKNRIC YLQEIFSNEM AKVDDSFFHR
          LEESFLVEED KKHERHPIFG
  121 NIVDEVAYHE KYPTIYHLRK KLVDSTDKAD LRLIYLALAH
          MIKFRGHFLI EGDLNPDNSD
  181 VDKLFIQLVQ TYNQLFEENP INASGVDAKA ILSARLSKSR
          RLENLIAQLP GEKKNGLFGN
  241 LIALSLGLTP NFKSNFDLAE DAKLQLSKDT YDDDLDNLLA
          QIGDQYADLF LAAKNLSDAI
  301 LLSDILRVNT EITKAPLSAS MIKRYDEHHQ DLTLLKALVR
          QQLPEKYKEI FFDQSKNGYA
  361 GYIDGGASQE EFYKFIKPIL EKMDGTEELL VKLNREDLLR
          KQRTFDNGSI PHQIHLGELH
  421 AILRRQEDFY PFLKDNREKI EKILTFRIPY YVGPLARGNS
          RFAWMTRKSE ETITPWNFEE
  481 VVDKGASAQS FIERMTNFDK NLPNEKVLPK HSLLYEYFTV
          YNELTKVKYV TEGMRKPAFL
  541 SGEQKKAIVD LLFKTNRKVT VKQLKEDYFK KIECFDSVEI
          SGVEDRFNAS LGTYHDLLKI
  601 IKDKDFLDNE ENEDILEDIV LTLTLFEDRE MIEERLKTYA
          HLFDDKVMKQ LKRRRYTGWG
  661 RLSRKLINGI RDKQSGKTIL DFLKSDGFAN RNFMQLIHDD
          SLTFKEDIQK AQVSGQGDSL
  721 HEHIANLAGS PAIKKGILQT VKVVDELVKV MGRHKPENIV
          IEMARENQTT QKGQKNSRER
  781 MKRIEEGIKE LGSQILKEHP VENTQLQNEK LYLYYLQNGR
          DMYVDQELDI NRLSDYDVDA
  841 IVPQSFLKDD SIDNKVLTRS DKNRGKSDNV PSEEVVKKMK
          NYWRQLLNAK LITQRKFDNL
  901 TKAERGGLSE LDKAGFIKRQ LVETRQITKH VAQILDSRMN
          TKYDENDKLI REVKVITLKS
  961 KLVSDFRKDF QFYKVREINN YHHAHDAYLN AVVGTALIKK
          YPKLESEFVY GDYKVYDVRK
1021 MIAKSEQEIG KATAKYFFYS NIMNFFKTEI TLANGEIRKR
          PLIETNGETG EIVWDKGRDF
1081 ATVRKVLSMP QVNIVKKTEV QTGGFSKESI LPKRNSDKLI
          ARKKDWDPKK YGGFDSPTVA
1141 YSVLVVAKVE KGKSKKLKSV KELLGITIME RSSFEKNPID
          FLEAKGYKEV KKDLIIKLPK
1201 YSLFELENGR KRMLASAGEL QKGNELALPS KYVNFLYLAS
          HYEKLKGSPE DNEQKQLFVE
1261 QHKHYLDEII EQISEFSKRV ILADANLDKV LSAYNKHRDK
          PIREQAENII HLFTLTNLGA
1321 PAAFKYFDTT IDRKRYTSTK EVLDATLIHQ SITGLYETRI
          DLSQLGGD.
```

[0745] In certain embodiments, the amino acid sequence of the dCas9 comprises the sequence of:

```
(SEQ ID NO: 18055)
      1 MDKKYSIGLA IGTNSVGWAV ITDEYKVPSK KFKVLGNTDR
          HSIKKNLIGA LLFDSGETAE
    61 ATRLKRTARR RYTRRKNRIC YLQEIFSNEM AKVDDSFFHR
          LEESFLVEED KKHERHPIFG
  121 NIVDEVAYHE KYPTIYHLRK KLVDSTDKAD LRLIYLALAH
          MIKFRGHFLI EGDLNPDNSD
  181 VDKLFIQLVQ TYNQLFEENP INASGVDAKA ILSARLSKSR
          RLENLIAQLP GEKKNGLFGN
  241 LIALSLGLTP NFKSNFDLAE DAKLQLSKDT YDDDLDNLLA
          QIGDQYADLF LAAKNLSDAI
  301 LLSDILRVNT EITKAPLSAS MIKRYDEHHQ DLTLLKALVR
          QQLPEKYKEI FFDQSKNGYA
  361 GYIDGGASQE EFYKFIKPIL EKMDGTEELL VKLNREDLLR
          KQRTFDNGSI PHQIHLGELH
  421 AILRRQEDFY PFLKDNREKI EKILTFRIPY YVGPLARGNS
          RFAWMTRKSE ETITPWNFEE
  481 VVDKGASAQS FIERMTNFDK NLPNEKVLPK HSLLYEYFTV
          YNELTKVKYV TEGMRKPAFL
  541 SGEQKKAIVD LLFKTNRKVT VKQLKEDYFK KIECFDSVEI
          SGVEDRFNAS LGTYHDLLKI
  601 IKDKDFLDNE ENEDILEDIV LTLTLFEDRE MIEERLKTYA
          HLFDDKVMKQ LKRRRYTGWG
  661 RLSRKLINGI RDKQSGKTIL DFLKSDGFAN RNFMQLIHDD
          SLTFKEDIQK AQVSGQGDSL
  721 HEHIANLAGS PAIKKGILQT VKVVDELVKV MGRHKPENIV
          IEMARENQTT QKGQKNSRER
  781 MKRIEEGIKE LGSQILKEHP VENTQLQNEK LYLYYLQNGR
          DMYVDQELDI NRLSDYDVDA
  841 IVPQSFLKDD SIDNKVLTRS DKNRGKSDNV PSEEVVKKMK
          NYWRQLLNAK LITQRKFDNL
  901 TKAERGGLSE LDKAGFIKRQ LVETRQITKH VAQILDSRMN
          TKYDENDKLI REVKVITLKS
  961 KLVSDFRKDF QFYKVREINN YHHAHDAYLN AVVGTALIKK
          YPKLESEFVY GDYKVYDVRK
1021 MIAKSEQEIG KATAKYFFYS NIMNFFKTEI TLANGEIRKR
          PLIETNGETG EIVWDKGRDF
1081 ATVRKVLSMP QVNIVKKTEV QTGGFSKESI LPKRNSDKLI
          ARKKDWDPKK YGGFDSPTVA
1141 YSVLVVAKVE KGKSKKLKSV KELLGITIME RSSFEKNPID
          FLEAKGYKEV KKDLIIKLPK
1201 YSLFELENGR KRMLASAGEL QKGNELALPS KYVNFLYLAS
          HYEKLKGSPE DNEQKQLFVE
1261 QHKHYLDEII EQISEFSKRV ILADANLDKV LSAYNKHRDK
          PIREQAENII HLFTLTNLGA
1321 PAAFKYFDTT IDRKRYTSTK EVLDATLIHQ SITGLYETRI
          DLSQLGGD.
```

### Clo051 Endonuclease

[0746] An exemplary Clo051 nuclease domain may comprise, consist essentially of or consist of, the amino acid sequence of:

(SEQ ID NO: 18056)
EGIKSNISLLKDELRGQISHISHEYLSLIDLAFDSKQNRLFEMKVLE
LLVNEYGFKGRHLGGSRKPDGIVYSTTLEDNFGIIVDTKAYSEGYSL
PISQADEMERYVRENSNRDEEVNPNKWWENFSEEVKKYYFVFISGSF
KGKFEEQLRRLSMTTGVNGSAVNVVNLLLGAEKIRSGEMTIEELERA
MFNNSEFILKY.

### Cas-Clover Fusion Protein

[0747] In certain embodiments, an exemplary dCas9-Clo051 fusion protein (embodiment 1) may comprise, consist essentially of or consist of, the amino acid sequence of (Clo051 sequence underlined, linker bold italics, dCas9 sequence (Streptoccocus pyogenes) in italics):

(SEQ ID NO: 18057)
MAPKKKRKVEGIKSNISLLKDELRGQISHISHEYLSLIDLAFDSK
QNRLFEMKVLELLVNEYGFKGRHLGGSRKPDGIVYSTTLEDNFGI
IVDTKAYSEGYSLPISQADEMERYVRENSNRDEEVNPNKWWENFS
EEVKKYYFVFISGSFKGKFEEQLRRLSMTTGVNGSAVNVVNLLLG
AEKIRSGEMTIEELERAMFNNSEFILKY [symbol] DKKYSIGLAIGT
NSVGWAVITDEYKVPSKKFKVLGNTDRHSIKKNLIGALLFDSGET
AEATRLKRTARRRYTRRKNRICYLQEIFSNEMAKVDDSFEHRLEE
SELVEEDKKHERHPIFGNIVDEVAYHEKYPTIYHLRKKLVDSTDK
ADLRLIYLALAHMIKFRGHFLIEGDLNPDNSDVDKLFIQLVQTYN
QLFEENPINASGVDAKAILSARLSKSRRLENLIAQLPGEKKNGLF
GNLIALSLGLTPNEKSNFDLAEDAKLQLSKDTYDDDLDNLLAQIG
DQYADLFLAAKNLSDAILLSDILRVNTEITKAPLSASMIKRYDEH
HQDLTLLKALVRQQLPEKYKEIFFDQSKNGYAGYIDGGASQEEFY
KFIKPILEKMDGTEELLVKLNREDLLRKQRTEDNGSIPHQIHLGE
LHAILRRQEDFYPFLKDNREKIEKILTFRIPYYVGPLARGNSRFA
WMTRKSEETITPWNFEEVVDKGASAQSFIERMTNFDKNLPNEKVL
PKHSLLYEYFTVYNELTKVKYVTEGMRKPAFLSGEQKKAIVDLLF
KTNRKVTVKQLKEDYFKKIECFDSVEISGVEDRFNASLGTYHDLL
KIIKDKDFLDNEENEDILEDIVLTLTLFEDREMIEERLKTYAHLF
DDKVMKQLKRRRYTGWGRLSRKLINGIRDKQSGKTILDFLKSDGF
ANRNFMQLIHDDSLTFKEDIQKAQVSGQGDSLHEHIANLAGSPAI
KKGILQTVKVVDELVKVMGRHKPENIVIEMARENQTTQKGQKNSR
ERMKRIEEGIKELGSQILKEHPVENTQLQNEKLYLYYLQNGRDMY
VDQELDINRLSDYDVDAIVPQSFLKDDSIDNKVLTRSDKNRGKSD
NVPSEEVVKKMKNYWRQLLNAKLITQRKEDNLTKAERGGLSELDK
AGFIKRQLVETRQITKHVAQILDSRMNTKYDENDKLIREVKVITL
KSKLVSDFRKDFQFYKVREINNYHHAHDAYLNAVVGTALIKKYPK
LESEFVYGDYKVYDVRKMIAKSEQEIGKATAKYFFYSNIMNFFKT
EITLANGEIRKRPLIETNGETGEIVWDKGRDFATVRKVLSMPQVN
IVKKTEVQTGGESKESILPKRNSDKLIARKKDWDPKKYGGFDSPT
VAYSVLVVAKVEKGKSKKLKSVKELLGITIMERSSFEKNPIDFLE
AKGYKEVKKDLIIKLPKYSLFELENGRKRMLASAGELQKGNELAL
PSKYVNFLYLASHYEKLKGSPEDNEQKQLFVEQHKHYLDEIIEQI
SEFSKRVILADANLDKVLSAYNKHRDKPIREQAENIIHLFTLTNL
GAPAAFKYFDTTIDRKRYTSTKEVLDATLIHQSITGLYETRIDLS
QLGGDGSPKKKRKVSS.

[0748] In certain embodiments, an exemplary dCas9-Clo051 fusion protein (embodiment 1) may comprise, consist essentially of or consist of, the nucleic acid sequence of (dCas9 sequence derived from Streptoccocus pyogenes):

```
(SEQ ID NO: 18054)
      1 atggcaccaa agaagaaaag aaaagtggag ggcatcaagt caaacatcag cctgctgaaa
    61 gacgaactgc ggggacagat tagtcacatc agtcacgagt acctgtcact gattgatctg
  121 gccttcgaca gcaagcagaa tagactgttt gagatgaaag tgctggaact gctggtcaac
  181 gagtatggct tcaagggcag acatctgggc gggtctagga aacctgacgg catcgtgtac
  241 agtaccacac tggaagacaa cttcggaatc attgtcgata ccaaggctta ttccgagggc
  301 tactctctgc caattagtca ggcagatgag atggaaaggt acgtgcgcga aaactcaaat
  361 agggacgagg aagtcaaccc caataagtgg tgggagaatt tcagcgagga agtgaagaaa
  421 tactacttcg tctttatctc aggcagcttc aaagggaagt ttgaggaaca gctgcggaga
  481 ctgtccatga ctaccggggt gaacggatct gctgtcaacg tggtcaatct gctgctgggc
  541 gcagaaaaga tcaggtccgg ggagatgaca attgaggaac tggaacgcgc catgttcaac
  601 aattctgagt ttatcctgaa gtatggaggc gggggaagcg ataagaaata ctccatcgga
  661 ctggccattg gcaccaattc cgtgggctgg gctgtcatca cagacgagta caaggtgcca
  721 agcaagaagt tcaaggtcct ggggaacacc gatcgccaca gtatcaagaa aaatctgatt
  781 ggagccctgc tgttcgactc aggcgagact gctgaagcaa cccgactgaa gcggactgct
  841 aggcgccgat atacccggag aaaaaatcgg atctgctacc tgcaggaaat tttcagcaac
  901 gagatggcca aggtggacga tagtttcttt caccgcctgg aggaatcatt cctggtggag
  961 gaagataaga aacacgagcg gcatcccatc tttggcaaca ttgtggacga agtcgcttat
1021 cacgagaagt accctactat ctatcatctg aggaagaaac tggtggactc caccgataag
1081 gcagacctgc gcctgatcta tctggccctg gctcacatga tcaagttccg ggggcatttt
1141 ctgatcgagg gagatctgaa ccctgacaat tctgatgtgg acaagctgtt catccagctg
1201 gtccagacat acaatcagct gtttgaggaa aacccaatta atgcctcagg cgtggacgca
1261 aaggccatcc tgagcgccag actgtccaaa tctaggcgcc tggaaaacct gatcgctcag
1321 ctgccaggag agaagaaaaa cggcctgttt gggaatctga ttgcactgtc cctgggcctg
1381 acacccaact tcaagtctaa ttttgatctg gccgaggacg ctaagctgca gctgtccaaa
1441 gacacttatg acgatgacct ggataacctg ctggctcaga tcggcgatca gtacgcagac
1501 ctgttcctgg ccgctaagaa tctgagtgac gccatcctgc tgtcagatat tctgcgcgtg
1561 aacacagaga ttactaaggc cccactgagt gcttcaatga tcaaaagata tgacgagcac
1621 catcaggatc tgaccctgct gaaggctctg gtgaggcagc agctgcccga gaaatacaag
1681 gaaatcttct ttgatcagag caagaatgga tacgccggct atattgacgg cggggcttcc
1741 caggaggagt tctacaagtt catcaagccc attctggaaa agatggacgg caccgaggaa
1801 ctgctggtga agctgaatcg ggaggacctg ctgagaaaac agaggacatt tgataacgga
1861 agcatccctc accagattca tctgggcgaa ctgcacgcca tcctgcgacg gcaggaggac
1921 ttctacccat ttctgaagga taaccgcgag aaaatcgaaa agatcctgac cttcagaatc
1981 ccctactatg tggggcctct ggcacgggga aatagtagat ttgcctggat gacaagaaag
2041 tcagaggaaa ctatcacccc ctggaacttc gaggaagtgg tcgataaagg cgctagcgca
2101 cagtccttca ttgaaaggat gacaaatttt gacaagaacc tgccaaatga gaaggtgctg
2161 cccaaacaca gcctgctgta cgaatatttc acagtgtata acgagctgac taaagtgaag
2221 tacgtcaccg aagggatgcg caagcccgca ttcctgtccg gagagcagaa gaaagccatc
2281 gtggacctgc tgtttaagac aaatcggaaa gtgactgtca aacagctgaa ggaagactat
2341 ttcaagaaaa ttgagtgttt cgattcagtg gaaatcagcg gcgtcgagga caggtttaac
2401 gcctccctgg ggacctacca cgatctgctg aagatcatca aggataagga cttcctggac
2461 aacgaggaaa atgaggacat cctggaggac attgtgctga cactgactct gtttgaggat
2521 cgcgaaatga tcgaggaacg actgaagact tatgcccatc tgttcgatga caaagtgatg
2581 aagcagctga aaagaaggcg ctacaccgga tggggacgcc tgagccgaaa actgatcaat
2641 gggattagag acaagcagag cggaaaaact atcctggact ttctgaagtc cgatggcttc
2701 gccaacagga acttcatgca gctgattcac gatgactctc tgaccttcaa ggaggacatc
2761 cagaaagcac aggtgtctgg ccagggggac agtctgcacg agcatatcgc aaacctggcc
2821 ggcagccccg ccatcaagaa agggattctg cagaccgtga aggtggtgga cgaactggtc
2881 aaggtcatgg gacgacacaa acctgagaac atcgtgattg agatggcccg cgaaaatcag
2941 acaactcaga agggccagaa aaacagtcga gaacggatga agagaatcga ggaaggcatc
3001 aaggagctgg ggtcacagat cctgaaggag catcctgtgg aaaacactca gctgcagaat
3061 gagaaactgt atctgtacta tctgcagaat ggacgggata tgtacgtgga ccaggagctg
3121 gatattaaca gactgagtga ttatgacgtg gatgccatcg tccctcagag cttcctgaag
3181 gatgactcca ttgacaacaa ggtgctgacc aggtccgaca agaaccgcgg caaatcagat
3241 aatgtgccaa gcgaggaagt ggtcaagaaa atgaagaact actggaggca gctgctgaat
3301 gccaagctga tcacacagcg gaaatttgat aacctgacta aggcagaaag aggaggcctg
3361 tctgagctgg acaaggccgg cttcatcaag cggcagctgg tggagacaag acagatcact
3421 aagcacgtcg ctcagattct ggatagcaga atgaacacaa agtacgatga aaacgacaag
3481 ctgatcaggg aggtgaaagt cattactctg aaatccaagc tggtgtctga ctttagaaag
3541 gatttccagt tttataaagt cagggagatc aacaactacc accatgctca tgacgcatac
3601 ctgaacgcag tggtcgggac cgccctgatt aagaaatacc ccaagctgga gtccgagttc
3661 gtgtacggag actataaagt gtacgatgtc cggaagatga tcgccaaatc tgagcaggaa
3721 attggcaagg ccaccgctaa gtatttcttt tacagtaaca tcatgaattt ctttaagacc
3781 gaaatcacac tggcaaatgg ggagatcaga aaaaggcctc tgattgagac caacggggag
3841 acaggagaaa tcgtgtggga caagggaagg gattttgcta ccgtgcgcaa agtcctgtcc
3901 atgccccaag tgaatattgt caagaaaact gaagtgcaga ccgggggatt ctctaaggag
3961 agtattctgc ctaagcgaaa ctctgataaa ctgatcgccc ggaagaaaga ctgggacccc
4021 aagaagtatg gcgggttcga ctctccaaca gtggcttaca gtgtcctggt ggtcgcaaag
4081 gtggaaaagg ggaagtccaa gaaactgaag tctgtcaaag agctgctggg aatcactatt
4141 atggaacgca gctccttcga gaagaatcct atcgattttc tggaagccaa gggctataaa
4201 gaggtgaaga aagacctgat cattaagctg ccaaaatact cactgtttga gctggaaaac
4261 ggacgaaagc gaatgctggc aagcgccgga gaactgcaga agggcaatga gctggccctg
4321 ccctccaaat acgtgaactt cctgtatctg gctagccact acgagaaact gaaggggtcc
4381 cctgaggata acgaacagaa gcagctgttt gtggagcagc acaaacatta tctggacgag
4441 atcattgaac agatttcaga gttcagcaag agagtgatcc tggctgacgc aaatctggat
4501 aaagtcctga gcgcatacaa caagcaccga gacaaaccaa tccgggagca ggccgaaaat
4561 atcattcatc tgttcaccct gacaaacctg ggcgcccctg cagccttcaa gtattttgac
4621 accacaatcg atcggaagag atacacttct accaaagagg tgctggatgc taccctgatc
4681 caccagagta ttaccggcct gtatgagaca cgcatcgacc tgtcacagct gggaggcgat
4741 gggagcccca agaaaaagcg gaaggtgtct agttaa
```

[0749] In certain embodiments, the nucleic acid sequence encoding a dCas9-Clo051 fusion protein (embodiment 1) of the disclosure may comprise a DNA. In certain embodiments, the nucleic acid sequence encoding a dCas9-Clo051 fusion protein (embodiment 1) of the disclosure may comprise an RNA.

[0750] In certain embodiments, an exemplary dCas9-Clo051 fusion protein (embodiment 2) may comprise, consist essentially of or consist of, the amino acid sequence of (Clo051 sequence underlined, linker bold italics, dCas9 sequence (Streptoccocus pyogenes) in italics):

```
(SEQ ID NO: 18059)
      1 MPKKKRKVEG IKSNISLLKD ELRGQISHIS HEYLSLIDLA FDSKQNRLFE MKVLELLVNE
    61 YGFKGRHLGG SRKPDGIVYS TTLEDNFGII VDTKAYSEGY SLPISQADEM ERYVRENSNR
  121 DEEVNPNKWW ENFSEEVKKY YFVFISGSFK GKFEEQLRRL SMTTGVNGSA VNVVNLLLGA
  181 EKIRSGEMTI EELERAMFNN SEFILKY [symbol] DKKYSIGL AIGTNSVGWA VITDEYKVPS
  241 KKFKVLGNTD RHSIKKNLIG ALLFDSGETA EATRLKRTAR RRYTRRKNRI CYLQEIFSNE
  301 MAKVDDSFFH RLEESFLVEE DKKHERHPIF GNIVDEVAYH EKYPTIYHLR KKLVDSTDKA
  361 DLRLIYLALA HMIKFRGHFL IEGDLNPDNS DVDKLFIQLV QTYNQLFEEN PINASGVDAK
  421 AILSARLSKS RRLENLIAQL PGEKKNGLFG NLIALSLGLT PNFKSNFDLA EDAKLQLSKD
  481 TYDDDLDNLL AQIGDQYADL FLAAKNLSDA ILLSDILRVN TEITKAPLSA SMIKRYDEHH
  541 QDLTELKALV RQQLPEKYKE IFFDQSKNGY AGYIDGGASQ EEFYKFIKPI LEKMDGTEEL
  601 LVKLNREDLL RKQRTEDNGS IPHQIHLGEL HAILRRQEDF YPFLKDNREK IEKILTFRIP
  661 YYVGPLARGN SRFAWMTRKS EETITPWNFE EVVDKGASAQ SFIERMTNED KNLPNEKVLP
  721 KHSLLYEYFT VYNELTKVKY VTEGMRKPAF LSGEQKKAIV DLLFKTNRKV TVKQLKEDYF
  781 KKIECFDSVE ISGVEDRFNA SLGTYHDLLK IIKDKDFLDN EENEDILEDI VLTLTLFEDR
  841 EMIEERLKTY AHLFDDKVMK QLKRRRYTGW GRLSRKLING IRDKQSGKTI LDFLKSDGFA
  901 NRNFMQLIHD DSLTFKEDIQ KAQVSGQGDS LHEHIANLAG SPAIKKGILQ TVKVVDELVK
  961 VKGRHKPENI VIEMARENQT TQKGQKNSRE RMKRIEEGIK ELGSQILKEH PVENTQLQNE
1021 KLYLYYLQNG RDMYVDQELD INRLSDYDVD AIVPQSELKD DSIDNKVLTR SDKNRGKSDN
1081 VPSEEVVKKM KNYWRQLLNA KLITQRKEDN LTKAERGGLS ELDKAGFIKR QLVETRQITK
1141 HVAQILDSRM NTKYDENDKL IREVKVITLK SKLVSDFRKD FQFYKVREIN NYHHAHDAYL
1201 NAVVGTALIK KYPKLESEFV YGDYKVYDVR KMIAKSEQEI GKATAKYFFY SNIMNFFKTE
1261 ITLANGEIRK RPLIETNGET GEIVWDKGRD FATVRKVLSM PQVNIVKKTE VQTGGESKES
1321 ILPKRNSDKL IARKKDWDPK KYGGFDSPTV AYSVLVVAKV EKGKSKKLKS VKELLGITIM
1381 ERSSFEKNPI DFLEAKGYKE VKKDLIIKLP KYSLFELENG RKRMLASAGE LQKGNELALP
1441 SKYVNFLYLA SHYEKLKGSP EDNEQKQLEV EQHKHYLDEI IEQISEFSKR VILADANLDK
1501 VLSAYNKHRD KPIREQAENI IHLFTLTNLG APAAFKYFDT TIDRKRYTST KEVLDATLIH
1561 QSITGLYETR IDLSQLGGDG SPKKKRKV.
```

[0751] In certain embodiments, an exemplary dCas9-Clo051 fusion protein (embodiment 2) may comprise, consist essentially of or consist of, the nucleic acid sequence of (dCas9 sequence derived from Streptoccocus pyogenes):

```
(SEQ ID NO: 18060)
      1 atgcctaaga agaagcggaa ggtggaaggc atcaaaagca acatctccct cctgaaagac
    61 gaactccggg ggcagattag ccacattagt cacgaatacc tctccctcat cgacctggct
  121 ttcgatagca agcagaacag gctctttgag atgaaagtgc tggaactgct cgtcaatgag
  181 tacgggttca agggtcgaca cctcggcgga tctaggaaac cagacggcat cgtgtatagt
  241 accacactgg aagacaactt tgggatcatt gtggatacca aggcatactc tgagggttat
  301 agtctgccca tttcacaggc cgacgagatg gaacggtacg tgcgcgagaa ctcaaataga
  361 gatgaggaag tcaaccctaa caagtggtgg gagaacttct ctgaggaagt gaagaaatac
  421 tacttcgtct ttatcagcgg gtccttcaag ggtaaatttg aggaacagct caggagactg
  481 agcatgacta ccggcgtgaa tggcagcgcc gtcaacgtgg tcaatctgct cctgggcgct
  541 gaaaagattc ggagcggaga gatgaccatc gaagagctgg agagggcaat gtttaataat
  601 agcgagttta tcctgaaata cggtggcggt ggatccgata aaaagtattc tattggttta
  661 gccatcggca ctaattccgt tggatgggct gtcataaccg atgaatacaa agtaccttca
  721 aagaaattta aggtgttggg gaacacagac cgtcattcga ttaaaaagaa tcttatcggt
  781 gccctcctat tcgatagtgg cgaaacggca gaggcgactc gcctgaaacg aaccgctcgg
  841 agaaggtata cacgtcgcaa gaaccgaata tgttacttac aagaaatttt tagcaatgag
  901 atggccaaag ttgacgattc tttctttcac cgtttggaag agtccttcct tgtcgaagag
  961 gacaagaaac atgaacggca ccccatcttt ggaaacatag tagatgaggt ggcatatcat
1021 gaaaagtacc caacgattta tcacctcaga aaaaagctag ttgactcaac tgataaagcg
1081 gacctgaggt taatctactt ggctcttgcc catatgataa agttccgtgg gcactttctc
1141 attgagggtg atctaaatcc ggacaactcg gatgtcgaca aactgttcat ccagttagta
1201 caaacctata atcagttgtt tgaagagaac cctataaatg caagtggcgt ggatgcgaag
1261 gctattctta gcgcccgcct ctctaaatcc cgacggctag aaaacctgat cgcacaatta
1321 cccggagaga agaaaaatgg gttgttcggt aaccttatag cgctctcact aggcctgaca
1381 ccaaatttta agtcgaactt cgacttagct gaagatgcca aattgcagct tagtaaggac
1441 acgtacgatg acgatctcga caatctactg gcacaaattg gagatcagta tgcggactta
1501 tttttggctg ccaaaaacct tagcgatgca atcctcctat ctgacatact gagagttaat
1561 actgagatta ccaaggcgcc gttatccgct tcaatgatca aaaggtacga tgaacatcac
1621 caagacttga cacttctcaa ggccctagtc cgtcagcaac tgcctgagaa atataaggaa
1681 atattctttg atcagtcgaa aaacgggtac gcaggttata ttgacggcgg agcgagtcaa
1741 gaggaattct acaagtttat caaacccata ttagagaaga tggatgggac ggaagagttg
1801 cttgtaaaac tcaatcgcga agatctactg cgaaagcagc ggactttcga caacggtagc
1861 attccacatc aaatccactt aggcgaattg catgctatac ttagaaggca ggaggatttt
1921 tatccgttcc tcaaagacaa tcgtgaaaag attgagaaaa tcctaacctt tcgcatacct
1981 tactatgtgg gacccctggc ccgagggaac tctcggttcg catggatgac aagaaagtcc
2041 gaagaaacga ttactccatg gaattttgag gaagttgtcg ataaaggtgc gtcagctcaa
2101 tcgttcatcg agaggatgac caactttgac aagaatttac cgaacgaaaa agtattgcct
2161 aagcacagtt tactttacga gtatttcaca gtgtacaatg aactcacgaa agttaagtat
2221 gtcactgagg gcatgcgtaa acccgccttt ctaagcggag aacagaagaa agcaatagta
2281 gatctgttat tcaagaccaa ccgcaaagtg acagttaagc aattgaaaga ggactacttt
2341 aagaaaattg aatgcttcga ttctgtcgag atctccgggg tagaagatcg atttaatgcg
2401 tcacttggta cgtatcatga cctcctaaag ataattaaag ataaggactt cctggataac
2461 gaagagaatg aagatatctt agaagatata gtgttgactc ttaccctctt tgaagatcgg
2521 gaaatgattg aggaaagact aaaaacatac gctcacctgt tcgacgataa ggttatgaaa
2581 cagttaaaga ggcgtcgcta tacgggctgg ggacgattgt cgcggaaact tatcaacggg
2641 ataagagaca agcaaagtgg taaaactatt ctcgattttc taaagagcga cggcttcgcc
2701 aataggaact ttatgcagct gatccatgat gactctttaa ccttcaaaga ggatatacaa
2761 aaggcacagg tttccggaca aggggactca ttgcacgaac atattgcgaa tcttgctggt
2821 tcgccagcca tcaaaaaggg catactccag acagtcaaag tagtggatga gctagttaag
2881 gtcatgggac gtcacaaacc ggaaaacatt gtaatcgaga tggcacgcga aaatcaaacg
2941 actcagaagg ggcaaaaaaa cagtcgagag cggatgaaga gaatagaaga gggtattaaa
3001 gaactgggca gccagatctt aaaggagcat cctgtggaaa atacccaatt gcagaacgag
3061 aaactttacc tctattacct acaaaatgga agggacatgt atgttgatca ggaactggac
3121 ataaaccgtt tatctgatta cgacgtcgat gccattgtac cccaatcctt tttgaaggac
3181 gattcaatcg acaataaagt gcttacacgc tcggataaga accgagggaa aagtgacaat
3241 gttccaagcg aggaagtcgt aaagaaaatg aagaactatt ggcggcagct cctaaatgcg
3301 aaactgataa cgcaaagaaa gttcgataac ttaactaaag ctgagagggg tggcttgtct
3361 gaacttgaca aggccggatt tattaaacgt cagctcgtgg aaacccgcca aatcacaaag
3421 catgttgcac agatactaga ttcccgaatg aatacgaaat acgacgagaa cgataagctg
3481 attcgggaag tcaaagtaat cactttaaag tcaaaattgg tgtcggactt cagaaaggat
3541 tttcaattct ataaagttag ggagataaat aactaccacc atgcgcacga cgcttatctt
3601 aatgccgtcg tagggaccgc actcattaag aaatacccga agctagaaag tgagtttgtg
3661 tatggtgatt acaaagttta tgacgtccgt aagatgatcg cgaaaagcga acaggagata
3721 ggcaaggcta cagccaaata cttcttttat tctaacatta tgaatttctt taagacggaa
3781 atcactctgg caaacggaga gatacgcaaa cgacctttaa ttgaaaccaa tggggagaca
3841 ggtgaaatcg tatgggataa gggccgggac ttcgcgacgg tgagaaaagt tttgtccatg
3901 ccccaagtca acatagtaaa gaaaactgag gtgcagaccg gagggttttc aaaggaatcg
3961 attcttccaa aaaggaatag tgataagctc atcgctcgta aaaaggactg ggacccgaaa
4021 aagtacggtg gcttcgatag ccctacagtt gcctattctg tcctagtagt ggcaaaagtt
4081 gagaagggaa aatccaagaa actgaagtca gtcaaagaat tattggggat aacgattatg
4141 gagcgctcgt cttttgaaaa gaaccccatc gacttccttg aggcgaaagg ttacaaggaa
4201 gtaaaaaagg atctcataat taaactacca aagtatagtc tgtttgagtt agaaaatggc
4261 cgaaaacgga tgttggctag cgccggagag cttcaaaagg ggaacgaact cgcactaccg
4321 tctaaatacg tgaatttcct gtatttagcg tcccattacg agaagttgaa aggttcacct
4381 gaagataacg aacagaagca actttttgtt gagcagcaca aacattatct cgacgaaatc
4441 atagagcaaa tttcggaatt cagtaagaga gtcatcctag ctgatgccaa tctggacaaa
4501 gtattaagcg catacaacaa gcacagggat aaacccatac gtgagcaggc ggaaaatatt
4561 atccatttgt ttactcttac caacctcggc gctccagccg cattcaagta ttttgacaca
4621 acgatagatc gcaaacgata cacttctacc aaggaggtgc tagacgcgac actgattcac
4681 caatccatca cgggattata tgaaactcgg atagatttgt cacagcttgg gggtgacgga
4741 tcccccaaga agaagaggaa agtctga.
```

[0752] In certain embodiments, the nucleic acid sequence encoding a dCas9-Clo051 fusion protein (embodiment 2) of the disclosure may comprise a DNA. In certain embodiments, the nucleic acid sequence encoding a dCas9-Clo051 fusion protein (embodiment 2) of the disclosure may comprise an RNA.

### EXAMPLES

### Example 1: Construction and In Vitro Characterization of PSMA5 and PSMA8 CARTyrins

[0753] PSMA5 and PSMA8 CARTyrins were constructed as shown in FIGS. 1, 2, 3A-3C and 4A-4C. FIG. 5 depicts the structure of the anti-PSMA CARTyrins.

[0754] Surface expression of CARTyrins of the disclosure was evaluated by flow cytometry 24 hours following mRNA electroporation of a sequence encoding a PSMA5 or PSMA8 CARTyrin into human pan T cells (FIG. 6A). By flow cytometry, surface PSMA protein expression was detected on LNCaP tumor cell lines and K562 cell lines transfected with PSMA (FIG. 6B). Functionality of CARTyrin-expressing T cells was measured by degranulation against tumor lines. Degranulation of RNA-electroporated PSMA CARTyrin T cells against PSMA+ tumor cell lines was observed (FIG. 6C). PSMA surface protein expression was detected by flow cytometry following transfection of K562 cells lines using increasing amounts of PSMA mRNA (FIG. 6D). Degranulation of RNA-electroporated PSMA CARTyrin T cells against K562 expressing various amounts of PSMA protein was observed (FIG. 6E). Together, these data shows that PSMA5 and PSMA8 CARTyrins can be expressed on the surface of T cells and facilitate cytotoxic function against PSMA+ cell targets.

[0755] To support in vivo evaluation of PSMA CARTyrins, P-PSMA5-101 and P-PSMA8-101 were constructed using the piggyBac DNA modification system. PSMA CARTyrin was detected on the surface of primary human T cells from a representative donor that were transposed with either P-PSMA5-101 or P-PSMA8-101 plasmids (FIG. 7A). Flow cytometry analysis using surface expression markers showed that T cells expressing PSMA CARTyrin had markers of T stem cell memory phenotype but not activation and/or function a T cell exhaustion phenotype (FIG. 7B-7C). ELISA analysis showed that T cells expressing PSMA CARTyrins caused IFNγ secretion in cells expressing PSMA (LNCaP and K562.PSMA cells), demonstrating effector function of the T cells (FIG. 7D). T cells expressing PSMA CARTyrins showed strong cytotoxic function by a standard killing assay and a cell proliferation assay (FIG. 7E-7F). Together, these data show that surface expression of P-PSMA5-101 and P-PSMA8-101 PSMA CARTyrins on T cells demonstrated cytotoxic function and proliferative capacity in vitro against PSMA+ cell targets. Following this strong performance in vitro, the ability of the PSMA CARTyrins to function in vivo was evaluated.

### Example 2: In Vivo Characterization of PSMA5 and PSMA8 CARTyrins Using a Murine Xenograft Model

[0756] FIG. 8A depicts the treatment schedule for an in vivo study in mice using the P-PSMA8-101 CARTyrin. Anti-tumor activity was evaluated by survival (FIG. 8B), P-PSMA8-101 CD8+ T cell expansion and detection in the blood (FIG. 8C), tumor volume assessment by caliper measurement (FIG. 8D), and bioluminescence of LNCaP tumor (FIG. 8E-F). P-PSMA8-101 at ‘stress’ and standard doses demonstrated significantly enhanced anti-tumor efficacy and survival in comparison to ‘No T cells’ control mice against established SC LNCaP.luc solid tumors in NSG mice. Specifically, there was no survival in control animals, 50% survival in animal treated with an ‘ultra-low’ dose of P-PSMA8-101, and 100% survival in animals treated with either the ‘stress’ or standard dose of P-PSMA8-101. P-PSMA8-101 at the standard dose eliminated established LNCaP tumor in 100% of animals for the duration of the study (42 days post-treatment), while ⅔ of the ‘stress’ dosed animals remained tumor-free. In the peripheral blood, P-PSMA8-101 expanded and gave rise to differentiated effector PSMA8 CARTyrin+ T-cells that were concomitant with a decrease in tumor burden below detectable caliper and bioluminescent imaging limits. P-PSMA8-101 then contracted, yet persisted in the peripheral blood. Together this data demonstrates that animals expressing the PSMA8 CARTyrin demonstrate a reduce tumor burden compared to controls.

[0757] FIG. 9A depicts the treatment schedule for an in vivo study in mice using the P-PSMA5-101 and P-PSMA8-101 CARTyrins at a “stress” dose of (4×10\hat{ }6) using a murine xenograft model. Anti-tumor activity was evaluated by survival (FIG. 9B), CD8+ T cell expansion and detection in the blood (FIG. 9C), tumor volume assessment by caliper measurement (FIG. 9D), and bioluminescence of LNCaP tumor (FIG. 9E-F). P-PSMA5-101 and P-PSMA8-101 at a ‘stress’ dose demonstrated significantly enhanced anti-tumor efficacy and survival in comparison to the T cells (no CAR) control mice against established SC LNCaP.luc solid tumors in NSG mice. Specifically, there was no survival in T cells (no CAR) control animals, 25% survival in the P-BCMA-101 treated group, 75% survival in the P-PSMA5-101 treated group, and 100% survival in animals treated with a ‘stress’ dose of P-PSMA8-101. In the peripheral blood, P-PSMA5-101 and P-PSMA8-101 expanded and gave rise to differentiated effector CARTyrin+ T-cells that were concomitant with a decrease in tumor burden below detectable caliper and bioluminescent imaging limits. These cells then contracted, yet persisted in the peripheral blood.

### Example 3: Expression and Function of PiggyBac Integrated iC9 Safety Switch into Human Pan T-Cells

[0758] Human pan T-cells were nucleofected using an Amaxa 4D nucleofector with one of four piggyBac transposons. Modified T cells receiving the “mock” condition were nucleofected with an empty piggyBac transposon. Modified T cells received either a piggyBac transposon containing a therapeutic agent alone (a sequence encoding a CARTyrin) or a piggyBac transposon containing an integrated iC9 sequence and a therapeutic agent (a sequence encoding a CARTyrin).

[0759] FIG. 8 provides a schematic diagram of the iC9 safety switch, which contains a ligand binding region, a linker, and a truncated caspase 9 polypeptide. Specifically, the iC9 polypeptide contains a ligand binding region comprising a FK506 binding protein 12 (FKBP12) polypeptide including a substitution of valine (V) for phenylalanine (F) at position 36 (F36V). In certain embodiments, the FKBP12 polypeptide is encoded by an amino acid sequence comprising

(SEQ ID NO: 18026)
GVQVETISPGDGRTFPKRGQTCVVHYTGMLEDGKKVDSSRDRNKP
FKFMLGKQEVIRGWEEGVAQMSVGQRAKLTISPDYAYGATGHPGI
IPPHATLVFDVELLKLE.

In certain embodiments, the FKBP12 polypeptide is encoded by a nucleic acid sequence comprising

(SEQ ID NO: 18027)
GGGGTCCAGGTCGAGACTATTTCACCAGGGGATGGGCGAACATTTC
CAAAAAGGGGCCAGACTTGCGTCGTGCATTACACCGGGATGCTGGA
GGACGGGAAGAAAGTGGACAGCTCCAGGGATCGCAACAAGCCCTTC
AAGTTCATGCTGGGAAAGCAGGAAGTGATCCGAGGATGGGAGGAAG
GCGTGGCACAGATGTCAGTCGGCCAGCGGGCCAAACTGACCATTAG
CCCTGACTACGCTTATGGAGCAACAGGCCACCCAGGGATCATTCCC
CCTCATGCCACCCTGGTCTTCGATGTGGAACTGCTGAAGCTGGAG.

In certain embodiments, the induction agent specific for the ligand binding region may comprise a FK506 binding protein 12 (FKBP12) polypeptide having a substitution of valine (V) for phenylalanine (F) at position 36 (F36V) comprises AP20187 and/or AP1903, both synthetic drugs.

[0760] In certain embodiments of the inducible proapoptotic polypeptides, inducible caspase polypeptides or truncated caspase 9 polypeptides of the disclosure, the linker region is encoded by an amino acid comprising GGGGS (SEQ ID NO: 18028) or a nucleic acid sequence comprising GGAGGAGGAGGATCC (SEQ ID NO: 18029). In certain embodiments, the nucleic acid sequence encoding the linker does not comprise a restriction site.

[0761] In certain embodiments of the truncated caspase 9 polypeptides of the disclosure, the truncated caspase 9 polypeptide is encoded by an amino acid sequence that does not comprise an arginine (R) at position 87 of the sequence. Alternatively, or in addition, in certain embodiments of the inducible proapoptotic polypeptides, inducible caspase polypeptides or truncated caspase 9 polypeptides of the disclosure, the truncated caspase 9 polypeptide is encoded by an amino acid sequence that does not comprise an alanine (A) at position 282 the sequence. In certain embodiments of the inducible proapoptotic polypeptides, inducible caspase polypeptides or truncated caspase 9 polypeptides of the disclosure, the truncated caspase 9 polypeptide is encoded by an amino acid comprising

(SEQ ID NO: 18030)
GFGDVGALESLRGNADLAYILSMEPCGHCLIINNVNFCRESGLRTRT
GSNIDCEKLRRRFSSLHFMVEVKGDLTAKKMVLALLELAQQDHGALD
CCVVVILSHGCQASHLQFPGAVYGTDGCPVSVEKIVNIFNGTSCPSL
GGKPKLFFIQACGGEQKDHGFEVASTSPEDESPGSNPEPDATPFQEG
LRTFDQLDAISSLPTPSDIFVSYSTFPGFVSWRDPKSGSWYVETLDD
IFEQWAHSEDLQSLLLRVANAVSVKGIYKQMPGCFNFLRKKLFFKTS

or a nucleic acid sequence comprising

(SEQ ID NO: 18031)
GGATTTGGGGACGTGGGGGCCCTGGAGTCTCTGCGAGGAAATGCCGA
TCTGGCTTACATCCTGAGCATGGAACCCTGCGGCCACTGTCTGATCA
TTAACAATGTGAACTTCTGCAGAGAAAGCGGACTGCGAACACGGACT
GGCTCCAATATTGACTGTGAGAAGCTGCGGAGAAGGTTCTCTAGTCT
GCACTTTATGGTCGAAGTGAAAGGGGATCTGACCGCCAAGAAAATGG
TGCTGGCCCTGCTGGAGCTGGCTCAGCAGGACCATGGAGCTCTGGAT
TGCTGCGTGGTCGTGATCCTGTCCCACGGGTGCCAGGCTTCTCATCT
GCAGTTCCCCGGAGCAGTGTACGGAACAGACGGCTGTCCTGTCAGCG
TGGAGAAGATCGTCAACATCTTCAACGGCACTTCTTGCCCTAGTCTG
GGGGGAAAGCCAAAACTGTTCTTTATCCAGGCCTGTGGCGGGGAACA
GAAAGATCACGGCTTCGAGGTGGCCAGCACCAGCCCTGAGGACGAAT
CACCAGGGAGCAACCCTGAACCAGATGCAACTCCATTCCAGGAGGGA
CTGAGGACCTTTGACCAGCTGGATGCTATCTCAAGCCTGCCCACTCC
TAGTGACATTTTCGTGTCTTACAGTACCTTCCCAGGCTTTGTCTCAT
GGCGCGATCCCAAGTCAGGGAGCTGGTACGTGGAGACACTGGACGAC
ATCTTTGAACAGTGGGCCCATTCAGAGGACCTGCAGAGCCTGCTGCT
GCGAGTGGCAAACGCTGTCTCTGTGAAGGGCATCTACAAACAGATGC
CCGGGTGCTTCAATTTTCTGAGAAAGAAACTGTTCTTTAAGACTTCC.

[0762] In certain embodiments of the inducible proapoptotic polypeptides, wherein the polypeptide comprises a truncated caspase 9 polypeptide, the inducible proapoptotic polypeptide is encoded by an amino acid sequence comprising

(SEQ ID NO: 18032)
GVQVETISPGDGRTFPKRGQTCVVHYTGMLEDGKKVDSSRDRNKPFK
FMLGKQEVIRGWEEGVAQMSVGQRAKLTISPDYAYGATGHPGIIPPH
ATLVFDVELLKLEGGGGSGFGDVGALESLRGNADLAYILSMEPCGHC
LIINNVNFCRESGLRTRTGSNIDCEKLRRRFSSLHFMVEVKGDLTAK
KMVLALLELAQQDHGALDCCVVVILSHGCQASHLQFPGAVYGTDGCP
VSVEKIVNIFNGTSCPSLGGKPKLFFIQACGGEQKDHGFEVASTSPE
DESPGSNPEPDATPFQEGLRTFDQLDAISSLPTPSDIFVSYSTFPGF
VSWRDPKSGSWYVETLDDIFEQWAHSEDLQSLLLRVANAVSVKGIYK
QMPGCFNFLRKKLFFKTS

or the nucleic acid sequence comprising

(SEQ ID NO: 18033)
ggggtccaggtcgagactatttcaccaggggatgggcgaacatttccaaa
aaggggccagacttgcgtcgtgcattacaccgggatgctggaggacggga
agaaagtggacagctccagggatcgcaacaagcccttcaagttcatgctg
ggaaagcaggaagtgatccgaggatgggaggaaggcgtggcacagatgtc
agtcggccagcgggccaaactgaccattagccctgactacgcttatggag
caacaggccacccagggatcattccccctcatgccaccctggtcttcgat
gtggaactgctgaagctggagggaggaggaggatccggatttggggacgt
gggggccctggagtctctgcgaggaaatgccgatctggcttacatcctga
gcatggaaccctgcggccactgtctgatcattaacaatgtgaacttctgc
agagaaagcggactgcgaacacggactggctccaatattgactgtgagaa
gctgcggagaaggttctctagtctgcactttatggtcgaagtgaaagggg
atctgaccgccaagaaaatggtgctggccctgctggagctggctcagcag
gaccatggagctctggattgctgcgtggtcgtgatcctgtcccacgggtg
ccaggcttctcatctgcagttccccggagcagtgtacggaacagacggct
gtcctgtcagcgtggagaagatcgtcaacatcttcaacggcacttcttgc
cctagtctggggggaaagccaaaactgttctttatccaggcctgtggcgg
ggaacagaaagatcacggcttcgaggtggccagcaccagccctgaggacg
aatcaccagggagcaaccctgaaccagatgcaactccattccaggaggga
ctgaggacctttgaccagctggatgctatctcaagcctgcccactcctag
tgacattacgtgtcttacagtaccttcccaggctttgtctcatggcgcga
tcccaagtcagggagctggtacgtggagacactggacgacatctttgaac
agtgggcccattcagaggacctgcagagcctgctgctgcgagtggcaaac
gctgtctctgtgaagggcatctacaaacagatgcccgggtgcttcaattt
tctgagaaagaaactgttattaagacttcc.

[0763] To test the iC9 safety switch, each of the four modified T cells were incubated for 24 hours with 0, 0.1 nM, 1 nM, 10 nM, 100 nM or 1000 nM AP1903 (an induction agent for AP1903). Viability was assessed by flow cytometry using 7-aminoactinomycin D (7-AAD), a fluorescent intercalator, as a marker for cells undergoing apoptosis.

[0764] Cell viability was assessed at day 12 (see FIG. 9). The data demonstrate a shift of cell populations from the lower right to the upper left quadrants with increasing concentration of the induction agent in cells containing the iC9 construct; however, this effect is not observed in cells lacking the iC9 construct (those receiving only the CARTyrin), in which cells are evenly distributed among these two areas regardless of the concentration of the induction agent. Moreover, cell viability was assessed at day 19 (see FIG. 10). The data reveal the same trend as shown in FIG. 9 (day 12 post-nucleofection); however, the population shift to the upper left quadrant is more pronounced at this later time point (day 19 post-nucleofection).

[0765] A quantification of the aggregated results was performed and is provided in FIG. 11, showing the significant impact of the iC9 safety switch on the percent cell viability as a function of the concentration of the induction agent (AP1903) of the iC9 switch for each modified cell type at either day 12 (FIG. 9 and left graph) or day 19 (FIG. 10 and right graph). The presence of the iC9 safety switch induces apoptosis in a significant majority of cells by day 12 and the effect is even more dramatic by day 19.

[0766] The results of this study show that the iC9 safety switch is extremely effective at eliminating active cells upon contact with an induction agent (e.g. AP1903) because AP1903 induces apoptosis at even the lowest concentrations of the study (0.1 nM). Furthermore, the iC9 safety switch may be functionally expressed as part of a tricistronic vector.

### Example 4: Knock Down Efficiency of Checkpoint Signaling Proteins on Armored T-Cells

[0767] To create armored T-cells which have enhanced therapeutic potential, genetic modifications may be made in order to render the T-cells less sensitive to immunologic and/or metabolic checkpoints. One mechanism to produce armored T-cells is to inhibit checkpoint signaling is to knockout various checkpoint receptors. The Cas-CLOVER™ platform was used to target and knockout the checkpoint receptors PD-1, TGFβR2, LAG-3, Tim-3, and CTLA-4 in resting (or quiescent) primary pan T cells. As measured by flow cytometry, gene editing resulted in 30-70% loss of protein expression at the cell surface (FIG. 13). These results show that Cas-CLOVER™ is able to efficiently target the knockout of these genes resulting in loss of target protein expression on the T-cell surface. Knockout efficiency can significantly be increased by further optimization of guide RNA pairs, or by using additional guide RNA pairs targeting the same gene and/or regulators or promoters of the target gene.

### Example 5: Strategies for the Expression of Null or Switch Intracellular Signaling Proteins on Armored T-Cells

[0768] Another strategy to produce armored T-cells is to reduce or inhibit endogenous checkpoint signaling by expressing various modified/chimeric checkpoint receptors that have an altered or absent intracellular signaling domain. Checkpoint signals that could be targeted using this strategy include PD-1 or TGFβRII of T-cells, which bind to the PD-L1 ligand and TGFβ cytokine, respectively. FIG. 14 shows a schematic diagram of various strategies for producing decoy/null/dominant negative receptor (Null receptors) for two different inhibitory receptors (PD-1 (top panel) and TGFβRII (bottom panel)). To design Null receptors, the intracellular domain (ICD) of PD1 or TGFβRII can be mutated (mutated null) or deleted (truncated null). As a result, binding of the cognate ligand(s) of the null receptor does not result in delivery of the checkpoint signal to the T-cells. Furthermore, since the Null receptor competes with wildtype receptors for binding of the endogenous ligand(s), any binding by the Null receptor sequesters endogenous ligand(s) from binding the wildtype receptor. This results in dilution of the overall level of checkpoint signaling effectively delivered to the T-cell, thus, reducing or blocking checkpoint inhibition. FIG. 15 also shows switch receptor design strategies for the inhibitory receptors PD-1 (top panel) and TGFβRII (bottom panel). In switch receptors, wildtype ICD is replaced with the ICD from either an immuno-stimulatory molecule (Co-stimulatory switch) or a different inhibitory molecule (Inhibitory switch). Immuno-stimulatory molecules include but are not limited to CD3z, CD28, 4-1BB and the examples listed in Table 1. Inhibitory molecules include but are not limited to CTLA4, PD1, Lag3 and the examples listed in Tables 1 and 9. In the former case, binding of the endogenous ligand by the modified switch receptor results in the delivery of a positive signal to the T-cells, thereby helping to enhance stimulation of the T-cell, facilitating continuation of tumor targeting and killing. In the latter case, binding of the endogenous ligand by the modified switch receptor results in the delivery of a negative signal to the T-cells, thereby helping to reduce stimulation and activity of the T-cell.

### Example 6: Enhancing Surface Expression of PD1 and TGFβRII Null or Switch Intracellular Signaling Proteins on Armored T-Cells

[0769] To create armored T-cells, a number of truncated null receptors expressing alternative signal peptides (SP) and transmembrane domains (TM) were designed and tested for maximal expression on the surface of modified T-cells. FIG. 15A shows schematic diagrams of several null receptor constructs for PD-1 (top) and TGFβRII (bottom). Extracellular domains (ECD) of these proteins were modified such that the wildtype signal peptide (SP) and/or the transmembrane domains (TM) were replaced with that from the human T cell CD8α receptor (red arrows). Each of the six truncated null constructs shown in FIG. 15A were DNA synthesized and then subcloned into an mRNA IVT DNA vector (pRT). High quality mRNA was produced via IVT for each. Transfection of mRNA encoding each of the six molecules was performed using electroporation (EP) delivery into primary human T cells and FACS analysis was performed 24 hours post-EP to evaluate expression level of each construct on the cell surface (FIG. 15B). By flow cytometry, replacement of the WT SP with the alternative CD8a (02.8aSP-PD-1 and 02.8aSP-TGFβRII) resulted in the highest level of expression at the T cell surface. 02.8aSP-PD-1 Null receptor exhibited an MFI of 43,680, which is 177-fold higher than endogenous T cell PD-1 expression and 2.8-fold higher than the WT PD-1 Null receptor. 02.8aSP-TGFβRII Null receptor exhibited an MFI of 13,809, which is 102-fold higher than endogenous T cell TGFβRII expression and 1.8-fold higher than the WT TGFβRII Null receptor. These results show that replacement of wildtype SP with the alternative CD8a SP for both PD1 and TGFβRII inhibitory proteins leads to enhanced surface expression of the Null or Switch receptor. This in turn will maximize checkpoint inhibition or co-stimulation, respectively, upon binding of the endogenous ligand(s).

### Example 7: Design of NF-KB Inducible Vectors for Expression in Modified T-Cells

[0770] Two T cell activation NF-KB inducible vectors were developed (FIGS. 16A and 16B); one with the gene expression system (GES) in the forward orientation (A) and the other in the complementary direction (B), both preceding the constitutive EF1a promoter. These vectors also direct expression of a CAR molecule and a DHFR selection gene, separated by a T2A sequence. Both the conditional NF-KB inducible system and the EF1a directed genes are a part of a piggyBac transposon which can be permanently integrated into T cells using EP. Once integrated into the genome, the T cells constitutively express the CAR on the membrane surface and the DHFR within the cell, while expression of the NF-KB inducible gene, GFP, will be expressed to the highest level only upon T cell activation.

### Example 8: NF-KB Inducible Vectors for GFP Expression in Modified T-Cells

[0771] T cells were nucleofected with a piggyBac vector expressing an anti-BCMA CAR and a DHFR mutein gene under control of an EF1a promoter along with the absence (No gene expression system (GES) control) or presence of an NF-KB inducible expression system driving GFP expression in either the forward (pNFKB-GFP forward) or reverse orientation (pNFKB-GFP reverse). Cells were cultured in the presence of methotrexate selection until the cells were almost completely resting (Day 19) and GFP expression was assessed at Day 5 and Day 19. At Day 5, all T cells are proliferating and highly stimulated, with cells harboring the NF-KB inducible expression cassette producing high levels of GFP due to strong NFκB activity (see FIG. 17). The No GES control cells did not express detectable levels of GFP. By Day 19, the GES T cells were almost fully resting and GFP expression was significantly lower than Day 5 (˜⅛ MFI), since NFκB activity is lower. GFP expression is still observed at Day 19, which may due to the long half-life of GFP protein (˜30 hr), or, basal level of NFκB activity through, for example, a TCR, a CAR, a cytokine receptor, or a growth factor receptor signal.

### Example 9: NF-KB Inducible Vectors for Anti-BCMA CAR-Mediated GFP Expression in Modified T-Cells

[0772] T cells were either unmodified (Mock T cells) or nucleofected with a piggyBac vector expressing an anti-BCMA CAR and a DHFR mutein gene under control of an EF1a promoter along with the absence (No GES control) or presence of an NF-KB inducible expression system driving GFP expression in either the forward (pNFKB-GFP forward) or reverse orientation (pNFKB-GFP reverse). All cells were cultured for 22 days, either with or without methotrexate selection (Mock T cells), until the cells were almost completely resting. Cells were then stimulated for 3 days in the absence (No stimulation) or presence of BCMA-(K562), BMCA+ (RPMI 8226), or positive control anti-CD3 anti-CD28 activation reagent (CD3/28 stimulation). GFP expression was undetectable under all conditions with the No GES control or Mock T cells. However, while pNFKB-GFP forward- and reverse-transposed cells exhibited little GFP expression over the No stimulation control when cultured with BCMA− K562 cells, they both demonstrated dramatic upregulation of gene expression either in the presence of BCMA+ tumor cells or under positive control conditions (FIG. 18). Little difference in GFP expression was observed between the pNFKB-GFP forward- and reverse-transposed cells that were cocultured with BCMA+ tumor cells.

### Example 10: Control of Anti-BCMA CAR-Mediated Expression in Modified T-Cells

[0773] The expression level of inducible gene can be regulated by the number of response elements upstream or preceding the inducible promoter. T cells were nucleofected with a piggyBac vector encoding an anti-BCMA CARTyrin followed by a selection gene, both under control of a human EF1a promoter (FIG. 19). Further, vectors either additionally encoded the conditional NF-KB inducible gene expression system driving expression of a truncated CD19 protein (dCD19) and included a number of NFKB response elements (RE) varying from 0-5, no GES (No GES), or received an electroporation pulse but no piggyBac nucleic acid (Mock). Data are shown for only the GES in the reverse (opposite) direction/orientation. All cells were cultured for 18 days and included selection for piggyBac-modified T cells using methotrexate addition. Cells were then stimulated for 3 days using anti-CD3 anti-CD28 bead activation reagent and dCD19 surface expression was assessed by FACS at Days 0, 3 and 18, and data are shown as FACS histograms and MFI of target protein staining. Surface dCD19 expression was detected at low levels at Day 0 in all T cells transposed with vectors encoding the GES. At 3 days post-stimulation, dramatic upregulation of dCD19 expression was observed for all T cells expressing the GES, with a greater fold increase in surface expression in those with higher numbers of REs. Thus, surface dCD19 expression was directly proportional with the number of REs encoded in the GES. No dCD19 was detected on the surface of T cells that did not harbor the GES: No GES and Mock controls.

### INCORPORATION BY REFERENCE

[0774] Every document cited herein, including any cross referenced or related patent or application is hereby incorporated herein by reference in its entirety unless expressly excluded or otherwise limited. The citation of any document is not an admission that it is prior art with respect to any invention disclosed or claimed herein or that it alone, or in any combination with any other reference or references, teaches, suggests or discloses any such invention. Further, to the extent that any meaning or definition of a term in this document conflicts with any meaning or definition of the same term in a document incorporated by reference, the meaning or definition assigned to that term in this document shall govern.

### OTHER EMBODIMENTS

[0775] While particular embodiments of the disclosure have been illustrated and described, various other changes and modifications can be made without departing from the spirit and scope of the disclosure. The scope of the appended claims includes all such changes and modifications that are within the scope of this disclosure.

1-273. (canceled)

274. A chimeric antigen receptor (CAR) comprising:
(a) an ectodomain comprising an antigen recognition region, wherein the antigen recognition region comprises at least one Centyrin that specifically binds prostate specific membrane antigen (PSMA);
(b) a transmembrane domain, and
(c) an endodomain comprising at least one costimulatory domain.

275. The CAR of claim 274, wherein the ectodomain of (a) further comprises a signal peptide.

276. The CAR of claim 274, wherein the ectodomain of (a) further comprises a hinge between the antigen recognition region and the transmembrane domain.

277. The CAR of claim 275, wherein the signal peptide comprises an amino acid sequence encoding a human CD2, CD3δ, CD3ε, CD3γ, CD3ζ, CD4, CD8α, CD19, CD28, 4-1BB or GM-CSFR signal peptide.

278. The CAR of claim 277, wherein the signal peptide comprises an amino acid sequence encoding a human CD8α signal peptide.

279. The CAR of claim 278, wherein the human CD8α signal peptide comprises an amino acid sequence of SEQ ID NO: 18004.

280. The CAR of claim 274, wherein the transmembrane domain comprises an amino acid sequence encoding a human CD2, CD3δ, CD3ε, CD3γ, CD3ζ, CD4, CD8α, CD19, CD28, 4-1BB or GM-CSFR transmembrane domain.

281. The CAR of claim 280, wherein the transmembrane domain comprises an amino acid sequence encoding a human CD8α transmembrane domain.

282. The CAR of claim 281, wherein the human CD8α transmembrane domain comprises an amino acid sequence of SEQ ID NO: 18006.

283. The CAR of claim 274, wherein the endodomain comprises a human CD3ζ endodomain.

284. The CAR of claim 274, wherein the at least one costimulatory domain comprises a human 4-1BB, CD28, CD40, ICOS, MyD88, OX-40 intracellular segment, or any combination thereof.

285. The CAR of claim 284, wherein the at least one costimulatory domain comprises a human 4-1BB costimulatory domain.

286. The CAR of claim 283, wherein the human CD3ζ endodomain domain comprises an amino acid sequence of SEQ ID NO: 18008.

287. The CAR of claim 285, wherein the human 4-1BB costimulatory domain comprises an amino acid sequence of SEQ ID NO: 18012.

288. The CAR of claim 276, wherein the hinge comprises an amino acid sequence derived from a human CD8α, IgG4, CD4 sequence or any combination thereof.

289. The CAR of claim 288, wherein the hinge comprises an amino acid sequence derived from a human CD8α.

290. The CAR of claim 289, wherein the sequence derived from a human CD8α comprises an amino acid sequence of SEQ ID NO: 18014.

291. The CAR of claim 274, wherein the at least one Centyrin that specifically binds PSMA comprises an amino acid sequence of SEQ ID NO: 18000.

292. The CAR of claim 274, wherein the at least one Centyrin that specifically binds PSMA is encoded by a nucleic acid sequence comprising SEQ ID NO: 18001.

293. The CAR of claim 274, wherein the at least one Centyrin that specifically binds PSMA comprises an amino acid sequence of SEQ ID NO: 18002.

294. The CAR of claim 274, wherein the at least one Centyrin that specifically binds PSMA is encoded by a nucleic acid sequence comprising SEQ ID NO: 18003.

295. A composition comprising the CAR of claim 274 and at least one pharmaceutically acceptable carrier.

296. A transposon comprising a nucleic acid sequence encoding the CAR of claim 274.

297. A composition comprising the transposon of claim 296.

298. A vector comprising a nucleic acid sequence encoding the CAR of claim 274.

299. A composition comprising the vector of claim 298.

300. A cell comprising the CAR of claim 274.

301. A cell comprising the transposon of claim 296.

302. A cell comprising the vector of claim 298.

303. The cell of claim 300, wherein the cell is an immune cell.

304. The cell of claim 303, wherein the immune cell is a T-cell, a Natural Killer (NK) cell, a Natural Killer (NK)-like cell, a Cytokine Induced Killer (CIK) cell, a hematopoietic progenitor cell, a peripheral blood (PB) derived T cell or an umbilical cord blood (UCB) derived T-cell.

305. The cell of claim 300, wherein the cell is autologous.

306. A composition comprising a population of cells, wherein the plurality of cells of the population comprises the cell of claim 300.

307. A method of producing a population of modified T-cells comprising:
(a) introducing into a plurality of T-cells a composition comprising a nucleic acid sequence encoding the CAR of claim 1 thereby generating a modified T-cell population;
(b) culturing the modified T-cell population under conditions suitable for integration of the nucleic acid sequence encoding the CAR;
(c) expanding and/or selecting at least one cell from the modified T-cell population that expresses the CAR on the cell surface.

308. The CAR of claim 274, comprising the amino acid sequence of SEQ ID NO: 18063.

309. The CAR of claim 274, comprising the amino acid sequence of SEQ ID NO: 18070.

310. A chimeric antigen receptor (CAR) comprising:
(a) an ectodomain comprising a human CD8α signal peptide and an antigen recognition region, wherein the antigen recognition region comprises at least one Centyrin that specifically binds PSMA;
(b) a hinge domain comprising a human CD8α hinge domain;
(c) a transmembrane domain comprising a human CD8α transmembrane domain; and
(d) an endodomain comprising a human 4-1BB costimulatory domain and a human CD3ζ endodomain.

311. The CAR of claim 310, wherein the at least one Centyrin that specifically binds PSMA comprises the amino acid sequence of SEQ ID NO: 18000, wherein the human CD8α signal peptide comprises the amino acid sequence of SEQ ID NO: 18004, wherein the human CD8α hinge domain comprises the amino acid sequence of SEQ ID NO: 18014, wherein the human CD8α transmembrane domain comprises the amino acid sequence of SEQ ID NO: 18006, wherein the human 4-1BB costimulatory domain comprises the amino acid sequence of SEQ ID NO: 18012, and wherein the human CD3ζ endodomain comprises the amino acid sequence of SEQ ID NO: 18008.

312. The CAR of claim 310, wherein the at least one Centyrin that specifically binds PSMA comprises the amino acid sequence of SEQ ID NO: 18002, wherein the human CD8α signal peptide comprises the amino acid sequence of SEQ ID NO: 18004, wherein the human CD8α hinge domain comprises the amino acid sequence of SEQ ID NO: 18014, wherein the human CD8α transmembrane domain comprises the amino acid sequence of SEQ ID NO: 18006, wherein the human 4-1BB costimulatory domain comprises the amino acid sequence of SEQ ID NO: 18012, and wherein the human CD3ζ endodomain comprises the amino acid sequence of SEQ ID NO: 18008.

The application's sequence listing, which the Patent Office published only in electronic form, follows.

SEQUENCE LISTING (18071 sequences)

SEQ ID NO: 1 - protein, 306 aa, Homo Sapiens
LTCQAHLETPDFQLFKNGVAQEPVHLDSPAIKHQFLLTGDTQGRYRCRSGLSTGWTQLSKLLELTGPKSLPAPWLSMAPVSWITPGLKTTAVCRGVLRGVTFLLRREGDHEFLEVPEAQEDVEATFPVHQPGNYSCSYRTDGEGALSEPSATVTIEELGPGPGSWPHGCLGLMVAKEFGQRMPKEWKAAPPPPVLMHHGESSQVLHPGNKVTLTCVAPLSGVDFQLRRGEKELLVPRSSTSPDRIFFHLNAVALGDGGHYTCRYRLHDNQNGWSGDSAPVELILSDETLPAPEFSPEPESGRALRL

SEQ ID NO: 2 - protein, 495 aa, Homo Sapiens
MSMLVVFLLLWGVTWGPVTEAAIFYETQPSLWAESESLLKPLANVTLTCQAHLETPDFQLFKNGVAQEPVHLDSPAIKHQFLLTGDTQGRYRCRSGLSTGWTQLSKLLELTGPKSLPAPWLSMAPVSWITPGLKTTAVCRGVLRGVTFLLRREGDHEFLEVPEAQEDVEATFPVHQPGNYSCSYRTDGEGALSEPSATVTIEELAAPPPPVLMHHGESSQVLHPGNKVTLTCVAPLSGVDFQLRRGEKELLVPRSSTSPDRIFFHLNAVALGDGGHYTCRYRLHDNQNGWSGDSAPVELILSDETLPAPEFSPEPESGRALRLRCLAPLEGARFALVREDRGGRRVHRFQSPAGTEALFELHNISVADSANYSCVYVDLKPPFGGSAPSERLELHVDGPPPRPQLRATWSGAVLAGRDAVLRCEGPIPDVTFELLREGETKAVKTVRTPGAAANLELIFVGPQHAGNYRCRYRSWVPHTFESELSDPVELLVAES

SEQ ID NO: 3 - protein, 90 aa, Homo Sapiens
MGKNKLLHPSLVLLLLVLLPTDASVSGKPQYMVLVPSLLHTETTEKGCVLLSYLNETVTVSASLESVRGNRSLFTDLEAENDVLHCVAFA

SEQ ID NO: 4 - protein, 168 aa, Homo Sapiens
MGKNKLLHPSLVLLLLVLLPTDASVSGKPQYMVLVPSLLHTETTEKGCVLLSYLNETVTVSASLESVRGNRSLFTDLEAENDVLHCVAFAVPKSSSNEEVMFLTVQVKGPTQEFKKRTTVMVKNEDSLVFVQTDKSIYKPGQTVKFRVVSMDENFHPLNELIPLVYIQ

SEQ ID NO: 5 - protein, 1474 aa, Homo Sapiens
MGKNKLLHPSLVLLLLVLLPTDASVSGKPQYMVLVPSLLHTETTEKGCVLLSYLNETVTVSASLESVRGNRSLFTDLEAENDVLHCVAFAVPKSSSNEEVMFLTVQVKGPTQEFKKRTTVMVKNEDSLVFVQTDKSIYKPGQTVKFRVVSMDENFHPLNELIPLVYIQDPKGNRIAQWQSFQLEGGLKQFSFPLSSEPFQGSYKVVVQKKSGGRTEHPFTVEEFVLPKFEVQVTVPKIITILEEEMNVSVCGLYTYGKPVPGHVTVSICRKYSDASDCHGEDSQAFCEKFSGQLNSHGCFYQQVKTKVFQLKRKEYEMKLHTEAQIQEEGTVVELTGRQSSEITRTITKLSFVKVDSHFRQGIPFFGQVRLVDGKGVPIPNKVIFIRGNEANYYSNATTDEHGLVQFSINTTNVMGTSLTVRVNYKDRSPCYGYQWVSEEHEEAHHTAYLVFSPSKSFVHLEPMSHELPCGHTQTVQAHYILNGGTLLGLKKLSFYYLIMAKGGIVRTGTHGLLVKQEDMKGHFSISIPVKSDIAPVARLLIYAVLPTGDVIGDSAKYDVENCLANKVDLSFSPSQSLPASHAHLRVTAAPQSVCALRAVDQSVLLMKPDAELSASSVYNLLPEKDLTGFPGPLNDQDNEDCINRHNVYINGITYTPVSSTNEKDMYSFLEDMGLKAFTNSKIRKPKMCPQLQQYEMHGPEGLRVGFYESDVMGRGHARLVHVEEPHTETVRKYFPETWIWDLVVVNSAGVAEVGVTVPDTITEWKAGAFCLSEDAGLGISSTASLRAFQPFFVELTMPYSVIRGEAFTLKATVLNYLPKCIRVSVQLEASPAFLAVPVEKEQAPHCICANGRQTVSWAVTPKSLGNVNFTVSAEALESQELCGTEVPSVPEHGRKDTVIKPLLVEPEGLEKETTFNSLLCPSGGEVSEELSLKLPPNVVEESARASVSVLGDILGSAMQNTQNLLQMPYGCGEQNMVLFAPNIYVLDYLNETQQLTPEIKSKAIGYLNTGYQRQLNYKHYDGSYSTFGERYGRNQGNTWLTAFVLKTFAQARAYIFIDEAHITQALIWLSQRQKDNGCFRSSGSLLNNAIKGGVEDEVTLSAYITIALLEIPLTVTHPVVRNALFCLESAWKTAQEGDHGSHVYTKALLAYAFALAGNQDKRKEVLKSLNEEAVKKDNSVHWERPQKPKAPVGHFYEPQAPSAEVEMTSYVLLAYLTAQPAPTSEDLTSATNIVKWITKQQNAQGGFSSTQDTVVALHALSKYGAATFTRTGKAAQVTIQSSGTFSSKFQVDNNNRLLLQQVSLPELPGEYSMKVTGEGCVYLQTSLKYNILPEKEEFPFALGVQTLPQTCDEPKAHTSFQISLSVSYTGSRSASNMAIVDVKMVSGFIPLKPTVKMLERSNHVSRTEVSSNHVLIYLDKVSNQTLSLFFTVLQDVPVRDLKPAIVKVYDYYETDEFAIAEYNAPCSKDLGNA

SEQ ID NO: 6 - protein, 73 aa, Homo Sapiens
NGGTLLGLKKLSFYYLIMAKGGIVRTGTHGLLVKQEDMKGHFSISIPVKSDIAPVARFTTCYQKRTSLASLGL

SEQ ID NO: 7 - protein, 183 aa, Homo Sapiens
MLGELIGKGSLVMEGQKHLNSKKKGLKASFSLSLTFTSRLAPDPSLVIYAIFPSGGVVADKIQFSVEMCFDNQVSLGFSPSQQLPGAEVELQLQAAPGSLCALRAVDESVLLLRPDRELSNRSVYGMFPFWYGHYPYQVAEYDQCPVSGPWDFPQPLIDPMPQGHSSQRSIIWRPSFSEGTDL

SEQ ID NO: 8 - protein, 963 aa, Homo Sapiens
MLIGKGSLVMEGQKHLNSKKKGLKASFSLSLTFTSRLAPDPSLVIYAIFPSGGVVADKIQFSVEMCFDNQVSLGFSPSQQLPGAEVELQLQAAPGSLCALRAVDESVLLLRPDRELSNRSVYGMFPFWYGHYPYQVAEYDQCPVSGPWDFPQPLIDPMPQGHSSQRSIIWRPSFSEGTDLFSFFRDVGLKILSNAKIKKPVDCSHRSPEYSTAMGAGGGHPEAFESSTPLHQAEDSQVRQYFPETWLWDLFPIGNSGKEAVHVTVPDAITEWKAMSFCTSQSRGFGLSPTVGLTAFKPFFVDLTLPYSVVRGESFRLTATIFNYLKDCIRVQTDLAKSHEYQLESWADSQTSSCLCADDAKTHHWNITAVKLGHINFTISTKILDSNEPCGGQKGFVPQKGRSDTLIKPVLVKPEGVLVEKTHSSLLCPKGKVASESVSLELPVDIVPDSTKAYVTVLGDIMGTALQNLDGLVQMPSGCGEQNMVLFAPIIYVLQYLEKAGLLTEEIRSRAVGFLEIGYQKELMYKHSNGSYSAFGERDGNGNTWLTAFVTKCFGQAQKFIFIDPKNIQDALKWMAGNQLPSGCYANVGNLLHTAMKGGVDDEVSLTAYVTAALLEMGKDVDDPMVSQGLRCLKNSATSTTNLYTQALLAYIFSLAGEMDIRNILLKQLDQQAIISGESIYWSQKPTPSSNASPWSEPAAVDVELTAYALLAQLTKPSLTQKEIAKATSIVAWLAKQHNAYGGFSSTQDTVVALQALAKYATTAYMPSEEINLVVKSTENFQRTFNIQSVNRLVFQQDTLPNVPGMYTLEASGQGCVYVQTVLRYNILPPTNMKTFSLSVEIGKARCEQPTSPRSLTLTIHTSYVGSRSSSNMAIVEVKMLSGFSPMEGTNQLLLQQPLVKKVEFGTDTLNIYLDELIKNTQTYTFTISQSVLVTNLKPATIKVYDYYLPDEQATIQYSDPCE

SEQ ID NO: 9 - protein, 81 aa, Homo Sapiens
MVRNNFYAVRLLPSTCVVLSQTSNCRRSHQDPLAASCICQASGCWLIGKGSLVMEGQKHLNSKKKGLKASFSLSLTFTSRL

SEQ ID NO: 10 - protein, 1454 aa, Homo Sapiens
MWAQLLLGMLALSPAIAEELPNYLVTLPARLNFPSVQKVCLDLSPGYSDVKFTVTLETKDKTQKLLEYSGLKKRHLHCISFLVPPPAGGTEEVATIRVSGVGNNISFEEKKKVLIQRQGNGTFVQTDKPLYTPGQQVYFRIVTMDSNFVPVNDKYSMVELQDPNSNRIAQWLEVVPEQGIVDLSFQLAPEAMLGTYTVAVAEGKTFGTFSVEEYVLPKFKVEVVEPKELSTVQESFLVKICCRYTYGKPMLGAVQVSVCQKANTYWYREVEREQLPDKCRNLSGQTDKTGCFSAPVDMATFDLIGYAYSHQINIVATVVEEGTGVEANATQNIYISPQMGSMTFEDTSNFYHPNFPFSGKIRVRGHDDSFLKNHLVFLVIYGTNGTFNQTLVTDNNGLAPFTLETSGWNGTDVSLEGKFQMEDLVYNPEQVPRYYQNAYLHLRPFYSTTRSFLGIHRLNGPLKCGQPQEVLVDYYIDPADASPDQEISFSYYLIGKGSLVMEGQKHLNSKKKGLKASFSLSLTFTSRLAPDPSLVIYAIFPSGGVVADKIQFSVEMCFDNQVSLGFSPSQQLPGAEVELQLQAAPGSLCALRAVDESVLLLRPDRELSNRSVYGMFPFWYGHYPYQVAEYDQCPVSGPWDFPQPLIDPMPQGHSSQRSIIWRPSFSEGTDLFSFFRDVGLKILSNAKIKKPVDCSHRSPEYSTAMGAGGGHPEAFESSTPLHQAEDSQVRQYFPETWLWDLFPIGNSGKEAVHVTVPDAITEWKAMSFCTSQSRGFGLSPTVGLTAFKPFFVDLTLPYSVVRGESFRLTATIFNYLKDCIRVQTDLAKSHEYQLESWADSQTSSCLCADDAKTHHWNITAVKLGHINFTISTKILDSNEPCGGQKGFVPQKGRSDTLIKPVLVKPEGVLVEKTHSSLLCPKGKVASESVSLELPVDIVPDSTKAYVTVLGDIMGTALQNLDGLVQMPSGCGEQNMVLFAPIIYVLQYLEKAGLLTEEIRSRAVGFLEIGYQKELMYKHSNGSYSAFGERDGNGNTWLTAFVTKCFGQAQKFIFIDPKNIQDALKWMAGNQLPSGCYANVGNLLHTAMKGGVDDEVSLTAYVTAALLEMGKDVDDPMVSQGLRCLKNSATSTTNLYTQALLAYIFSLAGEMDIRNILLKQLDQQAIISGESIYWSQKPTPSSNASPWSEPAAVDVELTAYALLAQLTKPSLTQKEIAKATSIVAWLAKQHNAYGGFSSTQDTVVALQALAKYATTAYMPSEEINLVVKSTENFQRTFNIQSVNRLVFQQDTLPNVPGMYTLEASGQGCVYVQTVLRYNILPPTNMKTFSLSVEIGKARCEQPTSPRSLTLTIHTSYVGSRSSSNMAIVEVKMLSGFSPMEGTNQLLLQQPLVKKVEFGTDTLNIYLDELIKNTQTYTFTISQSVLVTNLKPATIKVYDYYLPDEQATIQYSDPCE

SEQ ID NO: 11 - protein, 1004 aa, Homo Sapiens
SFLGIHRLNGPLKCGQPQEVLVDYYIDPADASPDQEISFSYYLIGKGSLVMEGQKHLNSKKKGLKASFSLSLTFTSRLAPDPSLVIYAIFPSGGVVADKIQFSVEMCFDNQVSLGFSPSQQLPGAEVELQLQAAPGSLCALRAVDESVLLLRPDRELSNRSVYGMFPFWYGHYPYQVAEYDQCPVSGPWDFPQPLIDPMPQGHSSQRSIIWRPSFSEGTDLFSFFRDVGLKILSNAKIKKPVDCSHRSPEYSTAMGAGGGHPEAFESSTPLHQAEDSQVRQYFPETWLWDLFPIGNSGKEAVHVTVPDAITEWKAMSFCTSQSRGFGLSPTVGLTAFKPFFVDLTLPYSVVRGESFRLTATIFNYLKDCIRVQTDLAKSHEYQLESWADSQTSSCLCADDAKTHHWNITAVKLGHINFTISTKILDSNEPCGGQKGFVPQKGRSDTLIKPVLVKPEGVLVEKTHSSLLCPKGKVASESVSLELPVDIVPDSTKAYVTVLGDIMGTALQNLDGLVQMPSGCGEQNMVLFAPIIYVLQYLEKAGLLTEEIRSRAVGFLEIGYQKELMYKHSNGSYSAFGERDGNGNTWLTAFVTKCFGQAQKFIFIDPKNIQDALKWMAGNQLPSGCYANVGNLLHTAMKGGVDDEVSLTAYVTAALLEMGKDVDDPMVSQGLRCLKNSATSTTNLYTQALLAYIFSLAGEMDIRNILLKQLDQQAIISGESIYWSQKPTPSSNASPWSEPAAVDVELTAYALLAQLTKPSLTQKEIAKATSIVAWLAKQHNAYGGFSSTQDTVVALQALAKYATTAYMPSEEINLVVKSTENFQRTFNIQSVNRLVFQQDTLPNVPGMYTLEASGQGCVYVQTVLRYNILPPTNMKTFSLSVEIGKARCEQPTSPRSLTLTIHTSYVGSRSSSNMAIVEVKMLSGFSPMEGTNQLLLQQPLVKKVEFGTDTLNIYLDELIKNTQTYTFTISQSVLVTNLKPATIKVYDYYLPDEQATIQYSDPCE

SEQ ID NO: 12 - protein, 182 aa, Homo Sapiens
  misc_feature (1)..(1): Xaa can be any naturally occurring amino acid
XRTFNIQSVNRLVFQQDTLPNVPGMYTLEASGQGCVYVQTVLRYNILPPTNMKTFSLSVEIGKARCEQPTSPRSLTLTIHTSYVGSRSSSNMAIVEVKMLSGFSPMEGTNQLLLQQPLVKKVEFGTDTLNIYLDELIKNTQTYTFTISQSVLVTNLKPATIKVYDYYLPDEQATIQYSDPCE

SEQ ID NO: 13 - protein, 340 aa, Homo Sapiens
MRKELQLSLSVTLLLVCGFLYQFTLKSSCLFCLPSFKSHQGLEALLSHRRGIVFLETSERMEPPHLVSCSVESAAKIYPEWPVVFFMKGLTDSTPMPSNSTYPAFSFLSAIDNVFLFPLDMKRLLEDTPLFSWYNQINASAERNWLHISSDASRLAIIWKYGGIYMDTDVISIRPIPEENFLAAQASRYSSNGIFGFLPHHPFLWECMENFVEHYNSAIWGNQGPELMTRMLRVWCKLEDFQEVSDLRCLNISFLHPQRFYPISYREWRRYYEVWDTEPSFNVSYALHLWNHMNQEGRAVIRGSNTLVENLYRKHCPRTYRDLIKGPEGSVTGELGPGNK

SEQ ID NO: 14 - protein, 401 aa, Homo Sapiens
MGLKALCLGLLCVLFVSHFYTPMPDNIEESWKIMALDAIAKTCTFTAMCFENMRIMRYEEFISMIFRLDYTQPLSDEYITVTDTTFVDIPVRLYLPKRKSETRRRAVIYFHGGGFCFGSSKQRAFDFLNRWTANTLDAVVVGVDYRLAPQHHFPAQFEDGLAAVKFFLLEKILTKYGVDPTRICIAGDSSGGNLATAVTQQVQNDAEIKHKIKMQVLLYPGLQITDSYLPSHRENEHGIVLTRDVAIKLVSLYFTKDEALPWAMRRNQHMPLESRHLFKFVNWSILLPEKYRKDYVYTEPILGGLSYSLPGLTDSRALPLLANDSQLQNLPLTYILTCQHDLLRDDGLMYVTRLRNVGVQVVHEHIEDGIHGALSFMTSPFYLRLGLRIRDMYVSWLDKNL

SEQ ID NO: 15 - protein, 53 aa, Homo Sapiens
MGLKALCLGLLCVLFVSHFYTPMPDNIEESWKIMALDAIAKTCTFTNRGLLTS

SEQ ID NO: 16 - protein, 252 aa, Homo Sapiens
MEPQSMKGQKRPFGGPWRLKVLGGPPWLRRTLPKLGRPKEAPVARMSTQSTHPLKPEAPRLPPGIPESPSCQRRHTLPASEFRCLTPEDAVSAFEIEREAFISVLGVCPLYLDEIRHFLTLCPELSLGWFEEGCLVAFIIGSLWDKERLMQESLTLHRSGGHIAHLHVLAVHRAFRQQGRGPILLWRYLHHLGSQPAVRRAALMCEDALVPFYERFSFHAVGPCAITVGSLTFMELHCSLRGHPFLRRNSGC

SEQ ID NO: 17 - protein, 152 aa, Homo Sapiens [sequence omitted]

SEQ ID NO: 18 - protein, 207 aa, Homo Sapiens
MSTQSTHPLKPEAPRLPPGIPESPSCQRRHTLPASEFRCLTPEDAVSAFEIEREAFISVLGVCPLYLDEIRHFLTLCPELSLGWFEEGCLVAFIIGSLWDKERLMQESLTLHRSGGHIAHLHVLAVHRAFRQQGRGPILLWRYLHHLGSQPAVRRAALMCEDALVPFYERFSFHAVGPCAITVGSLTFMELHCSLRGHPFLRRNSGC

SEQ ID NO: 19 - protein, 92 aa, Homo Sapiens
MSTQSTHPLKPEAPRLPPGIPESPSCQRRHTLPASEFRCLTPEDAVSAFEIEREDSGREAQRLPVTHLSLLPQPSSPSWASAPCTWMRSGTS

SEQ ID NO: 20 - protein, 257 aa, Homo Sapiens
MACLMAAFSVGTAMNASSYSAEMTEPKSVCVSVDEVVSSNMEATETDLLNGHLKKVDNNLTEAQRFSSLPRRAAVNIEFRDLSYSVPEGPWWRKKGYKTLLKGISGKFNSGELVAIMGPSGAGKSTLMNILAGYRETGMKGAVLINGLPRDLRCFRKVSCYIMQDDMLLPHLTVQEAMMVKEILTALGLLSCANTRTGSLSGGQRKRLAIALELVNNPPVMFFDEPTSGLDSASCFQVVSLMKGLAQGGRSIICTIH

SEQ ID NO: 21 - protein, 678 aa, Homo Sapiens
MACLMAAFSVGTAMNASSYSAEMTEPKSVCVSVDEVVSSNMEATETDLLNGHLKKVDNNLTEAQRFSSLPRRAAVNIEFRDLSYSVPEGPWWRKKGYKTLLKGISGKFNSGELVAIMGPSGAGKSTLMNILAGYRETGMKGAVLINGLPRDLRCFRKVSCYIMQDDMLLPHLTVQEAMMVSAHLKLQEKDEGRREMVKEILTALGLLSCANTRTGSLSGGQRKRLAIALELVNNPPVMFFDEPTSGLDSASCFQVVSLMKGLAQGGRSIICTIHQPSAKLFELFDQLYVLSQGQCVYRGKVCNLVPYLRDLGLNCPTYHNPADFVMEVASGEYGDQNSRLVRAVREGMCDSDHKRDLGGDAEVNPFLWHRPSEEVKQTKRLKGLRKDSSSMEGCHSFSASCLTQFCILFKRTFLSIMRDSVLTHLRITSHIGIGLLIGLLYLGIGNEAKKVLSNSGFLFFSMLFLMFAALMPTVLTFPLEMGVFLREHLNYWYSLKAYYLAKTMADVPFQIMFPVAYCSIVYWMTSQPSDAVRFVLFAALGTMTSLVAQSLGLLIGAASTSLQVATFVGPVTAIPVLLFSGFFVSFDTIPTYLQWMSYISYVRYGFEGVILSIYGLDREDLHCDIDETCHFQKSEAILRELDVENAKLYLDFIVLGIFFISLRLIAYFVLRYKIRAER

SEQ ID NO: 22 - protein, 666 aa, Homo Sapiens
MACLMAAFSVGTAMNASSYSAEMTEPKSVCVSVDEVVSSNMEATETDLLNGHLKKVDNNLTEAQRFSSLPRRAAVNIEFRDLSYSVPEGPWWRKKGYKTLLKGISGKFNSGELVAIMGPSGAGKSTLMNILAGYRETGMKGAVLINGLPRDLRCFRKVSCYIMQDDMLLPHLTVQEAMMVSAHLKLQEKDEGRREMVKEILTALGLLSCANTRTGSLSGGQRKRLAIALELVNNPPVMFFDEPTSGLDSASCFQVVSLMKGLAQGGRSIICTIHQPSAKLFELFDQLYVLSQGQCVYRGKVCNLVPYLRDLGLNCPTYHNPADFVMEVASGEYGDQNSRLVRAVREGMCDSDHKRDLGGDAEVNPFLWHRPSEEDSSSMEGCHSFSASCLTQFCILFKRTFLSIMRDSVLTHLRITSHIGIGLLIGLLYLGIGNEAKKVLSNSGFLFFSMLFLMFAALMPTVLTFPLEMGVFLREHLNYWYSLKAYYLAKTMADVPFQIMFPVAYCSIVYWMTSQPSDAVRFVLFAALGTMTSLVAQSLGLLIGAASTSLQVATFVGPVTAIPVLLFSGFFVSFDTIPTYLQWMSYISYVRYGFEGVILSIYGLDREDLHCDIDETCHFQKSEAILRELDVENAKLYLDFIVLGIFFISLRLIAYFVLRYKIRAER

SEQ ID NO: 23 - protein, 663 aa, Homo Sapiens
MIMRLPQPHGTNASSYSAEMTEPKSVCVSVDEVVSSNMEATETDLLNGHLKKVDNNLTEAQRFSSLPRRAAVNIEFRDLSYSVPEGPWWRKKGYKTLLKGISGKFNSGELVAIMGPSGAGKSTLMNILAGYRETGMKGAVLINGLPRDLRCFRKVSCYIMQDDMLLPHLTVQEAMMVSAHLKLQEKDEGRREMVKEILTALGLLSCANTRTGSLSGGQRKRLAIALELVNNPPVMFFDEPTSGLDSASCFQVVSLMKGLAQGGRSIICTIHQPSAKLFELFDQLYVLSQGQCVYRGKVCNLVPYLRDLGLNCPTYHNPADFVMEVASGEYGDQNSRLVRAVREGMCDSDHKRDLGGDAEVNPFLWHRPSEEDSSSMEGCHSFSASCLTQFCILFKRTFLSIMRDSVLTHLRITSHIGIGLLIGLLYLGIGNEAKKVLSNSGFLFFSMLFLMFAALMPTVLTFPLEMGVFLREHLNYWYSLKAYYLAKTMADVPFQIMFPVAYCSIVYWMTSQPSDAVRFVLFAALGTMTSLVAQSLGLLIGAASTSLQVATFVGPVTAIPVLLFSGFFVSFDTIPTYLQWMSYISYVRYGFEGVILSIYGLDREDLHCDIDETCHFQKSEAILRELDVENAKLYLDFIVLGIFFISLRLIAYFVLRYKIRAER

SEQ ID NO: 24 - protein, 824 aa, Homo Sapiens
MLAVQQTEHLPACPPARRWSSNFCPESTEGGPSLLGLRDMVRRGWSVCTAILLARLWCLVPTHTFLSEYPEAAEYPHPGWVYWLQMAVAPGHLRAWVMRNNVTTNIPSAFSGTLTHEEKAVLTVFTGTATAVHVQVAALASAKLESSVFVTDCVSCKIENVCDSALQGKRVPMSGLQGSSIVIMPPSNRPLASAASCTWSVQVQGGPHHLGVVAISGKVLSAAHGAGRAYGWGFPGDPMEEGYKTLLKGISGKFNSGELVAIMGPSGAGKSTLMNILAGYRETGMKGAVLINGLPRDLRCFRKVSCYIMQDDMLLPHLTVQEAMMVSAHLKLQEKDEGRREMVKEILTALGLLSCANTRTGSLSGGQRKRLAIALELVNNPPVMFFDEPTSGLDSASCFQVVSLMKGLAQGGRSIICTIHQPSAKLFELFDQLYVLSQGQCVYRGKVCNLVPYLRDLGLNCPTYHNPADFVMEVASGEYGDQNSRLVRAVREGMCDSDHKRDLGGDAEVNPFLWHRPSEEVKQTKRLKGLRKDSSSMEGCHSFSASCLTQFCILFKRTFLSIMRDSVLTHLRITSHIGIGLLIGLLYLGIGNEAKKVLSNSGFLFFSMLFLMFAALMPTVLTFPLEMGVFLREHLNYWYSLKAYYLAKTMADVPFQIMFPVAYCSIVYWMTSQPSDAVRFVLFAALGTMTSLVAQSLGLLIGAASTSLQVATFVGPVTAIPVLLFSGFFVSFDTIPTYLQWMSYISYVRYGFEGVILSIYGLDREDLHCDIDETCHFQKSEAILRELDVENAKLYLDFIVLGIFFISLRLIAYFVLRYKIRAER

SEQ ID NO: 25 - protein, 668 aa, Homo Sapiens
MLGTQGWTKQRKPCPQNASSYSAEMTEPKSVCVSVDEVVSSNMEATETDLLNGHLKKVDNNLTEAQRFSSLPRRAAVNIEFRDLSYSVPEGPWWRKKGYKTLLKGISGKFNSGELVAIMGPSGAGKSTLMNILAGYRETGMKGAVLINGLPRDLRCFRKVSCYIMQDDMLLPHLTVQEAMMVSAHLKLQEKDEGRREMVKEILTALGLLSCANTRTGSLSGGQRKRLAIALELVNNPPVMFFDEPTSGLDSASCFQVVSLMKGLAQGGRSIICTIHQPSAKLFELFDQLYVLSQGQCVYRGKVCNLVPYLRDLGLNCPTYHNPADFVMEVASGEYGDQNSRLVRAVREGMCDSDHKRDLGGDAEVNPFLWHRPSEEDSSSMEGCHSFSASCLTQFCILFKRTFLSIMRDSVLTHLRITSHIGIGLLIGLLYLGIGNEAKKVLSNSGFLFFSMLFLMFAALMPTVLTFPLEMGVFLREHLNYWYSLKAYYLAKTMADVPFQIMFPVAYCSIVYWMTSQPSDAVRFVLFAALGTMTSLVAQSLGLLIGAASTSLQVATFVGPVTAIPVLLFSGFFVSFDTIPTYLQWMSYISYVRYGFEGVILSIYGLDREDLHCDIDETCHFQKSEAILRELDVENAKLYLDFIVLGIFFISLRLIAYFVLRYKIRAER

SEQ ID NO: 26 - protein, 677 aa, Homo Sapiens
MRISLPRAPERDGGVSASSLLDTVTNASSYSAEMTEPKSVCVSVDEVVSSNMEATETDLLNGHLKKVDNNLTEAQRFSSLPRRAAVNIEFRDLSYSVPEGPWWRKKGYKTLLKGISGKFNSGELVAIMGPSGAGKSTLMNILAGYRETGMKGAVLINGLPRDLRCFRKVSCYIMQDDMLLPHLTVQEAMMVSAHLKLQEKDEGRREMVKEILTALGLLSCANTRTGSLSGGQRKRLAIALELVNNPPVMFFDEPTSGLDSASCFQVVSLMKGLAQGGRSIICTIHQPSAKLFELFDQLYVLSQGQCVYRGKVCNLVPYLRDLGLNCPTYHNPADFVMEVASGEYGDQNSRLVRAVREGMCDSDHKRDLGGDAEVNPFLWHRPSEEDSSSMEGCHSFSASCLTQFCILFKRTFLSIMRDSVLTHLRITSHIGIGLLIGLLYLGIGNEAKKVLSNSGFLFFSMLFLMFAALMPTVLTFPLEMGVFLREHLNYWYSLKAYYLAKTMADVPFQIMFPVAYCSIVYWMTSQPSDAVRFVLFAALGTMTSLVAQSLGLLIGAASTSLQVATFVGPVTAIPVLLFSGFFVSFDTIPTYLQWMSYISYVRYGFEGVILSIYGLDREDLHCDIDETCHFQKSEAILRELDVENAKLYLDFIVLGIFFISLRLIAYFVLRYKIRAER

SEQ ID NO: 27 - protein, 177 aa, Homo Sapiens
MAPGQTPSLCSWLLPLPSTWATTGHVCFSDILQTPDGGQLLLDWAKQPDSSQDPDPTTQPIVLLLPGITGSSQETYVLHLVNQALRDGYQAVVFNNRGCRGEELRTHRAFCASNTEDLETVVNHIKHRYPQAPLLAVGISFGGILVLNHLAQARQAAGLVAALTLSACWDSFETTRS

SEQ ID NO: 28 - protein, 102 aa, Homo Sapiens
MAPGQTPSLCSWLLPLPSTWATTGHVCFSDILQTPDGGQLLLDWAKQPDSSQDPDPTTQPIVLLLPGITGSSQETYVLHLVNQALRDGYQPTGLFVPAILKI

SEQ ID NO: 29 - protein, 405 aa, Homo Sapiens
MLSSFLSPQNGTWADTFSLLLALAVALYLGYYWACVLQRPRLVAGPQFLAFLEPHCSITTETFYPTLWCFEGRLQSIFQVLLQSQPLVLYQSDILQTPDGGQLLLDWAKQPDSSQDPDPTTQPIVLLLPGITGSSQETYVLHLVNQALRDGYQAVVFNNRGCRGEELRTHRAFCASNTEDLETVVNHIKHRYPQAPLLAVGISFGGILVLNHLAQARQAAGLVAALTLSACWDSFETTRSLETPLNSLLFNQPLTAGLCQLVERNRKVIEKVVDIDFVLQARTIRQFDERYTSVAFGYQDCVTYYKAASPRTKIDAIRIPVLYLSAADDPFSPVCALPIQAAQHSPYVALLITARGGHIGFLEGLLPWQHWYMSRLLHQYAKAIFQDPEGLPDLRALLPSEDRNS

SEQ ID NO: 30 - protein, 305 aa, Homo Sapiens
MLSSFLSPQNGTWADTFSLLLALAVALYLGYYWACVLQRPRLVAGPQFLAFLEPHCSITTETFYPTLWCFEGRLQSIFQVLLQSQPLVLYQSDILQTPDGGQLLLDWAKQPDSSQDPDPTTQPIVLLLPGITGSSQETYVLHLVNQALRDGYQAVVFNNRGCRGEELRTHRAFCASNTEDLETVVNHIKHRYPQAPLLAVGISFGGILVLNHLAQARQAAGLVAALTLSACWDSFETTRSLETPLNSLLFNQPLTAGLCQLVERLSYGKTCRPVQSASLMSATHLWPLDIKTVLPTTKQQALEPR

SEQ ID NO: 31 - protein, 305 aa, Homo Sapiens; identical to SEQ ID NO: 30

SEQ ID NO: 32 - protein, 205 aa, Homo Sapiens
MAVARLAAVAAWVPCRSWGWAAVPFGPHRGLSVLLARIPQRAPRWLPACRQKTSLSFLNRPDLPNLAYKKLKGKSPGIIFIPGYLSYMNGTKALAIEEFCKSLGHACIRFDYSGVGSSDGNSEESTLGKWRKDVLSIIDDLADGPQILVGSSLGGWLMLHAAIARPEKVVALIGVATAADTLVTKFNQLPVEDSGRKNYISLHSA

SEQ ID NO: 33 - protein, 306 aa, Homo Sapiens
MAVARLAAVAAWVPCRSWGWAAVPFGPHRGLSVLLARIPQRAPRWLPACRQKTSLSFLNRPDLPNLAYKKLKGKSPGIIFIPGYLSYMNGTKALAIEEFCKSLGHACIRFDYSGVGSSDGNSEESTLGKWRKDVLSIIDDLADGPQILVGSSLGGWLMLHAAIARPEKVVALIGVATAADTLVTKFNQLPVELKKEVEMKGVWSMPSKYSEEGVYNVQYSFIKEAEHHCLLHSPIPVNCPIRLLHGMKDDIVPWHTSMQVADRVLSTDVDVILRKHSDHRMREKADIQLLVYTIDDLIDKLSTIVN

SEQ ID NO: 34 - protein, 52 aa, Homo Sapiens
MAVARLAAVAAWVPCRSWGWAAVPFGPHRGLSVLLARIPQRAPRWLPDSCWI

SEQ ID NO: 35 - protein, 75 aa, Homo Sapiens
MAVARLAAVAAWVPCRSWGWAAVPFGPHRGLSVLLARIPQRAPRWLPGLITQELEVQMVTQRKAHWGNGEKMFFL

SEQ ID NO: 36 - protein, 229 aa, Homo Sapiens [sequence omitted]

SEQ ID NO: 37 - protein, 225 aa, Homo Sapiens [sequence omitted]

SEQ ID NO: 38 - protein, 153 aa, Homo Sapiens [sequence omitted]

SEQ ID NO: 39 - protein, 124 aa, Homo Sapiens
MVGALCGCWFRLGGARPLIPLGPTVVQTSMSRSQVALLGLSLLLMLLLYVGLPGPPEQTSCLWGDPNVTVLAGLTPGNSPIFYREVLPLNQAHRLQPLSCMESWTTSWLESHCGSSATCPTTLW

SEQ ID NO: 40 - protein, 271 aa, Homo Sapiens
MVGALCGCWFRLGGARPLIPLGPTVVQTSMSRSQVALLGLSLLLMLLLYVGLPGPPEQTSCLWGDPNVTVLAGLTPGNSPIFYREVLPLNQAHRVEVVLLHGKAFNSHTWEQLGTLQLLSQRGYRAVALDLPGFGNSAPSKEASTEAGRAALLERALRDLEVQNAVLVSPSLSGHYALPFLMRGHHQLHGFVPIAPTSTQNYTQEQFWAVKTPTLILYGELDHILARESLRQLRHLPNHSVVKLRNAGHACYLHKPQDFHLVLLAFLDHLP

SEQ ID NO: 41 - protein, 468 aa, Homo Sapiens
MPPWGAALALILAVLALLGLLGPRLRGPWGRAVGERTLPGAQDRDDGEEADGGGPADQFSDGREPLPGGCSLVCKPSALAQCLLRALRRSEALEAGPRSWFSGPHLQTLCHFVLPVAPGPELAREYLQLADDGLVALDWVVGPCVRGRRITSAGGLPAVLLVIPNAWGRLTRNVLGLCLLALERGYYPVIFHRRGHHGCPLVSPRLQPFGDPSDLKEAVTYIRFRHPAAPLFAVSEGSGSALLLSYLGECGSSSYVTGAACISPVLRCREWFEAGLPWPYERGFLLHQKIALSRYATALEDTVDTSRLFRSRSLREFEEALFCHTKSFPISWDTYWDRNDPLRDVDEAAVPVLCICSADDPVCGPPDHTLTTELFHSNPYFFLLLSRHGGHCGFLRQEPLPAWSHEVILESFRALTEFFRTEERIKGLSRHRASFLGGRRRGGALQRREVSSSSNLEEIFNWKRSYTR

SEQ ID NO: 42 - protein, 191 aa, Homo Sapiens
CIVVLWYGWLHFYAEPKYLIVVRPAPPPSQKKSCSGKTRSRKPLQLVVGTLTPSSVFLSWGFLINPHHDWTLPSHCPNDRFYTIRYREKDKEKKWIFQICPATETIVENLKPNTVYEFGVKDNVEGGIWSKIFNHKTVVGSKKVNGKIQSTYDQDHTVPAYVPRKLIPITIIKQVIQNVTHKDSAKSPEKA

SEQ ID NO: 43 - protein, 60 aa, Homo Sapiens
MRGGKCNMLSSLGCLLLCGSITLALGNAQKLPKANKRTELVIQHGWMSLIKMMLNERSQV

SEQ ID NO: 44 - protein, 161 aa, Homo Sapiens
MRGGKCNMLSSLGCLLLCGSITLALGNAQKLPKDAEPKYLIVVRPAPPPSQKKSCSGKTRSRKPLQLVVGTLTPSSVFLSWGFLINPHHDWTLPSHCPNDRFYTIRYREKDKEKKWIFQICPATETIVENLKPNTVYEFGVKDNVEGGIWSKIFNHKTVVG

SEQ ID NO: 45 - protein, 1075 aa, Homo Sapiens
MRGGKCNMLSSLGCLLLCGSITLALGNAQKLPKGKRPNLKVHINTTSDSILLKFLRPSPNVKLEGLLLGYGSNVSPNQYFPLPAEGKFTEAIVDAEPKYLIVVRPAPPPSQKKSCSGKTRSRKPLQLVVGTLTPSSVFLSWGFLINPHHDWTLPSHCPNDRFYTIRYREKDKEKKWIFQICPATETIVENLKPNTVYEFGVKDNVEGGIWSKIFNHKTVVGSKKVNGKIQSTYDQDHTVPAYVPRKLIPITIIKQVIQNVTHKDSAKSPEKAPLGGVILVHLIIPGLNETTVKLPASLMFEISDALKTQLAKNETLALPAESKTPEVEKISARPTTVTPETVPRSTKPTTSSALDVSETTLASSEKPWIVPTAKISEDSKVLQPQTATYDVFSSPTTSDEPEISDSYTATSDRILDSIPPKTSRTLEQPRATLAPSETPFVPQKLEIFTSPEMQPTTPAPQQTTSIPSTPKRRPRPKPPRTKPERTTSAGTITPKISKSPEPTWTTPAPGKTQFISLKPKIPLSPEVTHTKPAPKQTPRAPPKPKTSPRPRIPQTQPVPKVPQRVTAKPKTSPSPEVSYTTPAPKDVLLPHKPYPEVSQSEPAPLETRGIPFIPMISPSPSQEELQTTLEETDQSTQEPFTTKIPRTTELAKTTQAPHRFYTTVRPRTSDKPHIRPGVKQAPRPSGADRNVSVDSTHPTKKPGTRRPPLPPRPTHPRRKPLPPNNVTGKPGSAGIISSGPITTPPLRSTPRPTGTPLERIETDIKQPTVPASGEELENITDFSSSPTRETDPLGKPRFKGPHVRYIQKPDNSPCSITDSVKRFPKEEATEGNATSPPQNPPTNLTVVTVEGCPSFVILDWEKPLNDTVTEYEVISRENGSFSGKNKSIQMTNQTFSTVENLKPNTSYEFQVKPKNPLGEGPVSNTVAFSTESADPRVSEPVSAGRDAIWTERPFNSDSYSECKGKQYVKRTWYKKFVGVQLCNSLRYKIYLSDSLTGKFYNIGDQRGHGEDHCQFVDSFLDGRTGQQLTSDQLPIKEGYFRAVRQEPVQFGEIGGHTQINYVQWYECGTTIPGKW

SEQ ID NO: 46 - protein, 1777 aa, Homo Sapiens
MRGGKCNMLSSLGCLLLCGSITLALGNAQKLPKGKRPNLKVHINTTSDSILLKFLRPSPNVKLEGLLLGYGSNVSPNQYFPLPAEGKFTEAIVDAEPKYLIVVRPAPPPSQKKSCSGKTRSRKPLQLVVGTLTPSSVFLSWGFLINPHHDWTLPSHCPNDRFYTIRYREKDKEKKWIFQICPATETIVENLKPNTVYEFGVKDNVEGGIWSKIFNHKTVVGSKKVNGKIQSTYDQDHTVPAYVPRKLIPITIIKQVIQNVTHKDSAKSPEKAPLGGVILVHLIIPGLNETTVKLPASLMFEISDALKTQLAKNETLALPAESKTPEVEKISARPTTVTPETVPRSTKPTTSSALDVSETTLVLSKRTPETLQTILIPQFELPLSTLAPKSLPEFPEAKTPFPFEKPRGTLASSEKPWIVPTAKISEDSKVLQPQTATYDVFSSPTTSDEPEISDSYTATSDRILDSIPPKTSRTLEQPRATLAPSETPFVPQKLEIFTSPEMQPTTPAPQQTTSIPSTPKRRPRPKPPRTKPERTTSAGTITPKISKSPEPTWTTPAPGKTQFISLKPKIPLSPEVTHTKPAPEPQTLLPSQSTIGPETPGTKPSTTLAPRKTKRPGRRPRPRPRPKTTPSPEVPKSKPALEPATIQPEPLVPTTASKPSERPKTTHRPDAPQIQPGSKPPKQLLPKPQTTAEPDMPPTKSVSEPVPFETEAPSMTIVPTTDIEPVTVRTEATVTTLAPKTSQRTRTRRPRPKHKTTPRPETLQTKLDFGPITPGTSSAPTTTTKRTRRPHPKPKTTPHPEVPQTKLVPATILEPVLRTEASGTTAAPKVPQRTHRPHPKPKTTLSPEELQTELVPATIFEPVSPIKEAPGTTFVPVTDLEPVTFRTEIPATTLATKTSKRTRPPRPRPKTTPSPQAPETKPVPATVLEPVTLRPEASTTLASKTSQRTRRPRLRTKTTPRPEAPESKPVPTAELKPVTLRTETWVTTQAPKTSQRTRRPRPKTKTTPSPEVPQTKLVPSTDLEPGTLRTEAPKTMVVTTVLEPDTFRTKFPETTLAPKTQRTRRPRPRPKTTSSPEVPQNKSVSVTGFEPVVHSTDAPGTTFALTELQTLILKPVTSPSLEMTESQPVSDVLESVTLSTESPKETIAPAKTDYVYPTAKAPLWPEEPKTEVVESITYVSEPPETTLETSPLPSQSITLPSPDEPQTEPAPKQTPRAPPKPKTSPRPRIPQTQPVPKVPQRVTAKPKTSPSPEVSYTTPAPKDVLLPHKPYPEVSQSEPAPLETRGIPFIPMISPSPSQEELQTTLEETDQSTQEPFTTKIPRTTELAKTTQAPHRFYTTVRPRTSDKPHIRPVLNRTTTRPTRPKPSGMPSGNGVGTGVKQAPRPSGADRNVSVDSTHPTKKPGTRRPPLPPRPTHPRRKPLPPNNVTGKPGSAGIISSGPITTPPLRSTPRPTGTPLERIETDIKQPTVPASGEELENITDFSSSPTRETDPLGKPRFKGPHVRYIQKPDNSPCSITDSVKRFPKEEATEGNATSPPQNPPTNLTVVTVEGCPSFVILDWEKPLNDTVTEYEVISRENGSFSGKNKSIQMTNQTFSTVENLKPNTSYEFQVKPKNPLGEGPVSNTVAFSTESADPRVSEPVSAGRDAIWTERPFNSDSYSECKGKQYVKRTWYKKFVGVQLCNSLRYKIYLSDSLTGKFYNIGDQRGHGEDHCQFVDSFLDGRTGQQLTSDQLPIKEGYFRAVRQEPVQFGEIGGHTQINYVQWYECGTTIPGKW

SEQ ID NO: 47 - protein, 1005 aa, Homo Sapiens
MRGGKCNMLSSLGCLLLCGSITLALGNAQKLPKGKRPNLKVHINTTSDSILLKFLRPSPNVKLEGLLLGYGSNVSPNQYFPLPAEGKFTEAIVDAEPKYLIVVRPAPPPSQKKSCSGKTRSRKPLQLVVGTLTPSSVFLSWGFLINPHHDWTLPSHCPNDRFYTIRYREKDKEKKWIFQICPATETIVENLKPNTVYEFGVKDNVEGGIWSKIFNHKTVVGSKKVNGKIQSTYDQDHTVPAYVPRKLIPITIIKQVIQNVTHKDSAKSPEKAPLGGVILVHLIIPGLNETTVKLPASLMFEISDALKTQLAKNETLALPAESKTPEVEKISARPTTVTPETVPRSTKPTTSSALDVSETTLVLSKRTPETLQTILIPQFELPLSTLAPKSLPEFPEAKTPFPFEKPRGTLASSEKPWIVPTAKISEDSKVLQPQTATYDVFSSPTTSDEPEISDSYTATSDRILDSIPPKTSRTLEQPRATLAPSETPFVPQKLEIFTSPEMQPTTPAPQQTTSIPSTPKRRPRPKPPRTKPERTTSAGTITPKISKSPEPTWTTPAPGKTQFISLKPKIPLSPEVTHTKPAPEPQTLLPSQSTIGPETPGTKPSTTLAPRKTKRPGRRPRPRPRPKTTPSPEVPKSKPALEPATIQPEPLVPTTASKPSERPKTTHRPDAPQIQPGSKPPKQLLPKPQTTAEPDMPPTKSVSEPVPFETEAPSMTIVPTTDIEPVTVRTEATVTTLAPKTSQRTRTRRPRPKHKTTPRPETLQTKLDFGPITPGTSSAPTTTTKRTRRPHPKPKTTPHPEVPQTKLATKTSKRTRPPRPRPKTTPSPQAPETKPVPATVLEPVTLRPEASTTLASKTSQRTRRPRLRTKTTPRPEAPESKPVPTAELKPVTLRTETWVTTQAPKTSQRTRRPRPKTKTTPSPEVPQTKLVPSTDLEPGTLRTEAPKTMVVTTVLEPDTFRTKFPETTLAPKTQRTRRPRPRPKTTSSPEVPQNKSGKCMNPWLK

SEQ ID NO: 48 - protein, 188 aa, Homo Sapiens [sequence omitted]

SEQ ID NO: 49 - protein, 233 aa, Homo Sapiens
QRVTAKPKTSPSPEVSYTTPAPKDVLLPHKPYPEVSQSEPAPLETRGIPFIPMISPSPSQEELQTTLAPHRFYTTVRPRTSDKPHIRPGVKQAPRPSGADRNVSVDSTHPTKKPGTRRPPLPPRPTHPRRKPLPPNNVTGKPGSAGIISSGPITTPPLRSTPRPTGTPLERIETDIKQPTVPASGEELENITDFSSSPTRETDPLGKPRFKGPHVRYIQKPDNSPCSITDSVK

SEQ ID NO: 50 - protein, 158 aa, Homo Sapiens
VSDVLESVTLSTESPKETIAPAKTDYVYPTAKAPLWPEEPKTEVVESITYVSEPPETTLETSPLPSQSITLPSPDEPQTEPAPKQTPRAPPKPKTSPRPRIPQTQPVPKVPQRVTAKPKTSPSPEVSYTTPAPLETRGIPFIPMISPSPSQEELQTTL

SEQ ID NO: 51 - protein, 84 aa, Homo Sapiens
  misc_feature (1)..(1): Xaa can be any naturally occurring amino acid
XFEKPRGTLASSEKPWIVPTAKISEDSKVLQPQTATSDRILDSIPPKTSRTLEQPRATLAPSETPFVPQKLEIFTSPEMQPTTP

SEQ ID NO: 52 - protein, 187 aa, Homo Sapiens
  misc_feature (1)..(1): Xaa can be any naturally occurring amino acid
XFISLKPKIPLSPEVTHTKPAPKTSQRTRTRRPRPKHKTTPRPETLQTKLDFGPITPGTSSAPTTTTKRTRRPHPKPKTTPHPEVPQTKLAPKQTPRAPPKPKTSPRPRIPQTQPVPKVPQRVTAKPKTSPSPEVSYTTPAPKDVLLPHKPYPEVSQSEPAPLETRGIPFIPMISPSPSQEELQTTL

SEQ ID NO: 53 - protein, 1131 aa, Homo Sapiens
  misc_feature (1)..(1): Xaa can be any naturally occurring amino acid
XISLKPKIPLSPEVTHTKPAPEPQTLLPSQSTIGPETPGTKPSTTLALEPATIQPEPLVPTTASKPSERPKTTHRPDAPQIQPGSKPPKQLLPKPQTTAEPDMPPTKSVSEPVPFETEAPSMTIVPTTDIEPVTVRTEATVTTLAPKTSQRTRTRRPRPKHKTTPRPETLQTKLDFGPITPGTSSAPTTTTKRTRRPHPKPKTTPHPEVPQTKLVPATILEPVLRTEASGTTAVPATIFEPVSPIKEAPGTTFVPVTDLEPVTFRTEIPATTLATKTSKRTRPPRPRPKTTPSPQAPETKPVPATVLEPVTLRPEASTTLASKTSQRTRRPRLRTKTTPRPEAPESKPVPTAELKPVTLRTETWVTTQAPKTSQRTRRPRPKTKTTPSPEVPQTKLVPSTDLEPGTLRTEAPKTMVVTTVLEPDTFRTKFPETTLAPKTQRTRRPRPRPKTTSSPEVPQNKSVSVTGFEPVVHSTDAPGTTFALTELQTLILKPVTSPSLEMTESQPVSDVLESVTLSTESPKETIAPAKTDYVYPTAKAPLWPEEPKTEVVESITYVSEPPETTLETSPLPSQSITLPSPDEPQTEPAPKQTPRAPPKPKTSPRPRIPQTQPVPKVPQRVTAKPKTSPSPEVSYTTPAPKDVLLPHKPYPEVSQSEPAPLETRGIPFIPMISPSPSQEELQTTLEETDQSTQEPFTTKIPRTTELAKTTQAPHRFYTTVRPRTSDKPHIRPGVKQAPRPSGADRNVSVDSTHPTKKPGTRRPPLPPRPTHPRRKPLPPNNVTGKPGSAGIISSGPITTPPLRSTPRPTGTPLERIETDIKQPTVPASGEELENITDFSSSPTRETDPLGKPRFKGPHVRYIQKPDNSPCSITDSVKRFPKEEATEGNATSPPQNPPTNLTVVTVEGCPSFVILDWEKPLNDTVTEYEVISRENGSFSGKNKSIQMTNQTFSTVENLKPNTSYEFQVKPKNPLGEGPVSNTVAFSTESADPRVSEPVSAGRDAIWTERPFNSDSYSECKGKQYVKRTWYKKFVGVQLCNSLRYKIYLSDSLTGKFYNIGDQRGHGEDHCQFVDSFLDGRTGQQLTSDQLPIKEGYFRAVRQEPVQFGEIGGHTQINYVQWYECGTTIPGKW

SEQ ID NO: 54 - protein, 125 aa, Homo Sapiens
  misc_feature (1)..(1): Xaa can be any naturally occurring amino acid
XKNETLALPAESKTPEVEKISARPTTVTPETVPRSTKPTTSSALDVSETTLAPKSLPEFPEAKTPFPFEKPRGTLASSEKPWIVPTAKISEDSKVLQPQTALTELQTLILKPVTSPSLEMTESQP

SEQ ID NO: 55 - protein, 187 aa, Homo Sapiens
  misc_feature (1)..(1): Xaa can be any naturally occurring amino acid
XKTTPHPEVPQTKLAPKVPQRTHRPHPKPKTTLSPEELQTELVPATIFEPVSPIKEAPGTTFVPVTDLEPVTFRTEIPATTLATKTSKRTRPPRPRPKTTPSPQAPETKPAPKQTPRAPPKPKTSPRPRIPQTQPVPKVPQRVTAKPKTSPSPEVSYTTPAPLETRGIPFIPMISPSPSQEELQTTL

SEQ ID NO: 56 - protein, 187 aa, Homo Sapiens
  misc_feature (1)..(1): Xaa can be any naturally occurring amino acid
XNGKIQSTYDQDHTVPAYVPRKLIPITIIKQVIQNVTHKDSAKSPEKAPLGGVILVHLIIPGLNETTVKLPASLMFEISDALKTQLAKNETLALPAESKTPEVEKISARPTTVTPETVPRSTKPTTSSALDVSETTLVLSKRTPETLQTILIPQFELPLSTLASSEKPWIVPTAKISEDSKVLQPQT

SEQ ID NO: 57 - protein, 150 aa, Homo Sapiens
  misc_feature (1)..(1): Xaa can be any naturally occurring amino acid
XPETPGTKPSTTLAPRKTKRPGRRPRPRPRPKTTPSPEVPKSKPALEPATIQPEPLVPTTVPTTDIEPVTVRTEATVTTLAPKTSQRTRTRRPRPKHKTTPRPETLQTKLDFGPITPGTSSAPTTTTKRTRRPHPKPKTTPHPEVPQTKL

SEQ ID NO: 58 - protein, 308 aa, Homo Sapiens
  misc_feature (1)..(1): Xaa can be any naturally occurring amino acid
XPKPKTTPHPEVPQTKLATKTSKRTRPPRPRPKTTPSPQAPETKPVPATVLEPVTLRPEASTTLASKTSQRTRRPRLRTKTTPRPEAPESKPVPTAELKPVTLRTETWVTTQAPKQTPRAPPKPKTSPRPRIPQTQPVPKVPQRVTAKPKTSPSPEVSYTTPAPKDVLLPHKPYPEVSQSEPAPLETRGIPFIPMISPSPSQEELQTTLEETDQSTQEPFTTKIPRTTELAKTTQAPHRFYTTVRPRTSDKPHIRPVLNRTTTRPTRPKPSGMPSGNGVGTGVKQAPRPSGADRNVSVDSTHPTKKPG

SEQ ID NO: 59 - protein, 87 aa, Homo Sapiens
  misc_feature (1)..(1): Xaa can be any naturally occurring amino acid
XQTLLPSQSTIGPETPGTKPSTTLAPRKTKRPGRRPRPRPRPKTTPSPEVPKSKPALEPATIQPEPLVPTTVSEPVPFETEAPSMTI

SEQ ID NO: 60 - protein, 187 aa, Homo Sapiens
  misc_feature (1)..(1): Xaa can be any naturally occurring amino acid
XRTTSAGTITPKISKSPEPTWTTPAPGKTQFISLKPKIPLSPEVTHTKPVPTTDIEPVTVRTEATVTTLAPKTSQRTRTRRPRPKHKTTPRPETLQTKLDFGPITPGTSSAPTTTTKRTRRPHPKPKTTPHPEVPQTKLAPKVPQRTHRPHPKPKTTLSPEELQTELVPATIFEPVSPIKEAPGTTF

SEQ ID NO: 61 - protein, 189 aa, Homo Sapiens
  misc_feature (1)..(1): Xaa can be any naturally occurring amino acid
XTAKPKTSPSPEVSYTTPAPLETRGIPFIPMISPSPSQEELQTTLEETDQSTQEPFTTKIPRTTELAKTTQAPHRFYTTVRPRTSDKPHIRPVLNRTTTRPTRPKPSGMPSGNGVGTGVKQAPRPSGADRNVSVDSTHPTKKPGTRRPPLPPRPTHPRRKPLPPNNVTGKPGSAGIISSGPITTPPLRS

SEQ ID NO: 62 - protein, 303 aa, Homo Sapiens
  misc_feature (1)..(1): Xaa can be any naturally occurring amino acid
XTPEVEKISARPTTVTPETVPRSTKPTTSSALDVSETTLASSEKPWIVPTAKISEDSKVLQPQTATYDVFSSPTTSDEPEISDSYTATSDRILDSIPPKTSRTLEQPRATLAPSETPFVPQKLEIFTSPEMQPTTPAPQQTTSIPSTPKRRPRPKPPRTKPERTTSAGTITPKISKSPEPTWTTPAPGKTQFISLKPKIPLSPEVTHTKPAPEPQTLLPSQSTIGPETPGTKPSTTLAPRKTKRPGRRPRPRPRPKTTPSPEVPKSKPALEPATIQPEPLVPTTASKPSERPKTTHRPDAPQI

SEQ ID NO: 63 - protein, 151 aa, Homo Sapiens
  misc_feature (1)..(1): Xaa can be any naturally occurring amino acid
XVESITYVSEPPETTLETSPLPSQSITLPSPDEPQTEPAPKQTPRAPPKPKTSPRPRIPQTQPVPKVPQRVTAKPKTSPSPEVSYTTPAPKDVLLPHKPYPEVSQSEPVLQPVTFRFEPPKTTIAPLETRGIPFIPMISPSPSQEELQTTL

SEQ ID NO: 64 - protein, 198 aa, Homo Sapiens
LLHKNLQEHFSNQDLVFLLLTPSIITESCSTHRLEHSLYKPQKGLFHRVPLVVANLGMSEQLGYKTVSGSCMSTGFSRAVQTHSSKFFEEDGSLKEVHKINEMYASLQEELKLYSFSECHLHPGSRLKEQPLFGTCPHGIRQRARKLVDYRREPPQLAHELIFQFISVYFQRTNWHDKSCINEKLHVKKHFTTYKAYL

SEQ ID NO: 65 - protein, 360 aa, Homo Sapiens
MDDVEVVYTIDIQKYIPCYQLFSFYNSSGEVNEQALKKILSNVKKNVVGWYKFRRHSDQIMTFRERLLHKNLQEHFSNQDLVFLLLTPSIITESCSTHRLEHSLYKPQKGLFHRVPLVVANLGMSEQLGYKTVSGSCMSTGFSRAVQTHSSKFFEEDGSLKEVHKINEMYASLQEELKSICKKVEDSEQAVDKLVKDVNRLKREIEKRRGAQIQAAREKNIQKDPQENIFLCQALRTFFPNSEFLHSCVMSLKNRHVSKSSCNYNHHLDVVDNLTLMVEHTDIPEASPASTPQIIKHKALDLDDRWQFKRSRLLDTQDKRSKADTGSSNQDKASKMSSPETDEEIEKMKGFGEYSRSPTF

SEQ ID NO: 66 - protein, 74 aa, Homo Sapiens
MEGESTSAVLSGFVLGALAFQHLNTDSDTEGFLLGEVKGEAKNSITDSQMDDVEVVYTIDIQKYIPCYQLFRMW

SEQ ID NO: 67 - protein, 409 aa, Homo Sapiens
MEGESTSAVLSGFVLGALAFQHLNTDSDTEGFLLGEVKGEAKNSITDSQMDDVEVVYTIDIQKYIPCYQLFSFYNSSGEVNEQALKKILSNVKKNVVGWYKFRRHSDQIMTFRERLLHKNLQEHFSNQDLVFLLLTPSIITESCSTHRLEHSLYKPQKGLFHRVPLVVANLGMSEQLGYKTVSGSCMSTGFSRAVQTHSSKFFEEDGSLKEVHKINEMYASLQEELKSICKKVEDSEQAVDKLVKDVNRLKREIEKRRGAQIQAAREKNIQKDPQENIFLCQALRTFFPNSEFLHSCVMSLKNRHVSKSSCNYNHHLDVVDNLTLMVEHTDIPEASPASTPQIIKHKALDLDDRWQFKRSRLLDTQDKRSKADTGSSNQDKASKMSSPETDEEIEKMKGFGEYSRSPTF

SEQ ID NO: 68 - protein, 37 aa, Homo Sapiens
MEGESTSAVLSGFVLGALAFQHLNTDSDTVGRGGSRL

SEQ ID NO: 69 - protein, 189 aa, Homo Sapiens
MEGESTSAVLSGFVLGALAFQHLNTDSDTVSRGTGRGPASPGKSPARGLPPRCCSGPRPLPRRRRASSLRSRLCLLSPSAVPEEGFLLGEVKGEAKNSITDSQMDDVEVVYTIDIQKYIPCYQLFSFYNSSGEVNEQALKKILSNVKKNVVGWYKFRRHSDQIMTFRERLLHKNLQEHFSNQDLVFLLL

SEQ ID NO: 70 - protein, 220 aa, Homo Sapiens
MKTSSPKENCLFLCFTSMKNGQEGFLLGEVKGEAKNSITDSQMDDVEVVYTIDIQKYIPCYQLFSFYNSSGEVNEQALKKILSNVKKNVVGWYKFRRHSDQIMTFRERLLHKNLQEHFSNQDLVFLLLTPSIITESCSTHRLEHSLYKPQKGLFHRVPLVVANLGMSEQLGYKTVSGSCMSTGFSRAVQTHSSKFFEEDGSLKEVHKINEMYASLQEELK

SEQ ID NO: 71 - protein, 82 aa, Homo Sapiens
MMLKLFIQLMESHSVAQTGVKWHDLGSLQPLPLEVKRFSCLGLRSSWDYRHTQPCPANFFCIFSRDGVSPCWPGWSRTPDLK

SEQ ID NO: 72 - protein, 536 aa, Homo Sapiens
MGAWAFPAALFLLCLTSESLQGGLPLLPPGLGKVYGPHSGLGAGYDGGVKPQKPGFVVRHGLGTQPDTEGGMKPQNLGFRTFAGAAAQPGYGNGLGAAAFPVAGAQSGPAAQNGFGPGFGGGGKPQKPGPTTQNGYRPGYVGAVKPQKPGFQYRIGLGAQPGFRGDMKAQEPGLGNGNGLSAQPVLTAQNRFGFGAGLGGNVKPLKPGYGKRLRAGAFPGAGTQPEYGHGNGPGVQPGLGAGMKPQMPGLGAPNGYGPGRGRAGVPGGPERRPWVPHLLPFSSPGYLGVMKAQKPGPLAQNGYRAGAGEGMKPQKPGLRGTLKPQKSGHGHENGPWPGPCNARVAPMLLPRLPTPGVPSDKEGGWGLKSQPPSAVQNGKLPAPMPAIQWGLKPQKAGHQPPNGYGPGAEPGFNGGLEPQKIGLGYGNGVLGARVFPEAHPQPGFHGANGFRNRDGVEALVYPKAAALAPEGNGQAGVLWNSRWPTLQAWGAGLKPGYQAGDEYAEARSQPGGPDVKRGSNGQLGNGYGGRCPLGKC

SEQ ID NO: 73 - protein, 195 aa, Homo Sapiens
MPNFLGLHRARSFTVLCFWSTADVLNASGPRRQWHPLASCSSWSRPQSQGSTPGVLCKTGMGREPIPETQCHFANSMCSLHVSVPYFGNSPNISNFFRWSLALSPRQWCDLGSLQPPSPRFKGFSCLSLPSSWDYRRAPSPANFCILVEMGFHHVGQADLELLTSADLPTSASQSAGITGVSHHAWPQTLSLLLY

SEQ ID NO: 74 - protein, 130 aa, Homo Sapiens
MGGTWASKEPLRPRCRPINATLAVEKEGCPVCITVNTTICAGYCPTMTRVLQGVLPALPQVVCNYRDVRFESIRLPGCPRGVNPVVSYAVALSCQCALCRRSTTDCGGPKDHPLTCDDPRFQDSSSSKAP

SEQ ID NO: 75 - protein, 77 aa, Homo Sapiens
MSKGLLLLLLLSMGGTWASKEPLRPRCRPINATLAVEKEGCPVCITVNTTICAGYCPTMTRVLQGVLPALPQVVCNY

SEQ ID NO: 76 - protein, 165 aa, Homo Sapiens
MDAEGLALLLPPVTLAALVDSWLREDCPGLNYAALVSGAGPSQAALWAKSPGVLAGQPFFDAIFTQLNCQVSWFLPEGSKLVPVARVAEVRGPAHCLLLGERVALNTLARCSGIASAAAAAVEAARGAGWTGHVAGTRKTTPGFRLVEKYGLLVGGAASHRYDLG

SEQ ID NO: 77 - protein, 210 aa, Homo Sapiens [sequence omitted]

SEQ ID NO: 78 - protein, 83 aa, Homo Sapiens [sequence omitted]

SEQ ID NO: 79 - protein, 105 aa, Homo Sapiens
MKGWGWLALLLGALLGTAWARRSQDLHCGACRALVDELEWEIAQVDPKKTIQMGSFRINPDGSQSVVENASCLVLAARHASASSTNLKDILADLIPKEQARIKTF

SEQ ID NO: 80 - protein, 263 aa, Homo Sapiens
MKGWGWLALLLGALLGTAWARRSQDLHCGACRALVDELEWEIAQVDPKKTIQMGSFRINPDGSQSVVEVPYARSEAHLTELLEEICDRMKEYGEQIDPSTHRKNYVRVVGRNGESSELDLQGIRIDSDISGTLKFACESIVEEYEDELIEFFSREADNVKDKLCSKRTDGGTSKNRDRKGKMDVTNSAEKSRRSPAMALLTAAARLLGTKNASCLVLAARHASASSTNLKDILADLIPKEQARIKTFRQQHGKTVVGQITVDM

SEQ ID NO: 81 - protein, 171 aa, Homo Sapiens
MPETSHIVALTSKSEQELYIPSVVSNSPSTVQSIENTSKSHGEIFKKDVCAENNNNMAMLICLIIIAVLFLICTFLFLSTVVLANKVSSLRRSKQVGKRQPRSNGDFLASGLWPAESDTWKRTKQLTGPNLVMQSTGVLTATRERKDEEGTEKLTNKQIAKSPKCPVRTRI

SEQ ID NO: 82 - protein, 123 aa, Homo Sapiens
  misc_feature (1)..(1): Xaa can be any naturally occurring amino acid
XCAENNNNMAMLICLIIIAVLFLICTFLFLSTVVLANKVSSLRRSKQVGKRQPRSNGDFLASGLWPAESDTWKRTKQLTGPNLVMQSTGVLTATRERKDEEGTEKLTNKQIAKSPKCPVRTRI

SEQ ID NO: 83 - protein, 117 aa, Homo Sapiens
  misc_feature (1)..(1): Xaa can be any naturally occurring amino acid
XCAENNNNMAMLICLIIIAVLFLICTFLFLSTVVLANKVSSLRRSKQVGKRQPRSNGDFLASGLWPAESDTWKRTKQLTGPNLVMQSTGVLTATRERKDEEGTEKLTNKQIDNEEIF

SEQ ID NO: 84 - protein, 153 aa, Homo Sapiens
  misc_feature (1)..(1): Xaa can be any naturally occurring amino acid
XCAENNNNMAMLICLIIIAVLFLICTFLFLSTVVLANKVSSLRRSKQVGKRQPRSNGDFLASGLWPAESDTWKRTKQLTGPNLVMQSTGVLTATRERKDEEGTEKLTNKQIEEETVTQKCRVLPKVIQVNRTHHSLLMRRNLTKLFQFARGTF

SEQ ID NO: 85 - protein, 104 aa, Homo Sapiens
MGSTWGSPGWVRLALCLTGLVLSLYALHVKAARARDRDYRALCDVGTAISCSRVFSSRAAATELNSWSVVLGSLQREGLSPGAEEVGVAALQLPRAYNHYSQGS

SEQ ID NO: 86 - protein, 166 aa, Homo Sapiens
MGSTWGSPGWVRLALCLTGLVLSLYALHVKAARARDRDYRALCDVGTAISCSRVFSSRWGRGFGLVEHVLGQDSILNQSNSIFGCIFYTLQLLLGLQAAQRACGQRGPGPPKPQEGNTVPGEWPWQASVRRQGAHICSGSLVADTWVLTAAHCFEKAAATELNSWS

SEQ ID NO: 87 - protein, 121 aa, Homo Sapiens
  misc_feature (1)..(1): Xaa can be any naturally occurring amino acid
XDVGTAISCSRVFSSRWGRGFGLVEHVLGQDSILNQSNSIFGCIFYTLQLLLGCLRTRWASVLMLLSSLVSLAGSVYLAWILFFVLYDFCIVCITTYAINVSLMWLSFRKVQEPQGKAKRH

SEQ ID NO: 88 - protein, 199 aa, Homo Sapiens
MALLLRFVLLCRVADFIRGWSITTPEQMIEKAKGETAYLPCKFTLSPEDQGPLDIEWLISPADNQKVDQVIILYSGDKIYDDYYPDLKGRVHFKSNDLKSGDASINVTNFQLSDIGTDQCKVKRAPGVANRKIQLVVLGKMCRLQRAARPLPEATAVIIHPWDPYLLPTWKDIPRLSINKYQVKTLNALLRVRLSHLLR

SEQ ID NO: 89 - protein, 116 aa, Homo Sapiens
MEFGLNWVFLVAIIKGAQCEVQLVESGGGLVQPGGSLRLSCPDSGFTFSNHYMSWVRQAPGKGLEWISYISGDSGYTNYADSVKGRFTISRDNANNSPYLQMNSLRAEDTAVYYCV

SEQ ID NO: 90 - protein, 124 aa, Homo Sapiens
MLCPRAAFLVGSFHGVFPGPPASSHWEFWVPSTPVGAYFCPPQPQLTPPNTPKLVSEVEELYKSITALREKLLQAEQSLRNLKDIHMSLEKDVTAMTNSVFIDRQKCMAHRTCYPTILQLAGYQ

SEQ ID NO: 91 - protein, 117 aa, Homo Sapiens
MKHLWFFLLLVAAPRWVLSQVQLQESGPGLVKPSETLSLTCTVSGYSISSGYYWGWIRQPPGKGLEWIGSIYHSGSTYYNPSLKSRVTISVDTSKNQFSLKLSSVTAADTAVYYCAR

SEQ ID NO: 92 - protein, 67 aa, Homo Sapiens
MESPSAPPHRWCIPWQRLLLTASLLTFWNPPTTAKLTIESTPFNVAEGKEVLLLAHNLPQNRIGYSW

SEQ ID NO: 93 - protein, 152 aa, Homo Sapiens
MESPSAPPHRWCIPWQRLLLTASLLTFWNPPTTAKLTIESTPFNVAEGKEVLLLVHNLPQHLFGYSWYKGERVDGNRQIIGYVIGTQQATPGPAYSGREIIYPNASLLIQNIIQNDTGFYTLHVIKSDLVNEEATGQFRVYPELPKPSISSN

SEQ ID NO: 94 - protein, 155 aa, Homo Sapiens
MSPAKCKICFPDREVKPSMSGLHLVKRGREHKKLDLHRDFTVASPAEFVTRFGGDRVIEKVLIANNGIAAVKCMRSIRRWAYEMFRNERAIRFVVMVTPEDLKANAEYIKMADHYVPVPGGPNNNNYANVELIVDIAKRIPVQAVWAGWGHASEN

SEQ ID NO: 95 - protein, 143 aa, Homo Sapiens
MTDSKPITKSKSEANLIPSQEPFPASDNSGETPQRNGEGHTLPKTPSQAEPASHKGPKDAGRRRNSLPPSHQKPPRNPLSSSDAAPSPELQANGTGTQGLEATDTNGLSSSARPQGQQAGSPSKEDKKQANIKRQLMTNFILG

SEQ ID NO: 96 - protein, 858 aa, Homo Sapiens
MTVPISITNPDLLRHSTELFMDSGFSPLCQRMGAMVAFRRFEDFTRNFDEVISCFANVPKDTPLFSEARTSLYSEDDCKSLREEPIHILNVSIQCADHLEDEALVPILRTFVQSKKNILVDYGLRRITFLIAQEKEFPKFFTFRARDEFAEDRIYRHLEPALAFQLELNRMRNFDLTAVPCANHKMHLYLGAAKVKEGVEVTDHRFFIRAIIRHSDLITKEASFEYLQNEGERLLLEAMDELEVAFNNTSVRTDCNHIFLNFVPTVIMDPFKIEESVRYMVMRYGSRLWKLRVLQAEVKINIRQTTTGSAVPIRLFITNESGYYLDISLYKEVTDSRSGNIMFHSFGNKQGPQHGMLINTPYVTKDLLQAKRFQAQTLGTTYIYDFPEMFRQALFKLWGSPDKYPKDILTYTELVLDSQGQLVEMNRLPGGNEVGMVAFKMRFKTQEYPEGRDVIVIGNDITFRIGSFGPGEDLLYLRASEMARAEGIPKIYVAANSGARIGMAEEIKHMFHVAWVDPEDPHKGFKYLYLTPQDYTRISSLNSVHCKHIEEGGESRYMITDIIGKDDGLGVENLRGSGMIAGESSLAYEEIVTISLVTCRAIGIGAYLVRLGQRVIQVENSHIILTGASALNKVLGREVYTSNNQLGGVQIMHYNGVSHITVPDDFEGVYTILEWLSYMPKDNHSPVPIITPTDPIDREIEFLPSRAPYDPRWMLAGRPHPTLKGTWQSGFFDHGSFKEIMAPWAQTVVTGRARLGGIPVGVIAVETRTVEVAVPADPANLDSEAKIIQQAGQVWFPDSAYKTAQAVKDFNREKLPLMIFANWRGFSGGMKGCLGTWRDVSWWKIRAMLPMHIGEGSV

SEQ ID NO: 97 - protein, 2458 aa, Homo Sapiens
MVLLLCLSCLIFSCLTFSWLKIWGKMTDSKPITKSKSEANLIPSQEPFPASDNSGETPQRNGEGHTLPKTPSQAEPASHKGPKDAGRRRNSLPPSHQKPPRNPLSSSDAAPSPELQANGTGTQGLEATDTNGLSSSARPQGQQAGSPSKEDKKQANIKRQLMTNFILGSFDDYSSDEDSVAGSSRESTRKGSRASLGALSLEAYLTTGEAETRVPTMRPSMSGLHLVKRGREHKKLDLHRDFTVASPAEFVTRFGGDRVIEKVLIANNGIAAVKCMRSIRRWAYEMFRNERAIRFVVMVTPEDLKANAEYIKMADHYVPVPGGPNNNNYANVELIVDIAKRIPVQAVWAGWGHASENPKLPELLCKNGVAFLGPPSEAMWALGDKIASTVVAQTLQVPTLPWSGSGLTVEWTEDDLQQGKRISVPEDVYDKGCVKDVDEGLEAAERIGFPLMIKASEGGGGKGIRKAESAEDFPILFRQVQSEIPGSPIFLMKLAQHARHLEVQILADQYGNAVSLFGRDCSIQRRHQKIVEEAPATIAPLAIFEFMEQCAIRLAKTVGYVSAGTVEYLYSQDGSFHFLELNPRLQVEHPCTEMIADVNLPAAQLQIAMGVPLHRLKDIRLLYGESPWGVTPISFETPSNPPLARGHVIAARITSENPDEGFKPSSGTVQELNFRSSKNVWGYFSVAATGGLHEFADSQFGHCFSWGENREEAISNMVVALKELSIRGDFRTTVEYLINLLETESFQNNDIDTGWLDYLIAEKVQAEKPDIMLGVVCGALNVADAMFRTCMTDFLHSLERGQVLPADSLLNLVDVELIYGGVKYILKVARQSLTMFVLIMNGCHIEIDAHRLNDGGLLLSYNGNSYTTYMKEEVDSYRITIGNKTCVFEKENDPTVLRSPSAGKLTQYTVEDGGHVEAGSSYAEMEVMKMIMTLNVQERGRVKYIKRPGAVLEAGCVVARLELDDPSKVHPAEPFTGELPAQQTLPILGEKLHQVFHSVLENLTNVMSGFCLPEPVFSIKLKEWVQKLMMTLRHPSLPLLELQEIMTSVAGRIPAPVEKSVRRVMAQYASNITSVLCQFPSQQIATILDCHAATLQRKADREVFFINTQSIVQLVQRYRSGIRGYMKTVVLDLLRRYLRVEHHFQQAHYDKCVINLREQFKPDMSQVLDCIFSHAQVAKKNQLVIMLIDELCGPDPSLSDELISILNELTQLSKSEHCKVALRARQILIASHLPSYELRHNQVESIFLSAIDMYGHQFCPENLKKLILSETTIFDVLPTFFYHANKVVCMASLEVYVRRGYIAYELNSLQHRQLPDGTCVVEFQFMLPSSHPNRMTVPISITNPDLLRHSTELFMDSGFSPLCQRMGAMVAFRRFEDFTRNFDEVISCFANVPKDTPLFSEARTSLYSEDDCKSLREEPIHILNVSIQCADHLEDEALVPILRTFVQSKKNILVDYGLRRITFLIAQEKEFPKFFTFRARDEFAEDRIYRHLEPALAFQLELNRMRNFDLTAVPCANHKMHLYLGAAKVKEGVEVTDHRFFIRAIIRHSDLITKEASFEYLQNEGERLLLEAMDELEVAFNNTSVRTDCNHIFLNFVPTVIMDPFKIEESVRYMVMRYGSRLWKLRVLQAEVKINIRQTTTGSAVPIRLFITNESGYYLDISLYKEVTDSRSGNIMFHSFGNKQGPQHGMLINTPYVTKDLLQAKRFQAQTLGTTYIYDFPEMFRQALFKLWGSPDKYPKDILTYTELVLDSQGQLVEMNRLPGGNEVGMVAFKMRFKTQEYPEGRDVIVIGNDITFRIGSFGPGEDLLYLRASEMARAEGIPKIYVAANSGARIGMAEEIKHMFHVAWVDPEDPHKGFKYLYLTPQDYTRISSLNSVHCKHIEEGGESRYMITDIIGKDDGLGVENLRGSGMIAGESSLAYEEIVTISLVTCRAIGIGAYLVRLGQRVIQVENSHIILTGASALNKVLGREVYTSNNQLGGVQIMHYNGVSHITVPDDFEGVYTILEWLSYMPKDNHSPVPIITPTDPIDREIEFLPSRAPYDPRWMLAGRPHPTLKGTWQSGFFDHGSFKEIMAPWAQTVVTGRARLGGIPVGVIAVETRTVEVAVPADPANLDSEAKIIQQAGQVWFPDSAYKTAQAVKDFNREKLPLMIFANWRGFSGGMKDMYDQVLKFGAYIVDGLRQYKQPILIYIPPYAELRGGSWVVIDATINPLCIEMYADKESRGGVLEPEGTVEIKFRKKDLIKSMRRIDPAYKKLMEQLGEPDLSDKDRKDLEGRLKAREDLLLPIYHQVAVQFADFHDTPGRMLEKGVISDILEWKTARTFLYWRLRRLLLEDQVKQEILQASGELSHVHIQSMLRRWFVETEGAVKAYLWDNNQVVVQWLEQHWQAGDGPRSTIRENITYLKHDSVLKTIRGLVEENPEVAVDCVIYLSQHISPAERAQVVHLLSTMDSPAST

SEQ ID NO: 98 - protein, 2458 aa, Homo Sapiens; identical to SEQ ID NO: 97

SEQ ID NO: 99 - protein, 859 aa, Homo Sapiens
  misc_feature (1)..(1): Xaa can be any naturally occurring amino acid
XMTVPISITNPDLLRHSTELFMDSGFSPLCQRMGAMVAFRRFEDFTRNFDEVISCFANVPKDTPLFSEARTSLYSEDDCKSLREEPIHILNVSIQCADHLEDEALVPILRTFVQSKKNILVDYGLRRITFLIAQEKEFPKFFTFRARDEFAEDRIYRHLEPALAFQLELNRMRNFDLTAVPCANHKMHLYLGAAKVKEGVEVTDHRFFIRAIIRHSDLITKEASFEYLQNEGERLLLEAMDELEVAFNNTSVRTDCNHIFLNFVPTVIMDPFKIEESVRYMVMRYGSRLWKLRVLQAEVKINIRQTTTGSAVPIRLFITNESGYYLDISLYKEVTDSRSGNIMFHSFGNKQGPQHGMLINTPYVTKDLLQAKRFQAQTLGTTYIYDFPEMFRQALFKLWGSPDKYPKDILTYTELVLDSQGQLVEMNRLPGGNEVGMVAFKMRFKTQEYPEGRDVIVIGNDITFRIGSFGPGEDLLYLRASEMARAEGIPKIYVAANSGARIGMAEEIKHMFHVAWVDPEDPHKGFKYLYLTPQDYTRISSLNSVHCKHIEEGGESRYMITDIIGKDDGLGVENLRGSGMIAGESSLAYEEIVTISLVTCRAIGIGAYLVRLGQRVIQVENSHIILTGASALNKVLGREVYTSNNQLGGVQIMHYNGVSHITVPDDFEGVYTILEWLSYMPKDNHSPVPIITPTDPIDREIEFLPSRAPYDPRWMLAGRPHPTLKGTWQSGFFDHGSFKEIMAPWAQTVVTGRARLGGIPVGVIAVETRTVEVAVPADPANLDSEAKIIQQAGQVWFPDSAYKTAQAVKDFNREKLPLMIFANWRGFSGGMKGCLGTWRDVSWWKIRAMLPMHIGEGSV

SEQ ID NO: 100 - protein, 112 aa, Homo Sapiens
  misc_feature (1)..(1): Xaa can be any naturally occurring amino acid
XVEMNRLPGGNEVGMVAFKMRFKTQEYPEGRDVIVIGNDITFRIGSFGPGEDLLYLRASEMARAEGIPKIYVAANSGARIGMAEEIKHMFHVAWVDPEDPHKIHDHGYHREG

SEQ ID NO: 101 - protein, 2431 aa, Homo Sapiens
MTTLLWVFVTLRVITAAVTVETSDHDNSLSVSIPQPSPLRVLLGTSLTIPCYFIDPMHPVTTAPSTAPLAPRIKWSRVSKEKEVVLLVATEGRVRVNSAYQDKVSLPNYPAIPSDATLEVQSLRSNDSGVYRCEVMHGIEDSEATLEVVVKGIVFHYRAISTRYTLDFDRAQRACLQNSAIIATPEQLQAAYEDGFHQCDAGWLADQTVRYPIHTPREGCYGDKDEFPGVRTYGIRDTNETYDVYCFAEEMEGEVFYATSPEKFTFQEAANECRRLGARLATTGQLYLAWQAGMDMCSAGWLADRSVRYPISKARPNCGGNLLGVRTVYVHANQTGYPDPSSRYDAICYTGEDFVDIPENFFGVGGEEDITVQTVTWPDMELPLPRNITEGEARGSVILTVKPIFEVSPSPLEPEEPFTFAPEIGATAFAEVENETGEATRPWGFPTPGLGPATAFTSEDLVVQVTAVPGQPHLPGGVVFHYRPGPTRYSLTFEEAQQACLRTGAVIASPEQLQAAYEAGYEQCDAGWLRDQTVRYPIVSPRTPCVGDKDSSPGVRTYGVRPSTETYDVYCFVDRLEGEVFFATRLEQFTFQEALEFCESHNATLATTGQLYAAWSRGLDKCYAGWLADGSLRYPIVTPRPACGGDKPGVRTVYLYPNQTGLPDPLSRHHAFCFRGISAVPSPGEEEGGTPTSPSGVEEWIVTQVVPGVAAVPVEEETTAVPSGETTAILEFTTEPENQTEWEPAYTPVGTSPLPGILPTWPPTGAATEESTEGPSATEVPSASEEPSPSEVPFPSEEPSPSEEPFPSVRPFPSVELFPSEEPFPSKEPSPSEEPSASEEPYTPSPPVPSWTELPSSGEESGAPDVSGDFTGSGDVSGHLDFSGQLSGDRASGLPSGDLDSSGLTSTVGSGLPVESGLPSGDEERIEWPSTPTVGELPSGAEILEGSASGVGDLSGLPSGEVLETSASGVGDLSGLPSGEVLETTAPGVEDISGLPSGEVLETTAPGVEDISGLPSGEVLETTAPGVEDISGLPSGEVLETTAPGVEDISGLPSGEVLETTAPGVEDISGLPSGEVLETTAPGVEDISGLPSGEVLETAAPGVEDISGLPSGEVLETAAPGVEDISGLPSGEVLETAAPGVEDISGLPSGEVLETAAPGVEDISGLPSGEVLETAAPGVEDISGLPSGEVLETAAPGVEDISGLPSGEVLETAAPGVEDISGLPSGEVLETAAPGVEDISGLPSGEVLETAAPGVEDISGLPSGEVLETAAPGVEDISGLPSGEVLETAAPGVEDISGLPSGEVLETAAPGVEDISGLPSGEVLETAAPGVEDISGLPSGEVLETAAPGVEDISGLPSGEVLETAAPGVEDISGLPSGEVLETAAPGVEDISGLPSGEVLETTAPGVEEISGLPSGEVLETTAPGVDEISGLPSGEVLETTAPGVEEISGLPSGEVLETSTSAVGDLSGLPSGGEVLEISVSGVEDISGLPSGEVVETSASGIEDVSELPSGEGLETSASGVEDLSRLPSGEEVLEISASGFGDLSGLPSGGEGLETSASEVGTDLSGLPSGREGLETSASGAEDLSGLPSGKEDLVGSASGDLDLGKLPSGTLGSGQAPETSGLPSGFSGEYSGVDLGSGPPSGLPDFSGLPSGFPTVSLVDSTLVEVVTASTASELEGRGTIGISGAGEISGLPSSELDISGRASGLPSGTELSGQASGSPDVSGEIPGLFGVSGQPSGFPDTSGETSGVTELSGLSSGQPGISGEASGVLYGTSQPFGITDLSGETSGVPDLSGQPSGLPGFSGATSGVPDLVSGTTSGSGESSGITFVDTSLVEVAPTTFKEEEGLGSVELSGLPSGEADLSGKSGMVDVSGQFSGTVDSSGFTSQTPEFSGLPSGIAEVSGESSRAEIGSSLPSGAYYGSGTPSSFPTVSLVDRTLVESVTQAPTAQEAGEGPSGILELSGAHSGAPDMSGEHSGFLDLSGLQSGLIEPSGEPPGTPYFSGDFASTTNVSGESSVAMGTSGEASGLPEVTLITSEFVEGVTEPTISQELGQRPPVTHTPQLFESSGKVSTAGDISGATPVLPGSGVEVSSVPESSSETSAYPEAGFGASAAPEASREDSGSPDLSETTSAFHEANLERSSGLGVSGSTLTFQEGEASAAPEVSGESTTTSDVGTEAPGLPSATPTASGDRTEISGDLSGHTSQLGVVISTSIPESEWTQQTQRPAETHLEIESSSLLYSGEETHTVETATSPTDASIPASPEWKRESESTAADQEVCEEGWNKYQGHCYRHFPDRETWVDAERRCREQQSHLSSIVTPEEQEFVNNNAQDYQWIGLNDRTIEGDFRWSDGHPMQFENWRPNQPDNFFAAGEDCVVMIWHEKGEWNDVPCNYHLPFTCKKGTATTYKRRLQKRSSRHPRRSRPSTAH

SEQ ID NO: 102 - protein, 2530 aa, Homo Sapiens
MTTLLWVFVTLRVITAAVTVETSDHDNSLSVSIPQPSPLRVLLGTSLTIPCYFIDPMHPVTTAPSTAPLAPRIKWSRVSKEKEVVLLVATEGRVRVNSAYQDKVSLPNYPAIPSDATLEVQSLRSNDSGVYRCEVMHGIEDSEATLEVVVKGIVFHYRAISTRYTLDFDRAQRACLQNSAIIATPEQLQAAYEDGFHQCDAGWLADQTVRYPIHTPREGCYGDKDEFPGVRTYGIRDTNETYDVYCFAEEMEGEVFYATSPEKFTFQEAANECRRLGARLATTGQLYLAWQAGMDMCSAGWLADRSVRYPISKARPNCGGNLLGVRTVYVHANQTGYPDPSSRYDAICYTGEDFVDIPENFFGVGGEEDITVQTVTWPDMELPLPRNITEGEARGSVILTVKPIFEVSPSPLEPEEPFTFAPEIGATAFAEVENETGEATRPWGFPTPGLGPATAFTSEDLVVQVTAVPGQPHLPGGVVFHYRPGPTRYSLTFEEAQQACLRTGAVIASPEQLQAAYEAGYEQCDAGWLRDQTVRYPIVSPRTPCVGDKDSSPGVRTYGVRPSTETYDVYCFVDRLEGEVFFATRLEQFTFQEALEFCESHNATLATTGQLYAAWSRGLDKCYAGWLADGSLRYPIVTPRPACGGDKPGVRTVYLYPNQTGLPDPLSRHHAFCFRGISAVPSPGEEEGGTPTSPSGVEEWIVTQVVPGVAAVPVEEETTAVPSGETTAILEFTTEPENQTEWEPAYTPVGTSPLPGILPTWPPTGAATEESTEGPSATEVPSASEEPSPSEVPFPSEEPSPSEEPFPSVRPFPSVELFPSEEPFPSKEPSPSEEPSASEEPYTPSPPVPSWTELPSSGEESGAPDVSGDFTGSGDVSGHLDFSGQLSGDRASGLPSGDLDSSGLTSTVGSGLPVESGLPSGDEERIEWPSTPTVGELPSGAEILEGSASGVGDLSGLPSGEVLETSASGVGDLSGLPSGEVLETTAPGVEDISGLPSGEVLETTAPGVEDISGLPSGEVLETTAPGVEDISGLPSGEVLETTAPGVEDISGLPSGEVLETTAPGVEDISGLPSGEVLETTAPGVEDISGLPSGEVLETAAPGVEDISGLPSGEVLETAAPGVEDISGLPSGEVLETAAPGVEDISGLPSGEVLETAAPGVEDISGLPSGEVLETAAPGVEDISGLPSGEVLETAAPGVEDISGLPSGEVLETAAPGVEDISGLPSGEVLETAAPGVEDISGLPSGEVLETAAPGVEDISGLPSGEVLETAAPGVEDISGLPSGEVLETAAPGVEDISGLPSGEVLETAAPGVEDISGLPSGEVLETAAPGVEDISGLPSGEVLETAAPGVEDISGLPSGEVLETAAPGVEDISGLPSGEVLETAAPGVEDISGLPSGEVLETTAPGVEEISGLPSGEVLETTAPGVDEISGLPSGEVLETTAPGVEEISGLPSGEVLETSTSAVGDLSGLPSGGEVLEISVSGVEDISGLPSGEVVETSASGIEDVSELPSGEGLETSASGVEDLSRLPSGEEVLEISASGFGDLSGLPSGGEGLETSASEVGTDLSGLPSGREGLETSASGAEDLSGLPSGKEDLVGSASGDLDLGKLPSGTLGSGQAPETSGLPSGFSGEYSGVDLGSGPPSGLPDFSGLPSGFPTVSLVDSTLVEVVTASTASELEGRGTIGISGAGEISGLPSSELDISGRASGLPSGTELSGQASGSPDVSGEIPGLFGVSGQPSGFPDTSGETSGVTELSGLSSGQPGISGEASGVLYGTSQPFGITDLSGETSGVPDLSGQPSGLPGFSGATSGVPDLVSGTTSGSGESSGITFVDTSLVEVAPTTFKEEEGLGSVELSGLPSGEADLSGKSGMVDVSGQFSGTVDSSGFTSQTPEFSGLPSGIAEVSGESSRAEIGSSLPSGAYYGSGTPSSFPTVSLVDRTLVESVTQAPTAQEAGEGPSGILELSGAHSGAPDMSGEHSGFLDLSGLQSGLIEPSGEPPGTPYFSGDFASTTNVSGESSVAMGTSGEASGLPEVTLITSEFVEGVTEPTISQELGQRPPVTHTPQLFESSGKVSTAGDISGATPVLPGSGVEVSSVPESSSETSAYPEAGFGASAAPEASREDSGSPDLSETTSAFHEANLERSSGLGVSGSTLTFQEGEASAAPEVSGESTTTSDVGTEAPGLPSATPTASGDRTEISGDLSGHTSQLGVVISTSIPESEWTQQTQRPAETHLEIESSSLLYSGEETHTVETATSPTDASIPASPEWKRESESTAAAPARSCAEEPCGAGTCKETEGHVICLCPPGYTGEHCNIDQEVCEEGWNKYQGHCYRHFPDRETWVDAERRCREQQSHLSSIVTPEEQEFVNNNAQDYQWIGLNDRTIEGDFRWSDGHPMQFENWRPNQPDNFFAAGEDCVVMIWHEKGEWNDVPCNYHLPFTCKKGTVACGEPPVVEHARTFGQKKDRYEINSLVRYQCTEGFVQRHMPTIRCQPSGHWEEPQITCTDPTTYKRRLQKRSSRHPRRSRPSTAH

SEQ ID NO: 103 - protein, 2492 aa, Homo Sapiens
MTTLLWVFVTLRVITAAVTVETSDHDNSLSVSIPQPSPLRVLLGTSLTIPCYFIDPMHPVTTAPSTAPLAPRIKWSRVSKEKEVVLLVATEGRVRVNSAYQDKVSLPNYPAIPSDATLEVQSLRSNDSGVYRCEVMHGIEDSEATLEVVVKGIVFHYRAISTRYTLDFDRAQRACLQNSAIIATPEQLQAAYEDGFHQCDAGWLADQTVRYPIHTPREGCYGDKDEFPGVRTYGIRDTNETYDVYCFAEEMEGEVFYATSPEKFTFQEAANECRRLGARLATTGQLYLAWQAGMDMCSAGWLADRSVRYPISKARPNCGGNLLGVRTVYVHANQTGYPDPSSRYDAICYTGEDFVDIPENFFGVGGEEDITVQTVTWPDMELPLPRNITEGEARGSVILTVKPIFEVSPSPLEPEEPFTFAPEIGATAFAEVENETGEATRPWGFPTPGLGPATAFTSEDLVVQVTAVPGQPHLPGGVVFHYRPGPTRYSLTFEEAQQACLRTGAVIASPEQLQAAYEAGYEQCDAGWLRDQTVRYPIVSPRTPCVGDKDSSPGVRTYGVRPSTETYDVYCFVDRLEGEVFFATRLEQFTFQEALEFCESHNATLATTGQLYAAWSRGLDKCYAGWLADGSLRYPIVTPRPACGGDKPGVRTVYLYPNQTGLPDPLSRHHAFCFRGISAVPSPGEEEGGTPTSPSGVEEWIVTQVVPGVAAVPVEEETTAVPSGETTAILEFTTEPENQTEWEPAYTPVGTSPLPGILPTWPPTGAATEESTEGPSATEVPSASEEPSPSEVPFPSEEPSPSEEPFPSVRPFPSVELFPSEEPFPSKEPSPSEEPSASEEPYTPSPPVPSWTELPSSGEESGAPDVSGDFTGSGDVSGHLDFSGQLSGDRASGLPSGDLDSSGLTSTVGSGLPVESGLPSGDEERIEWPSTPTVGELPSGAEILEGSASGVGDLSGLPSGEVLETSASGVGDLSGLPSGEVLETTAPGVEDISGLPSGEVLETTAPGVEDISGLPSGEVLETTAPGVEDISGLPSGEVLETTAPGVEDISGLPSGEVLETTAPGVEDISGLPSGEVLETTAPGVEDISGLPSGEVLETAAPGVEDISGLPSGEVLETAAPGVEDISGLPSGEVLETAAPGVEDISGLPSGEVLETAAPGVEDISGLPSGEVLETAAPGVEDISGLPSGEVLETAAPGVEDISGLPSGEVLETAAPGVEDISGLPSGEVLETAAPGVEDISGLPSGEVLETAAPGVEDISGLPSGEVLETAAPGVEDISGLPSGEVLETAAPGVEDISGLPSGEVLETAAPGVEDISGLPSGEVLETAAPGVEDISGLPSGEVLETAAPGVEDISGLPSGEVLETAAPGVEDISGLPSGEVLETAAPGVEDISGLPSGEVLETTAPGVEEISGLPSGEVLETTAPGVDEISGLPSGEVLETTAPGVEEISGLPSGEVLETSTSAVGDLSGLPSGGEVLEISVSGVEDISGLPSGEVVETSASGIEDVSELPSGEGLETSASGVEDLSRLPSGEEVLEISASGFGDLSGLPSGGEGLETSASEVGTDLSGLPSGREGLETSASGAEDLSGLPSGKEDLVGSASGDLDLGKLPSGTLGSGQAPETSGLPSGFSGEYSGVDLGSGPPSGLPDFSGLPSGFPTVSLVDSTLVEVVTASTASELEGRGTIGISGAGEISGLPSSELDISGRASGLPSGTELSGQASGSPDVSGEIPGLFGVSGQPSGFPDTSGETSGVTELSGLSSGQPGISGEASGVLYGTSQPFGITDLSGETSGVPDLSGQPSGLPGFSGATSGVPDLVSGTTSGSGESSGITFVDTSLVEVAPTTFKEEEGLGSVELSGLPSGEADLSGKSGMVDVSGQFSGTVDSSGFTSQTPEFSGLPSGIAEVSGESSRAEIGSSLPSGAYYGSGTPSSFPTVSLVDRTLVESVTQAPTAQEAGEGPSGILELSGAHSGAPDMSGEHSGFLDLSGLQSGLIEPSGEPPGTPYFSGDFASTTNVSGESSVAMGTSGEASGLPEVTLITSEFVEGVTEPTISQELGQRPPVTHTPQLFESSGKVSTAGDISGATPVLPGSGVEVSSVPESSSETSAYPEAGFGASAAPEASREDSGSPDLSETTSAFHEANLERSSGLGVSGSTLTFQEGEASAAPEVSGESTTTSDVGTEAPGLPSATPTASGDRTEISGDLSGHTSQLGVVISTSIPESEWTQQTQRPAETHLEIESSSLLYSGEETHTVETATSPTDASIPASPEWKRESESTAADQEVCEEGWNKYQGHCYRHFPDRETWVDAERRCREQQSHLSSIVTPEEQEFVNNNAQDYQWIGLNDRTIEGDFRWSDGHPMQFENWRPNQPDNFFAAGEDCVVMIWHEKGEWNDVPCNYHLPFTCKKGTVACGEPPVVEHARTFGQKKDRYEINSLVRYQCTEGFVQRHMPTIRCQPSGHWEEPQITCTDPTTYKRRLQKRSSRHPRRSRPSTAH

SEQ ID NO: 104 - protein, 721 aa, Homo Sapiens
MTTLLWVFVTLRVITAAVTVETSDHDNSLSVSIPQPSPLRVLLGTSLTIPCYFIDPMHPVTTAPSTAPLAPRIKWSRVSKEKEVVLLVATEGRVRVNSAYQDKVSLPNYPAIPSDATLEVQSLRSNDSGVYRCEVMHGIEDSEATLEVVVKGIVFHYRAISTRYTLDFDRAQRACLQNSAIIATPEQLQAAYEDGFHQCDAGWLADQTVRYPIHTPREGCYGDKDEFPGVRTYGIRDTNETYDVYCFAEEMEGEVFYATSPEKFTFQEAANECRRLGARLATTGQLYLAWQAGMDMCSAGWLADRSVRYPISKARPNCGGNLLGVRTVYVHANQTGYPDPSSRYDAICYTGEDFVDIPENFFGVGGEEDITVQTVTWPDMELPLPRNITEGEARGSVILTVKPIFEVSPSPLEPEEPFTFAPEIGATAFAEVENETGEATRPWGFPTPGLGPATAFTSEDLVVQVTAVPGQPHLPGGVVFHYRPGPTRYSLTFEEAQQACLRTGAVIASPEQLQAAYEAGYEQCDAGWLRDQTVRYPIVSPRTPCVGDKDSSPGVRTYGVRPSTETYDVYCFVDRLEGEVFFATRLEQFTFQEALEFCESHNATLATTGQLYAAWSRGLDKCYAGWLADGSLRYPIVTPRPACGGDKPGVRTVYLYPNQTGLPDPLSRHHAFCFRGMQPHFGSNSPFCLERTPLGSPDPATTQYPIHQSKKMSVPLGQSQL

SEQ ID NO: 105 - protein, 2530 aa, Homo Sapiens; identical to SEQ ID NO: 102

SEQ ID NO: 106 - protein, 2568 aa, Homo Sapiens
MTTLLWVFVTLRVITAAVTVETSDHDNSLSVSIPQPSPLRVLLGTSLTIPCYFIDPMHPVTTAPSTAPLAPRIKWSRVSKEKEVVLLVATEGRVRVNSAYQDKVSLPNYPAIPSDATLEVQSLRSNDSGVYRCEVMHGIEDSEATLEVVVKGIVFHYRAISTRYTLDFDRAQRACLQNSAIIATPEQLQAAYEDGFHQCDAGWLADQTVRYPIHTPREGCYGDKDEFPGVRTYGIRDTNETYDVYCFAEEMEGEVFYATSPEKFTFQEAANECRRLGARLATTGQLYLAWQAGMDMCSAGWLADRSVRYPISKARPNCGGNLLGVRTVYVHANQTGYPDPSSRYDAICYTGEDFVDIPENFFGVGGEEDITVQTVTWPDMELPLPRNITEGEARGSVILTVKPIFEVSPSPLEPEEPFTFAPEIGATAFAEVENETGEATRPWGFPTPGLGPATAFTSEDLVVQVTAVPGQPHLPGGVVFHYRPGPTRYSLTFEEAQQACLRTGAVIASPEQLQAAYEAGYEQCDAGWLRDQTVRYPIVSPRTPCVGDKDSSPGVRTYGVRPSTETYDVYCFVDRLEGEVFFATRLEQFTFQEALEFCESHNATLATTGQLYAAWSRGLDKCYAGWLADGSLRYPIVTPRPACGGDKPGVRTVYLYPNQTGLPDPLSRHHAFCFRGISAVPSPGEEEGGTPTSPSGVEEWIVTQVVPGVAAVPVEEETTAVPSGETTAILEFTTEPENQTEWEPAYTPVGTSPLPGILPTWPPTGAATEESTEGPSATEVPSASEEPSPSEVPFPSEEPSPSEEPFPSVRPFPSVELFPSEEPFPSKEPSPSEEPSASEEPYTPSPPVPSWTELPSSGEESGAPDVSGDFTGSGDVSGHLDFSGQLSGDRASGLPSGDLDSSGLTSTVGSGLPVESGLPSGDEERIEWPSTPTVGELPSGAEILEGSASGVGDLSGLPSGEVLETSASGVGDLSGLPSGEVLETTAPGVEDISGLPSGEVLETTAPGVEDISGLPSGEVLETTAPGVEDISGLPSGEVLETTAPGVEDISGLPSGEVLETTAPGVEDISGLPSGEVLETTAPGVEDISGLPSGEVLETAAPGVEDISGLPSGEVLETAAPGVEDISGLPSGEVLETAAPGVEDISGLPSGEVLETAAPGVEDISGLPSGEVLETAAPGVEDISGLPSGEVLETAAPGVEDISGLPSGEVLETAAPGVEDISGLPSGEVLETAAPGVEDISGLPSGEVLETAAPGVEDISGLPSGEVLETAAPGVEDISGLPSGEVLETAAPGVEDISGLPSGEVLETAAPGVEDISGLPSGEVLETAAPGVEDISGLPSGEVLETAAPGVEDISGLPSGEVLETAAPGVEDISGLPSGEVLETAAPGVEDISGLPSGEVLETTAPGVEEISGLPSGEVLETTAPGVDEISGLPSGEVLETTAPGVEEISGLPSGEVLETSTSAVGDLSGLPSGGEVLEISVSGVEDISGLPSGEVVETSASGIEDVSELPSGEGLETSASGVEDLSRLPSGEEVLEISASGFGDLSGLPSGGEGLETSASEVGTDLSGLPSGREGLETSASGAEDLSGLPSGKEDLVGSASGDLDLGKLPSGTLGSGQAPETSGLPSGFSGEYSGVDLGSGPPSGLPDFSGLPSGFPTVSLVDSTLVEVVTASTASELEGRGTIGISGAGEISGLPSSELDISGRASGLPSGTELSGQASGSPDVSGEIPGLFGVSGQPSGFPDTSGETSGVTELSGLSSGQPGISGEASGVLYGTSQPFGITDLSGETSGVPDLSGQPSGLPGFSGATSGVPDLVSGTTSGSGESSGITFVDTSLVEVAPTTFKEEEGLGSVELSGLPSGEADLSGKSGMVDVSGQFSGTVDSSGFTSQTPEFSGLPSGIAEVSGESSRAEIGSSLPSGAYYGSGTPSSFPTVSLVDRTLVESVTQAPTAQEAGEGPSGILELSGAHSGAPDMSGEHSGFLDLSGLQSGLIEPSGEPPGTPYFSGDFASTTNVSGESSVAMGTSGEASGLPEVTLITSEFVEGVTEPTISQELGQRPPVTHTPQLFESSGKVSTAGDISGATPVLPGSGVEVSSVPESSSETSAYPEAGFGASAAPEASREDSGSPDLSETTSAFHEANLERSSGLGVSGSTLTFQEGEASAAPEVSGESTTTSDVGTEAPGLPSATPTASGDRTEISGDLSGHTSQLGVVISTSIPESEWTQQTQRPAETHLEIESSSLLYSGEETHTVETATSPTDASIPASPEWKRESESTAAAPARSCAEEPCGAGTCKETEGHVICLCPPGYTGEHCNIDIDECLSSPCLNGATCVDAIDSFTCLCLPSYEGDLCEIDQEVCEEGWNKYQGHCYRHFPDRETWVDAERRCREQQSHLSSIVTPEEQEFVNNNAQDYQWIGLNDRTIEGDFRWSDGHPMQFENWRPNQPDNFFAAGEDCVVMIWHEKGEWNDVPCNYHLPFTCKKGTVACGEPPVVEHARTFGQKKDRYEINSLVRYQCTEGFVQRHMPTIRCQPSGHWEEPQITCTDPTTYKRRLQKRSSRHPRRSRPSTAH

SEQ ID NO: 107 - protein, 2473 aa, Homo Sapiens
MTTLLWVFVTLRVITAAVTVETSDHDNSLSVSIPQPSPLRVLLGTSLTIPCYFIDPMHPVTTAPSTAPLAPRIKWSRVSKEKEVVLLVATEGRVRVNSAYQDKVSLPNYPAIPSDATLEVQSLRSNDSGVYRCEVMHGIEDSEATLEVVVKGIVFHYRAISTRYTLDFDRAQRACLQNSAIIATPEQLQAAYEDGFHQCDAGWLADQTVRYPIHTPREGCYGDKDEFPGVRTYGIRDTNETYDVYCFAEEMEGEVFYATSPEKFTFQEAANECRRLGARLATTGQLYLAWQAGMDMCSAGWLADRSVRYPISKARPNCGGNLLGVRTVYVHANQTGYPDPSSRYDAICYTGEDFVDIPENFFGVGGEEDITVQTVTWPDMELPLPRNITEGEARGSVILTVKPIFEVSPSPLEPEEPFTFAPEIGATAFAEVENETGEATRPWGFPTPGLGPATAFTSEDLVVQVTAVPGQPHLPGGVVFHYRPGPTRYSLTFEEAQQACLRTGAVIASPEQLQAAYEAGYEQCDAGWLRDQTVRYPIVSPRTPCVGDKDSSPGVRTYGVRPSTETYDVYCFVDRLEGEVFFATRLEQFTFQEALEFCESHNATLATTGQLYAAWSRGLDKCYAGWLADGSLRYPIVTPRPACGGDKPGVRTVYLYPNQTGLPDPLSRHHAFCFRGISAVPSPGEEEGGTPTSPSGVEEWIVTQVVPGVAAVPVEEETTAVPSGETTAILEFTTEPENQTEWEPAYTPVGTSPLPGILPTWPPTGAATEESTEGPSATEVPSASEEPSPSEVPFPSEEPSPSEEPFPSVRPFPSVELFPSEEPFPSKEPSPSEEPSASEEPYTPSPPVPSWTELPSSGEESGAPDVSGDFTGSGDVSGHLDFSGQLSGDRASGLPSGDLDSSGLTSTVGSGLPVESGLPSGDEERIEWPSTPTVGELPSGAEILEGSASGVGDLSGLPSGEVLETSASGVGDLSGLPSGEVLETTAPGVEDISGLPSGEVLETTAPGVEDISGLPSGEVLETTAPGVEDISGLPSGEVLETTAPGVEDISGLPSGEVLETTAPGVEDISGLPSGEVLETAAPGVEDISGLPSGEVLETAAPGVEDISGLPSGEVLETAAPGVEDISGLPSGEVLETAAPGVEDISGLPSGEVLETAAPGVEDISGLPSGEVLETAAPGVEDISGLPSGEVLETAAPGVEDISGLPSGEVLETAAPGVEDISGLPSGEVLETAAPGVEDISGLPSGEVLETAAPGVEDISGLPSGEVLETAAPGVEDISGLPSGEVLETAAPGVEDISGLPSGEVLETAAPGVEDISGLPSGEVLETAAPGVEDISGLPSGEVLETAAPGVEDISGLPSGEVLETAAPGVEDISGLPSGEVLETTAPGVEEISGLPSGEVLETTAPGVDEISGLPSGEVLETTAPGVEEISGLPSGEVLETSTSAVGDLSGLPSGGEVLEISVSGVEDISGLPSGEVVETSASGIEDVSELPSGEGLETSASGVEDLSRLPSGEEVLEISASGFGDLSGLPSGGEGLETSASEVGTDLSGLPSGREGLETSASGAEDLSGLPSGKEDLVGSASGDLDLGKLPSGTLGSGQAPETSGLPSGFSGEYSGVDLGSGPPSGLPDFSGLPSGFPTVSLVDSTLVEVVTASTASELEGRGTIGISGAGEISGLPSSELDISGRASGLPSGTELSGQASGSPDVSGEIPGLFGVSGQPSGFPDTSGETSGVTELSGLSSGQPGISGEASGVLYGTSQPFGITDLSGETSGVPDLSGQPSGLPGFSGATSGVPDLVSGTTSGSGESSGITFVDTSLVEVAPTTFKEEEGLGSVELSGLPSGEADLSGKSGMVDVSGQFSGTVDSSGFTSQTPEFSGLPSGIAEVSGESSRAEIGSSLPSGAYYGSGTPSSFPTVSLVDRTLVESVTQAPTAQEAGEGPSGILELSGAHSGAPDMSGEHSGFLDLSGLQSGLIEPSGEPPGTPYFSGDFASTTNVSGESSVAMGTSGEASGLPEVTLITSEFVEGVTEPTISQELGQRPPVTHTPQLFESSGKVSTAGDISGATPVLPGSGVEVSSVPESSSETSAYPEAGFGASAAPEASREDSGSPDLSETTSAFHEANLERSSGLGVSGSTLTFQEGEASAAPEVSGESTTTSDVGTEAPGLPSATPTASGDRTEISGDLSGHTSQLGVVISTSIPESEWTQQTQRPAETHLEIESSSLLYSGEETHTVETATSPTDASIPASPEWKRESESTAADQEVCEEGWNKYQGHCYRHFPDRETWVDAERRCREQQSHLSSIVTPEEQEFVNNNAQDYQWIGLNDRTIEGDFRWSDGHPMQFENWRPNQPDNFFAAGEDCVVMIWHEKGEWNDVPCNYHLPFTCKKGTVACGEPPVVEHARTFGQKKDRYEINSLVRYQCTEGFVQRHMPTIRCQPSGHWEEPQITCTDPTTYKRRLQKRSSRHPRRSRPSTAH

SEQ ID NO: 108 - protein, 156 aa, Homo Sapiens
  misc_feature (1)..(1): Xaa can be any naturally occurring amino acid
XWNDVPCNYHLPFTCKKGTVACGEPPVVEHARTFGQKKDRYEINSLVRYQCTEGFVQRHMPTIRCQPSGHWEEPQITCTDREHHPGHLAEHRPPPTNADYRSGAHGTLGGAAPAQPTEKSFQDAPRTLSPGACQADVHPTQTVSSSCRFLSYKESH

SEQ ID NO: 109 - protein, 282 aa, Homo Sapiens
LDMETTYSVATVCHPNGSCLQLEPDLTNVMATSRKYEDLLWAWEGWRDKAGRAILQFYPKYVELINQAARLNGYVDAGDSWRSMYETPSLEQDLERLFQELQPLYLNLHAYVRRALHRHYGAQHINLEGPIPAHLLGNMWAQTWSNIYDLVVPFPSAPSMDTTEAMLKQGWTPRRMFKEADDFFTSLGLLPVPPEFWNKSMLEKPTDGREVVCHASAWDFYNEHDINFLMKMALDKIAFIPFSYLVDQWRWRVFDGSITKENYNQEWWSLRLKYQGLCPPVP

SEQ ID NO: 110 - protein, 314 aa, Homo Sapiens
MDEGGCSQAAPAFAEGAGLGSGAPALSGSCLLTSGRCRCHRHRTALSIHPPLARPLFWSQFLLHHSHEADSLQKEEARLPQTKEEAALLSQEFAEAWGQKAKELYEPIWQNFTDPQLRRIIGAVRTLGSANLPLAKRQQYNALLSNMSRIYSTAKVCLPNKTATCWSLDPDLTNILASSRSYAMLLFAWEGWHNAAGIPLKPLYEDFTALSNEAYKQDGFTDTGAYWRSWYNSPTFEDDLEHLYQQLEPLYLNLHAFVRRALHRRYGDRYINLRGPIPAHLLGDMWAQSWENIYDMVVPFPDKPNLDVTSTMLQ

SEQ ID NO: 111 - protein, 168 aa, Homo Sapiens
MGAASGRRGPGLLLPLPLLLLLPPQPALALDPGLQPGNFSADEAGAQLFAQSYNSSAEQVLFQSVAASWAHDTNITAENARRQEEAALLSQEFAEAWGQKAKELYEPIWQNFTDPQLRRIIGAVRTLGSANLPLAKRQQISPTSWLPREATPCSCLPGRAGTTLRASR

SEQ ID NO: 112 - protein, 1306 aa, Homo Sapiens
MGAASGRRGPGLLLPLPLLLLLPPQPALALDPGLQPGNFSADEAGAQLFAQSYNSSAEQVLFQSVAASWAHDTNITAENARRQEEAALLSQEFAEAWGQKAKELYEPIWQNFTDPQLRRIIGAVRTLGSANLPLAKRQQYNALLSNMSRIYSTAKVCLPNKTATCWSLDPDLTNILASSRSYAMLLFAWEGWHNAAGIPLKPLYEDFTALSNEAYKQDGFTDTGAYWRSWYNSPTFEDDLEHLYQQLEPLYLNLHAFVRRALHRRYGDRYINLRGPIPAHLLGDMWAQSWENIYDMVVPFPDKPNLDVTSTMLQQGWNATHMFRVAEEFFTSLELSPMPPEFWEGSMLEKPADGREVVCHASAWDFYNRKDFRIKQCTRVTMDQLSTVHHEMGHIQYYLQYKDLPVSLRRGANPGFHEAIGDVLALSVSTPEHLHKIGLLDRVTNDTESDINYLLKMALEKIAFLPFGYLVDQWRWGVFSGRTPPSRYNFDWWYLRTKYQGICPPVTRNETHFDAGAKFHVPNVTPYIRYFVSFVLQFQFHEALCKEAGYEGPLHQCDIYRSTKAGAKLRKVLQAGSSRPWQEVLKDMVGLDALDAQPLLKYFQPVTQWLQEQNQQNGEVLGWPEYQWHPPLPDNYPEGIDLVTDEAEASKFVEEYDRTSQVVWNEYAEANWNYNTNITTETSKILLQKNMQIANHTLKYGTQARKFDVNQLQNTTIKRIIKKVQDLERAALPAQELEEYNKILLDMETTYSVATVCHPNGSCLQLEPDLTNVMATSRKYEDLLWAWEGWRDKAGRAILQFYPKYVELINQAARLNGYVDAGDSWRSMYETPSLEQDLERLFQELQPLYLNLHAYVRRALHRHYGAQHINLEGPIPAHLLGNMWAQTWSNIYDLVVPFPSAPSMDTTEAMLKQGWTPRRMFKEADDFFTSLGLLPVPPEFWNKSMLEKPTDGREVVCHASAWDFYNGKDFRIKQCTTVNLEDLVVAHHEMGHIQYFMQYKDLPVALREGANPGFHEAIGDVLALSVSTPKHLHSLNLLSSEGGSDEHDINFLMKMALDKIAFIPFSYLVDQWRWRVFDGSITKENYNQEWWSLRLKYQGLCPPVPRTQGDFDPGAKFHIPSSVPYIRYFVSFIIQFQFHEALCQAAGHTGPLHKCDIYQSKEAGQRLATAMKLGFSRPWPEAMQLITGQPNMSASAMLSYFKPLLDWLRTENELHGEKLGWPQYNWTPNSARSEGPLPDSGRVSFLGLDLDAQQARVGQWLLLFLGIALLVATLGLSQRLFSIRHRSLHRHSHGPQFGSEVELRHS

SEQ ID NO: 113 - protein, 1242 aa, Homo Sapiens
MGAASGRRGPGLLLPLPLLLLLPPQPALALDPGLQPGNFSADEAGAQLFAQSYNSSAEQVLFQSVAASWAHDTNITAENARRQEEAALLSQEFAEAWGQKAKELYEPIWQNFTDPQLRRIIGAVRTLGSANLPLAKRQQYNALLSNMSRIYSTAKVCLPNKTATCWSLDPDLTNILASSRSYAMLLFAWEGWHNAAGIPLKPLYEDFTALSNEAYKQDGFTDTGAYWRSWYNSPTFEDDLEHLYQQLEPLYLNLHAFVRRALHRRYGDRYINLRGPIPAHLLGDMWAQSWENIYDMVVPFPDKPNLDVTSTMLQQGWNATHMFRVAEEFFTSLELSPMPPEFWEGSMLEKPADGREVVCHASAWDFYNRKDFRIKQCTRVTMDQLSTVHHEMGHIQYYLQYKDLPVSLRRGANPGFHEAIGDVLALSVSTPEHLHKIGLLDRVTNDTESDINYLLKMALEKIAFLPFGYLVDQWRWGVFSGRTPPSRYNFDWWYLRTKYQGICPPVTRNETHFDAGAKFHVPNVTPYIRYFVSFVLQFQFHEALCKEAGYEGPLHQCDIYRSTKAGAKLRKVLQAGSSRPWQEVLKDMVGLDALDAQPLLKYFQPVTQWLQEQNQQNGEVLGWPEYQWHPPLPDNYPEGIDLVTDEAEASKFVEEYDRTSQVVWNEYAEANWNYNTNITTETSKILLQKNMQIANHTLKYGTQARKFDVNQLQNTTIKRIIKKVQDLERAALPAQELEEYNKILLDMETTYSVATVCHPNGSCLQLEPDLTNVMATSRKYEDLLWAWEGWRDKAGRAILQFYPKYVELINQAARLNGYVDAGDSWRSMYETPSLEQDLERLFQELQPLYLNLHAYVRRALHRHYGAQHINLEGPIPAHLLGNMWAQTWSNIYDLVVPFPSAPSMDTTEAMLKQGWTPRRMFKEADDFFTSLGLLPVPPEFWNKSMLEKPTDGREVVCHASAWDFYNGKDFRIKQCTTVNLEDLVVAHHEMGHIQYFMQYKDLPVALREGANPGFHEAIGDVLALSVSTPKHLHSLNLLSSEGGSDEHDINFLMKMALDKIAFIPFSYLVDQWRWRVFDGSITKENYNQEWWSLRLKYQGLCPPVPRTQGDFDPGAKFHIPSSVPYIRYFVSFIIQFQFHEALCQAAGHTGPLHKCDIYQSKEAGQRLATAMKLGFSRPWPEAMQLITGQPNMSASAMLSYFKPLLDWLRTENELHGEKLGWPQYNWTPNSGTATHPTSSLGS

SEQ ID NO: 114 - protein, 36 aa, Homo Sapiens
MGQGWATAGLPSLLFLLLCYGHPLLVPSQEASQQTW

SEQ ID NO: 115 - protein, 36 aa, Homo Sapiens; identical to SEQ ID NO: 114

SEQ ID NO: 116 - protein, 145 aa, Homo Sapiens
MGQGWATAGLPSLLFLLLCYGHPLLVPSQEASQQVTVTHGTSSQATTSSQTTTHQATAHQTSAQSPNLVTDEAEASKFVEEYDRTSQVVWNEYAEANWNYNTNITTETSKILGLYDTWGSSLLCPCLDMCCLTAGIQGGCRRTCK

SEQ ID NO: 117 - protein, 208 aa, Homo Sapiens
MGQGWATAGLPSLLFLLLCYGHPLLVPSQEASQQVTVTHGTSSQATTSSQTTTHQATAHQTSAQSPNLVTDEAEASKFVEEYDRTSQVVWNEYAEANWNYNTNITTETSKILLQKNMQIANHTLKYGTQARKFDVNQLQNTTIKRIIKKVQDLERAALPAQELEEYNKILLDMETTYSVATVCHPNGSCLQLEPALKFSELPLQAEVS

SEQ ID NO: 118 - protein, 732 aa, Homo Sapiens
MGQGWATAGLPSLLFLLLCYGHPLLVPSQEASQQVTVTHGTSSQATTSSQTTTHQATAHQTSAQSPNLVTDEAEASKFVEEYDRTSQVVWNEYAEANWNYNTNITTETSKILLQKNMQIANHTLKYGTQARKFDVNQLQNTTIKRIIKKVQDLERAALPAQELEEYNKILLDMETTYSVATVCHPNGSCLQLEPDLTNVMATSRKYEDLLWAWEGWRDKAGRAILQFYPKYVELINQAARLNGYVDAGDSWRSMYETPSLEQDLERLFQELQPLYLNLHAYVRRALHRHYGAQHINLEGPIPAHLLGNMWAQTWSNIYDLVVPFPSAPSMDTTEAMLKQGWTPRRMFKEADDFFTSLGLLPVPPEFWNKSMLEKPTDGREVVCHASAWDFYNGKDFRIKQCTTVNLEDLVVAHHEMGHIQYFMQYKDLPVALREGANPGFHEAIGDVLALSVSTPKHLHSLNLLSSEGGSDEHDINFLMKMALDKIAFIPFSYLVDQWRWRVFDGSITKENYNQEWWSLRLKYQGLCPPVPRTQGDFDPGAKFHIPSSVPYIRYFVSFIIQFQFHEALCQAAGHTGPLHKCDIYQSKEAGQRLATAMKLGFSRPWPEAMQLITGQPNMSASAMLSYFKPLLDWLRTENELHGEKLGWPQYNWTPNSARSEGPLPDSGRVSFLGLDLDAQQARVGQWLLLFLGIALLVATLGLSQRLFSIRHRSLHRHSHGPQFGSEVELRHS

SEQ ID NO: 119 - protein, 691 aa, Homo Sapiens
MGQGWATAGLPSLLFLLLCYGHPLLVPSQEASQQVTVTHGTSSQATTSSQTTTHQATAHQTSAQSPNLVTDEAEASKFVEEYDRTSQVVWNEYAEANWNYNTNITTETSKILLQKNMQIANHTLKYGTQARKFDVNQLQNTTIKRIIKKVQDLERAALPAQELEEYNKILLDMETTYSVATVCHPNGSCLQLEPDLTNVMATSRKYEDLLWAWEGWRDKAGRAILQFYPKYVELINQAARLNGYVDAGDSWRSMYETPSLEQDLERLFQELQPLYLNLHAYVRRALHRHYGAQHINLEGPIPAHLLGNMWAQTWSNIYDLVVPFPSAPSMDTTEAMLKQGWTPRRMFKEADDFFTSLGLLPVPPEFWNKSMLEKPTDGREVVCHASAWDFYNGKDFRIKQCTTVNLEDLVVAHHEMGHIQYFMQYKDLPVALREGANPGFHEAIGDVLALSVSTPKHLHSLNLLSSEGGSDEHDINFLMKMALDKIAFIPFSYLVDQWRWRVFDGSITKENYNQEWWSLRLKYQGLCPPVPRTQGDFDPGAKFHIPSSVPYIRTAMKLGFSRPWPEAMQLITGQPNMSASAMLSYFKPLLDWLRTENELHGEKLGWPQYNWTPNSARSEGPLPDSGRVSFLGLDLDAQQARVGQWLLLFLGIALLVATLGLSQRLFSIRHRSLHRHSHGPQFGSEVELRHS

SEQ ID NO: 120 - protein, 119 aa, Homo Sapiens
  misc_feature (1)..(1): Xaa can be any naturally occurring amino acid
XQAGSSRPWQEVLKDMVGLDALDAQPLLKYFQPVTQWLQEQNQQNGEVLGWPEYQWHPPLPDNYPEGIGDSHPWDKQPGNNQQPDNHPPGDGPPDISPEPKWDHAGEGQGARGGRGGAG

SEQ ID NO: 121 - protein, 138 aa, Homo Sapiens
  misc_feature (1)..(1): Xaa can be any naturally occurring amino acid
XRTQGDFDPGAKFHIPSSVPYIRYFVSFIIQFQFHEALCQAAGHTGPLHKCDIYQSKEAGQRLATAMKLGFSRPWPEAMQLITGQPNMSASAMLSYFKPLLDWLRTENELHGEKLGWPQYNWTPNSGTATHPTSSLGS

SEQ ID NO: 122 - protein, 94 aa, Homo Sapiens
MLGLVMSCPDRTLVTKVRSHPSGNQHRPTRGGSRSFHCRRGVRPRPAALRVLPRCPAFSDAACPAAMRPPQCLLHTPSLASPLLLLLLWLLGGG

SEQ ID NO: 123 - protein, 55 aa, Homo Sapiens
MRPPQCLLHTPSLASPLLLLLLWLLGGGVGAEGREDAELLVTVLRAPRCGTPTVS

SEQ ID NO: 124 - protein, 159 aa, Homo Sapiens
MRPPQCLLHTPSLASPLLLLLLWLLGGGVGAEGREDAELLVTVRGGRLRGIRLKTPGGPVSAFLGIPFAEPPMGPRRFLPPEPKQPWSGVVDATTFQSVCYQYVDTLYPGFEGTEMWNPNRELSEDCLYLNVWTPYPRPTSPTPVLVWIYGGGFYSGAS

SEQ ID NO: 125 - protein, 614 aa, Homo Sapiens
MRPPQCLLHTPSLASPLLLLLLWLLGGGVGAEGREDAELLVTVRGGRLRGIRLKTPGGPVSAFLGIPFAEPPMGPRRFLPPEPKQPWSGVVDATTFQSVCYQYVDTLYPGFEGTEMWNPNRELSEDCLYLNVWTPYPRPTSPTPVLVWIYGGGFYSGASSLDVYDGRFLVQAERTVLVSMNYRVGAFGFLALPGSREAPGNVGLLDQRLALQWVQENVAAFGGDPTSVTLFGESAGAASVGMHLLSPPSRGLFHRAVLQSGAPNGPWATVGMGEARRRATQLAHLVGCPPGGTGGNDTELVACLRTRPAQVLVNHEWHVLPQESVFRFSFVPVVDGDFLSDTPEALINAGDFHGLQVLVGVVKDEGSYFLVYGAPGFSKDNESLISRAEFLAGVRVGVPQVSDLAAEAVVLHYTDWLHPEDPARLREALSDVVGDHNVVCPVAQLAGRLAAQGARVYAYVFEHRASTLSWPLWMGVPHGYEIEFIFGIPLDPSRNYTAEEKIFAQRLMRYWANFARTGDPNEPRDPKAPQWPPYTAGAQQYVSLDLRPLEVRRGLRAQACAFWNRFLPKLLSATDTLDEAERQWKAEFHRWSSYMVHWKNQFDHYSKQDRCSDL

SEQ ID NO: 126 - protein, 617 aa, Homo Sapiens
MRPPQCLLHTPSLASPLLLLLLWLLGGGVGAEGREDAELLVTVRGGRLRGIRLKTPGGPVSAFLGIPFAEPPMGPRRFLPPEPKQPWSGVVDATTFQSVCYQYVDTLYPGFEGTEMWNPNRELSEDCLYLNVWTPYPRPTSPTPVLVWIYGGGFYSGASSLDVYDGRFLVQAERTVLVSMNYRVGAFGFLALPGSREAPGNVGLLDQRLALQWVQENVAAFGGDPTSVTLFGESAGAASVGMHLLSPPSRGLFHRAVLQSGAPNGPWATVGMGEARRRATQLAHLVGCPPGGTGGNDTELVACLRTRPAQVLVNHEWHVLPQESVFRFSFVPVVDGDFLSDTPEALINAGDFHGLQVLVGVVKDEGSYFLVYGAPGFSKDNESLISRAEFLAGVRVGVPQVSDLAAEAVVLHYTDWLHPEDPARLREALSDVVGDHNVVCPVAQLAGRLAAQGARVYAYVFEHRASTLSWPLWMGVPHGYEIEFIFGIPLDPSRNYTAEEKIFAQRLMRYWANFARTGDPNEPRDPKAPQWPPYTAGAQQYVSLDLRPLEVRRGLRAQACAFWNRFLPKLLSATASEAPSTCPGFTHGEAAPRPGLPLPLLLLHQLLLLFLSHLRRL

SEQ ID NO: 127 - protein, 614 aa, Homo Sapiens; identical to SEQ ID NO: 125

SEQ ID NO: 128 - protein, 614 aa, Homo Sapiens; identical to SEQ ID NO: 125

SEQ ID NO: 129 - protein, 617 aa, Homo Sapiens; identical to SEQ ID NO: 126

SEQ ID NO: 130 - protein, 435 aa, Homo Sapiens [sequence omitted]

SEQ ID NO: 131 - protein, 398 aa, Homo Sapiens [sequence omitted]

SEQ ID NO: 132 - protein, 526 aa, Homo Sapiens
MRPPQCLLHTPSLASPLLLLLLWLLGGGVGAEGREDAELLVTVRGGRLRGIRLKTPGGPVSAFLGIPFAEPPMGPRRFLPPEPKQPWSGVVDATTFQSVCYQYVDTLYPGFEGTEMWNPNRELSEDCLYLNVWTPYPRPTSPTPVLVWIYGGGFYSGASSLDVYDGRFLVQAERTVLVSMNYRVGAFGFLALPGSREAPGNVGLLDQRLALQWVQENVAAFGGDPTSVTLFGESAGAASVGMHLLSPPSRGLFHRAVLQSGAPNGPWATVGMGEARRRATQLAHLVGCPPGGTGGNDTELVACLRTRPAQVLVNHEWHVLPQESVFRFSFVPVVDGDFLSDTPEALINAGDFHGLQLAGRLAAQGARVYAYVFEHRASTLSWPLWMGVPHGYEIEFIFGIPLDPSRNYTAEEKIFAQRLMRYWANFARTGDPNEPRDPKAPQWPPYTAGAQQYVSLDLRPLEVRRGLRAQACAFWNRFLPKLLSATDTLDEAERQWKAEFHRWSSYMVHWKNQFDHYSKQDRCSDL

SEQ ID NO: 133 - protein, 359 aa, Homo Sapiens
MRPPQCLLHTPSLASPLLLLLLWLLGGGVGAEGREDAELLVTVRGGRLRGIRLKTPGGPVSAFLGIPFAEPPMGPRRFLPPEPKQPWSGVVDATTFQSVCYQYVDTLYPGFEGTEMWNPNRELSEDCLYLNVWTPYPRPTSPTPVLVWIYGGGFYSGASSLDVYDGRFLVQAERTVLVSMNYRVGAFGFLALPGSREAPGNVGLLDQRLALQWVQENVAAFGGDPTSVTLFGESAGAASVGMHLLSPPSRGLFHRAVLQSGAPNGPWATVGMGEARRRATQLAHLVGCPPGGTGGNDTELVACLRTRPAQVLVNHEWHVLPQESVFRFSFVPVVDGDFLSDTPEALINAGDFHGLQGSQ

SEQ ID NO: 134 - protein, 403 aa, Homo Sapiens
MRPPQCLLHTPSLASPLLLLLLWLLGGGVGAEGREDAELLVTVRGGRLRGIRLKTPGGPVSAFLGIPFAEPPMGPRRFLPPEPKQPWSGVVDATTFQSVCYQYVDTLYPGFEGTEMWNPNRELSEDCLYLNVWTPYPRPTSPTPVLVWIYGGGFYSGASSLDVYDGRFLVQAERTVLVSMNYRVGAFGFLALPGSREAPGNVGLLDQRLALQWVQENVAAFGGDPTSVTLFGESAGAASVGMHLLSPPSRGLFHRAVLQSGAPNGPWATVGMGEARRRATQLAHLVGCPPGGTGGNDTELVACLRTRPAQVLVNHEWHVLPQESVFRFSFVPVVDGDFLSDTPEALINAGDFHGLQVLVGVVKDEGSYFLVYGAPGFSKDNESLISRAEFLAGVRVGVPQGSQ

SEQ ID NO: 135 - protein, 391 aa, Homo Sapiens
MAGKRSGWSRAALLQLLLGVNLVVMPPTRARSLRFVTLEGMLQHWELGQALRQRYHGFLNTSYHRQEVYVRSTDFDRTLMSAEANLAGLFPPNGMQRFNPNISWQPIPVHTVPITEDRLLKFPLGPCPRYEQLQNETRQTPEYQNESSRNAQFLDMVANETGLTDLTLETVWNVYDTLFCEQTHGLRLPPWASPQTMQRLSRLKDFSFRFLFGIYQQAEKARLQGGVLLAQIRKNLTLMATTSQLPKLLVYSAHDTTLVALQMALDVYNGEQAPYASCHIFELYQEDSGNFSVEMYFRNESDKAPWPLSLPGCPHRCPLQDFLRLTEPVVPKDWQQECQLASGPADTEVIVALAVCGSILFLLIVLLLTVLFRMQAQPPGYRHVADGEDHA

SEQ ID NO: 136 - protein, 151 aa, Homo Sapiens
MAGKRSGWSRAALLQLLLGVNLVVMPPTRARSLRFVTLLYRHGDRSPVKTYPKDPYQEEEWPQGFGQLTKEGMLQHWELGQALRQRYHGFLNTSYHRQEVYVRSTDFDRTLMSAEANLAGLFPPNGMQRFNPNISWQPIPVHTVPITEDRD

SEQ ID NO: 137 - protein, 423 aa, Homo Sapiens
MAGKRSGWSRAALLQLLLGVNLVVMPPTRARSLRFVTLLYRHGDRSPVKTYPKDPYQEEEWPQGFGQLTKEGMLQHWELGQALRQRYHGFLNTSYHRQEVYVRSTDFDRTLMSAEANLAGLFPPNGMQRFNPNISWQPIPVHTVPITEDRLLKFPLGPCPRYEQLQNETRQTPEYQNESSRNAQFLDMVANETGLTDLTLETVWNVYDTLFCEQTHGLRLPPWASPQTMQRLSRLKDFSFRFLFGIYQQAEKARLQGGVLLAQIRKNLTLMATTSQLPKLLVYSAHDTTLVALQMALDVYNGEQAPYASCHIFELYQEDSGNFSVEMYFRNESDKAPWPLSLPGCPHRCPLQDFLRLTEPVVPKDWQQECQLASGPADTEVIVALAVCGSILFLLIVLLLTVLFRMQAQPPGYRHVADGEDHA

SEQ ID NO: 138 - protein, 162 aa, Homo Sapiens
MAGKRSGWSRAALLQLLLGVNLVVMPPTRARSLRFVTLLYRHGDRSPVKTYPKDPYQEEEWPQGFGQLTKEGMLQHWELGQALRQRYHGFLNTSYHRQEVYVRSTDFDRTLMSAEANLAGLFPPNGMQRFNPNISWQPIPVHTVPITEDRQAQVTRTVEHSA

SEQ ID NO: 139 - protein, 305 aa, Homo Sapiens
MAGKRSGWSRAALLQLLLGVNLVVMPPTRARSLRFVTLLYRHGDRSPVKTYPKDPYQEEEWPQGFGQLTKEGMLQHWELGQALRQRYHGFLNTSYHRQEVYVRSTDFDRTLMSAEANLAGLFPPNGMQRFNPNISWQPIPVHTVPITEDRQFLDMVANETGLTDLTLETVWNVYDTLFCEQTHGLRLPPWASPQTMQRLSRLKDFSFRFLFGIYQQAEKARLQGGVLLAQIRKNLTLMATTSQLPKLLVYSAHDTTLVALQMALDVYNGEQAPYASCHIFELYQEDSGNFSVEMYFRNESDKAPW

SEQ ID NO: 140 - protein, 360 aa, Homo Sapiens
MAGKRSGWSRAALLQLLLGVNLVVMPPTRARSLRFVTLLYRHGDRSPVKTYPKDPYQEEEWPQGFGQLTKEGMLQHWELGQALRQRYHGFLNTSYHRQEVYVRSTDFDRTLMSAEANLAGLFPPNGMQRFNPNISWQPIPVHTVPITEDRQTHGLRLPPWASPQTMQRLSRLKDFSFRFLFGIYQQAEKARLQGGVLLAQIRKNLTLMATTSQLPKLLVYSAHDTTLVALQMALDVYNGEQAPYASCHIFELYQEDSGNFSVEMYFRNESDKAPWPLSLPGCPHRCPLQDFLRLTEPVVPKDWQQECQLASGPADTEVIVALAVCGSILFLLIVLLLTVLFRMQAQPPGYRHVADGEDHA

SEQ ID NO: 141 - protein, 160 aa, Homo Sapiens
MAGKRSGWSRAALLQLLLGVNLVVMPPTRARSLRFVTLLYRHGDRSPVKTYPKDPYQEEEWPQGFGQLTKEGMLQHWELGQALRQRYHGFLNTSYHRQEVYVRSTDFDRTLMSAEANLAGLFPPNGMQRFNPNISWQPIPVHTVPITEDRSRTETLIHFS

SEQ ID NO: 142 - protein, 395 aa, Homo Sapiens
MGVRMTEYVGLYRHGDRSPVKTYPKDPYQEEEWPQGFGQLTKEGMLQHWELGQALRQRYHGFLNTSYHRQEVYVRSTDFDRTLMSAEANLAGLFPPNGMQRFNPNISWQPIPVHTVPITEDRLLKFPLGPCPRYEQLQNETRQTPEYQNESSRNAQFLDMVANETGLTDLTLETVWNVYDTLFCEQTHGLRLPPWASPQTMQRLSRLKDFSFRFLFGIYQQAEKARLQGGVLLAQIRKNLTLMATTSQLPKLLVYSAHDTTLVALQMALDVYNGEQAPYASCHIFELYQEDSGNFSVEMYFRNESDKAPWPLSLPGCPHRCPLQDFLRLTEPVVPKDWQQECQLASGPADTEVIVALAVCGSILFLLIVLLLTVLFRMQAQPPGYRHVADGEDHA

SEQ ID NO: 143 - protein, 6 aa, Homo Sapiens
MDMWTA

SEQ ID NO: 144 - protein, 52 aa, Homo Sapiens
MDMWTALLILQALLLPSLADGATPALRFVAVGDWGGVPNAPFHTAREMANAK

SEQ ID NO: 145 - protein, 74 aa, Homo Sapiens
MDMWTALLILQALLLPSLADGATPALRFVAVGDWGGVPNAPFHTAREMANAKEIARTVQILGADFILSLGDNFY

SEQ ID NO: 146 - protein, 124 aa, Homo Sapiens
MDMWTALLILQALLLPSLADGATPALRFVAVGDWGGVPNAPFHTAREMANAKEIARTVQILGADFILSLGDNFYFTGVQDINDKRFQETFEDVFSDRSLRKVPWYVLAGNHDHLGNVSAQIAYS

SEQ ID NO: 147 - protein, 325 aa, Homo Sapiens
MDMWTALLILQALLLPSLADGATPALRFVAVGDWGGVPNAPFHTAREMANAKEIARTVQILGADFILSLGDNFYFTGVQDINDKRFQETFEDVFSDRSLRKVPWYVLAGNHDHLGNVSAQIAYSKISKRWNFPSPFYRLHFKIPQTNVSVAIFMLDTVTLCGNSDDFLSQQPERPRDVKLARTQLSWLKKQLAAAREDYVLVAGHYPVWSIAEHGPTHCLVKQLRPLLATYGVTAYLCGHDHNLQYLQDENGVGYVLSGAGNFMDPSKRHQRKVPNGYLRFHYGTEDSLGGFAYVEISSKEMTVTYIEASGKSLFKTRLPRRARP

SEQ ID NO: 148 - protein, 325 aa, Homo Sapiens; identical to SEQ ID NO: 147

SEQ ID NO: 149 - protein, 325 aa, Homo Sapiens; identical to SEQ ID NO: 147

SEQ ID NO: 150 - protein, 325 aa, Homo Sapiens; identical to SEQ ID NO: 147

SEQ ID NO: 151 - protein, 59 aa, Homo Sapiens
MDMWTALLILQALLLPSLGISWTPQSGTSARSPTAICASTMGLKTHWVALPMWRSAPKR

SEQ ID NO: 152 - protein, 228 aa, Homo Sapiens
MITGVFSMRLWTPVGVLTSLAYCLHQRRVALAELQEADGQCPVDRSLLKLKMVQVVFRHGARSPLKPLPLEEQGGMFAGQLTKVGMQQMFALGERLRKNYVEDIPFLSPTFNPQEVFIRSTNIFRNLESTRCLLAGLFQCQKEGPIIIHTDEADSEVLYPNYQSCWSLRQRTRGRRQTASLQPGISEDLKKVKDRMGIDSSDKVDFFILLDNVAAEQEKMGSCRFHGS

SEQ ID NO: 153 - protein, 428 aa, Homo Sapiens
MITGVFSMRLWTPVGVLTSLAYCLHQRRVALAELQEADGQCPVDRSLLKLKMVQVVFRHGARSPLKPLPLEEQVEWNPQLLEVPPQTQFDYTVTNLAGGPKPYSPYDSQYHETTLKGGMFAGQLTKVGMQQMFALGERLRKNYVEDIPFLSPTFNPQEVFIRSTNIFRNLESTRCLLAGLFQCQKEGPIIIHTDEADSEVLYPNYQSCWSLRQRTRGRRQTASLQPGISEDLKKVKDRMGIDSSDKVDFFILLDNVAAEQAHNLPSCPMLKRFARMIEQRAVDTSLYILPKEDRESLQMAVGPFLHILESNLLKAMDSATAPDKIRKLYLYAAHDVTFIPLLMTLGIFDHKWPPFAVDLTMELYQHLESKEWFVQLYYHGKEQVPRGCPDGLCPLDMFLNAMSVYTLSPEKYHALCSQTQVMEVGNEE

SEQ ID NO: 154 - protein, 271 aa, Homo Sapiens
MITGVFSMRLWTPVGVLTSLAYCLHQRRVALAELQEADGQCPVDRSLLKLKMVQVVFRHGARSPLKPLPLEEQVEWNPQLLEVPPQTQFDYTVTNLAGGPKPYSPYDSQYHETTLKGGMFAGQLTKVGMQQMFALGERLRKNYVEDIPFLSPTFNPQEVFIRSTNIFRNLESTRCLLAGLFQCQKEGPIIIHTDEADSEVLYPNYQSCWSLRQRTRGRRQTASLQPGISEDLKKVKDRMGIDSSDKVDFFILLDNVAAEQEKMGSCRFHGS

SEQ ID NO: 155 - protein, 77 aa, Homo Sapiens
MITGVFSMRLWTPVGVLTSLAYCLHQRRVALAELQEADGQCPVDRSLLKLKMVQVVFRHGARSPLKPLPLEEQYSFH

SEQ ID NO: 156 - protein, 143 aa, Homo Sapiens
MVQVVFRHGARSPLKPLPLEEQVEWNPQLLEVPPQTQFDYTVTNLAGGPKPYSPYDSQYHETTLKGGMFAGQLTKVGMQQMFALGERLRKNYVEDIPFLSPTFNPQEVFIRSTNIFRNLESTRCLLAGLFQCQKEGPIIIHTD

SEQ ID NO: 157 - protein, 166 aa, Homo Sapiens
  misc_feature (1)..(1): Xaa can be any naturally occurring amino acid
XDSQYHETTLKGGMFAGQLTKVGMQQMFALGERLRKNYVEDIPFLSPTFNPQEVFIRSTNIFRNLESTRCLLAGLFQCQKEGPIIIHTDEADSEVLYPNYQSCWSLRQRTRGRRQTASLQPGISEDLKKVKDRMGIDSSDKVDFFILLDNVAAEQEKMGSCRFHGS

SEQ ID NO: 158 - protein, 157 aa, Homo Sapiens
  misc_feature (1)..(1): Xaa can be any naturally occurring amino acid
XRCLLAGLFQCQKEGPIIIHTDEADSEVLYPNYQSCWSLRQRTRGRRQTASLQPGISEDLKKVKDRMGIDSSDKVDFFILLDNVAAEQAHNLPSCPMLKRFARMIEQRAVDTSLYILPKEDRESLQMAVGPFLHILESNLLKAMDSATAPDKIRTCR

SEQ ID NO: 159 - protein, 334 aa, Homo Sapiens
MHPLPGYWSCYCLLLLFSLGVQGSLGAPSAAPEQVHLSYPGEPGSMTVTWTTWVPTRSEVQFGLQPSGPLPLRAQGTFVPFVDGGILRRKLYIHRVTLRKLLPGVQYVYRCGSAQGWSRRFRFRALKNGAHWSPRLAVFGDLGADNPKAVPRLRRDTQQGMYDAVLHVATSLTTRLASACRGIMRACGTAGIWVPPTSSPSPPRSISFSIMAATWYRGSFAGWRATSRKPIRTGQPGRGSSLWGTGPCTAPTQIWTTAHDMKARSAKASKASCTGWRIFSTNMEWICSCGLMSTRMNDCGQFTTTRYLTAAERCPTPTREGLSTSSQDLLMGRS

SEQ ID NO: 160 - protein, 367 aa, Homo Sapiens
MHPLPGYWSCYCLLLLFSLGVQGSLGAPSAAPEQVHLSYPGEPGSMTVTWTTWVPTRSEVQFGLQPSGPLPLRAQGTFVPFVDGGILRRKLYIHRVTLRKLLPGVQYVYRCGSAQGWSRRFRFRALKNGAHWSPRLAVFGDLGADNPKAVPRLRRDTQQGMYDAVLHVATSLTTRLASACRGIMRACGTGNVGVLGDWPSPLKDGRCRGALVPDPCPLTPPAGIWVPPTSSPSPPRSISFSIMAATWYRGSFAGWRATSRKPIRTGQPGRGSSLWGTGPCTAPTQIWTTAHDMKARSAKASKASCTGWRIFSTNMEWICSCGLMSTRMNDCGQFTTTRYLTAAERCPTPTREGLSTSSQDLLAVRSG

SEQ ID NO: 161 - protein, 438 aa, Homo Sapiens
MHPLPGYWSCYCLLLLFSLGVQGSLGAPSAAPEQVHLSYPGEPGSMTVTWTTWVPTRSEVQFGLQPSGPLPLRAQGTFVPFVDGGILRRKLYIHRVTLRKLLPGVQYVYRCGSAQGWSRRFRFRALKNGAHWSPRLAVFGDLGADNPKAVPRLRRDTQQGMYDAVLHVGDFAYNLDQDNARVGDRFMRLIEPVAASLPYMTCPGNHEERYNFSNYKARFSMPGDNEGLWYSWDLGPAHIISFSTEVYFFLHYGRHLVQRQFRWLESDLQKANKNRAARPWIITMGHRPMYCSNADLDDCTRHESKVRKGLQGKLYGLEDLFYKYGVDLQLWAHEHSYERLWPIYNYQVFNGSREMPYTNPRGPVHIITGSAGCEERLTPFAVFPRPWSAVRVKEYGYTRLHILNGTHIHIQQVSDDQDGKIVDDVWVVRPLFGRRMYL

SEQ ID NO: 162 - protein, 227 aa, Homo Sapiens
  misc_feature (1)..(1): Xaa can be any naturally occurring amino acid
XGADNPKAVPRLRRDTQQGMYDAVLHVGDFAYNLDQDNARVGDRFMRLIEPVAASLPYMTCPGNHEERYNFSNYKARFSMPGDNEGLWYSWDLGPAHIISFSTEVYFFLHYGRHLVQRQFRWLESDLQKANKNRAARPWIITMGHRPMYCSNADLDDCTRHESKVRKGLQGKLYGLEDLFYKYGVDLQLWAHEHSYERLWPIYNYQDGKIVDDVWVVRPLFGRRMYL

SEQ ID NO: 163 - protein, 353 aa, Homo Sapiens
MRAAPLLLARAASLSLGFLFLLFFWLDRSVLAKELKFVTLVFRHGDRSPIDTFPTDPIKESSWPQGFGQLTQLGMEQHYELGEYIRKRYRKFLNESYKHEQVYIRSTDVDRTLMSAMTNLAALFPPEGVSIWNPILLWQPIPVHTVPLSEDQDFIATLGKLSGLHGQDLFGIWSKVYDPLYCESVHNFTLPSWATEDTMTKLRELSELSLLSLYGIHKQKEKSRLQGGVLVNEILNHMKRATQIPSYKKLIMYSAHDTTVSGLQMALDVYNGLLPPYASCHLTELYFEKGEYFVEMYYRNETQHEPYPLMLPGCSPSCPLERFAELVGPVIPQDWSTECMTTNSHQGTEDSTD

SEQ ID NO: 164 - protein, 418 aa, Homo Sapiens
MRAAPLLLARAASLSLGFLFLLFFWLDRSVLAKELKFVTLVFRHGDRSPIDTFPTDPIKESSWPQGFGQLTQLGMEQHYELGEYIRKRYRKFLNESYKHEQVYIRSTDVDRTLMSAMTNLAALFPPEGVSIWNPILLWQPIPVHTVPLSEDQLLYLPFRNCPRFQELESETLKSEEFQKRLHPYKDFIATLGKLSGLHGQDLFGIWSKVYDPLYCESVHNFTLPSWATEDTMTKLRELSELSLLSLYGIHKQKEKSRLQGGVLVNEILNHMKRATQIPSYKKLIMYSAHDTTVSGLQMALDVYNGLLPPYASCHLTELYFEKGEYFVEMYYRNETQHEPYPLMLPGCSPSCPLERFAELVGPVIPQDWSTECMTTNSHQVLKVIFAVAFCLISAVLMVLLFIHIRRGLCWQRESYGNI

SEQ ID NO: 165 - protein, 386 aa, Homo Sapiens
MRAAPLLLARAASLSLGFLFLLFFWLDRSVLAKELKFVTLVFRHGDRSPIDTFPTDPIKESSWPQGFGQLTQLGMEQHYELGEYIRKRYRKFLNESYKHEQVYIRSTDVDRTLMSAMTNLAALFPPEGVSIWNPILLWQPIPVHTVPLSEDQLLYLPFRNCPRFQELESETLKSEEFQKRLHPYKDFIATLGKLSGLHGQDLFGIWSKVYDPLYCESVHNFTLPSWATEDTMTKLRELSELSLLSLYGIHKQKEKSRLQGGVLVNEILNHMKRATQIPSYKKLIMYSAHDTTVSGLQMALDVYNGLLPPYASCHLTELYFEKGEYFVEMYYRNETQHEPYPLMLPGCSPSCPLERFAELVGPVIPQDWSTECMTTNSHQGTEDSTD

SEQ ID NO: 166 - protein, 165 aa, Homo Sapiens
MRAAPLLLARAASLSLGFLFLLFFWLDRSVLAKELKFVTLVFRHGDRSPIDTFPTDPIKESSWPQGFGQLTQVYIRSTDVDRTLMSAMTNLAALFPPEGVSIWNPILLWQPIPVHTVPLSEDQLLYLPFRNCPRFQELESETLKSEEFQKRLHPYKDFIATLGKL

SEQ ID NO: 167 - protein, 99 aa, Homo Sapiens
  misc_feature (1)..(1): Xaa can be any naturally occurring amino acid
XELYFEKGEYFVEMYYRNETQHEPYPLMLPGCSPSCPLERFAELVGPVIPQDWSTECMTTNSHQGPAETAHSARRNHDIALPCGRSTCLENTVLYYHYG

SEQ ID NO: 168 - protein, 421 aa, Homo Sapiens
MVEMLPTAILLVLAVSVVAKDNATCDGPCGLRFRQNPQGGVRIVGGKAAQHGAWPWMVSLQIFTYNSHRYHTCGGSLLNSRWVLTAAHCFVGKNNVHDWRLVFGAKEITYGNNKPVKAPLQERYVEKIIIHEKYNSATEGNDIALVEITPPISCGRFIGPGCLPHFKAGLPRGSQSCWVAGWGYIEEKAPRPSSILMEARVDLIDLDLCNSTQWYNGRVQPTNVCAGYPVGKIDTCQGDSGGPLMCKDSKESAYVVVGITSWGVGCARAKRPGIYTATWPYLNWIASKIGSNALRMIQSATPPPPTTRPPPIRPPFSHPISAHLPWYFQPPPRPLPPRPPAAQPRPPPSPPPPPPPPASPLPPPPPPPPPTPSSTTKLPQGLSFAKRLQQLIEVLKGKTYSDGKNHYDMETTELPELTSTS

SEQ ID NO: 169 - protein, 212 aa, Homo Sapiens
MVEMLPTAILLVLAVSVVAKDNATCDGPCGLRFRQNPQGGVRIVGGKAAQHGAWPWMVSLQIFTYNSHRYHTCGGSLLNSRWVLTAAHCFVGKNNVHDWRLVFGAKEITYGNNKPVKAPLQERYVEKIIIHEKYNSATEGNDIALVEITPPISCGRFIGPGCLPHFKAGLPRGSQSCWVAGWGYIEEKGFLECPAGTSPFKTGVAVALELCP

SEQ ID NO: 170 - protein, 100 aa, Homo Sapiens
MRKPAAGFLPSLLKVLLLPLAPAAAQDSTQASTPGSPLSPTEYERFFALLTPTWKAETTCRLRATHGCRNPTLVQLDQYENHGLVPDESPVFPASLYSLT

SEQ ID NO: 171 - protein, 510 aa, Homo Sapiens
MRKPAAGFLPSLLKVLLLPLAPAAAQDSTQASTPGSPLSPTEYERFFALLTPTWKAETTCRLRATHGCRNPTLVQLDQYENHGLVPDGAVCSNLPYASWFESFCQFTHYRCSNHVYYAKRVLCSQPVSILSPNTLKEIEASAEVSPTTMTSPISPHFTAPEHKQEQGVEHRQEPTQEHKQEEGQKQEEQEEEQEEEGKQEEGQGTKEGREAVSQLQTDSEPKFHSESLSSNPSSFAPRVREVESTPMIMENIQELIRSAQEIDEMNEIYDENSYWRNQNPGSLLQLPHTEALLVLCYSIVENTCIITPTAKAWKYMEEEILGFGKSVCDSLGRRHMSTCALCDFCSLKLEQCHSEASLQRQQCDTSHKTPFVSPLLASQSLSIGNQVGSPESGRFYGLDLYGGLHMDFWCARLATKGCEDVRVSGWLQTEFLSFQDGDFPTKICDTDYIQYPNYCSFKSQQCLMRNRNRKVSRMRCLQNETYSALSPGKSEDVVLRWSQEFSTLTLGQFG

SEQ ID NO: 172 - protein, 174 aa, Homo Sapiens [sequence omitted]

SEQ ID NO: 173 - protein, 543 aa, Homo Sapiens
MRKPAAGFLPSLLKVLLLPLAPAAAQDSTQASTPGSPLSPTEYERFFALLTPTWKAETTCRLRATHGCRNPTLVQLDQYENHGLVPDGAVCSNLPYASWFESFCQFTHYRCSNHVYYAKRVLCSQPVSILSPNTLKEIEASAEVSPTTMTSPISPHFTVTERQTFQPWPERLSNNVEELLQSSLSLGGQEQAPEHKQEQGVEHRQEPTQEHKQEEGQKQEEQEEEQEEEGKQEEGQGTKEGREAVSQLQTDSEPKFHSESLSSNPSSFAPRVREVESTPMIMENIQELIRSAQEIDEMNEIYDENSYWRNQNPGSLLQLPHTEALLVLCYSIVENTCIITPTAKAWKYMEEEILGFGKSVCDSLGRRHMSTCALCDFCSLKLEQCHSEASLQRQQCDTSHKTPFVSPLLASQSLSIGNQVGSPESGRFYGLDLYGGLHMDFWCARLATKGCEDVRVSGWLQTEFLSFQDGDFPTKICDTDYIQYPNYCSFKSQQCLMRNRNRKVSRMRCLQNETYSALSPGKSEDVVLRWSQEFSTLTLGQFG

SEQ ID NO: 174 - protein, 319 aa, Homo Sapiens
MRKPAAGFLPSLLKVLLLPLAPAAAQDSTQASTPGSPLSPTEYERFFALLTPTWKAETTCRLRATHGCRNPTLVQLDQYENHGLVPDGAVCSNLPYASWFESFCQFTHYRCSNHVYYAKRVLCSQPVSILSPNTLKEIEASAEVSPTTMTSPISPHFTVTERQTFQPWPERLSNNVEELLQSSLSLGGQEQAPEHKQEQGVEHRQEPTQEHKQEEGQKQEEQEEEQEEEGKQEEGQGTKEGREAVSQLQTDSEPKFHSESLSSNPSSFAPRVREVESTPMIMENIQELIRSAQEIDEMNEIYDENSYWRNQNPGRYRKF

SEQ ID NO: 175 - protein, 265 aa, Homo Sapiens
MNRFLLLMSLYLLGSARGTSSQPNELSGSIDHQTSVQQLPGEFFSLENPSDAEALYETSSGLNTLSEHGSSEHGSSKHTVAEHTSGEHAESEHASGEPAATEHAEGEHTVGEQPSGEQPSGEHLSGEQPLSELESGEQPSDEQPSGEHGSGEQPSGEQASGEQPSGEHASGEQASGAPISSTSTGTILNCYTCAYMNDQGKCLRGEGTCITQNSQQCMLKKIFEGGKLQFMVQGCENMCPSMNLFSHGTRMQIICCRNQSFCNKI

SEQ ID NO: 176 - protein, 246 aa, Homo Sapiens
MNRFLLLMSLYLLGSARGTSSQPNELSGSIDHQTSVQQLPGEFFSLENPSDAEALYETSSGLNTLSEHGSSEHGSSKHTVAEHTSGEHAESEHASGEPAATEHAEGEHTVGEQPSGEQPSGEHLSGEQPLSELESGEQPSDEQPSGEHGSGEQPSGEQASGEQPSGTILNCYTCAYMNDQGKCLRGEGTCITQNSQQCMLKKIFEGGKLQFMVQGCENMCPSMNLFSHGTRMQIICCRNQSFCNKI

SEQ ID NO: 177 - protein, 210 aa, Homo Sapiens
MNRFLLLMSLYLLGSARGTSSQPNELSGSIDHQTSVQQLPGEPAATEHAEGEHTVGEQPSGEQPSGEHLSGEQPLSELESGEQPSDEQPSGEHGSGEQPSGEQASGEQPSGEHASGEQASGAPISSTSTGTILNCYTCAYMNDQGKCLRGEGTCITQNSQQCMLKKIFEGGKLQFMVQGCENMCPSMNLFSHGTRMQIICCRNQSFCNKI

SEQ ID NO: 178 - protein, 195 aa, Homo Sapiens
MNRFLLLMSLYLLGSARGTSSQPNELSGSIDHQTSVQQLPGEQPSGEQPSGEHLSGEQPLSELESGEQPSDEQPSGEHGSGEQPSGEQASGEQPSGEHASGEQASGAPISSTSTGTILNCYTCAYMNDQGKCLRGEGTCITQNSQQCMLKKIFEGGKLQFMVQGCENMCPSMNLFSHGTRMQIICCRNQSFCNKI

SEQ ID NO: 179 - protein, 45 aa, Homo Sapiens
MAVYVGMLRLGRLCAGSSGVLGARAALSRSWQEARLQGVRFLRCL

SEQ ID NO: 180 - protein, 54 aa, Homo Sapiens
MAVYVGMLRLGRLCAGSSGVLGARAALSRSWQEARLQGVRFLRPSGEKLAHQGV

SEQ ID NO: 181 - protein, 640 aa, Homo Sapiens
MAVYVGMLRLGRLCAGSSGVLGARAALSRSWQEARLQGVRFLSARGGMEAGRQRISVPSSFTASAAAHSREVDRMVSTPIGGLSYVQGCTKKHLNSKTVGQCLETTAQRVPEREALVVLHEDVRLTFAQLKEEVDKAASGLLSIGLCKGDRLGMWGPNSYAWVLMQLATAQAGIILVSVNPAYQAMELEYVLKKVGCKALVFPKQFKTQQYYNVLKQICPEVENAQPGALKSQRLPDLTTVISVDAPLPGTLLLDEVVAAGSTRQHLDQLQYNQQFLSCHDPINIQFTSGTTGSPKGATLSHYNIVNNSNILGERLKLHEKTPEQLRMILPNPLYHCLGSVAGTMMCLMYGATLILASPIFNGKKALEAISRERGTFLYGTPTMFVDILNQPDFSSYDISTMCGGVIAGSPAPPELIRAIINKINMKDLVVAYGTTENSPVTFAHFPEDTVEQKAESVGRIMPHTEARIMNMEAGTLAKLNTPGELCIRGYCVMLGYWGEPQKTEEAVDQDKWYWTGDVATMNEQGFCKIVGRSKDMIIRGGENIYPAELEDFFHTHPKVQEVQVVGVKDDRMGEEICACIRLKDGEETTVEEIKAFCKGKISHFKIPKYIVFVTNYPLTISGKIQKFKLREQMERHLNL

SEQ ID NO: 182 - protein, 615 aa, Homo Sapiens
MAVYVGMLRLGRLCAGSSGVLGARAALSRSWQEARLQGVRFLSSREVDRMVSTPIGGLSYVQGCTKKHLNSKTVGQCLETTAQRVPEREALVVLHEDVRLTFAQLKEEVDKAASGLLSIGLCKGDRLGMWGPNSYAWVLMQLATAQAGIILVSVNPAYQAMELEYVLKKVGCKALVFPKQFKTQQYYNVLKQICPEVENAQPGALKSQRLPDLTTVISVDAPLPGTLLLDEVVAAGSTRQHLDQLQYNQQFLSCHDPINIQFTSGTTGSPKGATLSHYNIVNNSNILGERLKLHEKTPEQLRMILPNPLYHCLGSVAGTMMCLMYGATLILASPIFNGKKALEAISRERGTFLYGTPTMFVDILNQPDFSSYDISTMCGGVIAGSPAPPELIRAIINKINMKDLVVAYGTTENSPVTFAHFPEDTVEQKAESVGRIMPHTEARIMNMEAGTLAKLNTPGELCIRGYCVMLGYWGEPQKTEEAVDQDKWYWTGDVATMNEQGFCKIVGRSKDMIIRGGENIYPAELEDFFHTHPKVQEVQVVGVKDDRMGEEICACIRLKDGEETTVEEIKAFCKGKISHFKIPKYIVFVTNYPLTISGKIQKFKLREQMERHLNL

SEQ ID NO: 183 - protein, 602 aa, Homo Sapiens
MAVYVGMLRLGRLCAGSSGVLGARAALSRSWQEARLQGVRFLSSREVDRMVSTPIGGLSYVQGCTKKHLNSKTVGQCLETTAQRVPEREALVVLHEDVRLTFAQLKEEVDKAASGLLSIGLCKGDRLGMWGPNSYAWVLMQLATAQAMELEYVLKKVGCKALVFPKQFKTQQYYNVLKQICPEVENAQPGALKSQRLPDLTTVISVDAPLPGTLLLDEVVAAGSTRQHLDQLQYNQQFLSCHDPINIQFTSGTTGSPKGATLSHYNIVNNSNILGERLKLHEKTPEQLRMILPNPLYHCLGSVAGTMMCLMYGATLILASPIFNGKKALEAISRERGTFLYGTPTMFVDILNQPDFSSYDISTMCGGVIAGSPAPPELIRAIINKINMKDLVVAYGTTENSPVTFAHFPEDTVEQKAESVGRIMPHTEARIMNMEAGTLAKLNTPGELCIRGYCVMLGYWGEPQKTEEAVDQDKWYWTGDVATMNEQGFCKIVGRSKDMIIRGGENIYPAELEDFFHTHPKVQEVQVVGVKDDRMGEEICACIRLKDGEETTVEEIKAFCKGKISHFKIPKYIVFVTNYPLTISGKIQKFKLREQMERHLNL

SEQ ID NO: 184 - protein, 183 aa, Homo Sapiens
MAVYVGMLRLGRLCAGSSGVLGARAALSRSWQEARLQGVRFLSSREVDRMVSTPIGGLSYVQGCTKKHLNSKTVGQCLETTAQRVPEREALVVLHEDVRLTFAQLKEEVDKAASGLLSIGLCKGVCEPSLPGYGTGVCPQEGGLQGPCVPQAIQDPAILQRPEADLSRSGECPARGLEESEAP

SEQ ID NO: 185 - protein, 572 aa, Homo Sapiens
MAVYVGMLRLGRLCAGSSGVLGARAALSRSWQEARLQGVRFLSSREVDRMVSTPIGGLSYVQGCTKKHLNSKTVGQCLETTAQRVPEREALVVLHEDVRLTFAQLKEEVSVNPAYQAMELEYVLKKVGCKALVFPKQFKTQQYYNVLKQICPEVENAQPGALKSQRLPDLTTVISVDAPLPGTLLLDEVVAAGSTRQHLDQLQYNQQFLSCHDPINIQFTSGTTGSPKGATLSHYNIVNNSNILGERLKLHEKTPEQLRMILPNPLYHCLGSVAGTMMCLMYGATLILASPIFNGKKALEAISRERGTFLYGTPTMFVDILNQPDFSSYDISTMCGGVIAGSPAPPELIRAIINKINMKDLVVAYGTTENSPVTFAHFPEDTVEQKAESVGRIMPHTEARIMNMEAGTLAKLNTPGELCIRGYCVMLGYWGEPQKTEEAVDQDKWYWTGDVATMNEQGFCKIVGRSKDMIIRGGENIYPAELEDFFHTHPKVQEVQVVGVKDDRMGEEICACIRLKDGEETTVEEIKAFCKGKISHFKIPKYIVFVTNYPLTISGKIQKFKLREQMERHLNL

SEQ ID NO: 186 - protein, 85 aa, Homo Sapiens
TVPPSSWPLPSSMARRHWRPSAERGVIAGSPAPPELIRAIINKINMKDLVKSQEEIAAWEDGQQSTDVLLERPGRLLMEPQRTVP

SEQ ID NO: 187 - protein, 104 aa, Homo Sapiens
  misc_feature (1)..(1): Xaa can be any naturally occurring amino acid
XGKKALEAISRERGTFLYGTPTMFVDILNQPDFSSYDISTMCGGVIAGSPAPPELIRAIINKINMKDLVKSQEEIAAWEDGQQSTDVLLERPGRLLMEPQRTVP

SEQ ID NO: 188 - protein, 245 aa, Homo Sapiens
MASTALLALCSTGAFSGLAVEAGAGVCHATPIYAGHSWHQATFRLNVAGSTLSRYLRDLLVAANPDLLQQALPRKAITHLKKRSCYVSLDFEGDLRDPARHHPASFSVGNGCCVCLSSERFRCPEPIFQPGLLGQAEQGLPALAFRALQKMPKTLRTRLADTVVLAGGSTLFPGFAERLDKELEAQCRRHGYAALRPHLVAKHGRGMAVWTGGSMVASLHSFQRRWITRAMYQECGSRLLYDVFN

SEQ ID NO: 189 - protein, 21 aa, Homo Sapiens
MVDGVMILPVLIMIALPSPSM

SEQ ID NO: 190 - protein, 71 aa, Homo Sapiens
MVDGVMILPVLIMIALPSPSMEDEKPKVNPKLYMCVCEGLSCGNEDHCEGQQCFSSLSINDGFHVYQKGCF

SEQ ID NO: 191 - protein, 73 aa, Homo Sapiens
MVDGVMILPVLIMIALPSPSMEDEKPKVNPKLYMCVCEGLSCGNEDHCEGQQCFSSLSINDGFHVYQKGCFQV

SEQ ID NO: 192 - protein, 87 aa, Homo Sapiens
MVDGVMILPVLIMIALPSPSMEDEKPKVNPKLYMCVCEGLSCGNEDHCEGQQCFSSLSINDGFHVYQKGCFQVYEQGKMTCKTPPSP

SEQ ID NO: 193 - protein, 87 aa, Homo Sapiens; identical to SEQ ID NO: 192

SEQ ID NO: 194 - protein, 509 aa, Homo Sapiens
MVDGVMILPVLIMIALPSPSMEDEKPKVNPKLYMCVCEGLSCGNEDHCEGQQCFSSLSINDGFHVYQKGCFQVYEQGKMTCKTPPSPGQAVECCQGDWCNRNITAQLPTKGKSFPGTQNFHLEVGLIILSVVFAVCLLACLLGVALRKFKRRNQERLNPRDVEYGTIEGLITTNVGDSTLADLLDHSCTSGSGSGLPFLVQRTVARQITLLECVGKGRYGEVWRGSWQGENVAVKIFSSRDEKSWFRETELYNTVMLRHENILGFIASDMTSRHSSTQLWLITHYHEMGSLYDYLQLTTLDTVSCLRIVLSIASGLAHLHIEIFGTQGKPAIAHRDLKSKNILVKKNGQCCIADLGLAVMHSQSTNQLDVGNNPRVGTKRYMAPEVLDETIQVDCFDSYKRVDIWAFGLVLWEVARRMVSNGIVEDYKPPFYDVVPNDPSFEDMRKVVCVDQQRPNIPNRWFSDPTLTSLAKLMKECWYQNPSARLTALRIKKTLTKIDNSLDKLKTDC

SEQ ID NO: 195 - protein, 509 aa, Homo Sapiens; identical to SEQ ID NO: 194

SEQ ID NO: 196 - protein, 509 aa, Homo Sapiens; identical to SEQ ID NO: 194

SEQ ID NO: 197 - protein, 509 aa, Homo Sapiens; identical to SEQ ID NO: 194

SEQ ID NO: 198 - protein, 443 aa, Homo Sapiens
MLTNGKEQVIKSCVSLPELNAQVFCHSSNNVTKTECCFTDFCNNITLHLPTASPNAPKLGPMELAIIITVPVCLLSIAAMLTVWACQGRQCSYRKKKRPNVEEPLSECNLVNAGKTLKDLIYDVTASGSGSGLPLLVQRTIARTIVLQEIVGKGRFGEVWHGRWCGEDVAVKIFSSRDERSWFREAEIYQTVMLRHENILGFIAADNKDNGTWTQLWLVSEYHEQGSLYDYLNRNIVTVAGMIKLALSIASGLAHLHMEIVGTQGKPAIAHRDIKSKNILVKKCETCAIADLGLAVKHDSILNTIDIPQNPKVGTKRYMAPEMLDDTMNVNIFESFKRADIYSVGLVYWEIARRCSVGGIVEEYQLPYYDMVPSDPSIEEMRKVVCDQKFRPSIPNQWQSCEALRVMGRIMRECWYANGAARLTALRIKKTISQLCVKEDCKA

SEQ ID NO: 199 - protein, 493 aa, Homo Sapiens
MTRALCSALRQALLLLAAAAELSPGLKCVCLLCDSSNFTCQTEGACWASVMLTNGKEQVIKSCVSLPELNAQVFCHSSNNVTKTECCFTDFCNNITLHLPTASPNAPKLGPMELAIIITVPVCLLSIAAMLTVWACQGRQCSYRKKKRPNVEEPLSECNLVNAGKTLKDLIYDVTASGSGSGLPLLVQRTIARTIVLQEIVGKGRFGEVWHGRWCGEDVAVKIFSSRDERSWFREAEIYQTVMLRHENILGFIAADNKDNGTWTQLWLVSEYHEQGSLYDYLNRNIVTVAGMIKLALSIASGLAHLHMEIVGTQGKPAIAHRDIKSKNILVKKCETCAIADLGLAVKHDSILNTIDIPQNPKVGTKRYMAPEMLDDTMNVNIFESFKRADIYSVGLVYWEIARRCSVGGIVEEYQLPYYDMVPSDPSIEEMRKVVCDQKFRPSIPNQWQSCEALRVMGRIMRECWYANGAARLTALRIKKTISQLCVKEDCKA

SEQ ID NO: 200 - protein, 336 aa, Homo Sapiens
MTRALCSALRQALLLLAAAAELSPGLKCVCLLCDSSNFTCQTEGACWASVMLTNGKEQVIKSCVSLPELNAQVFCHSSNNVTKTECCFTDFCNNITLHLPTDNGTWTQLWLVSEYHEQGSLYDYLNRNIVTVAGMIKLALSIASGLAHLHMEIVGTQGKPAIAHRDIKSKNILVKKCETCAIADLGLAVKHDSILNTIDIPQNPKVGTKRYMAPEMLDDTMNVNIFESFKRADIYSVGLVYWEIARRCSVGGIVEEYQLPYYDMVPSDPSIEEMRKVVCDQKFRPSIPNQWQSCEALRVMGRIMRECWYANGAARLTALRIKKTISQLCVKEDCKA

SEQ ID NO: 201 - protein, 413 aa, Homo Sapiens
MTRALCSALRQALLLLAAAAELSPGLKCVCLLCDSSNFTCQTEGACWASVMLTNGKEQVIKSCVSLPELNAQVFCHSSNNVTKTECCFTDFCNNITLHLPTGLPLLVQRTIARTIVLQEIVGKGRFGEVWHGRWCGEDVAVKIFSSRDERSWFREAEIYQTVMLRHENILGFIAADNKDNGTWTQLWLVSEYHEQGSLYDYLNRNIVTVAGMIKLALSIASGLAHLHMEIVGTQGKPAIAHRDIKSKNILVKKCETCAIADLGLAVKHDSILNTIDIPQNPKVGTKRYMAPEMLDDTMNVNIFESFKRADIYSVGLVYWEIARRCSVGGIVEEYQLPYYDMVPSDPSIEEMRKVVCDQKFRPSIPNQWQSCEALRVMGRIMRECWYANGAARLTALRIKKTISQLCVKEDCKA

SEQ ID NO: 202 - protein, 517 aa, Homo Sapiens
MALTPPLLLLSAGTMTLGSPRKGLLMLLMALVTQGDPVKPSRGPLVTCTCESPHCKGPTCRGAWCTVVLVREEGRHPQEHRGCGNLHRELCRGRPTEFVNHYCCDSHLCNHNVSLVLEATQPPSEQPGTDGQLALILGPVLALLALVALGVLGLWHVRRRQEKQRGLHSELGESSLILKASEQGDSMLGDLLDSDCTTGSGSGLPFLVQRTVARQVALVECVGKGRYGEVWRGLWHGESVAVKIFSSRDEQSWFRETEIYNTVLLRHDNILGFIASDMTSRNSSTQLWLITHYHEHGSLYDFLQRQTLEPHLALRLAVSAACGLAHLHVEIFGTQGKPAIAHRDFKSRNVLVKSNLQCCIADLGLAVMHSQGSDYLDIGNNPRVGTKRYMAPEVLDEQIRTDCFESYKWTDIWAFGLVLWEIARRTIVNGIVEDYRPPFYDVVPNDPSFEDMKKVVCVDQQTPTIPNRLAADPVLSGLAQMMRECWYPNPSARLTALRIKKTLQKISNSPEKPKVIQ

SEQ ID NO: 203 - protein, 159 aa, Homo Sapiens
MALTPPLLLLSAGTMTLGSPRKGLLMLLMALVTQGDPVKPSRGPLVTCTCESPHCKGPTCRGAWCTVVLVREEGRHPQEHRGCGNLHRELCRGRPTEFVNHYCCDSHLCNHNVSLVLEGKGRYGEVWRGLWHGESVAVKIFSSRDEQSWFRETEIYNTV

SEQ ID NO: 204 - protein, 329 aa, Homo Sapiens
MALTPPLLLLSAGTMTLGSPRKGLLMLLMALVTQGKGRYGEVWRGLWHGESVAVKIFSSRDEQSWFRETEIYNTVLLRHDNILGFIASDMTSRNSSTQLWLITHYHEHGSLYDFLQRQTLEPHLALRLAVSAACGLAHLHVEIFGTQGKPAIAHRDFKSRNVLVKSNLQCCIADLGLAVMHSQGSDYLDIGNNPRVGTKRYMAPEVLDEQIRTDCFESYKWTDIWAFGLVLWEIARRTIVNGIVEDYRPPFYDVVPNDPSFEDMKKVVCVDQQTPTIPNRLAADPVLSGLAQMMRECWYPNPSARLTALRIKKTLQKISNSPEKPKVIQ

SEQ ID NO: 205 - protein, 89 aa, Homo Sapiens
MTLGSPRKGLLMLLMALVTQGDPVKPSRGPLVTCTCESPHCKGPTCRGAWCTVVLVREEGRHPQEHRGCGNLHRELCRGRPTEFVNHYC

SEQ ID NO: 206 - protein, 503 aa, Homo Sapiens
MTLGSPRKGLLMLLMALVTQGDPVKPSRGPLVTCTCESPHCKGPTCRGAWCTVVLVREEGRHPQEHRGCGNLHRELCRGRPTEFVNHYCCDSHLCNHNVSLVLEATQPPSEQPGTDGQLALILGPVLALLALVALGVLGLWHVRRRQEKQRGLHSELGESSLILKASEQGDSMLGDLLDSDCTTGSGSGLPFLVQRTVARQVALVECVGKGRYGEVWRGLWHGESVAVKIFSSRDEQSWFRETEIYNTVLLRHDNILGFIASDMTSRNSSTQLWLITHYHEHGSLYDFLQRQTLEPHLALRLAVSAACGLAHLHVEIFGTQGKPAIAHRDFKSRNVLVKSNLQCCIADLGLAVMHSQGSDYLDIGNNPRVGTKRYMAPEVLDEQIRTDCFESYKWTDIWAFGLVLWEIARRTIVNGIVEDYRPPFYDVVPNDPSFEDMKKVVCVDQQTPTIPNRLAADPVLSGLAQMMRECWYPNPSARLTALRIKKTLQKISNSPEKPKVIQ

SEQ ID NO: 207 - protein, 163 aa, Homo Sapiens
  misc_feature (1)..(1): Xaa can be any naturally occurring amino acid
XSRNVLVKSNLQCCIADLGLAVMHSQGSDYLDIGNNPRVGTKRYMAPEVLDEQIRTDCFESYKWTDIWAFGLVLWEIARRTIVNGIVEDYRPPFYDVVPNDPSFEDMKKVVCVDQQTPTIPNRLAADPVRPLLGLGWRGVVAHGWDFWAQELVSEASASSHRY

SEQ ID NO: 208 - protein, 99 aa, Homo Sapiens
MAEGNTLISVDYEIFGKVQGVFFRKHTQAEGKKLGLVGWVQNTDRGTVQGQLQGPISKVRHMQEWLETRGSPKSHIDKANFNNEKVILKLDYSDFQIVK

SEQ ID NO: 209 - protein, 99 aa, Homo Sapiens; identical to SEQ ID NO: 208

SEQ ID NO: 210 - protein, 55 aa, Homo Sapiens
MAEGNTLISVDYEIFGKVQGVFFRKHTQEMTVENRIAETHSKSCVPVSFATSYAG

SEQ ID NO: 211 - protein, 62 aa, Homo Sapiens
MAEGNTLISVDYEIFGKVQGVFFRKHTQEMTVENRIAETHSKSCVPVSFATSYAGINEFKRI

SEQ ID NO: 212 - protein, 37 aa, Homo Sapiens
MAEGNTLISVDYEIFGKVQGVFFRKHTQVCGLQALGW

SEQ ID NO: 213 - protein, 129 aa, Homo Sapiens
MPASARLAGAGLLLAFLRALGCAGRAPGLSMAEGNTLISVDYEIFGKVQGVFFRKHTQAEGKKLGLVGWVQNTDRGTVQGQLQGPISKVRHMQEWLETRGSPKSHIDKANFNNEKVILKLDYSDFQIVK

SEQ ID NO: 214 - protein, 97 aa, Homo Sapiens
MCPLPLAAAAVAAPRAPLRLLNRGLAAAMSTAQSLKSVDYEVFGRVQGVCFRMYTEDEARKIGVVGWVKNTSKGTVTGQVQGPEDKVNSMLECSGLI

SEQ ID NO: 215 - protein, 98 aa, Homo Sapiens
MCPLPLAAAAVAAPRAPLRLLNRGLAAAMSTAQSLKSVDYEVFGRVQGVCFRMYTEDEARKIGVVGWVKNTSKGTVTGQVQGPEDKVNSMNSSAPEAG

SEQ ID NO: 216 - protein, 40 aa, Homo Sapiens
MLLTQSLFGGLFPRTRETMRREAVPDDNELPRNKHLNWKS

SEQ ID NO: 217 - protein, 116 aa, Homo Sapiens
MLLTQSLFGGLFPRTRETMRRYKVSLFYLGCSRTPNVKLSSCLGLPCCWDYSYKFIQLSEFGFGQVIIVSEEPWKENISCSSTTFIKSTICLNPDSEFRPCFNAWLSLIRENAVGL

SEQ ID NO: 218 - protein, 172 aa, Homo Sapiens
MLLTQSLFGGLFPRTRETMRRYKVSLFYLGCSRTPNVKLSSCLGLPCCWDYSYKFIQLSEFGFGQVIIVSEEPWKENISCSSTTFIKSTICLSVCFRMYTEDEARKIGVVGWVKNTSKGTVTGQVQGPEDKVNSMKSWLSKVGSPSSRIDRTNFSNEKTISKLEYSNFSIRY

SEQ ID NO: 219 - protein, 99 aa, Homo Sapiens
MSTAQSLKSVDYEVFGRVQGVCFRMYTEDEARKIGVVGWVKNTSKGTVTGQVQGPEDKVNSMKSWLSKVGSPSSRIDRTNFSNEKTISKLEYSNFSIRY

SEQ ID NO: 220 - protein, 83 aa, Homo Sapiens
MTALVLQIEYTEDEARKIGVVGWVKNTSKGTVTGQVQGPEDKVNSMKSWLSKVGSPSSRIDRTNFSNEKTISKLEYSNFSIRY

SEQ ID NO: 221 - protein, 66 aa, Homo Sapiens
  misc_feature (1)..(1): Xaa can be any naturally occurring amino acid
XAQSLKSVDYEVFGRVQGVCFRMYTEDEARKIGVVGWVKNTSKGTVTGQVQGPEDKVNSILAFPFY

SEQ ID NO: 222 - protein, 270 aa, Homo Sapiens
MDSLEWNWALVYELSGEHHDEEWSVKTYQEVAQKFVETHPEFIGIKIIYSDHRSKDVAVIAESIRMAMGLRIKFPTVVAGFDLVGHEDTGHSLHDYKEALMIPAKDGVKLPYFFHAGETDWQGTSIDRNILDALMLNTTRIGHGFALSKHPAVRTYSWKKDIPIEVCPISNQVLKLVSDLRNHPVATLMATGHPMVISSDDPAMFGAKGLSYDFYEVFMGIGGMKADLRTLKQLAMNSIKYSTLLESEKNTFMEIWKKRWDKFIADVATK

SEQ ID NO: 223 - protein, 391 aa, Homo Sapiens
MDWLVRNVTYRPHCHICFTPRGIMQFRFAHPTPRPSEKCSKWILLEDYRKRVQNVTEFDDSLLRNFTLVTQHPEVIYTNQNVVWSKFETIFFTISGLIHYAPVFRDYVFRSMQEFYEDNVLYMEIRARLLPVYELSGEHHDEEWSVKTYQEVAQKFVETHPEFIGIKIIYSDHRSKDVAVIAESIRMAMGLRIKFPTVVAGFDLVGHEDTGHSLHDYKEALMIPAKDGVKLPYFFHAGETDWQGTSIDRNILDALMLNTTRIGHGFALSKHPAVRTYSWKKDIPIEVCPISNQVLKLVSDLRNHPVATLMATGHPMVISSDDPAMFGAKGLSYDFYEVFMGIGGMKADLRTLKQLAMNSIKYSTLLESEKNTFMEIWKKRWDKFIADVATK

SEQ ID NO: 224 - protein, 135 aa, Homo Sapiens
MLVDGPSERPALCFLLLAVAMSFFGSALSIDETRAHLLLKEKMMRLGGRLVLNTKEELANERLMTLKIAEMKEAMRTLIFPPSMHFFQAKHLIERSQVFNILRMMPKGAALHLHDIGIVTMDWLVRNVTYRPHCH

SEQ ID NO: 225 - protein, 152 aa, Homo Sapiens
MLVDGPSERPALCFLLLAVAMSFFGSALSIDETRAHLLLKEKMMRLGGRLVLNTKEELANERLMTLKIAEMKEAMRTLIFPPSMHFFQAKHLIERSQVFNILRMMPKGAALHLHDIGIVTMDWLVRNVTYRPHCHICFTPRGIMQFRFAHPT

SEQ ID NO: 226 - protein, 511 aa, Homo Sapiens
MLVDGPSERPALCFLLLAVAMSFFGSALSIDETRAHLLLKEKMMRLGGRLVLNTKEELANERLMTLKIAEMKEAMRTLIFPPSMHFFQAKHLIERSQVFNILRMMPKGAALHLHDIGIVTMDWLVRNVTYRPHCHICFTPRGIMQFRFAHPTPRPSEKCSKWILLEDYRKRVQNVTEFDDSLLRNFTLVTQHPEVIYTNQNVVWSKFETIFFTISGLIHYAPVFRDYVFRSMQEFYEDNVLYMEIRARLLPVYELSGEHHDEEWSVKTYQEVAQKFVETHPEFIGIKIIYSDHRSKDVAVIAESIRMAMGLRIKFPTVVAGFDLVGHEDTGHSLHDYKEALMIPAKDGVKLPYFFHAGETDWQGTSIDRNILDALMLNTTRIGHGFALSKHPAVRTYSWKKDIPIEVCPISNQVLKLVSDLRNHPVATLMATGHPMVISSDDPAMFGAKGLSYDFYEVFMGIGGMKADLRTLKQLAMNSIKYSTLLESEKNTFMEIWKKRWDKFIADVATK

SEQ ID NO: 227 - protein, 511 aa, Homo Sapiens; identical to SEQ ID NO: 226

SEQ ID NO: 228 - protein, 511 aa, Homo Sapiens; identical to SEQ ID NO: 226

SEQ ID NO: 229 - protein, 469 aa, Homo Sapiens
MMRLGGRLVLNTKEELANERLMTLKIAEMKEAMRTLIFPPSMHFFQAKHLIERSQVFNILRMMPKGAALHLHDIGIVTMDWLVRNVTYRPHCHICFTPRGIMQFRFAHPTPRPSEKCSKWILLEDYRKRVQNVTEFDDSLLRNFTLVTQHPEVIYTNQNVVWSKFETIFFTISGLIHYAPVFRDYVFRSMQEFYEDNVLYMEIRARLLPVYELSGEHHDEEWSVKTYQEVAQKFVETHPEFIGIKIIYSDHRSKDVAVIAESIRMAMGLRIKFPTVVAGFDLVGHEDTGHSLHDYKEALMIPAKDGVKLPYFFHAGETDWQGTSIDRNILDALMLNTTRIGHGFALSKHPAVRTYSWKKDIPIEVCPISNQVLKLVSDLRNHPVATLMATGHPMVISSDDPAMFGAKGLSYDFYEVFMGIGGMKADLRTLKQLAMNSIKYSTLLESEKNTFMEIWKKRWDKFIADVATK

SEQ ID NO: 230 - protein, 59 aa, Homo Sapiens
MVLLRVLILLLSWAAGMGAPARWRIPKSSPPPRPAAQTRGKLCCLQLGSCIVLYPARRS

SEQ ID NO: 231 - protein, 148 aa, Homo Sapiens
MVLLRVLILLLSWAAGMGDRDFDDGVLGLAWVGAPSGSSGGICEKSKLYSDGKKKSLNTGIITVQNYGSHVPPKVSHITFAHEVGHNFGSPHDSGTECTPGESKNLGQKENGNYIMYARATSGDKLNNNKFSLCSIRNISQVLEKKRN

SEQ ID NO: 232 - protein, 71 aa, Homo Sapiens
MVLLRVLILLLSWAAGMGDRDFDDGVLGLAWVGAPSGSSGGICEKSKLYSDVPTMGKLHSKEKPIKSSSPN

SEQ ID NO: 233 - protein, 115 aa, Homo Sapiens
MVLLRVLILLLSWAAGMGGQYGNPLNKYIRHYEGLSYNVDSLHQKHQRAKRAVSHEDQFLRLDFHAHGRDGVLPCCPGWSQTPGLKRSTCLSLPQCWDYRCEPSPMISVFDYPHK

SEQ ID NO: 234 - protein, 125 aa, Homo Sapiens
MVLLRVLILLLSWAAGMGGQYGNPLNKYIRHYEGLSYNVDSLHQKHQRAKRAVSHEDQFLRLDFHAHGRHFNLRMKRDTSLFSDEFKVETSNKVLDYDTSHIYTGHIYDYPHKYGPQGGCADHSV

SEQ ID NO: 235 - protein, 748 aa, Homo Sapiens
MVLLRVLILLLSWAAGMGGQYGNPLNKYIRHYEGLSYNVDSLHQKHQRAKRAVSHEDQFLRLDFHAHGRHFNLRMKRDTSLFSDEFKVETSNKVLDYDTSHIYTGHIYGEEGSFSHGSVIDGRFEGFIQTRGGTFYVEPAERYIKDRTLPFHSVIYHEDDINYPHKYGPQGGCADHSVFERMRKYQMTGVEEVTQIPQEEHAANGPELLRKKRTTSAEKNTCQLYIQTDHLFFKYYGTREAVIAQISSHVKAIDTIYQTTDFSGIRNISFMVKRIRINTTADEKDPTNPFRFPNIGVEKFLELNSEQNHDDYCLAYVFTDRDFDDGVLGLAWVGAPSGSSGGICEKSKLYSDGKKKSLNTGIITVQNYGSHVPPKVSHITFAHEVGHNFGSPHDSGTECTPGESKNLGQKENGNYIMYARATSGDKLNNNKFSLCSIRNISQVLEKKRNNCFVESGQPICGNGMVEQGEECDCGYSDQCKDECCFDANQPEGRKCKLKPGKQCSPSQGPCCTAQCAFKSKSEKCRDDSDCAREGICNGFTALCPASDPKPNFTDCNRHTQVCINGQCAGSICEKYGLEECTCASSDGKDDKELCHVCCMKKMDPSTCASTGSVQWSRHFSGRTITLQPGSPCNDFRGYCDVFMRCRLVDADGPLARLKKAIFSPELYENIAEWIVAHWWAVLLMGIALIMLMAGFIKICSVHTPSSNPKLPPPKPLPGTLKRRRPPQPIQQPQRQRPRESYQMGHMRR

SEQ ID NO: 236 - protein, 38 aa, Homo Sapiens
MVLLRVLILLLSWAAGMGVPTMGKLHSKEKPIKSSSPN

SEQ ID NO: 237 - protein, 58 aa, Homo Sapiens
  misc_feature (1)..(1): Xaa can be any naturally occurring amino acid
XEEGSFSHGSVIDGRFEGFIQTRGGTFYVEPAERYIKDRTLPFHSVIYHEDDISEGLN

SEQ ID NO: 238 - protein, 278 aa, Homo Sapiens
MAARPLPVSPARALLLALAGALLAPCEARGVSLWNQGRADEVVSASVGSGDLWIPVKSFDSKNHPEVLNIRLQRESKELIINLERNEGLIASSFTETHYLQDGTDVSLARNYTGHCYYHGHVRGYSDSAVSLSTCSGLRGLIVFENESYVLEPMKSATNRYKLFPAKKLKSVRGSCGSHHNTPNLAAKNVFPPPSQTWARRHKRETLKATKYVELVIVADNREFQRQGKDLEKVKQRLIEIANHVDKFYRPLNIRIVLVGVEVWNDMDKCSVSQDPFT

SEQ ID NO: 239 - protein, 909 aa, Homo Sapiens
MAARPLPVSPARALLLALAGALLAPCEARGVSLWNQGRADEVVSASVGSGDLWIPVKSFDSKNHPEVLNIRLQRESKELIINLERNEGLIASSFTETHYLQDGTDVSLARNYTVILGHCYYHGHVRGYSDSAVSLSTCSGLRGLIVFENESYVLEPMKSATNRYKLFPAKKLKSVRGSCGSHHNTPNLAAKNVFPPPSQTWARRHKRETLKATKYVELVIVADNREFQRQGKDLEKVKQRLIEIANHVDKFYRPLNIRIVLVGVEVWNDMDKCSVSQDPFTSLHEFLDWRKMKLLPRKSHDNAQLVSGVYFQGTTIGMAPIMSMCTADQSGGIVMDHSDNPLGAAVTLAHELGHNFGMNHDTLDRGCSCQMAVEKGGCIMNASTGYPFPMVFSSCSRKDLETSLEKGMGVCLFNLPEVRESFGGQKCGNRFVEEGEECDCGEPEECMNRCCNATTCTLKPDAVCAHGLCCEDCQLKPAGTACRDSSNSCDLPEFCTGASPHCPANVYLHDGHSCQDVDGYCYNGICQTHEQQCVTLWGPGAKPAPGICFERVNSAGDPYGNCGKVSKSSFAKCEMRDAKCGKIQCQGGASRPVIGTNAVSIETNIPLQQGGRILCRGTHVYLGDDMPDPGLVLAGTKCADGKICLNRQCQNISVFGVHECAMQCHGRGVCNNRKNCHCEAHWAPPFCDKFGFGGSTDSGPIRQADNQGLTIGILVTILCLLAAGFVVYLKRKTLIRLLFTNKKTTIEKLRCVRPSRPPRGFQPCQAHLGHLGKGLMRKPPDSYPPKDNPRRLLQCQNVDISRPLNGLNVPQPQSTQRVLPPLHRAPRAPSVPARPLPAKPALRQAQGTCKPNPPQKPLPADPLARTTRLTHALARTPGQWETGLRLAPLRPAPQYPHQVPRSTHTAYIK

SEQ ID NO: 240 - protein, 738 aa, Homo Sapiens
MAARPLPVSPARALLLALAGALLAPCEARGVSLWNQGRADEVVSASVGSGDLWIPVKSFDSKNHPEVLNIRLQRESKELIINLERNEGLIASSFTETHYLQDGTDVSLARNYTVILGHCYYHGHVRGYSDSAVSLSTCSGLRGLIVFENESYVLEPMKSATNRYKLFPAKKLKSVRGSCGSHHNTPNLAAKNVFPPPSQTWARRHKRETLKATKYVELVIVADNREFQRQGKDLEKVKQRLIEIANHVDKFYRPLNIRIVLVGVEVWNDMDKCSVSQDPFTSLHEFLDWRKMKLLPRKSHDNAQLVSGVYFQGTTIGMAPIMSMCTADQSGGIVMDHSDNPLGAAVTLAHELGHNFGMNHDTLDRGCSCQMAVEKGGCIMNASTGYPFPMVFSSCSRKDLETSLEKGMGVCLFNLPEVRESFGGQKCGNRFVEEGEECDCGEPEECMNRCCNATTCTLKPDAVCAHGLCCEDCQLKPAGTACRDSSNSCDLPEFCTGASPHCPANVYLHDGHSCQDVDGYCYNGICQTHEQQCVTLWGPGAKPAPGICFERVNSAGDPYGNCGKVSKSSFAKCEMRDAKCGKIQCQGGASRPVIGTNAVSIETNIPLQQGGRILCRGTHVYLGDDMPDPGLVLAGTKCADGKICLNRQCQNISVFGVHECAMQCHGRGVCNNRKNCHCEAHWAPPFCDKFGFGGSTDSGPIRQAEARQEAAESNRERGQGQEPVGSQEHASTASLTLI

SEQ ID NO: 241 - protein, 520 aa, Homo Sapiens
MRLALLWALGLLGAGSPLPSWPLPNIGGTEEQQAESEKAPREPLEPQVLQDDLPISLKKVLQTSLPEPLRIKLELDGDSHILELLQNRELVPGLNFSNCSRRALEKALLDGMGSCLFERLPSLPPMAAFCGNMFVEPGEQCDCGFLDDCVDPCCDSLTCQLRPGAQCASDGPCCQNCQLRPSGWQCRPTRGDCDLPEFCPGDSSQCPPDVSLGDGEPCAGGQAVCMHGRCASYAQQCQSLWGPGAQPAAPLCLQTANTRGNAFGSCGRNPSGSYVSCTPRDAICGQLQCQTGRTQPLLGSIRDLLWETIDVNGTELNCSWVHLDLGSDVAQPLLTLPGTACGPGLVCIDHRCQRVDLLGAQECRSKCHGHGVCDSNRHCYCEEGWAPPDCTTQLKATSSLTTGLLLSLLVLLVLVMLGASYWYRARLHQRLCQLKGPTCQYRAAQSGPSERPGPPQRALLARGTKSQGPAKPPPPRKPLPADPQGRCPSGDLPGPGAGIPPLVVPSRPAPPPPTVSSLYL

SEQ ID NO: 242 - protein, 814 aa, Homo Sapiens
MRLALLWALGLLGAGSPLPSWPLPNIGGTEEQQAESEKAPREPLEPQVLQDDLPISLKKVLQTSLPEPLRIKLELDGDSHILELLQNRELVPGRPTLVWYQPDGTRVVSEGHTLENCCYQGRVRGYAGSWVSICTCSGLRGLVVLTPERSYTLEQGPGDLQGPPIISRIQDLHLPGHTCALSWRESVHTQKPPEHPLGQRHIRRRRDVVTETKTVELVIVADHSEAQKYRDFQHLLNRTLEVALLLDTFFRPLNVRVALVGLEAWTQRDLVEISPNPAVTLENFLHWRRAHLLPRLPHDSAQLVTGTSFSGPTVGMAIQNSICSPDFSGGVNMDHSTSILGVASSIAHELGHSLGLDHDLPGNSCPCPGPAPAKTCIMEASTDFLPGLNFSNCSRRALEKALLDGMGSCLFERLPSLPPMAAFCGNMFVEPGEQCDCGFLDDCVDPCCDSLTCQLRPGAQCASDGPCCQNCQLRPSGWQCRPTRGDCDLPEFCPGDSSQCPPDVSLGDGEPCAGGQAVCMHGRCASYAQQCQSLWGPGAQPAAPLCLQTANTRGNAFGSCGRNPSGSYVSCTPRDAICGQLQCQTGRTQPLLGSIRDLLWETIDVNGTELNCSWVHLDLGSDVAQPLLTLPGTACGPGLVCIDHRCQRVDLLGAQECRSKCHGHGVCDSNRHCYCEEGWAPPDCTTQLKATSSLTTGLLLSLLVLLVLVMLGASYWYRARLHQRLCQLKGPTCQYRAAQSGPSERPGPPQRALLARGTKSQGPAKPPPPRKPLPADPQGRCPSGDLPGPGAGIPPLVVPSRPAPPPPTVSSLYL

SEQ ID NO: 243 - protein, 796 aa, Homo Sapiens
MRLALLWALGLLGAGSPLPSWPLPNIGGTEEQQAESEKAPREPLEPQVLQDDLPISLKKVLQTSLPEPLRIKLELDGDSHILELLQNRELVPGRPTLVWYQPDGTRVVSEGHTLENCCYQGRVRGYAGSWVSICTCSGLRGLVVLTPERSYTLEQGPGDLQGPPIISRIQDLHLPGHTCALSWRESVHTQKPPEHPLGQRHIRRRRDVVTETKTVELVIVADHSEAQKYRDFQHLLNRTLEVALLLDTFFRPLNVRVALVGLEAWTQRDLVEISPNPAVTLENFLHWRRAHLLPRLPHDSAQLVTGTSFSGPTVGMAIQNSICSPDFSGGVNMDHSTSILGVASSIAHELGHSLGLDHDLPGNSCPCPGPAPAKTCIMEASTDFLPGLNFSNCSRRALEKALLDGMGSCLFERLPSLPPMAAFCGNMFVEPGEQCDCGFLDDCVDPCCDSLTCQLRPGAQCASDGPCCQNCQLRPSGWQCRPTRGDCDLPEFCPGDSSQCPPDVSLGDGEPCAGGQAVCMHGRCASYAQQCQSLWGPGAQPAAPLCLQTANTRGNAFGSCGRNPSGSYVSCTPRDAICGQLQCQTGRTQPLLGSIRDLLWETIDVNGTELNCSWVHLDLGSDVAQPLLTLPGTACGPGLVCIDHRCQRVDLLGAQECRSKCHGHGVCDSNRHCYCEEGWAPPDCTTQLKATSSLTTGLLLSLLVLLVLVMLGASYWYRARLHQRLCQLKGPTCQYRLVLSASRPPLPGRCRLTLCPRDSSLRGQPSPHPQGSHCLPTPRAGAHRVTCPAQGLESRP

SEQ ID NO: 244 - protein, 772 aa, Homo Sapiens
MRLALLWALGLLGAGSPLPSWPLPNIGGTEEQQAESEKAPREPLEPQVLQDDLPISLKKVLQTSLPEPLRIKLELDGDSHILELLQNRELVPGRPTLVWYQPDGTRVVSEGHTLENCCYQGRVRGYAGSWVSICTCSGLRGLVVLTPERSYTLEQGPGDLQGPPIISRIQDLHLPGHTCALSWRESVHTQKPPEHPLGQRHIRRRRDVVTETKTVELVIVADHSEAQKYRDFQHLLNRTLEVALLLDTFFRPLNVRVALVGLEAWTQRDLVEISPNPAVTLENFLHWRRAHLLPRLPHDSAQLVTGTSFSGPTVGMAIQNSICSPDFSGGVNMDHSTSILGVASSIAHELGHSLGLDHDLPGNSCPCPGPAPAKTCIMEASTDFLPGLNFSNCSRRALEKALLDGMGSCLFERLPSLPPMAAFCGNMFVEPGEQCDCGFLDDCVDPCCDSLTCQLRPGAQCASDGPCCQNCQLRPSGWQCRPTRGDCDLPEFCPGDSSQCPPDVSLGDGEPCAGGQAVCMHGRCASYAQQCQSLWGPGAQPAAPLCLQTANTRGNAFGSCGRNPSGSYVSCTPRDAICGQLQCQTGRTQPLLGSIRDLLWETIDVNGTELNCSWVHLDLGSDVAQPLLTLPGTACGPGLVCIDHRCQRVDLLGAQECRSKCHGHGVCDSNRHCYCEEGWAPPDCTTQLKATSSLTTGLLLSLLVLLVLVMLGASYWYRARLHQRLCQLKGPTCQYSLRGQPSPHPQGSHCLPTPRAGAHRVTCPAQGLESRP

SEQ ID NO: 245 - protein, 839 aa, Homo Sapiens
MRLALLWALGLLGAGSPLPSWPLPNIGGTEEQQAESEKAPREPLEPQVLQDDLPISLKKVLQTSLPEPLRIKLELDGDSHILELLQNRELVPGRPTLVWYQPDGTRVVSEGHTLENCCYQGRVRGYAGSWVSICTCSGLRGLVVLTPERSYTLEQGPGDLQGPPIISRIQDLHLPGHTCALSWRESVHTQKPPEHPLGQRHIRRRRDVVTETKTVELVIVADHSEAQKYRDFQHLLNRTLEVALLLDTFFRPLNVRVALVGLEAWTQRDLVEISPNPAVTLENFLHWRRAHLLPRLPHDSAQLVTGTSFSGPTVGMAIQNSICSPDFSGGVNMDHSTSILGVASSIAHELGHSLGLDHDLPGNSCPCPGPAPAKTCIMEASTDFLPGLNFSNCSRRALEKALLDGMGSCLFERLPSLPPMAAFCGNMFVEPGEQCDCGFLDDCVDPCCDSLTCQLRPGAQCASDGPCCQNCQLRPSGWQCRPTRGDCDLPEFCPGDSSQCPPDVSLGDGEPCAGGQAVCMHGRCASYAQQCQSLWGPGAQPAAPLCLQTANTRGNAFGSCGRNPSGSYVSCTPRDAICGQLQCQTGRTQPLLGSIRDLLWETIDVNGTELNCSWVHLDLGSDVAQPLLTLPGTACGPGLVCIDHRCQRVDLLGAQECRSKCHGHGVCDSNRHCYCEEGWAPPDCTTQLKATSSLTTGLLLSLLVLLVLVMLGASYWYRARLHQRLCQLKGPTCQYRAAQSGPSERPGPPQRALLARGTKQASALSFPAPPSRPLPPDPVSKRLQSQGPAKPPPPRKPLPADPQGRCPSGDLPGPGAGIPPLVVPSRPAPPPPTVSSLYL

SEQ ID NO: 246 - protein, 838 aa, Homo Sapiens
MRLALLWALGLLGAGSPLPSWPLPNIGGTEEQQAESEKAPREPLEPQVLQDDLPISLKKVLQTSLPEPLRIKLELDGDSHILELLQNRELVPGRPTLVWYQPDGTRVVSEGHTLENCCYQGRVRGYAGSWVSICTCSGLRGLVVLTPERSYTLEQGPGDLQGPPIISRIQDLHLPGHTCALSWRESVHTQKPPEHPLGQRHIRRRRDVVTETKTVELVIVADHSEAQKYRDFQHLLNRTLEVALLLDTFFRPLNVRVALVGLEAWTQRDLVEISPNPAVTLENFLHWRRAHLLPRLPHDSAQLVTGTSFSGPTVGMAIQNSICSPDFSGGVNMDHSTSILGVASSIAHELGHSLGLDHDLPGNSCPCPGPAPAKTCIMEASTDFLPGLNFSNCSRRALEKALLDGMGSCLFERLPSLPPMAAFCGNMFVEPGEQCDCGFLDDCVDPCCDSLTCQLRPGAQCASDGPCCQNCQLRPSGWQCRPTRGDCDLPEFCPGDSSQCPPDVSLGDGEPCAGGQAVCMHGRCASYAQQCQSLWGPGAQPAAPLCLQTANTRGNAFGSCGRNPSGSYVSCTPRDAICGQLQCQTGRTQPLLGSIRDLLWETIDVNGTELNCSWVHLDLGSDVAQPLLTLPGTACGPGLVCIDHRCQRVDLLGAQECRSKCHGHGVCDSNRHCYCEEGWAPPDCTTQLKATSSLTTGLLLSLLVLLVLVMLGASYWYRARLHQRLCQLKGPTCQYRAAQSGPSERPGPPQRALLARGTKAELADRPNPPTRPLPADPVVRSPKSQGPAKPPPPRKPLPADPQGRCPSGDLPGPGAGIPPLVVPSRPAPPPPTVSSLYL

SEQ ID NO: 247 - protein, 863 aa, Homo Sapiens
MRLALLWALGLLGAGSPLPSWPLPNIGGTEEQQAESEKAPREPLEPQVLQDDLPISLKKVLQTSLPEPLRIKLELDGDSHILELLQNRELVPGRPTLVWYQPDGTRVVSEGHTLENCCYQGRVRGYAGSWVSICTCSGLRGLVVLTPERSYTLEQGPGDLQGPPIISRIQDLHLPGHTCALSWRESVHTQKPPEHPLGQRHIRRRRDVVTETKTVELVIVADHSEAQKYRDFQHLLNRTLEVALLLDTFFRPLNVRVALVGLEAWTQRDLVEISPNPAVTLENFLHWRRAHLLPRLPHDSAQLVTGTSFSGPTVGMAIQNSICSPDFSGGVNMDHSTSILGVASSIAHELGHSLGLDHDLPGNSCPCPGPAPAKTCIMEASTDFLPGLNFSNCSRRALEKALLDGMGSCLFERLPSLPPMAAFCGNMFVEPGEQCDCGFLDDCVDPCCDSLTCQLRPGAQCASDGPCCQNCQLRPSGWQCRPTRGDCDLPEFCPGDSSQCPPDVSLGDGEPCAGGQAVCMHGRCASYAQQCQSLWGPGAQPAAPLCLQTANTRGNAFGSCGRNPSGSYVSCTPRDAICGQLQCQTGRTQPLLGSIRDLLWETIDVNGTELNCSWVHLDLGSDVAQPLLTLPGTACGPGLVCIDHRCQRVDLLGAQECRSKCHGHGVCDSNRHCYCEEGWAPPDCTTQLKATSSLTTGLLLSLLVLLVLVMLGASYWYRARLHQRLCQLKGPTCQYRAAQSGPSERPGPPQRALLARGTKQASALSFPAPPSRPLPPDPVSKRLQAELADRPNPPTRPLPADPVVRSPKSQGPAKPPPPRKPLPADPQGRCPSGDLPGPGAGIPPLVVPSRPAPPPPTVSSLYL

SEQ ID NO: 248 - protein, 862 aa, Homo Sapiens
MRLALLWALGLLGAGSPLPSWPLPNIGGTEEQQAESEKAPREPLEPQVLQDDLPISLKKVLQTSLPEPLRIKLELDGDSHILELLQNRELVPGRPTLVWYQPDGTRVVSEGHTLENCCYQGRVRGYAGSWVSICTCSGLRGLVVLTPERSYTLEQGPGDLQGPPIISRIQDLHLPGHTCALSWRESVHTQKPPEHPLGQRHIRRRRDVVTETKTVELVIVADHSEAQKYRDFQHLLNRTLEVALLLDTFFRPLNVRVALVGLEAWTQRDLVEISPNPAVTLENFLHWRRAHLLPRLPHDSAQLVTGTSFSGPTVGMAIQNSICSPDFSGGVNMDHSTSILGVASSIAHELGHSLGLDHDLPGNSCPCPGPAPAKTCIMEASTDFLPGLNFSNCSRRALEKALLDGMGSCLFERLPSLPPMAAFCGNMFVEPGEQCDCGFLDDCVDPCCDSLTCQLRPGAQCASDGPCCQNCQLRPSGWQCRPTRGDCDLPEFCPGDSSQCPPDVSLGDGEPCAGGQAVCMHGRCASYAQQCQSLWGPGAQPAAPLCLQTANTRGNAFGSCGRNPSGSYVSCTPRDAICGQLQCQTGRTQPLLGSIRDLLWETIDVNGTELNCSWVHLDLGSDVAQPLLTLPGTACGPGLVCIDHRCQRVDLLGAQECRSKCHGHGVCDSNRHCYCEEGWAPPDCTTQLKATSSLTTGLLLSLLVLLVLVMLGASYWYRARLHQRLCQLKGPTCQYRAAQSGPSERPGPPQRALLARGTKASALSFPAPPSRPLPPDPVSKRLQAELADRPNPPTRPLPADPVVRSPKSQGPAKPPPPRKPLPADPQGRCPSGDLPGPGAGIPPLVVPSRPAPPPPTVSSLYL

SEQ ID NO: 249 - protein, 797 aa, Homo Sapiens
MRLALLWALGLLGAGSPLPSWPLPNIGGTEEQQAESEKAPREPLEPQVLQDDLPISLKKVLQTSLPEPLRIKLELDGDSHILELLQNRELVPGRPTLVWYQPDGTRVVSEGHTLENCCYQGRVRGYAGSWVSICTCSGLRGLVVLTPERSYTLEQGPGDLQGPPIISRIQDLHLPGHTCALSWRESVHTQKPPEHPLGQRHIRRRRDVVTETKTVELVIVADHSEAQKYRDFQHLLNRTLEVALLLDTFFRPLNVRVALVGLEAWTQRDLVEISPNPAVTLENFLHWRRAHLLPRLPHDSAQLVTGTSFSGPTVGMAIQNSICSPDFSGGVNMDHSTSILGVASSIAHELGHSLGLDHDLPGNSCPCPGPAPAKTCIMEASTDFLPGLNFSNCSRRALEKALLDGMGSCLFERLPSLPPMAAFCGNMFVEPGEQCDCGFLDDCVDPCCDSLTCQLRPGAQCASDGPCCQNCQLRPSGWQCRPTRGDCDLPEFCPGDSSQCPPDVSLGDGEPCAGGQAVCMHGRCASYAQQCQSLWGPGAQPAAPLCLQTANTRGNAFGSCGRNPSGSYVSCTPRDAICGQLQCQTGRTQPLLGSIRDLLWETIDVNGTELNCSWVHLDLGSDVAQPLLTLPGTACGPGLVCIDHRCQRVDLLGAQECRSKCHGHGVCDSNRHCYCEEGWAPPDCTTQLKATSSLTTGLLLSLLVLLVLVMLGASYWYRARLHQRLCQLKGPTCQYRAAQSGPSERPGPPQRALLARGTKAELADRPNPPTRPLPADPVVRSPKVTVGGEKGTASPPT

SEQ ID NO: 250 - protein, 822 aa, Homo Sapiens
MRLALLWALGLLGAGSPLPSWPLPNIGGTEEQQAESEKAPREPLEPQVLQDDLPISLKKVLQTSLPEPLRIKLELDGDSHILELLQNRELVPGRPTLVWYQPDGTRVVSEGHTLENCCYQGRVRGYAGSWVSICTCSGLRGLVVLTPERSYTLEQGPGDLQGPPIISRIQDLHLPGHTCALSWRESVHTQKPPEHPLGQRHIRRRRDVVTETKTVELVIVADHSEAQKYRDFQHLLNRTLEVALLLDTFFRPLNVRVALVGLEAWTQRDLVEISPNPAVTLENFLHWRRAHLLPRLPHDSAQLVTGTSFSGPTVGMAIQNSICSPDFSGGVNMDHSTSILGVASSIAHELGHSLGLDHDLPGNSCPCPGPAPAKTCIMEASTDFLPGLNFSNCSRRALEKALLDGMGSCLFERLPSLPPMAAFCGNMFVEPGEQCDCGFLDDCVDPCCDSLTCQLRPGAQCASDGPCCQNCQLRPSGWQCRPTRGDCDLPEFCPGDSSQCPPDVSLGDGEPCAGGQAVCMHGRCASYAQQCQSLWGPGAQPAAPLCLQTANTRGNAFGSCGRNPSGSYVSCTPRDAICGQLQCQTGRTQPLLGSIRDLLWETIDVNGTELNCSWVHLDLGSDVAQPLLTLPGTACGPGLVCIDHRCQRVDLLGAQECRSKCHGHGVCDSNRHCYCEEGWAPPDCTTQLKATSSLTTGLLLSLLVLLVLVMLGASYWYRARLHQRLCQLKGPTCQYRAAQSGPSERPGPPQRALLARGTKQASALSFPAPPSRPLPPDPVSKRLQAELADRPNPPTRPLPADPVVRSPKVTVGGEKGTASPPT

SEQ ID NO: 251 - protein, 824 aa, Homo Sapiens
MRLALLWALGLLGAGSPLPSWPLPNIVLSWGVLGPAGGTEEQQAESEKAPREPLEPQVLQDDLPISLKKVLQTSLPEPLRIKLELDGDSHILELLQNRELVPGRPTLVWYQPDGTRVVSEGHTLENCCYQGRVRGYAGSWVSICTCSGLRGLVVLTPERSYTLEQGPGDLQGPPIISRIQDLHLPGHTCALSWRESVHTQKPPEHPLGQRHIRRRRDVVTETKTVELVIVADHSEAQKYRDFQHLLNRTLEVALLLDTFFRPLNVRVALVGLEAWTQRDLVEISPNPAVTLENFLHWRRAHLLPRLPHDSAQLVTGTSFSGPTVGMAIQNSICSPDFSGGVNMDHSTSILGVASSIAHELGHSLGLDHDLPGNSCPCPGPAPAKTCIMEASTDFLPGLNFSNCSRRALEKALLDGMGSCLFERLPSLPPMAAFCGNMFVEPGEQCDCGFLDDCVDPCCDSLTCQLRPGAQCASDGPCCQNCQLRPSGWQCRPTRGDCDLPEFCPGDSSQCPPDVSLGDGEPCAGGQAVCMHGRCASYAQQCQSLWGPGAQPAAPLCLQTANTRGNAFGSCGRNPSGSYVSCTPRDAICGQLQCQTGRTQPLLGSIRDLLWETIDVNGTELNCSWVHLDLGSDVAQPLLTLPGTACGPGLVCIDHRCQRVDLLGAQECRSKCHGHGVCDSNRHCYCEEGWAPPDCTTQLKATSSLTTGLLLSLLVLLVLVMLGASYWYRARLHQRLCQLKGPTCQYRAAQSGPSERPGPPQRALLARGTKSQGPAKPPPPRKPLPADPQGRCPSGDLPGPGAGIPPLVVPSRPAPPPPTVSSLYL

SEQ ID NO: 252 - protein, 633 aa, Homo Sapiens
MRLALLWALGLLGAGSPLPSWPLPNIVSACNVEAPQVALRSSRQSQRRPRGSPWSPRSFRTISQLASKRCFRELVPGRPTLVWYQPDGTRVVSEGHTLENCCYQGRVRGYAGSWVSICTCSGLRGLVVLTPERSYTLEQGPGDLQGPPIISRIQDLHLPGHTCALSWRESVHTQKPPEHPLGQRHIRRRRDVVTETKTVELVIVADHSEAQKYRDFQHLLNRTLEVALLLDTFFRPLNVRVALVGLEAWTQRDLVEISPNPAVTLENFLHWRRAHLLPRLPHDSAQLVTGTSFSGPTVGMAIQNSICSPDFSGGVNMDHSTSILGVASSIAHELGHSLGLDHDLPGNSCPCPGPAPAKTCIMEASTDFLPGLNFSNCSRRALEKALLDGMGSCLFERLPSLPPMAAFCGNMFVEPGEQCDCGFLDDCVDPCCDSLTCQLRPGAQCASDGPCCQNCQLRPSGWQCRPTRGDCDLPEFCPGDSSQCPPDVSLGDGEPCAGGQAVCMHGRCASYAQQCQSLWGPGAQPAAPLCLQTANTRGNAFGSCGRNPSGSYVSCTPRDAICGQLQCQTGRTQPLLGSIRDLLWETIDVNGTELNCSWVHLDLGSDVAQPLLTLPGTACGPGLVSSLGGQDQV

SEQ ID NO: 253 - protein, 824 aa, Homo Sapiens
MRQSLLFLTSVVPFVLAPRPPDDPGFGPHQRLEKLDSLLSDYDILSLSNIQQHSVRKRDLQTSTHVETLLTFSALKRHFKLYLTSSTERFSQNFKVVVVDGKNESEYTVKWQDFFTGHVVGEPDSRVLAHIRDDDVIIRINTDGAEYNIEPLWRFVNDTKDKRMLVYKSEDIKNVSRLQSPKVCGYLKVDNEELLPKGLVDREPPEELVHRVKRRADPDPMKNTCKLLVVADHRFYRYMGRGEESTTTNYLIELIDRVDDIYRNTSWDNAGFKGYGIQIEQIRILKSPQEVKPGEKHYNMAKSYPNEEKDAWDVKMLLEQFSFDIAEEASKVCLAHLFTYQDFDMGTLGLAYVGSPRANSHGGVCPKAYYSPVGKKNIYLNSGLTSTKNYGKTILTKEADLVTTHELGHNFGAEHDPDGLAECAPNEDQGGKYVMYPIAVSGDHENNKMFSNCSKQSIYKTIESKAQECFQERSNKVCGNSRVDEGEECDPGIMYLNNDTCCNSDCTLKEGVQCSDRNSPCCKNCQFETAQKKCQEAINATCKGVSYCTGNSSECPPPGNAEDDTVCLDLGKCKDGKCIPFCEREQQLESCACNETDNSCKVCCRDLSGRCVPYVDAEQKNLFLRKGKPCTVGFCDMNGKCEKRVQDVIERFWDFIDQLSINTFGKFLADNIVGSVLVFSLIFWIPFSILVHCVDKKLDKQYESLSLFHPSNVEMLSSMDSASVRIIKPFPAPQTPGRLQPAPVIPSAPAAPKLDHQRMDTIQEDPSTDSHMDEDGFEKDPFPNSSTAAKSFEDLTDHPVTRSEKAASFKLQRQNRVDSKETEC

SEQ ID NO: 254 - protein, 285 aa, Homo Sapiens
MRQSLLFLTSVVPFVLAPRPPDDPGFGPHQRLEKLDSLLSDYDILSLSNIQQHSVRKRDLQTSTHVETLLTFSALKRHFKLYLTSSTERFSQNFKVVVVDGKNESEYTVKWQDFFTGHVVGEPDSRVLAHIRDDDVIIRINTDGAEYNIEPLWRFVNDTKDKRMLVYKSEDIKNVSRLQSPKVCGYLKVDNEELLPKGLVDREPPEELVHRVKRRADPDPMKNTCKLLVVADHRFYRYMGRGEESTTTNYLIELIDRVDDIYRNTSWDNAGFKGYGIQIEQLLFE

SEQ ID NO: 255 - protein, 258 aa, Homo Sapiens
MRQSLLFLTSVVPFVLAPRPPDDPGFGPHQRLEKLDSLLSDYDILSLSNIQQHSVRKRDLQTSTHVETLLTFSALKRHFKLYLTSSTERFSQNFKVVVVDGKNESEYTVKWQDFFTGHVVGEPDSRVLAHIRDDDVIIRINTDGAEYNIEPLWRFVNDTKDKRMLVYKSEDIKNVSRLQSPKVCGYLKVDNEELLPKGLVDREPPEELVHRVKRRADPDPMKNTCKLLVVADHRFYRYMGRGEESTTTNYLIHTDRAN

SEQ ID NO: 256 - protein, 115 aa, Homo Sapiens
MFLLLALLTELGRLQAHEGSEGIFLHVTVPRKIKSNDSEVSERKMIYIITIDGQPYTLHLGKQSFLPQNFLVYTYNETGSLHSVSPYFMMHCHYQGYAAEFPNSFVTLSICSGLR

SEQ ID NO: 257 - protein, 715 aa, Homo Sapiens
MFLLLALLTELGRLQAHEGSEGIFLHVTVPRKIKSNDSEVSERKMIYIITIDGQPYTLHLGKQSFLPQNFLVYTYNETGSLHSVSPYFMMHCHYQGYAAEFPNSFVTLSICSGLRGFLQFENISYGIEPVESSARFEHIIYQMKNNDPNVSILAVNYSHIWQKDQPYKVPLNSQIKNLSKLLPQYLEIYIIVEKALMFTQFKLTVILSSLELWSNENQISTSGDADDILQRFLAWKRDYLILRPHDIAYLLVYRKHPKYVGATFPGTVCNKSYDAGIAMYPDAIGLEGFSVIIAQLLGLNVGLTYDDITQCFCLRATCIMNHEAVSASGRKIFSNCSMHDYRYFVSKFETKCLQKLSNLQPLHQNQPVCGNGILESNEECDCGNKNECQFKKCCDYNTCKLKGSVKCGSGPCCTSKCELSIAGTPCRKSIDPECDFTEYCNGTSSNCVPDTYALNGRLCKLGTAYCYNGQCQTTDNQCAKIFGKGAQGAPFACFKEVNSLHERSENCGFKNSQPLPCERKDVLCGKLACVQPHKNANKSDAQSTVYSYIQDHVCVSIATGSSMRSDGTDNAYVADGTMCGPEMYCVNKTCRKVHLMGYNCNATTKCKGKGICNNFGNCQCFPGHRPPDCKFQFGSPGGSIDDGNFQKSGDFYTEKGYNTHWNNWFILSFCIFLPFFIVFTTVIFKRNEISKSCNRENAEYNRNSSVVSESDDVGH

SEQ ID NO: 258 - protein, 739 aa, Homo Sapiens
MFLLLALLTELGRLQAHEGSEGIFLHVTVPRKIKSNDSEVSERKMIYIITIDGQPYTLHLGKQSFLPQNFLVYTYNETGSLHSVSPYFMMHCHYQGYAAEFPNSFVTLSICSGLRGFLQFENISYGIEPVESSARFEHIIYQMKNNDPNVSILAVNYSHIWQKDQPYKVPLNSQIKNLSKLLPQYLEIYIIVEKALYDYMGSEMMAVTQKIVQVIGLVNTMFTQFKLTVILSSLELWSNENQISTSGDADDILQRFLAWKRDYLILRPHDIAYLLVYRKHPKYVGATFPGTVCNKSYDAGIAMYPDAIGLEGFSVIIAQLLGLNVGLTYDDITQCFCLRATCIMNHEAVSASGRKIFSNCSMHDYRYFVSKFETKCLQKLSNLQPLHQNQPVCGNGILESNEECDCGNKNECQFKKCCDYNTCKLKGSVKCGSGPCCTSKCELSIAGTPCRKSIDPECDFTEYCNGTSSNCVPDTYALNGRLCKLGTAYCYNGQCQTTDNQCAKIFGKGAQGAPFACFKEVNSLHERSENCGFKNSQPLPCERKDVLCGKLACVQPHKNANKSDAQSTVYSYIQDHVCVSIATGSSMRSDGTDNAYVADGTMCGPEMYCVNKTCRKVHLMGYNCNATTKCKGKGICNNFGNCQCFPGHRPPDCKFQFGSPGGSIDDGNFQKSGDFYTEKGYNTHWNNWFILSFCIFLPFFIVFTTVIFKRNEISKSCNRENAEYNRNSSVVSESDDVGH

SEQ ID NO: 259 - protein, 182 aa, Homo Sapiens
MFLLLALLTELGRLQAHEGSEGIFLHVTVPRKIKSNDSEVSERKMIYIITIDGQPYTLHLGKQSFLPQNFLVYTYNETGSLHSVSPYFMMHCHYQGYAAEFPNSFVTLSICSGLRGFLQFENISYGIEPVESSARFEHIIYQMKNNDPNVSILAVNYSHIWQKDQPYKVPLNSQVTVIILML

SEQ ID NO: 260 - protein, 62 aa, Homo Sapiens
MFLLLALLTELGRLQAHEGSEGIFLHVTVPRKIKSNDSEVSERKVFGEQVVFGYMNDLHHYN

SEQ ID NO: 261 - protein, 330 aa, Homo Sapiens
EEDVDLGYVEDGTPCGPQMMCLEHRCLPVASFNFSTCLSSKEGTICSGNGVCSNELKCVCNRHWIGSDCNTYFPHNDDAKTGITLSGNGVAGTNIIIGIIAGTILVLALILGITAWGYKNYREQRQLPQGDYVKKPGDGDSFYSDIPPGVSTNSASSSKKRSNGLSHSWSERIPDTKHISDICENGRPRSNSWQGNLGGNKKKIRGKRFRPRSNSTEREPQAPEPGHSLAQTVPSQGISPGGSDSPQTGSLDHRYLNPWFKRDYNVAKWVEDVNKNTEGPYFRTLSPAKSPSSSTGSIASSRKYPYPMPPLPDEDKKVNRQSARLWETSI

SEQ ID NO: 262 - protein, 804 aa, Homo Sapiens
MELEKRKENRFVERQSIVPLRLIYRSGGEDESRHDALDTRVRGDLGGPQLTHVDQASFQVDAFGTSFILDVVLNHDLLSSEYIERHIEHGGKTVEVKGGEHCYYQGHIRGNPDSFVALSTCHGLHGMFYDGNHTYLIEPEENDTTQEDFHFHSVYKSRLFEFSLDDLPSEFQQVNITPSKFILKPRPKRSKRQLRRYPRNVEEETKYIELMIVNDHLMFKKHRLSVVHTNTYAKSVVNMADLIYKDQLKTRIVLVAMETWATDNKFAISENPLITLREFMKYRRDFIKEKSDAVHLFSGSQFESSRSGAAYIGGICSLLKGGGVNEFGKTDLMAVTLAQSLAHNIGIISDKRKLASGECKCEDTWSGCIMGDTGYYLPKKFTQCNIEEYHDFLNSGGGACLFNKPSKLLDPPECGNGFIETGEECDCGTPAECVLEGAECCKKCTLTQDSQCSDGLCCKKCKFQPMGTVCREAVNDCDIRETCSGNSSQCAPNIHKMDGYSCDGVQGICFGGRCKTRDRQCKYIWGQKVTASDKYCYEKLNIEGTEKGNCGKDKDTWIQCNKRDVLCGYLLCTNIGNIPRLGELDGEITSTLVVQQGRTLNCSGGHVKLEEDVDLGYVEDGTPCGPQMMCLEHRCLPVASFNFSTCLSSKEGTICSGNGVCSNELKCVCNRHWIGSDCNTYFPHNDDAKTGITLSGNGVAGTNIIIGIIAGTILVLALILGITAWGYKNYREQRQLPQGDYVKKPGDGDSFYSDIPPGVSTNSASSSKKRSNGLSHSWSERIPDTKHISDICENGRPRSNSWQG

SEQ ID NO: 263 - protein, 196 aa, Homo Sapiens
MQAAVAVSVPFLLLCVLGTCPPARCGQAGDASLMELEKRKENRFVERQSIVPLRLIYRSGGEDESRHDALDTRVRGDLGGPQIQMFLKSESQKTIYQIQLTHVDQASFQVDAFGTSFILDVVLNHDLLSSEYIERHIEHGGKTVEVKGGEHCYYQGHIRGNPDSFVALSTCHGLHGMFYDGNHTYLIEPEENDTTQ

SEQ ID NO: 264 - protein, 906 aa, Homo Sapiens
MQAAVAVSVPFLLLCVLGTCPPARCGQAGDASLMELEKRKENRFVERQSIVPLRLIYRSGGEDESRHDALDTRVRGDLGGPQLTHVDQASFQVDAFGTSFILDVVLNHDLLSSEYIERHIEHGGKTVEVKGGEHCYYQGHIRGNPDSFVALSTCHGLHGMFYDGNHTYLIEPEENDTTQEDFHFHSVYKSRLFEFSLDDLPSEFQQVNITPSKFILKPRPKRSKRQLRRYPRNVEEETKYIELMIVNDHLMFKKHRLSVVHTNTYAKSVVNMADLIYKDQLKTRIVLVAMETWATDNKFAISENPLITLREFMKYRRDFIKEKSDAVHLFSGSQFESSRSGAAYIGGICSLLKGGGVNEFGKTDLMAVTLAQSLAHNIGIISDKRKLASGECKCEDTWSGCIMGDTGYYLPKKFTQCNIEEYHDFLNSGGGACLFNKPSKLLDPPECGNGFIETGEECDCGTPAECVLEGAECCKKCTLTQDSQCSDGLCCKKCKFQPMGTVCREAVNDCDIRETCSGNSSQCAPNIHKMDGYSCDGVQGICFGGRCKTRDRQCKYIWGQKVTASDKYCYEKLNIEGTEKGNCGKDKDTWIQCNKRDVLCGYLLCTNIGNIPRLGELDGEITSTLVVQQGRTLNCSGGHVKLEEDVDLGYVEDGTPCGPQMMCLEHRCLPVASFNFSTCLSSKEGTICSGNGVCSNELKCVCNRHWIGSDCNTYFPHNDDAKTGITLSGNGVAGTNIIIGIIAGTILVLALILGITAWGYKNYREQRQLPQGDYVKKPGDGDSFYSDIPPGVSTNSASSSKKRSNGLSHSWSERIPDTKHISDICENGRPRSNSWQGNLGGNKKKIRGKRFRPRSNSTETLSPAKSPSSSTGSIASSRKYPYPMPPLPDEDKKVNRQSARLWETSI

SEQ ID NO: 265 - protein, 859 aa, Homo Sapiens
MQAAVAVSVPFLLLCVLGTCPPARCGQAGDASLMELEKRKENRFVERQSIVPLRLIYRSGGEDESRHDALDTRVRGDLGGPQLTHVDQASFQVDAFGTSFILDVVLNHDLLSSEYIERHIEHGGKTVEVKGGEHCYYQGHIRGNPDSFVALSTCHGLHGMFYDGNHTYLIEPEENDTTQEDFHFHSVYKSRLFEFSLDDLPSEFQQVNITPSKFILKPRPKRSKRQLRRYPRNVEEETKYIELMIVNDHLMFKKHRLSVVHTNTYAKSVVNMADLIYKDQLKTRIVLVAMETWATDNKFAISENPLITLREFMKYRRDFIKEKSDAVHLFSGSQFESSRSGAAYIGGICSLLKGGGVNEFGKTDLMAVTLAQSLAHNIGIISDKRKLASGECKCEDTWSGCIMGDTGYYLPKKFTQCNIEEYHDFLNSGGGACLFNKPSKLLDPPECGNGFIETGEECDCGTPAECVLEGAECCKKCTLTQDSQCSDGLCCKKCKFQPMGTVCREAVNDCDIRETCSGNSSQCAPNIHKMDGYSCDGVQGICFGGRCKTRDRQCKYIWGQKVTASDKYCYEKLNIEGTEKGNCGKDKDTWIQCNKRDVLCGYLLCTNIGNIPRLGELDGEITSTLVVQQGRTLNCSGGHVKLEEDVDLGYVEDGTPCGPQMMCLEHRCLPVASFNFSTCLSSKEGTICSGNGVCSNELKCVCNRHWIGSDCNTYFPHNDDAKTGITLSGNGVAGTNIIIGIIAGTILVLALILGITAWGYKNYREQRQLPQGDYVKKPGDGDSFYSDIPPGVSTNSASSSKKRSNGLSHSWSERIPDTKHISDICENGRPRSNSWQGNLGGNKKKIRGKRFRPRSNSTE

SEQ ID NO: 266 - protein, 899 aa, Homo Sapiens
MQAAVAVSVPFLLLCVLGTCPPARCGQAGDASLMELEKRKENRFVERQSIVPLRLIYRSGGEDESRHDALDTRVRGDLGGPQLTHVDQASFQVDAFGTSFILDVVLNHDLLSSEYIERHIEHGGKTVEVKGGEHCYYQGHIRGNPDSFVALSTCHGLHGMFYDGNHTYLIEPEENDTTQEDFHFHSVYKSRLFEFSLDDLPSEFQQVNITPSKFILKPRPKRSKRQLRRYPRNVEEETKYIELMIVNDHLMFKKHRLSVVHTNTYAKSVVNMADLIYKDQLKTRIVLVAMETWATDNKFAISENPLITLREFMKYRRDFIKEKSDAVHLFSGSQFESSRSGAAYIGGICSLLKGGGVNEFGKTDLMAVTLAQSLAHNIGIISDKRKLASGECKCEDTWSGCIMGDTGYYLPKKFTQCNIEEYHDFLNSGGGACLFNKPSKLLDPPECGNGFIETGEECDCGTPAECVLEGAECCKKCTLTQDSQCSDGLCCKKCKFQPMGTVCREAVNDCDIRETCSGNSSQCAPNIHKMDGYSCDGVQGICFGGRCKTRDRQCKYIWGQKVTASDKYCYEKLNIEGTEKGNCGKDKDTWIQCNKRDVLCGYLLCTNIGNIPRLGELDGEITSTLVVQQGRTLNCSGGHVKLEEDVDLGYVEDGTPCGPQMMCLEHRCLPVASFNFSTCLSSKEGTICSGNGVCSNELKCVCNRHWIGSDCNTYFPHNDDAKTGITLSGNGVAGTNIIIGIIAGTILVLALILGITAWGYKNYREQRSNGLSHSWSERIPDTKHISDICENGRPRSNSWQGNLGGNKKKIRGKRFRPRSNSTEYLNPWFKRDYNVAKWVEDVNKNTEGPYFRTLSPAKSPSSSTGSIASSRKYPYPMPPLPDEDKKVNRQSARLWETSI

SEQ ID NO: 267 - protein, 870 aa, Homo Sapiens
MQAAVAVSVPFLLLCVLGTCPPARCGQAGDASLMELEKRKENRFVERQSIVPLRLIYRSGGEDESRHDALDTRVRGDLGGPQLTHVDQASFQVDAFGTSFILDVVLNHDLLSSEYIERHIEHGGKTVEVKGGEHCYYQGHIRGNPDSFVALSTCHGLHGMFYDGNHTYLIEPEENDTTQEDFHFHSVYKSRLFEFSLDDLPSEFQQVNITPSKFILKPRPKRSKRQLRRYPRNVEEETKYIELMIVNDHLMFKKHRLSVVHTNTYAKSVVNMADLIYKDQLKTRIVLVAMETWATDNKFAISENPLITLREFMKYRRDFIKEKSDAVHLFSGSQFESSRSGAAYIGGICSLLKGGGVNEFGKTDLMAVTLAQSLAHNIGIISDKRKLASGECKCEDTWSGCIMGDTGYYLPKKFTQCNIEEYHDFLNSGGGACLFNKPSKLLDPPECGNGFIETGEECDCGTPAECVLEGAECCKKCTLTQDSQCSDGLCCKKCKFQPMGTVCREAVNDCDIRETCSGNSSQCAPNIHKMDGYSCDGVQGICFGGRCKTRDRQCKYIWGQKVTASDKYCYEKLNIEGTEKGNCGKDKDTWIQCNKRDVLCGYLLCTNIGNIPRLGELDGEITSTLVVQQGRTLNCSGGHVKLEEDVDLGYVEDGTPCGPQMMCLEHRCLPVASFNFSTCLSSKEGTICSGNGVCSNELKCVCNRHWIGSDCNTYFPHNDDAKTGITLSGNGVAGTNIIIGIIAGTILVLALILGITAWGYKNYREQRSNGLSHSWSERIPDTKHISDICENGRPRSNSWQGNLGGNKKKIRGKRFRPRSNSTETLSPAKSPSSSTGSIASSRKYPYPMPPLPDEDKKVNRQSARLWETSI

SEQ ID NO: 268 - protein, 342 aa, Homo Sapiens
MQAAVAVSVPFLLLCVLGTCPPARCGQAGDASLMELEKRKENRFVERQSIVPLRLIYRSGGEDESRHDALDTRVRGDLGGPQLTHVDQASFQVDAFGTSFILDVVLNHDLLSSEYIERHIEHGGKTVEVKGGEHCYYQGHIRGNPDSFVALSTCHGLHGMFYDGNHTYLIEPEENDTTQEDFHFHSVYKSRLFEFSLDDLPSEFQQVNITPSKFILKPRPKRSKRQLRRYPRNVEEETKYIELMIVNDHLMFKKHRLSVVHTNTYAKSVVNMADLIYKDQLKTRIVLVAMETWATDNKFAISENPLITLREFMKYRRDFIKEKSDAVHLFSYVTSVMMYYFF

SEQ ID NO: 269 - protein, 264 aa, Homo Sapiens
  misc_feature (1)..(1): Xaa can be any naturally occurring amino acid
XCNRHWIGSDCNTYFPHNDDAKTGITLSGNGVAGTNIIIGIIAGTILVLALILGITAWGYKNYREQRQLPQGDYVKKPGDGDSFYSDIPPGVSTNSASSSKKRSAFLSHFQISTCSITHYSISQNISLFCSRSNGLSHSWSERIPDTKHISDICENGRPRSNSWQGNLGGNKKKIRGKRFRPRSNSTEYLNPWFKRDYNVAKWVEDVNKNTEGPYFRTLSPAKSPSSSTGSIASSRKYPYPMPPLPDEDKKVNRQSARLWETSI

SEQ ID NO: 270 - protein, 217 aa, Homo Sapiens
MLQGLLPVSLLLSVAVSAIKELPGVKKYEVVYPIRLHPLHKREAKEPEQQEQFETELKYKMTINGKIAVLYLKKNKNLLAPGYTETYYNSTGKEITTSPQIMDDCYYQGHILNEKVSDASISTCRGLRGYFSQGDQRYFIEPLSPIHRDGQEHALFKYNPDEKNYDSTCGMDGVLWAHDLQQNIALPATKLVKLKDRKVQEHEKYIEYYLVLDNGEF

SEQ ID NO: 271 - protein, 775 aa, Homo Sapiens
MLQGLLPVSLLLSVAVSAIKELPGVKKYEVVYPIRLHPLHKREAKEPEQQEQFETELKYKMTINGKIAVLYLKKNKNLLAPGYTETYYNSTGKEITTSPQIMDDCYYQGHILNEKVSDASISTCRGLRGYFSQGDQRYFIEPLSPIHRDGQEHALFKYNPDEKNYDSTCGMDGVLWAHDLQQNIALPATKLVKLKDRKVQEHEKYIEYYLVLDNGEFKRYNENQDEIRKRVFEMANYVNMLYKKLNTHVALVGMEIWTDKDKIKITPNASFTLENFSKWRGSVLSRRKRHDIAQLITATELAGTTVGLAFMSTMCSPYSVGVVQDHSDNLLRVAGTMAHEMGHNFGMFHDDYSCKCPSTICVMDKALSFYIPTDFSSCSRLSYDKFFEDKLSNCLFNAPLPTDIISTPICGNQLVEMGEDCDCGTSEECTNICCDAKTCKIKATFQCALGECCEKCQFKKAGMVCRPAKDECDLPEMCNGKSGNCPDDRFQVNGFPCHHGKGHCLMGTCPTLQEQCTELWGPGTEVADKSCYNRNEGGSKYGYCRRVDDTLIPCKANDTMCGKLFCQGGSDNLPWKGRIVTFLTCKTFDPEDTSQEIGMVANGTKCGDNKVCINAECVDIEKAYKSTNCSSKCKGHAVCDHELQCQCEEGWIPPDCDDSSVVFHFSIVVGVLFPMAVIFVVVAMVIRHQSSREKQKKDQRPLSTTGTRPHKQKRKPQMVKAVQPQEMSQMKPHVYDLPVEGNEPPASFHKDTNALPPTVFKDNPVSTPKDSNPKA

SEQ ID NO: 272 - protein, 540 aa, Homo Sapiens
MLQGLLPVSLLLSVAVSAIKELPGVKKYEVVYPIRLHPLHKREAKEPEQQEQFETELKYKMTINGKIAVLYLKKNKNLLAPGYTETYYNSTGKEITTSPQIMDDCYYQGHILNEKVSDASISTCRGLRGYFSQGDQRYFIEPLSPIHRDGQEHALFKYNPDEKNYDSTCGMDGVLWAHDLQQNIALPATKLVKLKDRKVQEHEKYIEYYLVLDNGEFKRYNENQDEIRKRVFEMANYVNMLYKKLNTHVALVGMEIWTDKDKIKITPNASFTLENFSKWRGSVLSRRKRHDIAQLITATELAGTTVGLAFMSTMCSPYSVGVVQDHSDNLLRVAGTMAHEMGHNFGMFHDDYSCKCPSTICVMDKALSFYIPTDFSSCSRLSYDKFFEDKLSNCLFNAPLPTDIISTPICGNQLVEMGEDCDCGTSEECTNICCDAKTCKIKATFQCALGECCEKCQFKKAGMVCRPAKDECDLPEMCNGKSGNCPDDRFQVNGFPCHHGKGHCLMGTCPTLQEQCTELWGPGRRTNPFPCACAKENHFR

SEQ ID NO: 273 - protein, 58 aa, Homo Sapiens
MLQGLLPVSLLLSVAVSAIKELPGVKKYEVVYPIRLHPLHKREAKEPEQQFLSSMKIS

SEQ ID NO: 274 - protein, 387 aa, Homo Sapiens
  misc_feature (1)..(1): Xaa can be any naturally occurring amino acid
XFYIPTDFSSCSRLSYDKFFEDKLSNCLFNAPLPTDIISTPICGNQLVEMGEDCDCGTSEECTNICCDAKTCKIKATFQCALGECCEKCQFKKAGMVCRPAKDECDLPEMCNGKSGNCPDDRFQVNGFPCHHGKGHCLMGTCPTLQEQCTELWGPGTEVADKSCYNRNEGGSKYGYCRRVDDTLIPCKANDTMCGKLFCQGGSDNLPWKGRIVTFLTCKTFDPEDTSQEIGMVANGTKCGDNKVCINAECVDIEKAYKSTNCSSKCKGHAVCDHELQCQCEEGWIPPDCDDSSVVFHFSIVVGVLFPMAVIFVVVAMVIRHQSSREKQKKDQRPLSTTGTRPHKQKRKPQMVKAVQPQEMSQMKPHVYDLPVEGNEPPASFDSNPKA

SEQ ID NO: 275 - protein, 174 aa, Homo Sapiens
  misc_feature (1)..(1): Xaa can be any naturally occurring amino acid
XKGRIVTFLTCKTFDPEDTSQEIGMVANGTKCGDNKVCINAECVDIEKAYKSTNCSSKCKGHAVCDHELQCQCEEGWIPPDCDDSSVVFHFSIVVGVLFPMAVIFVVVAMVIRHQSSREKQKKDQRPLSTTGTRPHKQKRKPQMVKAVQPQEVNYIVWAVITMAPLCVSLTLLS

SEQ ID NO: 276 - protein, 14 aa, Homo Sapiens
MKMLLLLHCLGVFL

SEQ ID NO: 277 - protein, 44 aa, Homo Sapiens
MKMLLLLHCLGVFLSCSGHIQDEHPQYHSPPDVVIPVRITGTTR

SEQ ID NO: 278 - protein, 90 aa, Homo Sapiens
MKMLLLLHCLGVFLSCSGHIQDEHPQYHSPPDVVIPVRITGTTRGMTPPGWLSYILPFGGQKHIIHIKVKKLLFSKHLPVFTYTDQGAIL

SEQ ID NO: 279 - protein, 820 aa, Homo Sapiens
MKMLLLLHCLGVFLSCSGHIQDEHPQYHSPPDVVIPVRITGTTRGMTPPGWLSYILPFGGQKHIIHIKVKKLLFSKHLPVFTYTDQGAILEDQPFVQNNCYYHGYVEGDPESLVSLSTCFGGFQGILQINDFAYEIKPLAFSTTFEHLVYKMDSEEKQFSTMRSGFMQNEITCRMEFEEIDNSTQKQSSYVGWWIHFRIVEIVVVIDNYLYIRYERNDSKLLEDLYVIVNIVDSILDVIGVKVLLFGLEIWTNKNLIVVDDVRKSVHLYCKWKSENITPRMQHDTSHLFTTLGLRGLSGIGAFRGMCTPHRSCAIVTFMNKTLGTFSIAVAHHLGHNLGMNHDEDTCRCSQPRCIMHEGNPPITKFSNCSYGDFWEYTVERTKCLLETVHTKDIFNVKRCGNGVVEEGEECDCGPLKHCAKDPCCLSNCTLTDGSTCAFGLCCKDCKFLPSGKVCRKEVNECDLPEWCNGTSHKCPDDFYVEDGIPCKERGYCYEKSCHDRNEQCRRIFGAGANTASETCYKELNTLGDRVGHCGIKNATYIKCNISDVQCGRIQCENVTEIPNMSDHTTVHWARFNDIMCWSTDYHLGMKGPDIGEVKDGTECGIDHICIHRHCVHITILNSNCSPAFCNKRGICNNKHHCHCNYLWDPPNCLIKGYGGSVDSGPPPKRKKKKKFCYLCILLLIVLFILLCCLYRLCKKSKPIKKQQDVQTPSAKEEEKIQRRPHELPPQSQPWVMPSQSQPPVTPSQSHPQVMPSQSQPPVTPSQSQPRVMPSQSQPPVMPSQSHPQLTPSQSQPPVTPSQRQPQLMPSQSQPPVTPS

SEQ ID NO: 280 - protein, 820 aa, Homo Sapiens; identical to SEQ ID NO: 279

SEQ ID NO: 281 - protein, 820 aa, Homo Sapiens; identical to SEQ ID NO: 279

SEQ ID NO: 282 - protein, 820 aa, Homo Sapiens; identical to SEQ ID NO: 279

SEQ ID NO: 283 - protein, 820 aa, Homo Sapiens; identical to SEQ ID NO: 279

SEQ ID NO: 284 - protein, 820 aa, Homo Sapiens; identical to SEQ ID NO: 279

SEQ ID NO: 285 - protein, 787 aa, Homo Sapiens
MFRLWLLLAGLCGLLASRPGFQNSLLQIVIPEKIQTNTNDSSEIEYEQISYIIPIDEKLYTVHLKQRYFLADNFMIYLYNQGSMNTYSSDIQTQCYYQGNIEGYPDSMVTLSTCSGLRGILQFENVSYGIEPLESAVEFQHVLYKLKNEDNDIAIFIDRSLKEQPMDDNIFISEKSEPAVPDLFPLYLEMHIVVDKTLYDYWGSDSMIVTNKVIEIVGLANSMFTQFKVTIVLSSLELWSDENKISTVGEADELLQKFLEWKQSYLNLRPHDIAYLLIYMDYPRYLGAVFPGTMCITRYSAGVALYPKEITLEAFAVIVTQMLALSLGISYDDPKKCQCSESTCIMNPEVVQSNGVKTFSSCSLRSFQNFISNVGVKCLQNKPQMQKKSPKPVCGNGRLEGNEICDCGTEAQCGPASCCDFRTCVLKDGAKCYKGLCCKDCQILQSGVECRPKAHPECDIAENCNGTSPECGPDITLINGLSCKNNKFICYDGDCHDLDARCESVFGKGSRNAPFACYEEIQSQSDRFGNCGRDRNNKYVFCGWRNLICGRLVCTYPTRKPFHQENGDVIYAFVRDSVCITVDYKLPRTVPDPLAVKNGSQCDIGRVCVNRECVESRIIKASAHVCSQQCSGHGVCDSRNKCHCSPGYKPPNCQIRSKGFSIFPEEDMGSIMERASGKTENTWLLGFLIALPILIVTTAIVLARKQLKKWFAKEEEFPSSESKSEGSTQTYASQSSSEGSTQTYASQTRSESSSQADTSKSKSEDSAEAYTSRSKSQDSTQTQSSSN

SEQ ID NO: 286 - protein, 629 aa, Homo Sapiens
MFRLWLLLAGLCGLLASRPGFQNSLLQIVIPEKIQTNTNDSSEIEYEQISYIIPIDEKLYTVHLKQRYFLADNFMIYLYNQGSMNTYSSDIQTQCYYQGNIEGYPDSMVTLSTCSGLRGILQFENVSYGIEPLESAVEFQHVLYKLKNEDNDIAIFIDRSLKEQPMDDNIFISEKSEPAVPDLFPLYLEMHIVVDKTLYDYWGSDSMIVTNKVIEIVGLANSMFTQFKVTIVLSSLELWSDENKISTVGEADELLQKFLEWKQSYLNLRPHDIAYLLIYMDYPRYLGAVFPGTMCITRYSAGVALQCGPASCCDFRTCVLKDGAKCYKGLCCKDCQILQSGVECRPKAHPECDIAENCNGTSPECGPDITLINGLSCKNNKFICYDGDCHDLDARCESVFGKGSRNAPFACYEEIQSQSDRFGNCGRDRNNKYVFCGWRNLICGRLVCTYPTRKPFHQENGDVIYAFVRDSVCITVDYKLPRTVPDPLAVKNGSQCDIGRVCVNRECVESRIIKASAHVCSQQCSGHGVCDSRNKCHCSPGYKPPNCQIRSKGFSIFPEEDMGSIMERASGKTENTWLLGFLIALPILIVTTAIVLARKQLKKWFAKEEEFPSSESKSQDSTQTQSSSN

SEQ ID NO: 287 - protein, 184 aa, Homo Sapiens
MFRLWLLLAGLCGLLASRPGFQNSLLQIVIPEKIQTNTNDSSEIEYEQISYIIPIDEKLYTVHLKQRYFLADNFMIYLYNQGSMNTYSSDIQTQCYYQGNIEGYPDSMVTLSTCSGLRGILQFENVSYGIEPLESAVEFQHVLYKLKNEDNDIAIFIDRSLKEQPMDDNIFISEKYDYWGSDSM

SEQ ID NO: 288 - protein, 155 aa, Homo Sapiens
MFRLWLLLAGLCGLLASRPGFQNSLLQIVIPEKIQTNTNDSSEIEYEQISYIIPIDEKLYTVHLKQRYFLADNFMIYLYNQGSMNTYSSDIQTQCYYQGNIEGYPDSMVTLSTCSGLRSLKEQPMDDNIFISEKSEPAVPDLFPLYLEMHIVVDK

SEQ ID NO: 289 - protein, 53 aa, Homo Sapiens
MIYLYNQGSMNTYSSDIQTQCYYQGNIEGYPDSMVTLSTCSGLRGILQFENVS

SEQ ID NO: 290 - protein, 688 aa, Homo Sapiens
MNVRGAAPGVRASPRPWQFPTSQRLPAGSPEAAPCSASGCCWPGSAASWRQDPEQISYIIPIDEKLYTVHLKQRYFLADNFMIYLYNQGSMNTYSSDIQTQCYYQGNIEGYPDSMVTLSTCSGLRGILQFENVSYGIEPLESAVEFQHVLYKLKNEDNDIAIFIDRSLKEQPMDDNIFISEKSEPAVPDLFPLYLEMHIVVDKTLYDYWGSDSMIVTNKVIEIVGLANSMFTQFKVTIVLSSLELWSDENKISTVGEADELLQKFLEWKQSYLNLRPHDIAYLLIYMDYPRYLGAVFPGTMCITRYSAGVALQCGPASCCDFRTCVLKDGAKCYKGLCCKDCQILQSGVECRPKAHPECDIAENCNGTSPECGPDITLINGLSCKNNKFICYDGDCHDLDARCESVFGKGSRNAPFACYEEIQSQSDRFGNCGRDRNNKYVFCGWRNLICGRLVCTYPTRKPFHQENGDVIYAFVRDSVCITVDYKLPRTVPDPLAVKNGSQCDIGRVCVNRECVESRIIKASAHVCSQQCSGHGVCDSRNKCHCSPGYKPPNCQIRSKGFSIFPEEDMGSIMERASGKTENTWLLGFLIALPILIVTTAIVLARKQLKKWFAKEEEFPSSESKSEGSTQTYASQSSSEGSTQTYASQTRSESSSQADTSKSKSEDSAEAYTSRSKSQDSTQTQSSSN

SEQ ID NO: 291 - protein, 173 aa, Homo Sapiens [sequence omitted]

SEQ ID NO: 292 - protein, 787 aa, Homo Sapiens
MGWRPRRARGTPLLLLLLLLLLWPVPGAGVLQGHIPGQPVTPHWVLDGQPWRTVSLEEPVSKPDMGLVALEAEGQELLLELEKNHRLLAPGYIETHYGPDGQPVVLAPNHTDHCHYQGRVRGFPDSWVVLCTCSGMSGLITLSRNASYYLRPWPPRGSKDFSTHEIFRMEQLLTWKGTCGHRDPGNKAGMTSLPGGPQSRGRREARRTRKYLELYIVADHTLFLTRHRNLNHTKQRLLEVANYVDQLLRTLDIQVALTGLEVWTERDRSRVTQDANATLWAFLQWRRGLWAQRPHDSAQLLTGRAFQGATVGLAPVEGMCRAESSGGVSTDHSELPIGAAATMAHEIGHSLGLSHDPDGCCVEAAAESGGCVMAAATGHPFPRVFSACSRRQLRAFFRKGGGACLSNAPDPGLPVPPALCGNGFVEAGEECDCGPGQECRDLCCFAHNCSLRPGAQCAHGDCCVRCLLKPAGALCRQAMGDCDLPEFCTGTSSHCPPDVYLLDGSPCARGSGYCWDGACPTLEQQCQQLWGPGSHPAPEACFQVVNSAGDAHGNCGQDSEGHFLPCAGRDALCGKLQCQGGKPSLLAPHMVPVDSTVHLDGQEVTCRGALALPSAQLDLLGLGLVEPGTQCGPRMVCNSNHNCHCAPGWAPPFCDKPGFGGSMDSGPVQAENHDTFLLAMLLSVLLPLLPGAGLAWCCYRLPGAHLQRCSWGCRRDPACSGPKDGPHRDHPLGGVHPMELGPTATGQPWPLDPENSHEPSSHPEKPLPAVSPDPQADQVQMPRSCLW

SEQ ID NO: 293 - protein, 813 aa, Homo Sapiens
MGWRPRRARGTPLLLLLLLLLLWPVPGAGVLQGHIPGQPVTPHWVLDGQPWRTVSLEEPVSKPDMGLVALEAEGQELLLELEKNHRLLAPGYIETHYGPDGQPVVLAPNHTDHCHYQGRVRGFPDSWVVLCTCSGMSGLITLSRNASYYLRPWPPRGSKDFSTHEIFRMEQLLTWKGTCGHRDPGNKAGMTSLPGGPQSRGRREARRTRKYLELYIVADHTLFLTRHRNLNHTKQRLLEVANYVDQLLRTLDIQVALTGLEVWTERDRSRVTQDANATLWAFLQWRRGLWAQRPHDSAQLLTGRAFQGATVGLAPVEGMCRAESSGGVSTDHSELPIGAAATMAHEIGHSLGLSHDPDGCCVEAAAESGGCVMAAATGHPFPRVFSACSRRQLRAFFRKGGGACLSNAPDPGLPVPPALCGNGFVEAGEECDCGPGQECRDLCCFAHNCSLRPGAQCAHGDCCVRCLLKPAGALCRQAMGDCDLPEFCTGTSSHCPPDVYLLDGSPCARGSGYCWDGACPTLEQQCQQLWGPGSHPAPEACFQVVNSAGDAHGNCGQDSEGHFLPCAGRDALCGKLQCQGGKPSLLAPHMVPVDSTVHLDGQEVTCRGALALPSAQLDLLGLGLVEPGTQCGPRMVCQSRRCRKNAFQELQRCLTACHSHGVCNSNHNCHCAPGWAPPFCDKPGFGGSMDSGPVQAENHDTFLLAMLLSVLLPLLPGAGLAWCCYRLPGAHLQRCSWGCRRDPACSGPKDGPHRDHPLGGVHPMELGPTATGQPWPLDPENSHEPSSHPEKPLPAVSPDPQADQVQMPRSCLW

SEQ ID NO: 294 - protein, 812 aa, Homo Sapiens
MGWRPRRARGTPLLLLLLLLLLWPVPGAGVLQGHIPGQPVTPHWVLDGQPWRTVSLEEPVSKPDMGLVALEAEGQELLLELEKNHRLLAPGYIETHYGPDGQPVVLAPNHTDHCHYQGRVRGFPDSWVVLCTCSGMSGLITLSRNASYYLRPWPPRGSKDFSTHEIFRMEQLLTWKGTCGHRDPGNKAGMTSLPGGPQSRGRREARRTRKYLELYIVADHTLFLTRHRNLNHTKQRLLEVANYVDQLLRTLDIQVALTGLEVWTERDRSRVTQDANATLWAFLQWRRGLWAQRPHDSAQLLTGRAFQGATVGLAPVEGMCRAESSGGVSTDHSELPIGAAATMAHEIGHSLGLSHDPDGCCVEAAAESGGCVMAAATGHPFPRVFSACSRRQLRAFFRKGGGACLSNAPDPGLPVPPALCGNGFVEAGEECDCGPGQECRDLCCFAHNCSLRPGAQCAHGDCCVRCLLKPAGALCRQAMGDCDLPEFCTGTSSHCPPDVYLLDGSPCARGSGYCWDGACPTLEQQCQQLWGPGSHPAPEACFQVVNSAGDAHGNCGQDSEGHFLPCAGRDALCGKLQCQGGKPSLLAPHMVPVDSTVHLDGQEVTCRGALALPSAQLDLLGLGLVEPGTQCGPRMVCQSRRCRKNAFQELQRCLTACHSHGVCNSNHNCHCAPGWAPPFCDKPGFGGSMDSGPVQAENHDTFLLAMLLSVLLPLLPGAGLAWCCYRLPGAHLQRCSWGCRRDPACSGPKDGPHRDHPLGGVHPMELGPTATGQPWPLDPENSHEPSSHPEKPLPAVSPDPQDQVQMPRSCLW

SEQ ID NO: 295 - protein, 692 aa, Homo Sapiens
MGWRPRRARGTPLLLLLLLLLLWPVPGAGVLQGHIPGQPVTPHWVLDGQPWRTVSLEEPVSKPDMGLVALEAEGQELLLELEKNHRLLAPGYIETHYGPDGQPVVLAPNHTDHCHYQGRVRGFPDSWVVLCTCSGMSGLITLSRNASYYLRPWPPRGSKDFSTHEIFRMEQLLTWKGTCGHRDPGNKAGMTSLPGGPQSRGRREARRTRKYLELYIVADHTLFLTRHRNLNHTKQRLLEVANYVDQLLRTLDIQVALTGLEVWTERDRSRRQLRAFFRKGGGACLSNAPDPGLPVPPALCGNGFVEAGEECDCGPGQECRDLCCFAHNCSLRPGAQCAHGDCCVRCLLKPAGALCRQAMGDCDLPEFCTGTSSHCPPDVYLLDGSPCARGSGYCWDGACPTLEQQCQQLWGPGSHPAPEACFQVVNSAGDAHGNCGQDSEGHFLPCAGRDALCGKLQCQGGKPSLLAPHMVPVDSTVHLDGQEVTCRGALALPSAQLDLLGLGLVEPGTQCGPRMVCQSRRCRKNAFQELQRCLTACHSHGVCNSNHNCHCAPGWAPPFCDKPGFGGSMDSGPVQAENHDTFLLAMLLSVLLPLLPGAGLAWCCYRLPGAHLQRCSWGCRRDPACSGPKDGPHRDHPLGGVHPMELGPTATGQPWPLDPENSHEPSSHPEKPLPAVSPDPQDQVQMPRSCLW

SEQ ID NO: 296 - protein, 138 aa, Homo Sapiens
MGWRPRRARGTPLLLLLLLLLLWPVPGAGVLQGHIPGQPVTPHWVLDGQPWRTVSLEEPVSKPDMGLVALEAEGQELLLELEKNHRLLAPGYIETHYGPDGQPVVLAPNHTVRCFHGLWDAPPEVPPHHSYPYSSLHS

SEQ ID NO: 297 - protein, 754 aa, Homo Sapiens
MLPGCIFLMILLIPQVKEKFILGVEGQQLVRPKKLPLIQKRDTGHTHDDDILKTYEEELLYEIKLNRKTLVLHLLRSREFLGSNYSETFYSMKGEAFTRHPQIMDHCFYQGSIVHEYDSAASISTCNGLRGFFRINDQRYLIEPVKYSDEGEHLVFKYNLRVPYGANYSCTELNFTRKTVPGDNESEEDSKIKGIHDEKYVELFIVADDTVYRRNGHPHNKLRNRIWGMVNFVNMIYKTLNIHVTLVGIEIWTHEDKIELYSNIETTLLRFSFWQEKILKTRKDFDHVVLLSGKWLYSHVQGISYPGGMCLPYYSTSIIKDLLPDTNIIANRMAHQLGHNLGMQHDEFPCTCPSGKCVMDSDGSIPALKFSKCSQNQYHQYLKDYKPTCMLNIPFPYNFHDFQFCGNKKLDEGEECDCGPAQECTNPCCDAHTCVLKPGFTCAEGECCESCQIKKAGSICRPAKDECDFPEMCTGHSPACPKDQFRVNGFPCKNSEGYCFMGKCPTREDQCSELFDDEAIESHDICYKMNTKGNKFGYCKNKENRFLPCEEKDVRCGKIYCTGGELSSLLGEDKTYHLKDPQKNATVKCKTIFLYHDSTDIGLVASGTKCGEGMVCNNGECLNMEKVYISTNCPSQCNENPVDGHGLQCHCEEGQAPVACEETLHVTNITILVVVLVLVIVGIGVLILLVRYRKCIKLKQVQSPPTETLGVENKGYFGDEQQIRTEPILPEIHFLNKPASKDSRGIADPNQSAK

SEQ ID NO: 298 - protein, 776 aa, Homo Sapiens
MLPGCIFLMILLIPQVKEKFILGVEGQQLVRPKKLPLIQKRDTGHTHDDDILKTYEEELLYEIKLNRKTLVLHLLRSREFLGSNYSETFYSMKGEAFTRHPQIMDHCFYQGSIVHEYDSAASISTCNGLRGFFRINDQRYLIEPVKYSDEGEHLVFKYNLRVPYGANYSCTELNFTRKTVPGDNESEEDSKIKGIHDEKYVELFIVADDTVYRRNGHPHNKLRNRIWGMVNFVNMIYKTLNIHVTLVGIEIWTHEDKIELYSNIETTLLRFSFWQEKILKTRKDFDHVVLLSGKWLYSHVQGISYPGGMCLPYYSTSIIKDLLPDTNIIANRMAHQLGHNLGMQHDEFPCTCPSGKCVMDSDGSIPALKFSKCSQNQYHQYLKDYKPTCMLNIPFPYNFHDFQFCGNKKLDEGEECDCGPAQECTNPCCDAHTCVLKPGFTCAEGECCESCQIKKAGSICRPAKDECDFPEMCTGHSPACPKDQFRVNGFPCKNSEGYCFMGKCPTREDQCSELFDDEAIESHDICYKMNTKGNKFGYCKNKENRFLPCEEKDVRCGKIYCTGGELSSLLGEDKTYHLKDPQKNATVKCKTIFLYHDSTDIGLVASGTKCGEGMVCNNGECLNMEKVYISTNCPSQCNENPVDGHGLQCHCEEGQAPVACEETLHVTNITILVVVLVLVIVGIGVLILLVRYRKCIKLKQVQSPPTETLGVENKGYFGDEQQIRTEPILPEIHFLNQRTPESLESLPTSFSSPHYITLKPASKDSRGIADPNQSAK

SEQ ID NO: 299 - protein, 210 aa, Homo Sapiens
MLPGCIFLMILLIPQVKEKFILGVEGQQLVRPKKLPLIQKRDTGHTHDDDILKTYEEELLYEIKLNRKTLVLHLLRSREFLGSNYSETFYSMKGEAFTRHPQIMDHCFYQGSIVHEYDSAASISTCNGLRGFFRINDQRYLIEPVKYSDEGEHLVFKYNLRVPYGANYSCTELNFTRKTVPGDNESEEDSKIKVSTLLLSLPQMKHLLFS

SEQ ID NO: 300 - protein, 516 aa, Homo Sapiens
MVNFVNMIYKTLNIHVTLVGIEIWTHEDKIELYSNIETTLLRFSFWQEKILKTRKDFDHVVLLSGKWLYSHVQGISYPGGMCLPYYSTSIIKDLLPDTNIIANRMAHQLGHNLGMQHDEFPCTCPSGKCVMDSDGSIPALKFSKCSQNQYHQYLKDYKPTCMLNIPFPYNFHDFQFCGNKKLDEGEECDCGPAQECTNPCCDAHTCVLKPGFTCAEGECCESCQIKKAGSICRPAKDECDFPEMCTGHSPACPKDQFRVNGFPCKNSEGYCFMGKCPTREDQCSELFDDEAIESHDICYKMNTKGNKFGYCKNKENRFLPCEEKDVRCGKIYCTGGELSSLLGEDKTYHLKDPQKNATVKCKTIFLYHDSTDIGLVASGTKCGEGMVCNNGECLNMEKVYISTNCPSQCNENPVDGHGLQCHCEEGQAPVACEETLHVTNITILVVVLVLVIVGIGVLILLVRYRKCIKLKQVQSPPTETLGVENKGYFGDEQQIRTEPILPEIHFLNHLLYGRHQ

SEQ ID NO: 301 - protein, 245 aa, Homo Sapiens
MRGLGLWLLGAMMLPAIAPSRPWALMEQYEVVLPWRLPGPRVRRALPSHLGGQFRPQPCPYLSIRGTYYRPARCPGLIQPVAQLRLSQSSAGRAPACTWGLEMQWSSRRLCRHHQGLHPERVSYVLGATGHNFTLHLRKNRDLLGSGYTETYTAANGSEVTEQPRGQDHCFYQGHVEGYPDSAASLSTCAGLRGFFQVGSDLHLIEPLDEGGEGGRHAVYQAEHLLQTAGTCGVSDDSLGSLLGP

SEQ ID NO: 302 - protein, 742 aa, Homo Sapiens
MRGLGLWLLGAMMLPAIAPSRPWALMEQYEVVLPWRLPGPRVRRALPSHLGLHPERVSYVLGATGHNFTLHLRKNRDLLGSGYTETYTAANGSEVTEQPRGQDHCFYQGHVEGYPDSAASLSTCAGLRGFFQVGSDLHLIEPLDEGGEGGRHAVYQAEHLLQTAGTCGVSDDSLGSLLGPRTAAVFRPRPGDSLPSRETRYVELYVVVDNAEFQMLGSEAAVRHRVLEVVNHVDKLYQKLNFRVVLVGLEIWNSQDRFHVSPDPSVTLENLLTWQARQRTRRHLHDNVQLITGVDFTGTTVGFARVSAMCSHSSGAVNQDHSKNPVGVACTMAHEMGHNLGMDHDENVQGCRCQERFEAGRCIMAGSIGSSFPRMFSDCSQAYLESFLERPQSVCLANAPDLSHLVGGPVCGNLFVERGEQCDCGPPEDCRNRCCNSTTCQLAEGAQCAHGTCCQECKVKPAGELCRPKKDMCDLEEFCDGRHPECPEDAFQENGTPCSGGYCYNGACPTLAQQCQAFWGPGGQAAEESCFSYDILPGCKASRYRADMCGVLQCKGGQQPLGRAICIVDVCHALTTEDGTAYEPVPEGTRCGPEKVCWKGRCQDLHVYRSSNCSAQCHNHGVCNHKQECHCHAGWAPPHCAKLLTEVHAGCQPRAGQGRGSSPIQGPPRAGPHHPPGPARPTPGLLGGSEEAAPCSSGHCVQPTLPSSCLHPAGTKAGHQANVRTPSAPSQTRGWCGQPWSS

SEQ ID NO: 303 - protein, 824 aa, Homo Sapiens
MRGLGLWLLGAMMLPAIAPSRPWALMEQYEVVLPWRLPGPRVRRALPSHLGLHPERVSYVLGATGHNFTLHLRKNRDLLGSGYTETYTAANGSEVTEQPRGQDHCFYQGHVEGYPDSAASLSTCAGLRGFFQVGSDLHLIEPLDEGGEGGRHAVYQAEHLLQTAGTCGVSDDSLGSLLGPRTAAVFRPRPGDSLPSRETRYVELYVVVDNAEFQMLGSEAAVRHRVLEVVNHVDKLYQKLNFRVVLVGLEIWNSQDRFHVSPDPSVTLENLLTWQARQRTRRHLHDNVQLITGVDFTGTTVGFARVSAMCSHSSGAVNQDHSKNPVGVACTMAHEMGHNLGMDHDENVQGCRCQERFEAGRCIMAGSIGSSFPRMFSDCSQAYLESFLERPQSVCLANAPDLSHLVGGPVCGNLFVERGEQCDCGPPEDCRNRCCNSTTCQLAEGAQCAHGTCCQECKVKPAGELCRPKKDMCDLEEFCDGRHPECPEDAFQENGTPCSGGYCYNGACPTLAQQCQAFWGPGGQAAEESCFSYDILPGCKASRYRADMCGVLQCKGGQQPLGRAICIVDVCHALTTEDGTAYEPVPEGTRCGPEKVCWKGRCQDLHVYRSSNCSAQCHNHGVCNHKQECHCHAGWAPPHCAKLLTEVHAASGSLPVFVVVVLVLLAVVLVTLAGIIVYRKARSRILSRNVAPKTTMGRSNPLFHQAASRVPAKGGAPAPSRGPQELVPTTHPGQPARHPASSVALKRPPPAPPVTVSSPPFPVPVYTRQAPKQVIKPTFAPPVPPVKPGAGAANPGPAEGAVGPKVALKPPIQRKQGAGAPTAP

SEQ ID NO: 304 - protein, 109 aa, Homo Sapiens
MRGLGLWLLGAMMLPGPAPREGELRPWGHRAQLHPPPAEEQGPAGLRLHRDLYGCQWLRGDGAASRAGPLLLPGPRRGVPGLSRQPQHLCRPQGFLPGGVRPAPDRAPG

SEQ ID NO: 305 - protein, 733 aa, Homo Sapiens
MRGLGLWLLGAMMLPGPAPREGELRPWGHRAQLHPPPAEEQGPAGLRLHRDLYGCQWLRGDGAASRAGPLLLPGPRRGVPGLSRQPQHLCRPQVGSDLHLIEPLDEGGEGGRHAVYQAEHLLQTAGTCGVSDDSLGSLLGPRTAAVFRPRPGDSLPSRETRYVELYVVVDNAEFQMLGSEAAVRHRVLEVVNHVDKLYQKLNFRVVLVGLEIWNSQDRFHVSPDPSVTLENLLTWQARQRTRRHLHDNVQLITGVDFTGTTVGFARVSAMCSHSSGAVNQDHSKNPVGVACTMAHEMGHNLGMDHDENVQGCRCQERFEAGRCIMAGSIGSSFPRMFSDCSQAYLESFLERPQSVCLANAPDLSHLVGGPVCGNLFVERGEQCDCGPPEDCRNRCCNSTTCQLAEGAQCAHGTCCQECKVKPAGELCRPKKDMCDLEEFCDGRHPECPEDAFQENGTPCSGGYCYNGACPTLAQQCQAFWGPGGQAAEESCFSYDILPGCKASRYRADMCGVLQCKGGQQPLGRAICIVDVCHALTTEDGTAYEPVPEGTRCGPEKVCNHKQECHCHAGWAPPHCAKLLTEVHAASGSLPVFVVVVLVLLAVVLVTLAGIIVYRKARSRILSRNVAPKTTMGRSNPLFHQAASRVPAKGGAPAPSRGPQELVPTTHPGQPARHPASSVALKRPPPAPPVTVSSPPFPVPVYTRQAPKQGAVGPKVALKPPIQRKQGAGAPTAP

SEQ ID NO: 306 - protein, 655 aa, Homo Sapiens
MGSGARFPSGTLRVRWLLLLGLVGPVLGAARPGFQQTSHLSSYEIITPWRLTRERREAPRPYSKQVSYVIQAEGKEHIIHLERNKDLLPEDFVVYTYNKEGTLITDHPNIQNHCHYRGYVEGVHNSSIALSDCFGLRGLLHLENASYGIEPLQNSSHFEHIIYRMDDVYKEPLKCGVSNKDIEKETAKDEEEEPPSMTQLLRRRRAVLPQTRYVELFIVVDKERYDMMGRNQTAVREEMILLANYLDSMYIMLNIRIVLVGLEIWTNGNLINIVGGAGDVLGNFVQWREKFLITRRRHDSAQLVLKKGFGGTAGMAFVGTVCSRSHAGGINVFGQITVETFASIVAHELGHNLGMNHDDGRDCSCGAKSCIMNSGASGSRNFSSCSAEDFEKLTLNKGGNCLLNIPKPDEAYSAPSCGNKLVDAGEECDCGTPKECELDPCCEGSTCKLKSFAECAYGDCCKDCRFLPGGTLCRGKTSECDVPEYCNGSSQFCQPDVFIQNGYPCQNNKAYCYNGMCQYYDAQCQVIFGSKAKAAPKDCFIEVNSKGDRFGNCGFSGNEYKKCATGNALCGKLQCENVQEIPVFGIVPAIIQTPSRGTKCWGVDFQLGSDVPDPGMVNEGTKCGAGKICRNFQCVDASVLNYDCDVQKKCHGHGK

SEQ ID NO: 307 - protein, 628 aa, Homo Sapiens
MGSGARFPSGTLRVRWLLLLGLVGPVLGAARPGFQQTSHLSSYEIITPWRLTRERREAPRPYSKQVSYVIQAEGKEHIIHLERNKDLLPEDFVVYTYNKEGTLITDHPNIQNHCHYRGYVEGVHNSSIALSDCFGLRGLLHLENASYGIEPLQNSSHFEHIIYRMDDVYKEPLKCGVSNKDIEKETAKDEEEEPPSMTQLLRRRRAVLPQTRYVELFIVVDKERYDMMGRNQTAVREEMILLANYLDSMYIMLNIRIVLVGLEIWTNGNLINIVGGAGDVLGNFVQWREKFLITRRRHDSAQLVLKKGFGGTAGMAFVGTVCSRSHAGGINVFGQITVETFASIVAHELGHNLGMNHDDGRDCSCGAKSCIMNSGASGSRNFSSCSAEDFEKLTLNKGGNCLLNIPKPDEAYSAPSCGNKLVDAGEECDCGTPKECELDPCCEGSTCKLKSFAECAYGDCCKDCRFLPGGTLCRGKTSECDVPEYCNGSSQFCQPDVFIQNGYPCQNNKAYCYNGMCQYYDAQCQVIFGSKAKAAPKDCFIEVNSKGDRFGNCGFSGNEYKKCATGNALCGKLQCENVQEIPVFGIVPAIIQTPSRGTKCWGVDFQLGSDVPDPGMVNEGTKCGAGKK

SEQ ID NO: 308 - protein, 819 aa, Homo Sapiens
MGSGARFPSGTLRVRWLLLLGLVGPVLGAARPGFQQTSHLSSYEIITPWRLTRERREAPRPYSKQVSYVIQAEGKEHIIHLERNKDLLPEDFVVYTYNKEGTLITDHPNIQNHCHYRGYVEGVHNSSIALSDCFGLRGLLHLENASYGIEPLQNSSHFEHIIYRMDDVYKEPLKCGVSNKDIEKETAKDEEEEPPSMTQLLRRRRAVLPQTRYVELFIVVDKERYDMMGRNQTAVREEMILLANYLDSMYIMLNIRIVLVGLEIWTNGNLINIVGGAGDVLGNFVQWREKFLITRRRHDSAQLVLKKGFGGTAGMAFVGTVCSRSHAGGINVFGQITVETFASIVAHELGHNLGMNHDDGRDCSCGAKSCIMNSGASGSRNFSSCSAEDFEKLTLNKGGNCLLNIPKPDEAYSAPSCGNKLVDAGEECDCGTPKECELDPCCEGSTCKLKSFAECAYGDCCKDCRFLPGGTLCRGKTSECDVPEYCNGSSQFCQPDVFIQNGYPCQNNKAYCYNGMCQYYDAQCQVIFGSKAKAAPKDCFIEVNSKGDRFGNCGFSGNEYKKCATGNALCGKLQCENVQEIPVFGIVPAIIQTPSRGTKCWGVDFQLGSDVPDPGMVNEGTKCGAGKICRNFQCVDASVLNYDCDVQKKCHGHGVCNSNKNCHCENGWAPPNCETKGYGGSVDSGPTYNEMNTALRDGLLVFFFLIVPLIVCAIFIFIKRDQLWRSYFRKKRSQTYESDGKNQANPSRQPGSVPRHVSPVTPPREVPIYANRFAVPTYAAKQPQQFPSRPPPPQPKVSSQGNLIPARPAPAPPLYSSLT

SEQ ID NO: 309 - protein, 712 aa, Homo Sapiens
MGSGARFPSGTLRVRWLLLLGLVGPVLGAARPGFQQTSHLSSYEIITPWRLTRERREAPRPYSKQVSYVIQAEGKEHIIHLERNKDLLPEDFVVYTYNKEGTLITDHPNIQNHCHYRGYVEGVHNSSIALSDCFGLRGLLHLENASYGIEPLQNSSHFEHIIYRMDDVYKEPLKCGVSNKDIEKETAKDEEEEPPSMTQLLRRRRAVLPQTRYVELFIVVDKERYDMMGRNQTAVREEMILLANYLDSMYIMLNIRIVLVGLEIWTNGNLINIVGGAGDVLGNFVQWREKFLITRRRHDSAQLVLKKGFGGTAGMAFVGTVCSRSHAGGINVFGQITVETFASIVAHELGHNLGMNHDDGRDCSCGAKSCIMNSGASGSRNFSSCSAEDFEKLTLNKGGNCLLNIPKPDEAYSAPSCGNKLVDAGEECDCGTPKECELDPCCEGSTCKLKSFAECAYGDCCKDCRFLPGGTLCRGKTSECDVPEYCNGSSQFCQPDVFIQNGYPCQNNKAYCYNGMCQYYDAQCQVIFGSKAKAAPKDCFIEVNSKGDRFGNCGFSGNEYKKCATGNALCGKLQCENVQEIPVFGIVPAIIQTPSRGTKCWGVDFQLGSDVPDPGMVNEGTKCGAGKICRNFQCVDASVLNYDCDVQKKCHGHGVCNSNKNCHCENGWAPPNCETKGYGGSVDSGPTYNGQMAKIKQTLLDSRGVFLDMFLQ

SEQ ID NO: 310 - protein, 147 aa, Homo Sapiens
MGSGARFPSGTLRVRWLLLLGLVGPVLGAARPGFQQTSHLSSYEIITPWRLTRERREAPRPYSKQVSYVIQAEGKEHIIHLERNKDLLPEDFVVYTYNKEGTLITDHPNIQRCGPLCIREQSTPGDRAGQNTQNNWQMSNLAFCVYY

SEQ ID NO: 311 - protein, 128 aa, Homo Sapiens
MGSGARFPSGTLRVRWLLLLGLVGPVLGAARPGFQQTSHLSSYEIITPWRLTRERREAPRPYSKQVSYVIQAEGKEHIIHLERNKDLLPEDFVVYTYNKEGTLITDHPNIQVMYFSLDPIANFKTIII

SEQ ID NO: 312 - protein, 391 aa, Homo Sapiens
MILNGEEIILSLQKTKHLLGPDYTETLYSPRGEEITTKPENMEHCYYKGNILNEKNSVASISTCDGLRGYFTHHHQRYQIKPLKSTDEKEHAVFTSNQEEQDPANHTCGVKSTDGKQGPIRISRSLKSPEKEDFLRAQKYIDLYLVLDNAFYKNYNENLTLIRSFVFDVMNLLNVIYNTIDVQVALVGMEIWSDGDKIKVVPSASTTFDNFLRWHSSNLGKKIHDHAQLLSGISFNNRRVGLAASNSLCSPSSVAVIEAKKKNNVALVGVMSHELGHVLGMPDVPFNTKCPSGSCVMNQYLSSKFPKDFSTSCRAHFERYLLSQKPKCLLQAPIPTNIMTTPVCGNHLLEVGEDCDCGSPKECTNLCCEALTCKLKPGTDCGGDAPNHTTE

SEQ ID NO: 313 - protein, 470 aa, Homo Sapiens
MLRGISQLPAVATMSWVLLPVLWLIVQTQAIAIKQTPELTLHEIVCPKKLHILHKREIKNNQTEKHGKEERYEPEVQYQMILNGEEIILSLQKTKHLLGPDYTETLYSPRGEEITTKPENMEHCYYKGNILNEKNSVASISTCDGLRGYFTHHHQRYQIKPLKSTDEKEHAVFTSNQEEQDPANHTCGVKSTDGKQGPIRISRSLKSPEKEDFLRAQKYIDLYLVLDNAFYKNYNENLTLIRSFVFDVMNLLNVIYNTIDVQVALVGMEIWSDGDKIKVVPSASTTFDNFLRWHSSNLGKKIHDHAQLLSGISFNNRRVGLAASNSLCSPSSVAVIEAKKKNNVALVGVMSHELGHVLGMPDVPFNTKCPSGSCVMNQYLSSKFPKDFSTSCRAHFERYLLSQKPKCLLQAPIPTNIMTTPVCGNHLLEVGEDCDCGSPKECTNLCCEALTCKLKPGTDCGGDAPNHTTE

SEQ ID NO: 314 - protein, 41 aa, Homo Sapiens
MLRGISQLPAVATMSWVLLPVLWLIVQTQASNCAWPKVSIQ

SEQ ID NO: 315 - protein, 171 aa, Homo Sapiens
MLVADQSMAEFHGSGLKHYLLTLFSVAARLYKHPSIRNSVSLVVVKILVIHDEQKGPEVTSNAALTLRNFCNWQKQHNPPSDRDAEHYDTAILFTRQDLCGSQTCDTLGMADVGTVCDPSRSCSVIEDDGLQAAFTTAHELGHVFNMPHDDAKQCASLNGVNQDSHMMASM

SEQ ID NO: 316 - protein, 967 aa, Homo Sapiens
MQRAVPEGFGRRKLGSDMGNAERAPGSRSFGPVPTLLLLAAALLAVSDALGRPSEEDEELVVPELERAPGHGTTRLRLHAFDQQLDLELRPDSSFLAPGFTLQNVGRKSGSETPLPETDLAHCFYSGTVNGDPSSAAALSLCEGVRGAFYLLGEAYFIQPLPAASERLATAAPGEKPPAPLQFHLLRRNRQGDVGGTCGVVDDEPRPTGKAETEDEDEGTEGEDEGAQWSPQDPALQGVGQPTGTGSIRKKRFVSSHRYVETMLVADQSMAEFHGSGLKHYLLTLFSVAARLYKHPSIRNSVSLVVVKILVIHDEQKGPEVTSNAALTLRNFCNWQKQHNPPSDRDAEHYDTAILFTRQDLCGSQTCDTLGMADVGTVCDPSRSCSVIEDDGLQAAFTTAHELGHVFNMPHDDAKQCASLNGVNQDSHMMASMLSNLDHSQPWSPCSAYMITSFLDNGHGECLMDKPQNPIQLPGDLPGTSYDANRQCQFTFGEDSKHCPDAASTCSTLWCTGTSGGVLVCQTKHFPWADGTSCGEGKWCINGKCVNKTDRKHFDTPFHGSWGMWGPWGDCSRTCGGGVQYTMRECDNPVPKNGGKYCEGKRVRYRSCNLEDCPDNNGKTFREEQCEAHNEFSKASFGSGPAVEWIPKYAGVSPKDRCKLICQAKGIGYFFVLQPKVVDGTPCSPDSTSVCVQGQCVKAGCDRIIDSKKKFDKCGVCGGNGSTCKKISGSVTSAKPGYHDIITIPTGATNIEVKQRNQRGSRNNGSFLAIKAADGTYILNGDYTLSTLEQDIMYKGVVLRYSGSSAALERIRSFSPLKEPLTIQVLTVGNALRPKIKYTYFVKKKKESFNAIPTFSAWVIEEWGECSKSCELGWQRRLVECRDINGQPASECAKEVKPASTRPCADHPCPQWQLGEWSSCSKTCGKGYKKRSLKCLSHDGGVLSHESCDPLKKPKHFIDFCTMAECS

SEQ ID NO: 317 - protein, 128 aa, Homo Sapiens
MVTWEGTGSIRKKRFVSSHRYVETMLVADQSMAEFHGSGLKHYLLTLFSVAARLYKHPSIRNSVSLVVVKILVIHDEQKGPEVTSNAALTLRNFCNWQKQHNPPSDRDAEHYDTAILFTRQDLCGSQT

SEQ ID NO: 318 - protein, 200 aa, Homo Sapiens
  misc_feature (1)..(1): Xaa can be any naturally occurring amino acid
XCRSFLLRPSLCAVLILQFFLFHHFGTGSIRKKRFVSSHRYVETMLVADQSMAEFHGSGLKHYLLTLFSVAARLYKHPSIRNSVSLVVVKILVIHDEQKGPEVTSNAALTLRNFCNWQKQHNPPSDRDAEHYDTAILFTRQDLCGSQTCDTLGMADVGTVCDPSRSCSVIEDDGLQAAFTTAHELGHVFNMPHDDAKQCA

SEQ ID NO: 319 - protein, 1103 aa, Homo Sapiens
MAPACQILRWALALGLGLMFEVTHAFRSQDEFLSSLESYEIAFPTRVDHNGALLAFSPPPPRRQRRGTGATAESRLFYKVASPSTHFLLNLTRSSRLLAGHVSVEYWTREGLAWQRAARPHCLYAGHLQGQASSSHVAISTCGGLHGLIVADEEEYLIEPLHGGPKGSRSPEESGPHVVYKRSSLRHPHLDTACGVRDEKPWKGRPWWLRTLKPPPARPLGNETERGQPGLKRSVSRERYVETLVVADKMMVAYHGRRDVEQYVLAIMNIVAKLFQDSSLGSTVNILVTRLILLTEDQPTLEITHHAGKSLDSFCKWQKSIVNHSGHGNAIPENGVANHDTAVLITRYDICIYKNKPCGTLGLAPVGGMCERERSCSVNEDIGLATAFTIAHEIGHTFGMNHDGVGNSCGARGQDPAKLMAAHITMKTNPFVWSSCSRDYITSFLDSGLGLCLNNRPPRQDFVYPTVAPGQAYDADEQCRFQHGVKSRQCKYGEVCSELWCLSKSNRCITNSIPAAEGTLCQTHTIDKGWCYKRVCVPFGSRPEGVDGAWGPWTPWGDCSRTCGGGVSSSSRHCDSPRPTIGGKYCLGERRRHRSCNTDDCPPGSQDFREVQCSEFDSIPFRGKFYKWKTYRGGGVKACSLTCLAEGFNFYTERAAAVVDGTPCRPDTVDICVSGECKHVGCDRVLGSDLREDKCRVCGGDGSACETIEGVFSPASPGAGYEDVVWIPKGSVHIFIQDLNLSLSHLALKGDQESLLLEGLPGTPQPHRLPLAGTTFQLRQGPDQVQSLEALGPINASLIVMVLARTELPALRYRFNAPIARDSLPPYSWHYAPWTKCSAQCAGGSQVQAVECRNQLDSSAVAPHYCSAHSKLPKRQRACNTEPCPPDWVVGNWSLCSRSCDAGVRSRSVVCQRRVSAAEEKALDDSACPQPRPPVLEACHGPTCPPEWAALDWSECTPSCGPGLRHRVVLCKSADHRATLPPAHCSPAAKPPATMRCNLRRCPPARWVAGEWGECSAQCGVGQRQRSVRCTSHTGQASHECTEALRPPTTQQCEAKCDSPTPGDGPEECKDVNKVAYCPLVLKFQFCSRAYFRQMCCKTCHGH

SEQ ID NO: 320 - protein, 289 aa, Homo Sapiens
MAPACQILRWALALGLGLMFEVTHAFRSQDEFLSSLESYEIAFPTRVDHNGALLAFSPPPPRRQRRGTGATAESRLFYKVASPSTHFLLNLTRSSRLLAGHVSVEYWTREGLAWQRAARPHCLYAGHLQGQASSSHVAISTCGGLHGLIVADEEEYLIEPLHGGPKGSRSPEESGPHVVYKRSSLRHPHLDTACGVRDEKPWKGRPWWLRTLKPPPARPLGNETERGQPGLKRSVSRERYVETLVVADKMMVAYHGRRDVEQYVLAIMNIVRLPNFSRTRVWEAPLTSS

SEQ ID NO: 321 - protein, 289 aa, Homo Sapiens; identical to SEQ ID NO: 320

SEQ ID NO: 322 - protein, 1103 aa, Homo Sapiens; identical to SEQ ID NO: 319

SEQ ID NO: 323 - protein, 590 aa, Homo Sapiens
MGPTSVLRAGLTPSCLPPPSGATNGSVSPLGRAQRVWTEPGGRGLHGATAAGPVAAACPLLAVTATAPGQPSGASTVWVREGGTAPATRMTVPLAPRTSEKCSVLNLTASLSVGNSTSGKRTGEACSLTCLAEGFNFYTERAAAVVDGTPCRPDTVDICVSGECKHVGCDRVLGSDLREDKCRVCGGDGSACETIEGVFSPASPGAGYEDVVWIPKGSVHIFIQDLNLSLSHLALKGDQESLLLEGLPGTPQPHRLPLAGTTFQLRQGPDQVQSLEALGPINASLIVMVLARTELPALRYRFNAPIARDSLPPYSWHYAPWTKCSAQCAGGSQVQAVECRNQLDSSAVAPHYCSAHSKLPKRQRACNTEPCPPDWVVGNWSLCSRSCDAGVRSRSVVCQRRVSAAEEKALDDSACPQPRPPVLEACHGPTCPPEWAALDWSECTPSCGPGLRHRVVLCKSADHRATLPPAHCSPAAKPPATMRCNLRRCPPARWVAGEWGECSAQCGVGQRQRSVRCTSHTGQASHECTEALRPPTTQQCEAKCDSPTPGDGPEECKDVNKVAYCPLVLKFQFCSRAYFRQMCCKTCHGH

SEQ ID NO: 324 - protein, 126 aa, Homo Sapiens
MGPTSVLRAGLTPSCLPPPSGATNGSVSPLGRAQRVWTEPGGRGLHGATAAGPVAAACPLLAVTATAPGQPSGASTVWVREGGTAPATRMTVPLAPRTSEKCSVLNLTASLSVGNSTSGKRTGEGA

SEQ ID NO: 325 - protein, 1509 aa, Homo Sapiens
MPCAQRSWLANLSVVAQLLNFGALCYGRQPQPGPVRFPDRRQEHFIKGLPEYHVVGPVRVDASGHFLSYGLHYPITSSRRKRDLDGSEDWVYYRISHEEKDLFFNLTVNQGFLSNSYIMEKRYGNLSHVKMMASSAPLCHLSGTVLQQGTRVGTAALSACHGLTGFFQLPHGDFFIEPVKKHPLVEGGYHPHIVYRRQKVPETKEPTCGLKDSVNISQKQELWREKWERHNLPSRSLSRRSISKERWVETLVVADTKMIEYHGSENVESYILTIMNMVTGLFHNPSIGNAIHIVVVRLILLEEEEQGLKIVHHAEKTLSSFCKWQKSINPKSDLNPVHHDVAVLLTRKDICAGFNRPCETLGLSHLSGMCQPHRSCNINEDSGLPLAFTIAHELGHSFGIQHDGKENDCEPVGRHPYIMSRQLQYDPTPLTWSKCSEEYITRFLDRGWGFCLDDIPKKKGLKSKVIAPGVIYDVHHQCQLQYGPNATFCQEVENVCQTLWCSVKGFCRSKLDAAADGTQCGEKKWCMAGKCITVGKKPESIPGGWGRWSPWSHCSRTCGAGVQSAERLCNNPEPKFGGKYCTGERKRYRLCNVHPCRSEAPTFRQMQCSEFDTVPYKNELYHWFPIFNPGYVDIGLIPKGARDIRVMEIEGAGNFLAIRSEDPEKYYLNGGFIIQWNGNYKLAGTVFQYDRKGDLEKLMATGPTNESVWIQLLFQVTNPGIKYEYTIQKDGLDNDVEQQMYFWQYGHWTECSVTCGTGIRRQTAHCIKKGRGMVKATFCDPETQPNGRQKKCHEKACPPRWWAGEWEACSATCGPHGEKKRTVLCIQTMVSDEQALPPTDCQHLLKPKTLLSCNRDILCPSDWTVGNWSECSVSCGGGVRIRSVTCAKNHDEPCDVTRKPNSRALCGLQQCPSSRRVLKPNKGTISNGKNPPTLKPVPPPTSRPRMLTTPTGPESMSTSTPAISSPSPTTASKEGDLGGKQWQDSSTQPELSSRYLISTGSTSQPILTSQSLSIQPSEENVSSSDTGPTSEGGLVATTTSGSGLSSSRNPITWPVTPFYNTLTKGPEMEIHSGSGEEREQPEDKDESNPVIWTKIRVPGNDAPVESTEMPLAPPLTPDLSRESWWPPFSTVMEGLLPSQRPTTSETGTPRVEGMVTEKPANTLLPLGGDHQPEPSGKTANRNHLKLPNNMNQTKSSEPVLTEEDATSLITEGFLLNASNYKQLTNGHGSAHWIVGNWSECSTTCGLGAYWRRVECSTQMDSDCAAIQRPDPAKRCHLRPCAGWKVGNWSKCSRNCSGGFKIREIQCVDSRDHRNLRPFHCQFLAGIPPPLSMSCNPEPCEAWQVEPWSQCSRSCGGGVQERGVFCPGGLCDWTKRPTSTMSCNEHLCCHWATGNWDLCSTSCGGGFQKRTVQCVPSEGNKTEDQDQCLCDHKPRPPEFKKCNQQACKKSADLLCTKDKLSASFCQTLKAMKKCSVPTVRAECCFSCPQTHITHTQRQRRQRLLQKSKEL

SEQ ID NO: 326 - protein, 1594 aa, Homo Sapiens
MPCAQRSWLANLSVVAQLLNFGALCYGRQPQPGPVRFPDRRQEHFIKGLPEYHVVGPVRVDASGHFLSYGLHYPITSSRRKRDLDGSEDWVYYRISHEEKDLFFNLTVNQGFLSNSYIMEKRYGNLSHVKMMASSAPLCHLSGTVLQQGTRVGTAALSACHGLTGFFQLPHGDFFIEPVKKHPLVEGGYHPHIVYRRQKVPETKEPTCGLKDSVNISQKQELWREKWERHNLPSRSLSRRSISKERWVETLVVADTKMIEYHGSENVESYILTIMNMVTGLFHNPSIGNAIHIVVVRLILLEEEEQGLKIVHHAEKTLSSFCKWQKSINPKSDLNPVHHDVAVLLTRKDICAGFNRPCETLGLSHLSGMCQPHRSCNINEDSGLPLAFTIAHELGHSFGIQHDGKENDCEPVGRHPYIMSRQLQYDPTPLTWSKCSEEYITRFLDRGWGFCLDDIPKKKGLKSKVIAPGVIYDVHHQCQLQYGPNATFCQEVENVCQTLWCSVKGFCRSKLDAAADGTQCGEKKWCMAGKCITVGKKPESIPGGWGRWSPWSHCSRTCGAGVQSAERLCNNPEPKFGGKYCTGERKRYRLCNVHPCRSEAPTFRQMQCSEFDTVPYKNELYHWFPIFNPAHPCELYCRPIDGQFSEKMLDAVIDGTPCFEGGNSRNVCINGICKMVGCDYEIDSNATEDRCGVCLGDGSSCQTVRKMFKQKEGSGYVDIGLIPKGARDIRVMEIEGAGNFLAIRSEDPEKYYLNGGFIIQWNGNYKLAGTVFQYDRKGDLEKLMATGPTNESVWIQLLFQVTNPGIKYEYTIQKDGLDNDVEQQMYFWQYGHWTECSVTCGTGIRRQTAHCIKKGRGMVKATFCDPETQPNGRQKKCHEKACPPRWWAGEWEACSATCGPHGEKKRTVLCIQTMVSDEQALPPTDCQHLLKPKTLLSCNRDILCPSDWTVGNWSECSVSCGGGVRIRSVTCAKNHDEPCDVTRKPNSRALCGLQQCPSSRRVLKPNKGTISNGKNPPTLKPVPPPTSRPRMLTTPTGPESMSTSTPAISSPSPTTASKEGDLGGKQWQDSSTQPELSSRYLISTGSTSQPILTSQSLSIQPSEENVSSSDTGPTSEGGLVATTTSGSGLSSSRNPITWPVTPFYNTLTKGPEMEIHSGSGEEREQPEDKDESNPVIWTKIRVPGNDAPVESTEMPLAPPLTPDLSRESWWPPFSTVMEGLLPSQRPTTSETGTPRVEGMVTEKPANTLLPLGGDHQPEPSGKTANRNHLKLPNNMNQTKSSEPVLTEEDATSLITEGFLLNASNYKQLTNGHGSAHWIVGNWSECSTTCGLGAYWRRVECSTQMDSDCAAIQRPDPAKRCHLRPCAGWKVGNWSKCSRNCSGGFKIREIQCVDSRDHRNLRPFHCQFLAGIPPPLSMSCNPEPCEAWQVEPWSQCSRSCGGGVQERGVFCPGGLCDWTKRPTSTMSCNEHLCCHWATGNWDLCSTSCGGGFQKRTVQCVPSEGNKTEDQDQCLCDHKPRPPEFKKCNQQACKKSADLLCTKDKLSASFCQTLKAMKKCSVPTVRAECCFSCPQTHITHTQRQRRQRLLQKSKEL

SEQ ID NO: 327 - protein, 232 aa, Homo Sapiens
MPCAQRSWLANLSVVAQLLNFGALCYGRQPQPGPVRFPDRRQEHFIKGLPEYHVVGPVRVDASGHFLSYGLHYPITSSRRKRDLDGSEDWVYYRISHEEKDLFFNLTVNQGFLSNSYIMEKRYGNLSHVKMMASSAPLCHLSGTVLQQGTRVGTAALSACHGLTGFFQLPHGDFFIEPVKKHPLVEGGYHPHIVYRRQKVPETKEPTCGLKGIVTHMSSWVEESVLFFWLFY

SEQ ID NO: 328 - protein, 444 aa, Homo Sapiens
MASDGAAPRAGLAWSPCSRRQLLSLLSAGRARCVWDPPRPQPGSAGHPPDAQPGLYYSANEQCRVAFGPKAVACTFAREHLDMCQALSCHTDPLDQSSCSRLLVPLLDGTECGVEKWCSKGRCRSLVELTPIAAVHGRWSSWGPRSPCSRSCGGGVVTRRRQCNNPRPAFGGRACVGADLQAEMCNTQACEKTQLEFMSQQCARTDGQPLRSSPGGASFYHWGAAVPHSQGDALCRHMCRAIGESFIMKRGDSFLDGTRCMPSGPREDGTLSLCVSGSCRTFGCDGRMDSQQVWDRCQVCGGDNSTCSPRKGSFTAGRAREYVTFLTVTPNLTSVYIANHRPLFTHLAVRIGGRYVVAGKMSISPNTTYPSLLEDGRVEYRVALTEDRLPRLEEIRIWGPLQEDADIQVGGVRAQLMHISWWSRPGLGERDLCARGRWPGGSSD

SEQ ID NO: 329 - protein, 276 aa, Homo Sapiens
MHQRHPRARCPPLCVAGILACGFLLGCWGPSHFQQSCLQALEPQAVSSYLSPGAPLKGRPPSPGFQRQRQRQRRAAGGILHLELLVAVGPDVFQAHQEDTERYVLTNLNIGAELLRDPSLGAQFRVHLVKMVILTEPEGAPNITANLTSSLLSVCGWSQTINPEDDTDPGHADLVLYITRFDLELPDGNRQVRGVTQLGGACSPTWSCLITEDTGFDLGVTIAHEIGHRICARPSPATQTRWTKAAAAASSFLSWMGQNVAWRSGAPRVAAAPWWS

SEQ ID NO: 330 - protein, 1371 aa, Homo Sapiens
MHQRHPRARCPPLCVAGILACGFLLGCWGPSHFQQSCLQALEPQAVSSYLSPGAPLKGRPPSPGFQRQRQRQRRAAGGILHLELLVAVGPDVFQAHQEDTERYVLTNLNIGAELLRDPSLGAQFRVHLVKMVILTEPEGAPNITANLTSSLLSVCGWSQTINPEDDTDPGHADLVLYITRFDLELPDGNRQVRGVTQLGGACSPTWSCLITEDTGFDLGVTIAHEIGHSFGLEHDGAPGSGCGPSGHVMASDGAAPRAGLAWSPCSRRQLLSLLSAGRARCVWDPPRPQPGSAGHPPDAQPGLYYSANEQCRVAFGPKAVACTFAREHLDMCQALSCHTDPLDQSSCSRLLVPLLDGTECGVEKWCSKGRCRSLVELTPIAAVHGRWSSWGPRSPCSRSCGGGVVTRRRQCNNPRPAFGGRACVGADLQAEMCNTQACEKTQLEFMSQQCARTDGQPLRSSPGGASFYHWGAAVPHSQGDALCRHMCRAIGESFIMKRGDSFLDGTRCMPSGPREDGTLSLCVSGSCRTFGCDGRMDSQQVWDRCQVCGGDNSTCSPRKGSFTAGRAREYVTFLTVTPNLTSVYIANHRPLFTHLAVRIGGRYVVAGKMSISPNTTYPSLLEDGRVEYRVALTEDRLPRLEEIRIWGPLQEDADIQVYRRYGEEYGNLTRPDITFTYFQPKPRQAWVWAAVRGPCSVSCGAGLRWVNYSCLDQARKELVETVQCQGSQQPPAWPEACVLEPCPPYWAVGDFGPCSASCGGGLRERPVRCVEAQGSLLKTLPPARCRAGAQQPAVALETCNPQPCPARWEVSEPSSCTSAGGAGLALENETCVPGADGLEAPVTEGPGSVDEKLPAPEPCVGMSCPPGWGHLDATSAGEKAPSPWGSIRTGAQAAHVWTPAAGSCSVSCGRGLMELRFLCMDSALRVPVQEELCGLASKPGSRREVCQAVPCPARWQYKLAACSVSCGRGVVRRILYCARAHGEDDGEEILLDTQCQGLPRPEPQEACSLEPCPPRWKVMSLGPCSASCGLGTARRSVACVQLDQGQDVEVDEAACAALVRPEASVPCLIADCTYRWHVGTWMECSVSCGDGIQRRRDTCLGPQAQAPVPADFCQHLPKPVTVRGCWAGPCVGQGACGRQHLEPTGTIDMRGPGQADCAVAIGRPLGEVVTLRVLESSLNCSAGDMLLLWGRLTWRKMCRKLLDMTFSSKTNTLVVRQRCGRPGGGVLLRYGSQLAPETFYRECDMQLFGPWGEIVSPSLSPATSNAGGCRLFINVAPHARIAIHALATNMGAGTEGANASYILIRDTHSLRTTAFHGQQVLYWESESSQAEMEFSEGFLKAQASLRGQYWTLQSWVPEMQDPQSWKGKEGT

SEQ ID NO: 331 - protein, 1340 aa, Homo Sapiens
MHQRHPRARCPPLCVAGILACGFLLGCWGPSHFQQSCLQALEPQAVSSYLSPGAPLKGRPPSPGFQRQRQRQRRAAGGILHLELLVAVGPDVFQAHQEDTERYVLTNLNIGAELLRDPSLGAQFRVHLVKMVILTEPEGAPNITANLTSSLLSVCGWSQTINPEDDTDPGHADLVLYITRFDLELPDGNRQVRGVTQLGGACSPTWSCLITEDTGFDLGVTIAHEIGHSFGLEHDGAPGSGCGPSGHVMASDGAAPRAGLAWSPCSRRQLLSLLSANEQCRVAFGPKAVACTFAREHLDMCQALSCHTDPLDQSSCSRLLVPLLDGTECGVEKWCSKGRCRSLVELTPIAAVHGRWSSWGPRSPCSRSCGGGVVTRRRQCNNPRPAFGGRACVGADLQAEMCNTQACEKTQLEFMSQQCARTDGQPLRSSPGGASFYHWGAAVPHSQGDALCRHMCRAIGESFIMKRGDSFLDGTRCMPSGPREDGTLSLCVSGSCRTFGCDGRMDSQQVWDRCQVCGGDNSTCSPRKGSFTAGRAREYVTFLTVTPNLTSVYIANHRPLFTHLAVRIGGRYVVAGKMSISPNTTYPSLLEDGRVEYRVALTEDRLPRLEEIRIWGPLQEDADIQVYRRYGEEYGNLTRPDITFTYFQPKPRQAWVWAAVRGPCSVSCGAGLRWVNYSCLDQARKELVETVQCQGSQQPPAWPEACVLEPCPPYWAVGDFGPCSASCGGGLRERPVRCVEAQGSLLKTLPPARCRAGAQQPAVALETCNPQPCPARWEVSEPSSCTSAGGAGLALENETCVPGADGLEAPVTEGPGSVDEKLPAPEPCVGMSCPPGWGHLDATSAGEKAPSPWGSIRTGAQAAHVWTPAAGSCSVSCGRGLMELRFLCMDSALRVPVQEELCGLASKPGSRREVCQAVPCPARWQYKLAACSVSCGRGVVRRILYCARAHGEDDGEEILLDTQCQGLPRPEPQEACSLEPCPPRWKVMSLGPCSASCGLGTARRSVACVQLDQGQDVEVDEAACAALVRPEASVPCLIADCTYRWHVGTWMECSVSCGDGIQRRRDTCLGPQAQAPVPADFCQHLPKPVTVRGCWAGPCVGQGACGRQHLEPTGTIDMRGPGQADCAVAIGRPLGEVVTLRVLESSLNCSAGDMLLLWGRLTWRKMCRKLLDMTFSSKTNTLVVRQRCGRPGGGVLLRYGSQLAPETFYRECDMQLFGPWGEIVSPSLSPATSNAGGCRLFINVAPHARIAIHALATNMGAGTEGANASYILIRDTHSLRTTAFHGQQVLYWESESSQAEMEFSEGFLKAQASLRGQYWTLQSWVPEMQDPQSWKGKEGT

SEQ ID NO: 332 - protein, 1427 aa, Homo Sapiens
MHQRHPRARCPPLCVAGILACGFLLGCWGPSHFQQSCLQALEPQAVSSYLSPGAPLKGRPPSPGFQRQRQRQRRAAGGILHLELLVAVGPDVFQAHQEDTERYVLTNLNIGAELLRDPSLGAQFRVHLVKMVILTEPEGAPNITANLTSSLLSVCGWSQTINPEDDTDPGHADLVLYITRFDLELPDGNRQVRGVTQLGGACSPTWSCLITEDTGFDLGVTIAHEIGHSFGLEHDGAPGSGCGPSGHVMASDGAAPRAGLAWSPCSRRQLLSLLSAGRARCVWDPPRPQPGSAGHPPDAQPGLYYSANEQCRVAFGPKAVACTFAREHLDMCQALSCHTDPLDQSSCSRLLVPLLDGTECGVEKWCSKGRCRSLVELTPIAAVHGRWSSWGPRSPCSRSCGGGVVTRRRQCNNPRPAFGGRACVGADLQAEMCNTQACEKTQLEFMSQQCARTDGQPLRSSPGGASFYHWGAAVPHSQGDALCRHMCRAIGESFIMKRGDSFLDGTRCMPSGPREDGTLSLCVSGSCRTFGCDGRMDSQQVWDRCQVCGGDNSTCSPRKGSFTAGRAREYVTFLTVTPNLTSVYIANHRPLFTHLAVRIGGRYVVAGKMSISPNTTYPSLLEDGRVEYRVALTEDRLPRLEEIRIWGPLQEDADIQVYRRYGEEYGNLTRPDITFTYFQPKPRQAWVWAAVRGPCSVSCGAGLRWVNYSCLDQARKELVETVQCQGSQQPPAWPEACVLEPCPPYWAVGDFGPCSASCGGGLRERPVRCVEAQGSLLKTLPPARCRAGAQQPAVALETCNPQPCPARWEVSEPSSCTSAGGAGLALENETCVPGADGLEAPVTEGPGSVDEKLPAPEPCVGMSCPPGWGHLDATSAGEKAPSPWGSIRTGAQAAHVWTPAAGSCSVSCGRGLMELRFLCMDSALRVPVQEELCGLASKPGSRREVCQAVPCPARWQYKLAACSVSCGRGVVRRILYCARAHGEDDGEEILLDTQCQGLPRPEPQEACSLEPCPPRWKVMSLGPCSASCGLGTARRSVACVQLDQGQDVEVDEAACAALVRPEASVPCLIADCTYRWHVGTWMECSVSCGDGIQRRRDTCLGPQAQAPVPADFCQHLPKPVTVRGCWAGPCVGQGTPSLVPHEEAAAPGRTTATPAGASLEWSQARGLLFSPAPQPRRLLPGPQENSVQSSACGRQHLEPTGTIDMRGPGQADCAVAIGRPLGEVVTLRVLESSLNCSAGDMLLLWGRLTWRKMCRKLLDMTFSSKTNTLVVRQRCGRPGGGVLLRYGSQLAPETFYRECDMQLFGPWGEIVSPSLSPATSNAGGCRLFINVAPHARIAIHALATNMGAGTEGANASYILIRDTHSLRTTAFHGQQVLYWESESSQAEMEFSEGFLKAQASLRGQYWTLQSWVPEMQDPQSWKGKEGT

SEQ ID NO: 333 - protein, 344 aa, Homo Sapiens
MHQRHPRARCPPLCVAGILACGFLLGCWGPSHFQQSCLQALEPQAVSSYLSPGAPLKGRPPSPGFQRQRQRQRRAAGGILHLELLVAVGPDVFQAHQEDTERYVLTNLNIGAELLRDPSLGAQFRVHLVKMVILTEPEGAPNITANLTSSLLSVCGWSQTINPEDDTDPGHADLVLYITRFDLELPDGNRQVRGVTQLGGACSPTWSCLITEDTGFDLGVTIAHEIGHSFGLEHDGAPGSGCGPSGHVMASDGAAPRAGLAWSPCSRRQLLSLLRPVPPSPLPLLATHLCAGRSLSLGPSQEPAPGGGRGPRTPVPTHKRPRFQTLPSSCPLLRPASSRCTPRD

SEQ ID NO: 334 - protein, 344 aa, Homo Sapiens; identical to SEQ ID NO: 333

SEQ ID NO: 335 - protein, 223 aa, Homo Sapiens
MRGPGQADCAVAIGRPLGEVVTLRVLESSLNCSAGDMLLLWGRLTWRKMCRKLLDMTFSSKTNTLVVRQRCGRPGGGVLLRYGSQLAPETFYRECDMQLFGPWGEIVSPSLSPATSNAGGCRLFINVAPHARIAIHALATNMGAGTEGANASYILIRDTHSLRTTAFHGQQVLYWESESSQAEMEFSEGFLKAQASLRGQYWTLQSWVPEMQDPQSWKGKEGT

SEQ ID NO: 336 - protein, 1226 aa, Homo Sapiens
MAPLRALLSYLLPLHCALCAAAGSRTPELHLSGKLSDYGVTVPCSTDFRGRFLSHVVSGPAAASAGSMVVDTPPTLPRHSSHLRVARSPLHPGGTLWPGRVGRHSLYFNVTVFGKELHLRLRPNRRLVVPGSSVEWQEDFRELFRQPLRQECVYTGGVTGMPGAAVAISNCDGLAGLIRTDSTDFFIEPLERGQQEKEASGRTHVVYRREAVQQEWAEPDGDLHNEAFGLGDLPNLLGLVGDQLGDTERKRRHAKPGSYSIEVLLVVDDSVVRFHGKEHVQNYVLTLMNIVDEIYHDESLGVHINIALVRLIMVGYRQSLSLIERGNPSRSLEQVCRWAHSQQRQDPSHAEHHDHVVFLTRQDFGPSGMQGYAPVTGMCHPLRSCALNHEDGFSSAFVIAHETGHVLGMEHDGQGNGCADETSLGSVMAPLVQAAFHRFHWSRCSKLELSRYLPSYDCLLDDPFDPAWPQPPELPGINYSMDEQCRFDFGSGYQTCLAFRTFEPCKQLWCSHPDNPYFCKTKKGPPLDGTECAPGKWCFKGHCIWKSPEQTYGQDGGWSSWTKFGSCSRSCGGGVRSRSRSCNNPSPAYGGRLCLGPMFEYQVCNSEECPGTYEDFRAQQCAKRNSYYVHQNAKHSWVPYEPDDDAQKCELICQSADTGDVVFMNQVVHDGTRCSYRDPYSVCARGECVPVGCDKEVGSMKADDKCGVCGGDNSHCRTVKGTLGKASKQAGALKLVQIPAGARHIQIEALEKSPHRIVVKNQVTGSFILNPKGKEATSRTFTAMGLEWEDAVEDAKESLKTSGPLPEAIAILALPPTEGGPRSSLAYKYVIHEDLLPLIGSNNVLLEEMDTYEWALKSWAPCSKACGGGIQFTKYGCRRRRDHHMVQRHLCDHKKRPKPIRRRCNQHPCSQPVWVTEEWGACSRSCGKLGVQTRGIQCLLPLSNGTHKVMPAKACAGDRPEARRPCLRVPCPAQWRLGAWSQCSATCGEGIQQRQVVCRTNANSLGHCEGDRPDTVQVCSLPACGGNHQNSTVRADVWELGTPEGQWVPQSEPLHPINKISSTEPCTGDRSVFCQMEVLDRYCSIPGYHRLCCVSCIKKASGPNPGPDPGPTSLPPFSTPGSPLPGPQDPADAAEPPGKPTGSEDHQHGRATQLPGALDTSSPGTQHPFAPETPIPGASWSISPTTPGGLPWGWTQTPTPVPEDKGQPGEDLRHPGTSLPAASPVT

SEQ ID NO: 337 - protein, 1223 aa, Homo Sapiens
MAPLRALLSYLLPLHCALCAAAGSRTPELHLSGKLSDYGVTVPCSTDFRGRFLSHVVSGPAAASAGSMVVDTPPTLPRHSSHLRVARSPLHPGGTLWPGRVGRHSLYFNVTVFGKELHLRLRPNRRLVVPGSSVEWQEDFRELFRQPLRQECVYTGGVTGMPGAAVAISNCDGLAGLIRTDSTDFFIEPLERGQQEKEASGRTHVVYRREAVQQEWAEPDGDLHNEAFGLGDLPNLLGLVGDQLGDTERKRRHAKPGSYSIEVLLVVDDSVVRFHGKEHVQNYVLTLMNIVDEIYHDESLGVHINIALVRLIMVGYRQSLSLIERGNPSRSLEQVCRWAHSQQRQDPSHAEHHDHVVFLTRQDFGPSGYAPVTGMCHPLRSCALNHEDGFSSAFVIAHETGHVLGMEHDGQGNGCADETSLGSVMAPLVQAAFHRFHWSRCSKLELSRYLPSYDCLLDDPFDPAWPQPPELPGINYSMDEQCRFDFGSGYQTCLAFRTFEPCKQLWCSHPDNPYFCKTKKGPPLDGTECAPGKWCFKGHCIWKSPEQTYGQDGGWSSWTKFGSCSRSCGGGVRSRSRSCNNPSPAYGGRLCLGPMFEYQVCNSEECPGTYEDFRAQQCAKRNSYYVHQNAKHSWVPYEPDDDAQKCELICQSADTGDVVFMNQVVHDGTRCSYRDPYSVCARGECVPVGCDKEVGSMKADDKCGVCGGDNSHCRTVKGTLGKASKQAGALKLVQIPAGARHIQIEALEKSPHRIVVKNQVTGSFILNPKGKEATSRTFTAMGLEWEDAVEDAKESLKTSGPLPEAIAILALPPTEGGPRSSLAYKYVIHEDLLPLIGSNNVLLEEMDTYEWALKSWAPCSKACGGGIQFTKYGCRRRRDHHMVQRHLCDHKKRPKPIRRRCNQHPCSQPVWVTEEWGACSRSCGKLGVQTRGIQCLLPLSNGTHKVMPAKACAGDRPEARRPCLRVPCPAQWRLGAWSQCSATCGEGIQQRQVVCRTNANSLGHCEGDRPDTVQVCSLPACGGNHQNSTVRADVWELGTPEGQWVPQSEPLHPINKISSTEPCTGDRSVFCQMEVLDRYCSIPGYHRLCCVSCIKKASGPNPGPDPGPTSLPPFSTPGSPLPGPQDPADAAEPPGKPTGSEDHQHGRATQLPGALDTSSPGTQHPFAPETPIPGASWSISPTTPGGLPWGWTQTPTPVPEDKGQPGEDLRHPGTSLPAASPVT

SEQ ID NO: 338 - protein, 950 aa, Homo Sapiens
MLLLGILTLAFAGRTAGGSEPEREVVVPIRLDPDINGRRYYWRGPEDSGDQGLIFQITAFQEDFYLHLTPDAQFLAPAFSTEHLGVPLQGLTGGSSDLRRCFYSGDVNAEPDSFAAVSLCGGLRGAFGYRGAEYVISPLPNASAPAAQRNSQGAHLLQRRGVPGGPSGDPTSRCGVASGWNPAILRALDPYKPRRAGFGESRSRRRSGRAKRFVSIPRYVETLVVADESMVKFHGADLEHYLLTLLATAARLYRHPSILNPINIVVVKVLLLRDRDSGPKVTGNAALTLRNFCAWQKKLNKVSDKHPEYWDTAILFTRQDLCGATTCDTLGMADVGTMCDPKRSCSVIEDDGLPSAFTTAHELGHVFNMPHDNVKVCEEVFGKLRANHMMSPTLIQIDRANPWSACSAAIITDFLDSGHGDCLLDQPSKPISLPEDLPGASYTLSQQCELAFGVGSKPCPYMQYCTKLWCTGKAKGQMVCQTRHFPWADGTSCGEGKLCLKGACVERHNLNKHRVDGSWAKWDPYGPCSRTCGGGVQLARRQCTNPTPANGGKYCEGVRVKYRSCNLEPCPSSASGKSFREEQCEAFNGYNHSTNRLTLAVAWVPKYSGVSPRDKCKLICRANGTGYFYVLAPKVVDGTLCSPDSTSVCVQGKCIKAGCDGNLGSKKRFDKCGVCGGDNKSCKKVTGLFTKPMHGYNFVVAIPAGASSIDIRQRGYKGLIGDDNYLALKNSQGKYLLNGHFVVSAVERDLVVKGSLLRYSGTGTAVESLQASRPILEPLTVEVLSVGKMTPPRVRYSFYLPKEPREDKSSHPKDPRGPSVLHNSVLSLSNQVEQPDDRPPARWVAGSWGPCSASCGSGLQKRAVDCRGSAGQRTVPACDAAHRPVETQACGEPCPTWELSAWSPCSKSCGRGFQRRSLKCVGHGGRLLARDQCNLHRKPQELDFCVLRPC

SEQ ID NO: 339 - protein, 1224 aa, Homo Sapiens
MKPRARGWRGLAALWMLLAQVAEQAPACAMGPAAAAPGSPSVPRPPPPAERPGWMEKGEYDLVSAYEVDHRGDYVSHEIMHHQRRRRAVPVSEVESLHLRLKGSRHDFHMDLRTSSSLVAPGFIVQTLGKTGTKSVQTLPPEDFCFYQGSLRSHRNSSVALSTCQGLSGMIRTEEADYFLRPLPSHLSWKLGRAAQGSSPSHVLYKRSTEPHAPGASEVLVTSRTWELAHQPLHSSDLRLGLPQKQHFCGRRKKYMPQPPKEDLFILPDEYKSCLRHKRSLLRSHRNEELNVETLVVVDKKMMQNHGHENITTYVLTILNMVSALFKDGTIGGNINIAIVGLILLEDEQPGLVISHHADHTLSSFCQWQSGLMGKDGTRHDHAILLTGLDICSWKNEPCDTLGFAPISGMCSKYRSCTINEDTGLGLAFTIAHESGHNFGMIHDGEGNMCKKSEGNIMSPTLAGRNGVFSWSPCSRQYLHKFLSTAQAICLADQPKPVKEYKYPEKLPGELYDANTQCKWQFGEKAKLCMLDFKKDICKALWCHRIGRKCETKFMPAAEGTICGHDMWCRGGQCVKYGDEGPKPTHGHWSDWSSWSPCSRTCGGGVSHRSRLCTNPKPSHGGKFCEGSTRTLKLCNSQKCPRDSVDFRAAQCAEHNSRRFRGRHYKWKPYTQVEDQDLCKLYCIAEGFDFFFSLSNKVKDGTPCSEDSRNVCIDGICERVGCDNVLGSDAVEDVCGVCNGNNSACTIHRGLYTKHHHTNQYYHMVTIPSGARSIRIYEMNVSTSYISVRNALRRYYLNGHWTVDWPGRYKFSGTTFDYRRSYNEPENLIATGPTNETLIVELLFQGRNPGVAWEYSMPRLGTEKQPPAQPSYTWAIVRSECSVSCGGGQMTVREGCYRDLKFQVNMSFCNPKTRPVTGLVPCKVSACPPSWSVGNWSACSRTCGGGAQSRPVQCTRRVHYDSEPVPASLCPQPAPSSRQACNSQSCPPAWSAGPWAECSHTCGKGWRKRAVACKSTNPSARAQLLPDAVCTSEPKPRMHEACLLQRCHKPKKLQWLVSAWSQCSVTCERGTQKRFLKCAEKYVSGKYRELASKKCSHLPKPSLELERACAPLPCPRHPPFAAAGPSRGSWFASPWSQCTASCGGGVQTRSVQCLAGGRPASGCLLHQKPSASLACNTHFCPIAEKKDAFCKDYFHWCYLVPQHGMCSHKFYGKQCCKTCSKSNL

SEQ ID NO: 340 - protein, 570 aa, Homo Sapiens
MKPRARGWRGLAALWMLLAQVAEQAPACAMGPAAAAPGSPSVPRPPPPAERPGWMEKGEYDLVSAYEVDHRGDYVSHEIMHHQRRRRAVPVSEVESLHLRLKGSRHDFHMDLRTSSSLVAPGFIVQTLGKTGTKSVQTLPPEDFCFYQGSLRSHRNSSVALSTCQGLSGMIRTEEADYFLRPLPSHLSWKLGRAAQGSSPSHVLYKRSTEPHAPGASEVLVTSRTWELAHQPLHSSDLRLGLPQKQHFCGRRKKYMPQPPKEDLFILPDEYKSCLRHKRSLLRSHRNEELNVETLVVVDKKMMQNHGHENITTYVLTILNMVSALFKDGTIGGNINIAIVGLILLEDEQPGLVISHHADHTLSSFCQWQSGLMGKDGTRHDHAILLTGLDICSWKNEPCDTLGFAPISGMCSKYRSCTINEDTGLGLAFTIAHESGHNFGMIHDGEGNMCKKSEGNIMSPTLAGRNGVFSWSPCSRQYLHKFLSTAQAICLADQPKPVKEYKYPEKLPGELYDANTQCKWQFGEKAKLCMLDFKKDICKALWCHRIGRKCETKFMPAAEGTICGHDMVRS

SEQ ID NO: 341 - protein, 1095 aa, Homo Sapiens
MCDGALLPPLVLPVLLLLVWGLDPGTAVGDAAADVEVVLPWRVRPDDVHLPPLPAAPGPRRRRRPRTPPAAPRARPGERALLLHLPAFGRDLYLQLRRDLRFLSRGFEVEEAGAARRRGRPAELCFYSGRVLGHPGSLVSLSACGAAGGLVGLIQLGQEQVLIQPLNNSQGPFSGREHLIRRKWSLTPSPSAEAQRPEQLCKVLTEKKKPTWGRPSRDWRERRNAIRLTSEHTVETLVVADADMVQYHGAEAAQRFILTVMNMVYNMFQHQSLGIKINIQVTKLVLLRQRPAKLSIGHHGERSLESFCHWQNEEYGGARYLGNNQVPGGKDDPPLVDAAVFVTRTDFCVHKDEPCDTVGIAYLGGVCSAKRKCVLAEDNGLNLAFTIAHELGHNLGMNHDDDHSSCAGRSHIMSGEWVKGRNPSDLSWSSCSRDDLENFLKSKVSTCLLVTDPRSQHTVRLPHKLPGMHYSANEQCQILFGMNATFCRNMEHLMCAGLWCLVEGDTSCKTKLDPPLDGTECGADKWCRAGECVSKTPIPEHVDGDWSPWGAWSMCSRTCGTGARFRQRKCDNPPPGPGGTHCPGASVEHAVCENLPCPKGLPSFRDQQCQAHDRLSPKKKGLLTAVVVDDKPCELYCSPLGKESPLLVADRVLDGTPCGPYETDLCVHGKCQKIGCDGIIGSAAKEDRCGVCSGDGKTCHLVKGDFSHARGTALKDSGKGSINSDWKIELPGEFQIAGTTVRYVRRGLWEKISAKGPTKLPLHLMVLLFHDQDYGIHYEYTVPVNRTAENQSEPEKPQDSLFIWTHSGWEGCSVQCGGGERRTIVSCTRIVNKTTTLVNDSDCPQASRPEPQVRRCNLHPCQSRWVAGPWSPCSATCEKGFQHREVTCVYQLQNGTHVATRPLYCPGPRPAAVQSCEGQDCLSIWEASEWSQCSASCGKGVWKRTVACTNSQGKCDASTRPRAEEACEDYSGCYEWKTGDWSTCSSTCGKGLQSRVVQCMHKVTGRHGSECPALSKPAPYRQCYQEVCNDRINANTITSPRLAALTYKCTRDQWTVYCRVIREKNLCQDMRWYQRCCQTCRDFYANKMRQPPPNS

SEQ ID NO: 342 - protein, 68 aa, Homo Sapiens
MCDGALLPPLVLPVLLLLVWGLDPGTGWPHSAWAGAGANPAPQQLPGPIQWTRTSDQAQMVLDPQPFC

SEQ ID NO: 343 - protein, 214 aa, Homo Sapiens
  misc_feature (1)..(1): Xaa can be any naturally occurring amino acid
XELYCSPLGKESPLLVADRVLDGTPCGPYETDLCVHGKCQKIGCDGIIGSAAKEDRCGVCSGDGKTCHLVKGDFSHARGTGYIEAAVIPAGARRIRVVEDKPAHSFLALKDSGKGSINSDWKIELPGEFQIAGTTVRYVRRGLWEKISAKGPTKLPLHLMVLLFHDQDYGIHYEYTVPVNRTAENQSEPEKPQDSLFIWTHSGWEGCSVQCGGG

SEQ ID NO: 344 - protein, 120 aa, Homo Sapiens
  misc_feature (1)..(1): Xaa can be any naturally occurring amino acid
XGRPAELCFYSGRVLGHPGSLVSLSACGAAGGLVGLIQLGQEQVLIQPLNNSQGPFSGREHLIRRKWSLTPSPSAEAQRPEQLCKVLTVPQCLGLTWEDLKSGGWSDLEVPHSCVWPGGG

SEQ ID NO: 345 - protein, 1221 aa, Homo Sapiens
MECALLLACAFPAAGSGPPRGLAGLGRVAKALQLCCLCCASVAAALASDSSSGASGLNDDYVFVTPVEVDSAGSYISHDILHNGRKKRSAQNARSSLHYRFSAFGQELHLELKPSAILSSHFIVQVLGKDGASETQKPEVQQCFYQGFIRNDSSSSVAVSTCAGLSGLIRTRKNEFLISPLPQLLAQEHNYSSPAGHHPHVLYKRTAEEKIQRYRGYPGSGRNYPGYSPSHIPHASQSRETEYHHRRLQKQHFCGRRKKYAPKPPTEDTYLRFDEYGSSGRPRRSAGKSQKGLNVETLVVADKKMVEKHGKGNVTTYILTVMNMVSGLFKDGTIGSDINVVVVSLILLEQEPGGLLINHHADQSLNSFCQWQSALIGKNGKRHDHAILLTGFDICSWKNEPCDTLGFAPISGMCSKYRSCTINEDTGLGLAFTIAHESGHNFGMIHDGEGNPCRKAEGNIMSPTLTGNNGVFSWSSCSRQYLKKFLSTPQAGCLVDEPKQAGQYKYPDKLPGQIYDADTQCKWQFGAKAKLCSLGFVKDICKSLWCHRVGHRCETKFMPAAEGTVCGLSMWCRQGQCVKFGELGPRPIHGQWSAWSKWSECSRTCGGGVKFQERHCNNPKPQYGGLFCPGSSRIYQLCNINPCNENSLDFRAQQCAEYNSKPFRGWFYQWKPYTKVEEEDRCKLYCKAENFEFFFAMSGKVKDGTPCSPNKNDVCIDGVCELVGCDHELGSKAVSDACGVCKGDNSTCKFYKGLYLNQHKANEYYPVVLIPAGARSIEIQELQVSSSYLAVRSLSQKYYLTGGWSIDWPGEFPFAGTTFEYQRSFNRPERLYAPGPTNETLVFEILMQGKNPGIAWKYALPKVMNGTPPATKRPAYTWSIVQSECSVSCGGGYINVKAICLRDQNTQVNSSFCSAKTKPVTEPKICNAFSCPAYWMPGEWSTCSKACAGGQQSRKIQCVQKKPFQKEEAVLHSLCPVSTPTQVQACNSHACPPQWSLGPWSQCSKTCGRGVRKRELLCKGSAAETLPESQCTSLPRPELQEGCVLGRCPKNSRLQWVASSWSECSATCGLGVRKREMKCSEKGFQGKLITFPERRCRNIKKPNLDLEETCNRRACPAHPVYNMVAGWYSLPWQQCTVTCGGGVQTRSVHCVQQGRPSSSCLLHQKPPVLRACNTNFCPAPEKREDPSCVDFFNWCHLVPQHGVCNHKFYGKQCCKSCTRKI

SEQ ID NO: 346 - protein, 274 aa, Homo Sapiens
MECALLLACAFPAAGSGPPRGLAGLGRVAKALQLCCLCCASVAAALASDSSSGASGLNDDYVFVTPVEVDSAGSYISHDILHNGRKKRSAQNARSSLHYRFSAFGQELHLELKPSAILSSHFIVQVLGKDGASETQKPEVQQCFYQGFIRNDSSSSVAVSTCAGLSGLIRTRKNEFLISPLPQLLAQEHNYSSPAGHHPHVLYKRTAEEKIQRYRGYPGSGRNYPGYSPSHIPHASQSRETEYHHRRLQKQHFCGRRKKCICSQASHRGHLSKV

SEQ ID NO: 347 - protein, 62 aa, Homo Sapiens
  misc_feature (1)..(1): Xaa can be any naturally occurring amino acid
XQGRPSSSCLLHQKPPVLRACNTNFCPAPEKRDSAGSQLPCCDGPQAVHEEGLRFPDNHWAM

SEQ ID NO: 348 - protein, 186 aa, Homo Sapiens
  misc_feature (1)..(1): Xaa can be any naturally occurring amino acid
XVDSAGSYISHDILHNGRKKRSAQNARSSLHYRFSAFGQELHLELKPSAILSSHFIVQVLGKDGASETQKPEVQQCFYQGFIRNDSSSSVAVSTCAGLLLAQEHNYSSPAGHHPHVLYKRTAEEKIQRYRGYPGSGRNYPGYSPSHIPHASQSRETEYHHRRLQKQHFCGRRKKCICSQASHRGHL

SEQ ID NO: 349 - protein, 37 aa, Homo Sapiens
MGKNREMRLTHICCCCLLYQLGFLSNGIVSDGIYTAQ

SEQ ID NO: 350 - protein, 1213 aa, Homo Sapiens
MGKNREMRLTHICCCCLLYQLGFLSNGIVSELQFAPDREEWEVVFPALWRREPVDPAGGSGGSADPGWVRGVGGGGSARAQAAGSSREVRSVAPVPLEEPVEGRSESRLRPPPPSEGEEDEELESQELPRGSSGAAALSPGAPASWQPPPPPQPPPSPPPAQHAEPDGDEVLLRIPAFSRDLYLLLRRDGRFLAPRFAVEQRPNPGPGPTGAASAPQPPAPPDAGCFYTGAVLRHPGSLASFSTCGGGLMGFIQLNEDFIFIEPLNDTMAITGHPHRVYRQKRSMEEKVTEKSALHSHYCGIISDKGRPRSRKIAESGRGKRYSYKLPQEYNIETVVVADPAMVSYHGADAARRFILTILNMVFNLFQHKSLSVQVNLRVIKLILLHETPPELYIGHHGEKMLESFCKWQHEEFGKKNDIHLEMSTNWGEDMTSVDAAILITRKDFCVHKDEPCDTVGIAYLSGMCSEKRKCIIAEDNGLNLAFTIAHEMGHNMGINHDNDHPSCADGLHIMSGEWIKGQNLGDVSWSRCSKEDLERFLRSKASNCLLQTNPQSVNSVMVPSKLPGMTYTADEQCQILFGPLASFCQEMQHVICTGLWCKVEGEKECRTKLDPPMDGTDCDLGKWCKAGECTSRTSAPEHLAGEWSLWSPCSRTCSAGISSRERKCPGLDSEARDCNGPRKQYRICENPPCPAGLPGFRDWQCQAYSVRTSSPKHILQWQAVLDEEKPCALFCSPVGKEQPILLSEKVMDGTSCGYQGLDICANGRCQKVGCDGLLGSLAREDHCGVCNGNGKSCKIIKGDFNHTRGAGYVEVLVIPAGARRIKVVEEKPAHSYLALRDAGKQSINSDWKIEHSGAFNLAGTTVHYVRRGLWEKISAKGPTTAPLHLLVLLFQDQNYGLHYEYTIPSDPLPENQSSKAPEPLFMWTHTSWEDCDATCGGGERKTTVSCTKIMSKNISIVDNEKCKYLTKPEPQIRKCNEQPCQTRWMMTEWTPCSRTCGKGMQSRQVACTQQLSNGTLIRARERDCIGPKPASAQRCEGQDCMTVWEAGVWSECSVKCGKGIRHRTVRCTNPRKKCVLSTRPREAEDCEDYSKCYVWRMGDWSKCSITCGKGMQSRVIQCMHKITGRHGNECFSSEKPAAYRPCHLQPCNEKINVNTITSPRLAALTFKCLGDQWPVYCRVIREKNLCQDMRWYQRCCETCRDFYAQKLQQKS

SEQ ID NO: 351 - protein, 1207 aa, Homo Sapiens
MRLTHICCCCLLYQLGFLSNGIVSELQFAPDREEWEVVFPALWRREPVDPAGGSGGSADPGWVRGVGGGGSARAQAAGSSREVRSVAPVPLEEPVEGRSESRLRPPPPSEGEEDEELESQELPRGSSGAAALSPGAPASWQPPPPPQPPPSPPPAQHAEPDGDEVLLRIPAFSRDLYLLLRRDGRFLAPRFAVEQRPNPGPGPTGAASAPQPPAPPDAGCFYTGAVLRHPGSLASFSTCGGGLMGFIQLNEDFIFIEPLNDTMAITGHPHRVYRQKRSMEEKVTEKSALHSHYCGIISDKGRPRSRKIAESGRGKRYSYKLPQEYNIETVVVADPAMVSYHGADAARRFILTILNMVFNLFQHKSLSVQVNLRVIKLILLHETPPELYIGHHGEKMLESFCKWQHEEFGKKNDIHLEMSTNWGEDMTSVDAAILITRKDFCVHKDEPCDTVGIAYLSGMCSEKRKCIIAEDNGLNLAFTIAHEMGHNMGINHDNDHPSCADGLHIMSGEWIKGQNLGDVSWSRCSKEDLERFLRSKASNCLLQTNPQSVNSVMVPSKLPGMTYTADEQCQILFGPLASFCQEMQHVICTGLWCKVEGEKECRTKLDPPMDGTDCDLGKWCKAGECTSRTSAPEHLAGEWSLWSPCSRTCSAGISSRERKCPGLDSEARDCNGPRKQYRICENPPCPAGLPGFRDWQCQAYSVRTSSPKHILQWQAVLDEEKPCALFCSPVGKEQPILLSEKVMDGTSCGYQGLDICANGRCQKVGCDGLLGSLAREDHCGVCNGNGKSCKIIKGDFNHTRGAGYVEVLVIPAGARRIKVVEEKPAHSYLALRDAGKQSINSDWKIEHSGAFNLAGTTVHYVRRGLWEKISAKGPTTAPLHLLVLLFQDQNYGLHYEYTIPSDPLPENQSSKAPEPLFMWTHTSWEDCDATCGGGERKTTVSCTKIMSKNISIVDNEKCKYLTKPEPQIRKCNEQPCQTRWMMTEWTPCSRTCGKGMQSRQVACTQQLSNGTLIRARERDCIGPKPASAQRCEGQDCMTVWEAGVWSECSVKCGKGIRHRTVRCTNPRKKCVLSTRPREAEDCEDYSKCYVWRMGDWSKCSITCGKGMQSRVIQCMHKITGRHGNECFSSEKPAAYRPCHLQPCNEKINVNTITSPRLAALTFKCLGDQWPVYCRVIREKNLCQDMRWYQRCCETCRDFYAQKLQQKS

SEQ ID NO: 352 - protein, 145 aa, Homo Sapiens
  misc_feature (1)..(1): Xaa can be any naturally occurring amino acid
XDAGCFYTGAVLRHPGSLASFSTCGGGLMGFIQLNEDFIFIEPLNDTMAITGHPHRVYRQKRSMEEKVTEKSALHSHYCGIISDKGRPRSRKIAESGRGKRYSYKLPQEYNIETVVVADPAMVSYHGADAARRFILTILNMVGKL

SEQ ID NO: 353 - protein, 1211 aa, Homo Sapiens
MDPPAGAARRLLCPALLLLLLLLPPPLLPPPPPPANARLAAAADPPGGPLGHGAERILAVPVRTDAQGRLVSHVVSAATSRAGVRARRAAPVRTPSFPGGNEEEPGSHLFYNVTVFGRDLHLRLRPNARLVAPGATMEWQGEKGTTRVEPLLGSCLYVGDVAGLAEASSVALSNCDGLAGLIRMEEEEFFIEPLEKGLAAQEAEQGRVHVVYRRPPTSPPLGGPQALDTGASLDSLDSLSRALGVLEEHANSSRRRARRHAADDDYNIEVLLGVDDSVVQFHGKEHVQKYLLTLMNIVNEIYHDESLGAHINVVLVRIILLSYGKSMSLIEIGNPSQSLENVCRWAYLQQKPDTGHDEYHDHAIFLTRQDFGPSGMQGYAPVTGMCHPVRSCTLNHEDGFSSAFVVAHETGHVLGMEHDGQGNRCGDEVRLGSIMAPLVQAAFHRFHWSRCSQQELSRYLHSYDCLLDDPFAHDWPALPQLPGLHYSMNEQCRFDFGLGYMMCTAFRTFDPCKQLWCSHPDNPYFCKTKKGPPLDGTMCAPGKHCFKGHCIWLTPDILKRDGSWGAWSPFGSCSRTCGTGVKFRTRQCDNPHPANGGRTCSGLAYDFQLCSRQDCPDSLADFREEQCRQWDLYFEHGDAQHHWLPHEHRDAKERCHLYCESRETGEVVSMKRMVHDGTRCSYKDAFSLCVRGDCRKVGCDGVIGSSKQEDKCGVCGGDNSHCKVVKGTFTRSPKKHGYIKMFEIPAGARHLLIQEVDATSHHLAVKNLETGKFILNEENDVDASSKTFIAMGVEWEYRDEDGRETLQTMGPLHGTITVLVIPVGDTRVSLTYKYMIHEDSLNVDDNNVLEEDSVVYEWALKKWSPCSKPCGGGSQFTKYGCRRRLDHKMVHRGFCAALSKPKAIRRACNPQECSQPVWVTGEWEPCSQTCGRTGMQVRSVRCIQPLHDNTTRSVHAKHCNDARPESRRACSRELCPGRWRAGPWSQCSVTCGNGTQERPVLCRTADDSFGICQEERPETARTCRLGPCPRNISDPSKKSYVVQWLSRPDPDSPIRKISSKGHCQGDKSIFCRMEVLSRYCSIPGYNKLCCKSCNLYNNLTNVEGRIEPPPGKHNDIDVFMPTLPVPTVAMEVRPSPSTPLEVPLNASSTNATEDHPETNAVDEPYKIHGLEDEVQPPNLIPRRPSPYEKTRNQRIQELIDEMRKKEMLGKF

SEQ ID NO: 354 - protein, 566 aa, Homo Sapiens
MDPPAGAARRLLCPALLLLLLLLPPPLLPPPPPPANARLAAAADPPGGPLGHGAERILAVPVRTDAQGRLVSHVVSAATSRAGVRARRAAPVRTPSFPGGNEEEPGSHLFYNVTVFGRDLHLRLRPNARLVAPGATMEWQGEKGTTRVEPLLGSCLYVGDVAGLAEASSVALSNCDGLAGLIRMEEEEFFIEPLEKGLAAQEAEQGRVHVVYRRPPTSPPLGGPQALDTGASLDSLDSLSRALGVLEEHANSSRRRARRHAADDDYNIEVLLGVDDSVVQFHGKEHVQKYLLTLMNIVNEIYHDESLGAHINVVLVRIILLSYGKSMSLIEIGNPSQSLENVCRWAYLQQKPDTGHDEYHDHAIFLTRQDFGPSGMQGYAPVTGMCHPVRSCTLNHEDGFSSAFVVAHETGHVLGMEHDGQGNRCGDEVRLGSIMAPLVQAAFHRFHWSRCSQQELSRYLHSYDCLLDDPFAHDWPALPQLPGLHYSMNEQCRFDFGLGYMMCTAFRTFDPCKQLWCSHPDNPYFCKTKKGPPLDGTMCAPGKFRPGAVAHACYPSTLGGQGRWIA

SEQ ID NO: 355 - protein, 106 aa, Homo Sapiens
VTCGNGTQERPVLCRTADDSFGICQEERPETARTCRLGPCPRNISDPSKKSYVVQWLSRPDPDSPIRKISSSNRPVYNSASALQCMPCALWSLPWAPLLSVYGKLP

SEQ ID NO: 356 - protein, 1910 aa, Homo Sapiens
MWVAKWLTGLLYHLSLFITRSWEVDFHPRQEALVRTLTSYEVVIPERVNEFGEVFPQSHHFSRQKRSSEALEPMPFRTHYRFTAYGQLFQLNLTADASFLAAGYTEVHLGTPERGAWESDAGPSDLRHCFYRGQVNSQEDYKAVVSLCGGLTGTFKGQNGEYFLEPIMKADGNEYEDGHNKPHLIYRQDLNNSFLQTLKYCSVSESQIKETSLPFHTYSNMNEDLNVMKERVLGHTSKNVPLKDERRHSRKKRLISYPRYIEIMVTADAKVVSAHGSNLQNYILTLMSIVATIYKDPSIGNLIHIVVVKLVMIHREEEGPVINFDGATTLKNFCSWQQTQNDLDDVHPSHHDTAVLITREDICSSKEKCNMLGLSYLGTICDPLQSCFINEEKGLISAFTIAHELGHTLGVQHDDNPRCKEMKVTKYHVMAPALSFHMSPWSWSNCSRKYVTEFLDTGYGECLLDKPDEEIYNLPSELPGSRYDGNKQCELAFGPGSQMCPHINICMHLWCTSTEKLHKGCFTQHVPPADGTDCGPGMHCRHGLCVNKETETRPVNGEWGPWEPYSSCSRTCGGGIESATRRCNRPEPRNGGNYCVGRRMKFRSCNTDSCPKGTQDFREKQCSDFNGKHLDISGIPSNVRWLPRYSGIGTKDRCKLYCQVAGTNYFYLLKDMVEDGTPCGTETHDICVQGQCMAAGCDHVLNSSAKIDKCGVCGGDNSSCKTITGVFNSSHYGYNVVVKIPAGATNVDIRQYSYSGQPDDSYLALSDAEGNFLFNGNFLLSTSKKEINVQGTRTVIEYSGSNNAVERINSTNRQEKELILQVLCVGNLYNPDVHYSFNIPLEERSDMFTWDPYGPWEGCTKMCQGLQRRNITCIHKSDHSVVSDKECDHLPLPSFVTQSCNTDCELRWHVIGKSECSSQCGQGYRTLDIHCMKYSIHEGQTVQVDDHYCGDQLKPPTQELCHGNCVFTRWHYSEWSQCSRSCGGGERSRESYCMNNFGHRLADNECQELSRVTRENCNEFSCPSWAASEWSECLVTCGKGTKQRQVWCQLNVDHLSDGFCNSSTKPESLSPCELHTCASWQVGPWGPCTTTCGHGYQMRDVKCVNELASAVLEDTECHEASRPSDRQSCVLTPCSFISKLETALLPTVLIKKMAQWRHGSWTPCSVSCGRGTQARYVSCRDALDRIADESYCAHLPRPAEIWDCFTPCGEWQAGDWSPCSASCGHGKTTRQVLCMNYHQPIDENYCDPEVRPLMEQECSLAACPPAHSHFPSSPVQPSYYLSTNLPLTQKLEDNENQVVHPSVRGNQWRTGPWGSCSSSCSGGLQHRAVVCQDENGQSASYCDAASKPPELQQCGPGPCPQWNYGNWGECSQTCGGGIKSRLVICQFPNGQILEDHNCEIVNKPPSVIQCHMHACPADVSWHQEPWTSCSASCGKGRKYREVFCIDQFQRKLEDTNCSQVQKPPTHKACRSVRCPSWKANSWNECSVTCGSGVQQRDVYCRLKGVGQVVEEMCDQSTRPCSQRRCWSQDCVQHKGMERGRLNCSTSCERKDSHQRMECTDNQIRQVNEIVYNSSTISLTSKNCRNPPCNYIVVTADSSQCANNCGFSYRQRITYCTEIPSTKKHKLHRLRPIVYQECPVVPSSQVYQCINSCLHLATWKVGKWSKCSVTCGIGIMKRQVKCITKHGLSSDLCLNHLKPGAQKKCYANDCKSFTTCKEIQVKNHIRKDGDYYLNIKGRIIKIYCADMYLENPKEYLTLVQGEENFSEVYGFRLKNPYQCPFNGSRREDCECDNGHLAAGYTVFSKIRIDLTSMQIKTTDLLFSKTIFGNAVPFATAGDCYSAFRCPQGQFSINLSGTGMKISSTAKWLTQGSYTSVSIRRSEDGTRFFGKCGGYCGKCLPHMTTGLPIQVI

SEQ ID NO: 357 - protein, 1504 aa, Homo Sapiens
MWVAKWLTGLLYHLSLFITRSWEVDFHPRQEALVRTLTSYEVVIPERVNEFGEVFPQSHHFSRQKRSSEALEPMPFRTHYRFTAYGQLFQLNLTADASFLAAGYTEVHLGTPERGAWESDAGPSDLRHCFYRGQVNSQEDYKAVVSLCGGLTGTFKGQNGEYFLEPIMKADGNEYEDGHNKPHLIYRQDLNNSFLQTLKYCSVSESQIKETSLPFHTYSNMNEDLNVMKERVLGHTSKNVPLKDERRHSRKKRLISYPRYIEIMVTADAKVVSAHGSNLQNYILTLMSIVATIYKDPSIGNLIHIVVVKLVMIHREEEGPVINFDGATTLKNFCSWQQTQNDLDDVHPSHHDTAVLITREDICSSKEKCNMLGLSYLGTICDPLQSCFINEEKGLISAFTIAHELGHTLGVQHDDNPRCKEMKVTKYHVMAPALSFHMSPWSWSNCSRKYVTEFLDTGYGECLLDKPDEEIYNLPSELPGSRYDGNKQCELAFGPGSQMCPHINICMHLWCTSTEKLHKGCFTQHVPPADGTDCGPGMHCRHGLCVNKETETRPVNGEWGPWEPYSSCSRTCGGGIESATRRCNRPEPRNGGNYCVGRRMKFRSCNTDSCPKGTQDFREKQCSDFNGKHLDISGIPSNVRWLPRYSGIGTKDRCKLYCQVAGTNYFYLLKDMVEDGTPCGTETHDICVQGQCMAAGCDHVLNSSAKIDKCGVCGGDNSSCKTITGVFNSSHYGYNVVVKIPAGATNVDIRQYSYSGQPDDSYLALSDAEGNFLFNGNFLLSTSKKEINVQGTRTVIEYSGSNNAVERINSTNRQEKELILQVLCVGNLYNPDVHYSFNIPLEERSDMFTWDPYGPWEGCTKMCQGLQRRNITCIHKSDHSVVSDKECDHLPLPSFVTQSCNTDCELRWHVIGKSECSSQCGQGYRTLDIHCMKYSIHEGQTVQVDDHYCGDQLKPPTQELCHGNCVFTRWHYSEWSQCSRSCGGGERSRESYCMNNFGHRLADNECQELSRVTRENCNEFSCPSWAASEWSECLVTCGKGTKQRQVWCQLNVDHLSDGFCNSSTKPESLSPCELHTCASWQVGPWGPCTTTCGHGYQMRDVKCVNELASAVLEDTECHEASRPSDRQSCVLTPCSFISKLETALLPTVLIKKMAQWRHGSWTPCSVSCGRGTQARYVSCRDALDRIADESYCAHLPRPAEIWDCFTPCGEWQAGDWSPCSASCGHGKTTRQVLCMNYHQPIDENYCDPEVRPLMEQECSLAACPPAHSHFPSSPVQPSYYLSTNLPLTQKLEDNENQVVHPSVRGNQWRTGPWGSCSSSCSGGLQHRAVVCQDENGQSASYCDAASKPPELQQCGPGPCPQWNYGNWGECSQTCGGGIKSRLVICQFPNGQILEDHNCEIVNKPPSVIQCHMHACPADVSWHQEPWTSEDLKVKLLPQRTIILWELMKNIFCHGKHSHMYLINVVTDHLLYPRHCDPETIETYFLSLWSLQFTWGDLKYYKNSL

SEQ ID NO: 358 - protein, 1504 aa, Homo Sapiens [sequence omitted]

SEQ ID NO: 359 - protein, 634 aa, Homo Sapiens
YSFNIPLEERSDMFTWDPYGPWEGCTKMCQGLQRRNITCIHKSDHSVVSDKECDHLPLPSFVTQSCNTDCELRWHVIGKSECSSQCGQGYRTLDIHCMKYSIHEGQTVQVDDHYCGDQLKPPTQELCHGNCVFTRWHYSEWSQCSRSCGGGERSRESYCMNNFGHRLADNECQELSRVTRENCNEFSCPSWAASEWSECLVTCGKGTKQRQVWCQLNVDHLSDGFCNSSTKPESLSPCELHTCASWQVGPWGPCTTTCGHGYQMRDVKCVNELASAVLEDTECHEASRPSDRQCSVSCGRGTQARYVSCRDALDRIADESYCAHLPRPAEIWDCFTPCGEWQAGDWSPCSASCGHGKTTRQVLCMNYHQPIDENYCDPEVRPLMEQECSLAACPPAHSHFPSSPVQPSYYLSTNLPLTQKLEDNENQVVHPSVRGNQWRTGPWGSCSSSCSGGLQHRAVVCQDENGQSASYCDAASKPPELQQCGPGPCPQWNYGNWGECSQTCGGGIKSRLVICQFPNGQILEDHNCEIVNKPPSVIQCHMHACPADVSWHQEPWTSEDLKVKLLPQRTIILWELMKNIFCHGKHSHMYLINVVTDHLLYPRHCDPETIETYFLSLWSLQFTWGDLKYYKNSL

SEQ ID NO: 360 - protein, 1205 aa, Homo Sapiens
MVLLSLWLIAAALVEVRTSADGQAGNEEMVQIDLPIKRYREYELVTPVSTNLEGRYLSHTLSASHKKRSARDVSSNPEQLFFNITAFGKDFHLRLKPNTQLVAPGAVVEWHETSLVPGNITDPINNHQPGSATYRIRRTEPLQTNCAYVGDIVDIPGTSVAISNCDGLAGMIKSDNEEYFIEPLERGKQMEEEKGRIHVVYKRSAVEQAPIDMSKDFHYRESDLEGLDDLGTVYGNIHQQLNETMRRRRHAGENDYNIEVLLGVDDSVVRFHGKEHVQNYLLTLMNIVNEIYHDESLGVHINVVLVRMIMLGYAKSISLIERGNPSRSLENVCRWASQQQRSDLNHSEHHDHAIFLTRQDFGPAGMQGYAPVTGMCHPVRSCTLNHEDGFSSAFVVAHETGHVLGMEHDGQGNRCGDETAMGSVMAPLVQAAFHRYHWSRCSGQELKRYIHSYDCLLDDPFDHDWPKLPELPGINYSMDEQCRFDFGVGYKMCTAFRTFDPCKQLWCSHPDNPYFCKTKKGPPLDGTECAAGKWCYKGHCMWKNANQQKQDGNWGSWTKFGSCSRTCGTGVRFRTRQCNNPMPINGGQDCPGVNFEYQLCNTEECQKHFEDFRAQQCQQRNSHFEYQNTKHHWLPYEHPDPKKRCHLYCQSKETGDVAYMKQLVHDGTHCSYKDPYSICVRGECVKVGCDKEIGSNKVEDKCGVCGGDNSHCRTVKGTFTRTPRKLGYLKMFDIPPGARHVLIQEDEASPHILAIKNQATGHYILNGKGEEAKSRTFIDLGVEWDYNIEDDIESLHTDGPLHDPVIVLIIPQENDTRSSLTYKYIIHEDSVPTINSNNVIQEELDTFEWALKSWSQCSKPCGGGFQYTKYGCRRKSDNKMVHRSFCEANKKPKPIRRMCNIQECTHPLWVAEEWEHCTKTCGSSGYQLRTVRCLQPLLDGTNRSVHSKYCMGDRPESRRPCNRVPCPAQWKTGPWSECSVTCGEGTEVRQVLCRAGDHCDGEKPESVRACQLPPCNDEPCLGDKSIFCQMEVLARYCSIPGYNKLCCESCSKRSSTLPPPYLLEAAETHDDVISNPSDLPRSLVMPTSLVPYHSETPAKKMSLSSISSVGGPNAYAAFRPNSKPDGANLRQRSAQQAGSKTVRLVTVPSSPPTKRVHLSSASQMAAASFFAASDSIGASSQARTSKKDGKIIDNRRPTRSSTLER

SEQ ID NO: 361 - protein, 1205 aa, Homo Sapiens; identical to SEQ ID NO: 360

SEQ ID NO: 362 - protein, 930 aa, Homo Sapiens
MLLGWASLLLCAFRLPLAAVGPAATPAQDKAGQPPTAAAAAQPRRRQGEEVQERAEPPGHPHPLAQRRRSKGLVQNIDQLYSGGGKVGYLVYAGGRRFLLDLERDGSVGIAGFVPAGGGTSAPWRHRSHCFYRGTVDGSPRSLAVFDLCGGLDGFFAVKHARYTLKPLLRGPWAEEEKGRVYGDGSARILHVYTREGFSFEALPPRASCETPASTPEAHEHAPAHSNPSGRAALASQLLDQSALSPAGGSGPQTWWRRRRRSISRARQVELLLVADASMARLYGRGLQHYLLTLASIANRLYSHASIENHIRLAVVKVVVLGDKDKSLEVSKNAATTLKNFCKWQHQHNQLGDDHEEHYDAAILFTREDLCGHHSCDTLGMADVGTICSPERSCAVIEDDGLHAAFTVAHEIGHLLGLSHDDSKFCEETFGSTEDKRLMSSILTSIDASKPWSKCTSATITEFLDDGHGNCLLDLPRKQILGPEELPGQTYDATQQCNLTFGPEYSVCPGMDVCARLWCAVVRQGQMVCLTKKLPAVEGTPCGKGRICLQGKCVDKTKKKYYSTSSHGNWGSWGSWGQCSRSCGGGVQFAYRHCNNPAPRNNGRYCTGKRAIYRSCSLMPCPPNGKSFRHEQCEAKNGYQSDAKGVKTFVEWVPKYAGVLPADVCKLTCRAKGTGYYVVFSPKVTDGTECRLYSNSVCVRGKCVRTGCDGIIGSKLQYDKCGVCGGDNSSCTKIVGTFNKKSKGYTDVVRIPEGATHIKVRQFKAKDQTRFTAYLALKKKNGEYLINGKYMISTSETIIDINGTVMNYSGWSHRDDFLHGMGYSATKEILIVQILATDPTKPLDVRYSFFVPKKSTPKVNSVTSHGSNKVGSHTSQPQWVTGPWLACSRTCDTGWHTRTVQCQDGNRKLAKGCPLSQRPSAFKQCLLKKC

SEQ ID NO: 363 - protein, 292 aa, Homo Sapiens
MEILWKTLTWILSLIMASSEFHSDHRLSYSSQEEFLTYLEHYQLTIPIRVDQNGAFLSFTVKNDKHSRRRRSMDPIDPQQAVSKLFFKLSAYGKHFHLNLTLNTDFVSKHFTVEYWGKDGPQWKHDFLDNCHYTGYLQDQRSTTKVALSNCVGLHGVIATEDEEYFIEPLKNTTEDSKHFSYENGHPHVIYKKSALQQRHLYDHSHCGVSDFTRSGKPWWLNDTSTVSYSLPINNTHIHHRQKRSVSIERFVETLVVADKMMVGYHGRKDIEHYILSVMNIVRLPNFTVIPA

SEQ ID NO: 364 - protein, 1117 aa, Homo Sapiens
MEILWKTLTWILSLIMASSEFHSDHRLSYSSQEEFLTYLEHYQLTIPIRVDQNGAFLSFTVKNDKHSRRRRSMDPIDPQQAVSKLFFKLSAYGKHFHLNLTLNTDFVSKHFTVEYWGKDGPQWKHDFLDNCHYTGYLQDQRSTTKVALSNCVGLHGVIATEDEEYFIEPLKNTTEDSKHFSYENGHPHVIYKKSALQQRHLYDHSHCGVSDFTRSGKPWWLNDTSTVSYSLPINNTHIHHRQKRSVSIERFVETLVVADKMMVGYHGRKDIEHYILSVMNIVAKLYRDSSLGNVVNIIVARLIVLTEDQPNLEINHHADKSLDSFCKWQKSILSHQSDGNTIPENGIAHHDNAVLITRYDICTYKNKPCGTLGLASVAGMCEPERSCSINEDIGLGSAFTIAHEIGHNFGMNHDGIGNSCGTKGHEAAKLMAAHITANTNPFSWSACSRDYITSFLDSGRGTCLDNEPPKRDFLYPAVAPGQVYDADEQCRFQYGATSRQCKYGEVCRELWCLSKSNRCVTNSIPAAEGTLCQTGNIEKGWCYQGDCVPFGTWPQSIDGGWGPWSLWGECSRTCGGGVSSSLRHCDSPAPSGGGKYCLGERKRYRSCNTDPCPLGSRDFREKQCADFDNMPFRGKYYNWKPYTGGGVKPCALNCLAEGYNFYTERAPAVIDGTQCNADSLDICINGECKHVGCDNILGSDAREDRCRVCGGDGSTCDAIEGFFNDSLPRGGYMEVVQIPRGSVHIEVREVAMSKNYIALKSEGDDYYINGAWTIDWPRKFDVAGTAFHYKRPTDEPESLEALGPTSENLIVMVLLQEQNLGIRYKFNVPITRTGSGDNEVGFTWNHQPWSECSATCAGGVQRQEVVCKRLDDNSIVQNNYCDPDSKPPENQRACNTEPCPPEWFIGDWLECSKTCDGGMRTRAVLCIRKIGPSEEETLDYSGCLTHRPVEKEPCNNQSCPPQWVALDWSECTPKCGPGFKHRIVLCKSSDLSKTFPAAQCPEESKPPVRIRCSLGRCPPPRWVTGDWGQCSAQCGLGQQMRTVQCLSYTGQASSDCLETVRPPSMQQCESKCDSTPISNTEECKDVNKVAYCPLVLKFKFCSRAYFRQMCCKTCQGH

SEQ ID NO: 365 - protein, 1686 aa, Homo Sapiens
MPGGPSPRSPAPLLRPLLLLLCALAPGAPGPAPGRATEGRAALDIVHPVRVDAGGSFLSYELWPRALRKRDVSVRRDAPAFYELQYRGRELRFNLTANQHLLAPGFVSETRRRGGLGRAHIRAHTPACHLLGEVQDPELEGGLAAISACDGLKGVFQLSNEDYFIEPLDSAPARPGHAQPHVVYKRQAPERLAQRGDSSAPSTCGVQVYPELESRRERWEQRQQWRRPRLRRLHQRSVSKEKWVETLVVADAKMVEYHGQPQVESYVLTIMNMVAGLFHDPSIGNPIHITIVRLVLLEDEEEDLKITHHADNTLKSFCKWQKSINMKGDAHPLHHDTAILLTRKDLCAAMNRPCETLGLSHVAGMCQPHRSCSINEDTGLPLAFTVAHELGHSFGIQHDGSGNDCEPVGKRPFIMSPQLLYDAAPLTWSRCSRQYITRFLDRGWGLCLDDPPAKDIIDFPSVPPGVLYDVSHQCRLQYGAYSAFCEDMDNVCHTLWCSVGTTCHSKLDAAVDGTRCGENKWCLSGECVPVGFRPEAVDGGWSGWSAWSICSRSCGMGVQSAERQCTQPTPKYKGRYCVGERKRFRLCNLQACPAGRPSFRHVQCSHFDAMLYKGQLHTWVPVVNDVNPCELHCRPANEYFAEKLRDAVVDGTPCYQVRASRDLCINGICKNVGCDFEIDSGAMEDRCGVCHGNGSTCHTVSGTFEEAEGLGYVDVGLIPAGAREIRIQEVAEAANFLALRSEDPEKYFLNGGWTIQWNGDYQVAGTTFTYARRGNWENLTSPGPTKEPVWIQLLFQESNPGVHYEYTIHREAGGHDEVPPPVFSWHYGPWTKCTVTCGRGVQRQNVYCLERQAGPVDEEHCDPLGRPDDQQRKCSEQPCPARWWAGEWQLCSSSCGPGGLSRRAVLCIRSVGLDEQSALEPPACEHLPRPPTETPCNRHVPCPATWAVGNWSQCSVTCGEGTQRRNVLCTNDTGVPCDEAQQPASEVTCSLPLCRWPLGTLGPEGSGSGSSSHELFNEADFIPHHLAPRPSPASSPKPGTMGNAIEEEAPELDLPGPVFVDDFYYDYNFINFHEDLSYGPSEEPDLDLAGTGDRTPPPHSHPAAPSTGSPVPATEPPAAKEEGVLGPWSPSPWPSQAGRSPPPPSEQTPGNPLINFLPEEDTPIGAPDLGLPSLSWPRVSTDGLQTPATPESQNDFPVGKDSQSQLPPPWRDRTNEVFKDDEEPKGRGAPHLPPRPSSTLPPLSPVGSTHSSPSPDVAELWTGGTVAWEPALEGGLGPVDSELWPTVGVASLLPPPIAPLPEMKVRDSSLEPGTPSFPTPGPGSWDLQTVAVWGTFLPTTLTGLGHMPEPALNPGPKGQPESLSPEVPLSSRLLSTPAWDSPANSHRVPETQPLAPSLAEAGPPADPLVVRNAGWQAGNWSECSTTCGLGAVWRPVRCSSGRDEDCAPAGRPQPARRCHLRPCATWHSGNWSKCSRSCGGGSSVRDVQCVDTRDLRPLRPFHCQPGPAKPPAHRPCGAQPCLSWYTSSWRECSEACGGGEQQRLVTCPEPGLCEEALRPNTTRPCNTHPCTQWVVGPWGQCSGPCGGGVQRRLVKCVNTQTGLPEEDSDQCGHEAWPESSRPCGTEDCEPVEPPRCERDRLSFGFCETLRLLGRCQLPTIRTQCCRSCSPPSHGAPSRGHQRVARR

SEQ ID NO: 366 - protein, 889 aa, Homo Sapiens
MLPAPAAPRWPPLLLLLLLLLPLARGAPARPAAGGQASELVVPTRLPGSAGELALHLSAFGKGFVLRLAPDDSFLAPEFKIERLGGSGRATGGERGLRGCFFSGTVNGEPESLAAVSLCRGLSGSFLLDGEEFTIQPQGAGGSLAQPHRLQRWGPAGARPLPRGPEWEVETGEGQRQERGDHQEDSEEESQEEEAEGASEPPPPLGATSRTKRFVSEARFVETLLVADASMAAFYGADLQNHILTLMSVAARIYKHPSIKNSINLMVVKVLIVEDEKWGPEVSDNGGLTLRNFCNWQRRFNQPSDRHPEHYDTAILLTRQNFCGQEGLCDTLGVADIGTICDPNKSCSVIEDEGLQAAHTLAHELGHVLSMPHDDSKPCTRLFGPMGKHHVMAPLFVHLNQTLPWSPCSAMYLTELLDGGHGDCLLDAPAAALPLPTGLPGRMALYQLDQQCRQIFGPDFRHCPNTSAQDVCAQLWCHTDGAEPLCHTKNGSLPWADGTPCGPGHLCSEGSCLPEEEVERPKPVADGGWAPWGPWGECSRTCGGGVQFSHRECKDPEPQNGGRYCLGRRAKYQSCHTEECPPDGKSFREQQCEKYNAYNYTDMDGNLLQWVPKYAGVSPRDRCKLFCRARGRSEFKVFEAKVIDGTLCGPETLAICVRGQCVKAGCDHVVDSPRKLDKCGVCGGKGNSCRKVSGSLTPTNYGYNDIVTIPAGATNIDVKQRSHPGVQNDGNYLALKTADGQYLLNGNLAISAIEQDILVKGTILKYSGSIATLERLQSFRPLPEPLTVQLLTVPGEVFPPKVKYTFFVPNDVDFSMQSSKERATTNIIQPLLHAQWVLGDWSECSSTCGAGWQRRTVECRDPSGQASATCNKALKPEDAKPCESQLCPL

SEQ ID NO: 367 - protein, 69 aa, Homo Sapiens
AKCPQGRFSINLYGTGLSLTESARWISQGNYAVSDIKKSPDGTRVVGKCGGYCGKCTPSSGTGLEVRVL

SEQ ID NO: 368 - protein, 1907 aa, Homo Sapiens
MQFVSWATLLTLLVRDLAEMGSPDAAAAVRKDRLHPRQVKLLETLSEYEIVSPIRVNALGEPFPTNVHFKRTRRSINSATDPWPAFASSSSSSTSSQAHYRLSAFGQQFLFNLTANAGFIAPLFTVTLLGTPGVNQTKFYSEEEAELKHCFYKGYVNTNSEHTAVISLCSGMLGTFRSHDGDYFIEPLQSMDEQEDEEEQNKPHIIYRRSAPQREPSTGRHACDTSEHKNRHSKDKKKTRARKWGERINLAGDVAALNSGLATEAFSAYGNKTDNTREKRTHRRTKRFLSYPRFVEVLVVADNRMVSYHGENLQHYILTLMSIDGPSISFNAQTTLKNFCQWQHSKNSPGGIHHDTAVLLTRQDICRAHDKCDTLGLAELGTICDPYRSCSISEDSGLSTAFTIAHELGHVFNMPHDDNNKCKEEGVKSPQHVMAPTLNFYTNPWMWSKCSRKYITEFLDTGYGECLLNEPESRPYPLPVQLPGILYNVNKQCELIFGPGSQVCPYMMQCRRLWCNNVNGVHKGCRTQHTPWADGTECEPGKHCKYGFCVPKEMDVPVTDGSWGSWSPFGTCSRTCGGGIKTAIRECNRPEPKNGGKYCVGRRMKFKSCNTEPCLKQKRDFRDEQCAHFDGKHFNINGLLPNVRWVPKYSGILMKDRCKLFCRVAGNTAYYQLRDRVIDGTPCGQDTNDICVQGLCRQAGCDHVLNSKARRDKCGVCGGDNSSCKTVAGTFNTVHYGYNTVVRIPAGATNIDVRQHSFSGETDDDNYLALSSSKGEFLLNGNFVVTMAKREIRIGNAVVEYSGSETAVERINSTDRIEQELLLQVLSVGKLYNPDVRYSFNIPIEDKPQQFYWNSHGPWQACSKPCQGERKRKLVCTRESDQLTVSDQRCDRLPQPGHITEPCGTDCDLRWHVASRSECSAQCGLGYRTLDIYCAKYSRLDGKTEKVDDGFCSSHPKPSNREKCSGECNTGGWRYSAWTECSKSCDGGTQRRRAICVNTRNDVLDDSKCTHQEKVTIQRCSEFPCPQWKSGDWSECLVTCGKGHKHRQVWCQFGEDRLNDRMCDPETKPTSMQTCQQPECASWQAGPWGQCSVTCGQGYQLRAVKCIIGTYMSVVDDNDCNAATRPTDTQDCELPSCHPPPAAPETRRSTYSAPRTQWRFGSWTPCSATCGKGTRMRYVSCRDENGSVADESACATLPRPVAKEECSVTPCGQWKALDWSSCSVTCGQGRATRQVMCVNYSDHVIDRSECDQDYIPETDQDCSMSPCPQRTPDSGLAQHPFQNEDYRPRSASPSRTHVLGGNQWRTGPWGACSSTCAGGSQRRVVVCQDENGYTANDCVERIKPDEQRACESGPCPQWAYGNWGECTKLCGGGIRTRLVVCQRSNGERFPDLSCEILDKPPDREQCNTHACPHDAAWSTGPWSSCSVSCGRGHKQRNVYCMAKDGSHLESDYCKHLAKPHGHRKCRGGRCPKWKAGAWSQCSVSCGRGVQQRHVGCQIGTHKIARETECNPYTRPESERDCQGPRCPLYTWRAEEWQECTKTCGEGSRYRKVVCVDDNKNEVHGARCDVSKRPVDRESCSLQPCEYVWITGEWSECSVTCGKGYKQRLVSCSEIYTGKENYEYSYQTTINCPGTQPPSVHPCYLRDCPVSATWRVGNWGSCSVSCGVGVMQRSVQCLTNEDQPSHLCHTDLKPEERKTCRNVYNCELPQNCKEVKRLKGASEDGEYFLMIRGKLLKIFCAGMHSDHPKEYVTLVHGDSENFSEVYGHRLHNPTECPYNGSRRDDCQCRKDYTAAGFSSFQKIRIDLTSMQIITTDLQFARTSEGHPVPFATAGDCYSAAKCPQGRFSINLYGTGLSLTESARWISQGNYAVSDIKKSPDGTRVVGKCGGYCGKCTPSSGTGLEVRVL

SEQ ID NO: 369 - protein, 1935 aa, Homo Sapiens
MQFVSWATLLTLLVRDLAEMGSPDAAAAVRKDRLHPRQVKLLETLSEYEIVSPIRVNALGEPFPTNVHFKRTRRSINSATDPWPAFASSSSSSTSSQAHYRLSAFGQQFLFNLTANAGFIAPLFTVTLLGTPGVNQTKFYSEEEAELKHCFYKGYVNTNSEHTAVISLCSGMLGTFRSHDGDYFIEPLQSMDEQEDEEEQNKPHIIYRRSAPQREPSTGRHACDTSEHKNRHSKDKKKTRARKWGERINLAGDVAALNSGLATEAFSAYGNKTDNTREKRTHRRTKRFLSYPRFVEVLVVADNRMVSYHGENLQHYILTLMSIVASIYKDPSIGNLINIVIVNLIVIHNEQDGPSISFNAQTTLKNFCQWQHSKNSPGGIHHDTAVLLTRQDICRAHDKCDTLGLAELGTICDPYRSCSISEDSGLSTAFTIAHELGHVFNMPHDDNNKCKEEGVKSPQHVMAPTLNFYTNPWMWSKCSRKYITEFLDTGYGECLLNEPESRPYPLPVQLPGILYNVNKQCELIFGPGSQVCPYMMQCRRLWCNNVNGVHKGCRTQHTPWADGTECEPGKHCKYGFCVPKEMDVPVTDGSWGSWSPFGTCSRTCGGGIKTAIRECNRPEPKNGGKYCVGRRMKFKSCNTEPCLKQKRDFRDEQCAHFDGKHFNINGLLPNVRWVPKYSGILMKDRCKLFCRVAGNTAYYQLRDRVIDGTPCGQDTNDICVQGLCRQAGCDHVLNSKARRDKCGVCGGDNSSCKTVAGTFNTVHYGYNTVVRIPAGATNIDVRQHSFSGETDDDNYLALSSSKGEFLLNGNFVVTMAKREIRIGNAVVEYSGSETAVERINSTDRIEQELLLQVLSVGKLYNPDVRYSFNIPIEDKPQQFYWNSHGPWQACSKPCQGERKRKLVCTRESDQLTVSDQRCDRLPQPGHITEPCGTDCDLRWHVASRSECSAQCGLGYRTLDIYCAKYSRLDGKTEKVDDGFCSSHPKPSNREKCSGECNTGGWRYSAWTECSKSCDGGTQRRRAICVNTRNDVLDDSKCTHQEKVTIQRCSEFPCPQWKSGDWSECLVTCGKGHKHRQVWCQFGEDRLNDRMCDPETKPTSMQTCQQPECASWQAGPWGQCSVTCGQGYQLRAVKCIIGTYMSVVDDNDCNAATRPTDTQDCELPSCHPPPAAPETRRSTYSAPRTQWRFGSWTPCSATCGKGTRMRYVSCRDENGSVADESACATLPRPVAKEECSVTPCGQWKALDWSSCSVTCGQGRATRQVMCVNYSDHVIDRSECDQDYIPETDQDCSMSPCPQRTPDSGLAQHPFQNEDYRPRSASPSRTHVLGGNQWRTGPWGACSSTCAGGSQRRVVVCQDENGYTANDCVERIKPDEQRACESGPCPQWAYGNWGECTKLCGGGIRTRLVVCQRSNGERFPDLSCEILDKPPDREQCNTHACPHDAAWSTGPWSSCSVSCGRGHKQRNVYCMAKDGSHLESDYCKHLAKPHGHRKCRGGRCPKWKAGAWSQCSVSCGRGVQQRHVGCQIGTHKIARETECNPYTRPESERDCQGPRCPLYTWRAEEWQECTKTCGEGSRYRKVVCVDDNKNEVHGARCDVSKRPVDRESCSLQPCEYVWITGEWSECSVTCGKGYKQRLVSCSEIYTGKENYEYSYQTTINCPGTQPPSVHPCYLRDCPVSATWRVGNWGSCSVSCGVGVMQRSVQCLTNEDQPSHLCHTDLKPEERKTCRNVYNCELPQNCKEVKRLKGASEDGEYFLMIRGKLLKIFCAGMHSDHPKEYVTLVHGDSENFSEVYGHRLHNPTECPYNGSRRDDCQCRKDYTAAGFSSFQKIRIDLTSMQIITTDLQFARTSEGHPVPFATAGDCYSAAKCPQGRFSINLYGTGLSLTESARWISQGNYAVSDIKKSPDGTRVVGKCGGYCGKCTPSSGTGLEVRVL

SEQ ID NO: 370 - protein, 488 aa, Homo Sapiens
MQFVSWATLLTLLVRDLAEMGSPDAAAAVRKDRLHPRQVKLLETLSEYEIVSPIRVNALGEPFPTNVHFKRTRRSINSATDPWPAFASSSSSSTSSQAHYRLSAFGQQFLFNLTANAGFIAPLFTVTLLGTPGVNQTKFYSEEEAELKHCFYKGYVNTNSEHTAVISLCSGMLGTFRSHDGDYFIEPLQSMDEQEDEEEQNKPHIIYRRSAPQREPSTGRHACDTSEHKNRHSKDKKKTRARKWGERINLAGDVAALNSGLATEAFSAYGNKTDNTREKRTHRRTKRFLSYPRFVEVLVVADNRMVSYHGENLQHYILTLMSIVASIYKDPSIGNLINIVIVNLIVIHNEQDGPSISFNAQTTLKNFCQWQHSKNSPGGIHHDTAVLLTRQDICRAHDKCDTLGLAELGTICDPYRSCSISEDSGLSTAFTIAHELGHVFNMPHDDNNKCKEEGVKSPQHVMAPTLNFYTNPWMWSKCSRKYITEFLE

SEQ ID NO: 371 - protein, 991 aa, Homo Sapiens
  misc_feature (1)..(1): Xaa can be any naturally occurring amino acid
XECSAQCGLGYRTLDIYCAKYSRLDGKTEKVDDGFCSSHPKPSNREKCSGECNTGGWRYSAWTECSKSCDGGTQRRRAICVNTRNDVLDDSKCTHQEKVTIQRCSEFPCPQWKSGDWSECLVTCGKGHKHRQVWCQFGEDRLNDRMCDPETKPTSMQTCQQPECASWQAGPWGQCSVTCGQGYQLRAVKCIIGTYMSVVDDNDCNAATRPTDTQDCELPSCHPPPAAPETRRSTYSAPRTQWRFGSWTPCSATCGKGTRMRYVSCRDENGSVADESACATLPRPVAKEECSVTPCGQWKALDWSSCSVTCGQGRATRQVMCVNYSDHVIDRSECDQDYIPETDQDCSMSPCPQRTPDSGLAQHPFQNEDYRPRSASPSRTHVLGGNQWRTGPWGACSSTCAGGSQRRVVVCQDENGYTANDCVERIKPDEQRACESGPCPQWAYGNWGECTKLCGGGIRTRLVVCQRSNGERFPDLSCEILDKPPDREQCNTHACPHDAAWSTGPWSSCSVSCGRGHKQRNVYCMAKDGSHLESDYCKHLAKPHGHRKCRGGRCPKWKAGAWSQCSVSCGRGVQQRHVGCQIGTHKIARETECNPYTRPESERDCQGPRCPLYTWRAEEWQECTKTCGEGSRYRKVVCVDDNKNEVHGARCDVSKRPVDRESCSLQPCEYVWITGEWSECSVTCGKGYKQRLVSCSEIYTGKENYEYSYQTTINCPGTQPPSVHPCYLRDCPVSATWRVGNWGSCSVSCGVGVMQRSVQCLTNEDQPSHLCHTDLKPEERKTCRNVYNCELPQNCKEVKRLKGASEDGEYFLMIRGKLLKIFCAGMHSDHPKEYVTLVHGDSENFSEVYGHRLHNPTECPYNGSRRDDCQCRKDYTAAGFSSFQKIRIDLTSMQIITTDLQFARTSEGHPVPFATAGDCYSAAKCPQGRFSINLYGTGLSLTESARWISQGNYAVSDIKKSPDGTRVVGKCGGYCGKCTPSSGTGLEVRVL

SEQ ID NO: 372 - protein, 127 aa, Homo Sapiens
MARLEAPQCPGFLARLLGGTWCLLCIAGQVCGDQSQGAVFLREFTLIRRESLHEDFLSDLLNSHKTEDSSSRTARSEEDRDGLWDAWGPWSECSRTCGGGASYSLRRCLSSKSCEGRNIRYRTCSNV

SEQ ID NO: 373 - protein, 219 aa, Homo Sapiens
MECCRRATPGTLLLFLAFLLLSSRTARSEEDRDGLWDAWGPWSECSRTCGGGASYSLRRCLSSKSCEGRNIRYRTCSNVDCPPEAGDFRAQQCSAHNDVKHHGQFYEWLPVSNDPDNPCSLKCQAKGTTLVVELAPKVLDGTRCYTESLDMCISGLCQIVGCDHQLGSTVKEDNCGVCNGDGSTCRLVRGQYKSQLSATKCKTHRDGRPLDLLTYPLLA

SEQ ID NO: 374 - protein, 683 aa, Homo Sapiens
MECCRRATPGTLLLFLAFLLLSSRTARSEEDRDGLWDAWGPWSECSRTCGGGASYSLRRCLSSKSCEGRNIRYRTCSNVDCPPEAGDFRAQQCSAHNDVKHHGQFYEWLPVSNDPDNPCSLKCQAKGTTLVVELAPKVLDGTRCYTESLDMCISGLCQIVGCDHQLGSTVKEDNCGVCNGDGSTCRLVRGQYKSQLSATKSDDTVVAIPYGSRHIRLVLKGPDHLYLETKTLQGTKGENSLSSTGTFLVDNSSVDFQKFPDKEILRMAGPLTADFIVKIRNSGSADSTVQFIFYQPIIHRWRETDFFPCSATCGGGYQLTSAECYDLRSNRVVADQYCHYYPENIKPKPKLQECNLDPCPASDGYKQIMPYDLYHPLPRWEATPWTACSSSCGGGIQSRAVSCVEEDIQGHVTSVEEWKCMYTPKMPIAQPCNIFDCPKWLAQEWSPCTVTCGQGLRYRVVLCIDHRGMHTGGCSPKTKPHIKEECIVPTPCYKPKEKLPVEAKLPWFKQAQELEEGAAVSEEPSFIPEAWSACTVTCGVGTQVRIVRCQVLLSFSQSVADLPIDECEGPKPASQRACYAGPCSGEIPEFNPDETDGLFGGLQDFDELYDWEYEGFTKCSESCGGGVQEAVVSCLNKQTREPAEENLCVTSRRPPQLLKSCNLDPCPARSSIDSAWNACNVLC

SEQ ID NO: 375 - protein, 525 aa, Homo Sapiens
MECCRRATPGTLLLFLAFLLLSSRTARSEEDRDGLWDAWGPWSECSRTCGGGASYSLRRCLSSKSCEGRNIRYRTCSNVDCPPEAGDFRAQQCSAHNDVKHHGQFYEWLPVSNDPDNPCSLKCQAKGTTLVVELAPKVLDGTRCYTESLDMCISGLCQIVGCDHQLGSTVKEDNCGVCNGDGSTCRLVRGQYKSQLSATKSDDTVVAIPYGSRHIRLVLKGPDHLYLETKTLQGTKGENSLSSTGTFLVDNSSVDFQKFPDKEILRMAGPLTADFIVKIRNSGSADSTVQFIFYQPIIHRWRETDFFPCSATCGGGYQLTSAECYDLRSNRVVADQYCHYYPENIKPKPKLQECNLDPCPASDGYKQIMPYDLYHPLPRWEATPWTACSSSCGGGIQSRAVSCVEEDIQGHVTSVEEWKCMYTPKMPIAQPCNIFDCPKWLAQEWSPCTVTCGQGLRYRVVLCIDHRGMHTGGCSPKTKPHIKEECIVPTPCYKPKEKLPVEAKLPWFKQAQELEEGAAVSEEPS

SEQ ID NO: 376 - protein, 1762 aa, Homo Sapiens
MECCRRATPGTLLLFLAFLLLSSRTARSEEDRDGLWDAWGPWSECSRTCGGGASYSLRRCLSSKSCEGRNIRYRTCSNVDCPPEAGDFRAQQCSAHNDVKHHGQFYEWLPVSNDPDNPCSLKCQAKGTTLVVELAPKVLDGTRCYTESLDMCISGLCQIVGCDHQLGSTVKEDNCGVCNGDGSTCRLVRGQYKSQLSATKSDDTVVAIPYGSRHIRLVLKGPDHLYLETKTLQGTKGENSLSSTGTFLVDNSSVDFQKFPDKEILRMAGPLTADFIVKIRNSGSADSTVQFIFYQPIIHRWRETDFFPCSATCGGGYQLTSAECYDLRSNRVVADQYCHYYPENIKPKPKLQECNLDPCPASDGYKQIMPYDLYHPLPRWEATPWTACSSSCGGGIQSRAVSCVEEDIQGHVTSVEEWKCMYTPKMPIAQPCNIFDCPKWLAQEWSPCTVTCGQGLRYRVVLCIDHRGMHTGGCSPKTKPHIKEECIVPTPCYKPKEKLPVEAKLPWFKQAQELEEGAAVSEEPSFIPEAWSACTVTCGVGTQVRIVRCQVLLSFSQSVADLPIDECEGPKPASQRACYAGPCSGEIPEFNPDETDGLFGGLQDFDELYDWEYEGFTKCSESCGGGVQEAVVSCLNKQTREPAEENLCVTSRRPPQLLKSCNLDPCPARWEIGKWSPCSLTCGVGLQTRDVFCSHLLSREMNETVILADELCRQPKPSTVQACNRFNCPPAWYPAQWQPCSRTCGGGVQKREVLCKQRMADGSFLELPETFCSASKPACQQACKKDDCPSEWLLSDWTECSTSCGEGTQTRSAICRKMLKTGLSTVVNSTLCPPLPFSSSIRPCMLATCARPGRPSTKHSPHIAAARKVYIQTRRQRKLHFVVGGFAYLLPKTAVVLRCPARRVRKPLITWEKDGQHLISSTHVTVAPFGYLKIHRLKPSDAGVYTCSAGPAREHFVIKLIGGNRKLVARPLSPRSEEEVLAGRKGGPKEALQTHKHQNGIFSNGSKAEKRGLAANPGSRYDDLVSRLLEQGGWPGELLASWEAQDSAERNTTSEEDPGAEQVLLHLPFTMVTEQRRLDDILGNLSQQPEELRDLYSKHLVAQLAQEIFRSHLEHQDTLLKPSERRTSPVTLSPHKHVSGFSSSLRTSSTGDAGGGSRRPHRKPTILRKISAAQQLSASEVVTHLGQTVALASGTLSVLLHCEAIGHPRPTISWARNGEEVQFSDRILLQPDDSLQILAPVEADVGFYTCNATNALGYDSVSIAVTLAGKPLVKTSRMTVINTEKPAVTVDIGSTIKTVQGVNVTINCQVAGVPEAEVTWFRNKSKLGSPHHLHEGSLLLTNVSSSDQGLYSCRAANLHGELTESTQLLILDPPQVPTQLEDIRALLAATGPNLPSVLTSPLGTQLVLDPGNSALLGCPIKGHPVPNITWFHGGQPIVTATGLTHHILAAGQILQVANLSGGSQGEFSCLAQNEAGVLMQKASLVIQDYWWSVDRLATCSASCGNRGVQQPRLRCLLNSTEVNPAHCAGKVRPAVQPIACNRRDCPSRWMVTSWSACTRSCGGGVQTRRVTCQKLKASGISTPVSNDMCTQVAKRPVDTQACNQQLCVEWAFSSWGQCNGPCIGPHLAVQHRQVFCQTRDGITLPSEQCSALPRPVSTQNCWSEACSVHWRVSLWTLCTATCGNYGFQSRRVECVHARTNKAVPEHLCSWGPRPANWQRCNITPCENMECRDTTRYCEKVKQLKLCQLSQFKSRCCGTCGKA

SEQ ID NO: 377 - protein, 439 aa, Homo Sapiens
MECCRRATPGTLLLFLAFLLLSSRTARSEEDRDGLWDAWGPWSECSRTCGGGASYSLRRCLSSKSCEGRNIRYRTCSNVDCPPEAGDFRAQQCSAHNDVKHHGQFYEWLPVSNDPDNPCSLKCQAKGTTLVVELAPKVLDGTRCYTESLDMCISGLCQIVGCDHQLGSTVKEDNCGVCNGDGSTCRLVRGQYKSQLSATKSDDTVVAIPYGSRHIRLVLKGPDHLYLETKTLQGTKGENSLSSTGTFLVDNSSVDFQKFPDKEILRMAGPLTADFIVKIRNSGSADSTVQFIFYQPIIHRWRETDFFPCSATCGGGYQLTSAECYDLRSNRVVADQYCHYYPENIKPKPKLQECNLDPCPARWEATPWTACSSSCGGGIQSRAVSCVEEDIQGHVTSVEEWKCMYTPKMPIAQPCNIFDCPKWLAQEWSPVTVPSFFVH

SEQ ID NO: 378 - protein, 185 aa, Homo Sapiens
MECCRRATPGTLLLFLAFLLLSSRTARSEEDRDGLWDAWGPWSECSRTCGGGASYSLRRCLSSKSCEGRNIRYRTCSNVDCPPEAGDFRAQQCSAHNDVKHHGQFYEWLPVSNDPDNPCSLKCQAKGTTLVVELAPKVLDGTRCYTESLDMCISGLCQVSADLFSFNLSRGFQCLCVNGLHSLTL

SEQ ID NO: 379 - protein, 258 aa, Homo Sapiens
MSGVFCFFFFFLGVPEAEVTWFRNKSKLGSPHHLHEGSLLLTNVSSSDQGLYSCRAANLHGELTESTQLLILDPPQVPTQLEDIRALLAATGPNLPSVLTSPLGTQLVLDPGNSALLGCPIKGHPVPNITWFHGGQPIVTATGLTHHILAAGQILQVANLSGGSQGEFSCLAQNEAGVLMQKASLVIQDYWWSVDRLATCSASCGNRGVQQPRLRCLLNSTEVNPAHCAGKVRPAVQPIACNRRDCPSRAMGLASGLT

SEQ ID NO: 380 - protein, 463 aa, Homo Sapiens
MSGVFCFFFFFLGVPEAEVTWFRNKSKLGSPHHLHEGSLLLTNVSSSDQGLYSCRAANLHGELTESTQLLILDPPQVPTQLEDIRALLAATGPNLPSVLTSPLGTQLVLDPGNSALLGCPIKGHPVPNITWFHGGQPIVTATGLTHHILAAGQILQVANLSGGSQGEFSCLAQNEAGVLMQKASLVIQDYWWSVDRLATCSASCGNRGVQQPRLRCLLNSTEVNPAHCAGKVRPAVQPIACNRRDCPSRWMVTSWSACTRSCGGGVQTRRVTCQKLKASGISTPVSNDMCTQVAKRPVDTQACNQQLCVEWAFSSWGQCNGPCIGPHLAVQHRQVFCQTRDGITLPSEQCSALPRPVSTQNCWSEACSVHWRVSLWTLCTATCGNYGFQSRRVECVHARTNKAVPEHLCSWGPRPANWQRCNITPCENMECRDTTRYCEKVKQLKLCQLSQFKSRCCGTCGKA

SEQ ID NO: 381 - protein, 275 aa, Homo Sapiens
MSGVFCFFFFFLGVPEAEVTWFRNKSKLGSPHHLHEGSLLLTNVSSSDQGLYSCRAANLHGELTESTQLLILDPPQVPTQLEDIRALLAATGPNLPSVLTSPLGTQLVLDPGNSALLGCPIKGHPVPNITWFHGGQPIVTATGLTHHILAAGQILQVANLSGGSQGEFSCLAQNEAGVLMQKASLVIQVQWALHRASPSCATQTSLLPDTGWHHLTIRAVQCSSEACEHPELLVRGLQCTLESQPVDPVHSYLWQLRLPVPACGVCACPHQQGSA

SEQ ID NO: 382 - protein, 150 aa, Homo Sapiens
TSPLGTQLVLDPGNSALLGCPIKGHPVPNITWFHGGQPIVTATGLTHHILAAGQILQVANLSGGSQGEFSCLAQNEAGVLMQKASLVIQDYWWSVDRLATCSASCGNRGVQQPRLRCLLNSTEVNPAHCAGKVRPAVQPIACNRRDCPSR

SEQ ID NO: 383 - protein, 951 aa, Homo Sapiens
MDGRWQCSCWAWFLLVLAVVAGDTVSTGSTDNSPTSNSLEGGTDATAFWWGEWTKWTACSRSCGGGVTSQERHCLQQRRKSVPGPGNRTCTGTSKRYQLCRVQECPPDGRSFREEQCVSFNSHVYNGRTHQWKPLYPDDYVHISSKPCDLHCTTVDGQRQLMVPARDGTSCKLTDLRGVCVSGKCEPIGCDGVLFSTHTLDKCGICQGDGSSCTHVTGNYRKGNAHLGYSLVTHIPAGARDIQIVERKKSADVLALADEAGYYFFNGNYKVDSPKNFNIAGTVVKYRRPMDVYETGIEYIVAQGPTNQGLNVMVWNQNGKSPSITFEYTLLQPPHESRPQPIYYGFSESAESQGLDGAGLMGFVPHNGSLYGQASSERLGLDNRLFGHPGLDMELGPSQGQETNEVCEQAGGGACEGPPRGKGFRDRNVTGTPLTGDKDDEEVDTHFASQEFFSANAISDQLLGAGSDLKDFTLNETVNSIFAQGAPRSSLAESFFVDYEENEGAGPYLLNGSYLELSSDRVANSSSEAPFPNVSTSLLTSAGNRTHKARTRPKARKQGVSPADMYRWKLSSHEPCSATCTTGVMSAYAMCVRYDGVEVDDSYCDALTRPEPVHEFCAGRECQPRWETSSWSECSRTCGEGYQFRVVRCWKMLSPGFDSSVYSDLCEAAEAVRPEERKTCRNPACGPQWEMSEWSECTAKCGERSVVTRDIRCSEDEKLCDPNTRPVGEKNCTGPPCDRQWTVSDWGPCSGSCGQGRTIRHVYCKTSDGRVVPESQCQMETKPLAIHPCGDKNCPAHWLAQDWERCNTTCGRGVKKRLVLCMELANGKPQTRSGPECGLAKKPPEESTCFERPCFKWYTSPWSECTKTCGVGVRMRDVKCYQGTDIVRGCDPLVKPVGRQACDLQPCPTEPPDDSCQDQPGTNCALAIKVNLCGHWYYSKACCRSCRPPHS

SEQ ID NO: 384 - protein, 951 aa, Homo Sapiens; identical to SEQ ID NO: 383

SEQ ID NO: 385 - protein, 1060 aa, Homo Sapiens
MLFEVGEGGGAGEEGKGRGRPGRSLCTHAAPARTAHLAPSALRSARPFLWEDNLLTRSQGLPDNHDQLVPDNLEAWALAGPRGLFPKRTLVIWKRIGAGLVVTVALLPRMDGRWQCSCWAWFLLVLAVVAGDTVSTGSTDNSPTSNSLEGGTDATAFWWGEWTKWTACSRSCGGGVTSQERHCLQQRRKSVPGPGNRTCTGTSKRYQLCRVQECPPDGRSFREEQCVSFNSHVYNGRTHQWKPLYPDDYVHISSKPCDLHCTTVDGQRQLMVPARDGTSCKLTDLRGVCVSGKCEPIGCDGVLFSTHTLDKCGICQGDGSSCTHVTGNYRKGNAHLGYSLVTHIPAGARDIQIVERKKSADVLALADEAGYYFFNGNYKVDSPKNFNIAGTVVKYRRPMDVYETGIEYIVAQGPTNQGLNVMVWNQNGKSPSITFEYTLLQPPHESRPQPIYYGFSESAESQGLDGAGLMGFVPHNGSLYGQASSERLGLDNRLFGHPGLDMELGPSQGQETNEVCEQAGGGACEGPPRGKGFRDRNVTGTPLTGDKDDEEVDTHFASQEFFSANAISDQLLGAGSDLKDFTLNETVNSIFAQGAPRSSLAESFFVDYEENEGAGPYLLNGSYLELSSDRVANSSSEAPFPNVSTSLLTSAGNRTHKARTRPKARKQGVSPADMYRWKLSSHEPCSATCTTGVMSAYAMCVRYDGVEVDDSYCDALTRPEPVHEFCAGRECQPRWETSSWSECSRTCGEGYQFRVVRCWKMLSPGFDSSVYSDLCEAAEAVRPEERKTCRNPACGPQWEMSEWSECTAKCGERSVVTRDIRCSEDEKLCDPNTRPVGEKNCTGPPCDRQWTVSDWGPCSGSCGQGRTIRHVYCKTSDGRVVPESQCQMETKPLAIHPCGDKNCPAHWLAQDWERCNTTCGRGVKKRLVLCMELANGKPQTRSGPECGLAKKPPEESTCFERPCFKWYTSPWSECTKTCGVGVRMRDVKCYQGTDIVRGCDPLVKPVGRQACDLQPCPTEPPDDSCQDQPGTNCALAIKVNLCGHWYYSKACCRSCRPPHS

SEQ ID NO: 386 - protein, 1691 aa, Homo Sapiens
MASWTSPWWVLIGMVFMHSPLPQTTAEKSPGAYFLPEFALSPQGSFLEDTTGEQFLTYRYDDQTSRNTRSDEDKDGNWDAWGDWSDCSRTCGGGASYSLRRCLTGRNCEGQNIRYKTCSNHDCPPDAEDFRAQQCSAYNDVQYQGHYYEWLPRYNDPAAPCALKCHAQGQNLVVELAPKVLDGTRCNTDSLDMCISGICQAVGCDRQLGSNAKEDNCGVCAGDGSTCRLVRGQSKSHVSPEKREENVIAVPLGSRSVRITVKGPAHLFIESKTLQGSKGEHSFNSPGVFLVENTTVEFQRGSERQTFKIPGPLMADFIFKTRYTAAKDSVVQFFFYQPISHQWRQTDFFPCTVTCGGGYQLNSAECVDIRLKRVVPDHYCHYYPENVKPKPKLKECSMDPCPSSDGFKEIMPYDHFQPLPRWEHNPWTACSVSCGGGIQRRSFVCVEESMHGEILQVEEWKCMYAPKPKVMQTCNLFDCPKWIAMEWSQCTVTCGRGLRYRVVLCINHRGEHVGGCNPQLKLHIKEECVIPIPCYKPKEKSPVEAKLPWLKQAQELEETRIATEEPTFIPEPWSACSTTCGPGVQVREVKCRVLLTFTQTETELPEEECEGPKLPTERPCLLEACDESPASRELDIPLPEDSETTYDWEYAGFTPCTATCVGGHQEAIAVCLHIQTQQTVNDSLCDMVHRPPAMSQACNTEPCPPRWHVGSWGPCSATCGVGIQTRDVYCLHPGETPAPPEECRDEKPHALQACNQFDCPPGWHIEEWQQCSRTCGGGTQNRRVTCRQLLTDGSFLNLSDELCQGPKASSHKSCARTDCPPHLAVGDWSKCSVSCGVGIQRRKQVCQRLAAKGRRIPLSEMMCRDLPGLPLVRSCQMPECSKIKSEMKTKLGEQGPQILSVQRVYIQTREEKRINLTIGSRAYLLPNTSVIIKCPVRRFQKSLIQWEKDGRCLQNSKRLGITKSGSLKIHGLAAPDIGVYRCIAGSAQETVVLKLIGTDNRLIARPALREPMREYPGMDHSEANSLGVTWHKMRQMWNNKNDLYLDDDHISNQPFLRALLGHCSNSAGSTNSWELKNKQFEAAVKQGAYSMDTAQFDELIRNMSQLMETGEVSDDLASQLIYQLVAELAKAQPTHMQWRGIQEETPPAAQLRGETGSVSQSSHAKNSGKLTFKPKGPVLMRQSQPPSISFNKTINSRIGNTVYITKRTEVINILCDLITPSEATYTWTKDGTLLQPSVKIILDGTGKIQIQNPTRKEQGIYECSVANHLGSDVESSSVLYAEAPVILSVERNITKPEHNHLSVVVGGIVEAALGANVTIRCPVKGVPQPNITWLKRGGSLSGNVSLLFNGSLLLQNVSLENEGTYVCIATNALGKAVATSVLHLLERRWPESRIVFLQGHKKYILQATNTRTNSNDPTGEPPPQEPFWEPGNWSHCSATCGHLGARIQRPQCVMANGQEVSEALCDHLQKPLAGFEPCNIRDCPARWFTSVWSQCSVSCGEGYHSRQVTCKRTKANGTVQVVSPRACAPKDRPLGRKPCFGHPCVQWEPGNRCPGRCMGRAVRMQQRHTACQHNSSDSNCDDRKRPTLRRNCTSGACDVCWHTGPWKPCTAACGRGFQSRKVDCIHTRSCKPVAKRHCVQKKKPISWRHCLGPSCDRDCTDTTHYCMFVKHLNLCSLDRYKQRCCQSCQEG

SEQ ID NO: 387 - protein, 1682 aa, Homo Sapiens
MASWTSPWWVLIGMVFMHSPLPQTTAEKSPGAYFLPEFALSPQGSFLEDTTGEQFLTYRYDDQTSRNTRSDEDKDGNWDAWGDWSDCSRTCGGGASYSLRRCLTGRNCEGQNIRYKTCSNHDCPPDAEDFRAQQCSAYNDVQYQGHYYEWLPRYNDPAAPCALKCHAQGQNLVVELAPKVLDGTRCNTDSLDMCISGICQAVGCDRQLGSNAKEDNCGVCAGDGSTCRLVRGQSKSHVSPEKREENVIAVPLGSRSVRITVKGPAHLFIESKTLQGSKGEHSFNSPGVFLVENTTVEFQRGSERQTFKIPGPLMADFIFKTRYTAAKDSVVQFFFYQPISHQWRQTDFFPCTVTCGGGYQLNSAECVDIRLKRVVPDHYCHYYPENVKPKPKLKECSMDPCPSSDGFKEIMPYDHFQPLPRWEHNPWTACSVSCGGGIQRRSFVCVEESMHGEILQVEEWKCMYAPKPKVMQTCNLFDCPKWIAMEWSQCTVTCGRGLRYRVVLCINHRGEHVGGCNPQLKLHIKEECVIPIPCYKPKEKSPVEAKLPWLKQAQELEETRIATEEPTFIPEPWSACSTTCGPGVQVREVKCRVLLTFTQTETELPEEECEGPKLPTERPCLLEACDESPASRELDIPLPEDSETTYDWEYAGFTPCTATCVGGHQEAIAVCLHIQTQQTVNDSLCDMVHRPPAMSQACNTEPCPPRWHVGSWGPCSATCGVGIQTRDVYCLHPGETPAPPEECRDEKPHALQACNQFDCPPGWHIEEWQQCSRTCGGGTQNRRVTCRQLLTDGSFLNLSDELCQGPKASSHKSCARTDCPPHLAVGDWSKCSVSCGVGIQRRKQVCQRLAAKGRRIPLSEMMCRDLPGLPLVRSCQMPECSKIKSEMKTKLGEQGPQILSVQRVYIQTREEKRINLTIGSRAYLLPNTSVIIKCPVRRFQKSLIQWEKDGRCLQNSKRLGITKSGSLKIHGLAAPDIGVYRCIAGSAQETVVLKLIGTDNRLIARPALREPMREYPGMDHSEANSLGVTWHKMRQMWNNKNDLYLDDDHISNQPFLRALLGHCSNSAGSTNSWELKNKQFEAAVKQGAYSMDTAQFDELIRNMSQLMETGEVSDDLASQLIYQLVAELAKAQPTHMQWRGIQEETPPAAQLRGETGSVSQSSHAKNSGKLTFKPKGPVLMRQSQPPSISFNKTINSRIGNTVYITKRTEVINILCDLITPSEATYTWTKDGTLLQPSVKIILDGTGKIQIQNPTRKEQGIYECSVANHLGSDVESSSVLYAEAPVILSVERNITKPEHNHLSVVVGGIVEAALGANVTIRCPVKGVPQPNITWLKRGGSLSGNVSLLFNGSLLLQNVSLENEGTYVCIATNALGKAVATSVLHLLERRWPESRIVFLQGHKKYILQATNTRTNSNDPTGEPPPQEPFWEPGNWSHCSATCGHLGARIQRPQCVMANGQEVSEALCDHLQKPLAGFEPCNIRDCPARWFTSVWSQCSVSCGEGYHSRQVTCKRTKANGTVQVVSPRACAPKDRPLGRKPCFGHPCVQWEPGNRCPGRCMGRAVRMQQRHTACQHNSSDSNCDDRKRPTLRRNCTSGACDVCWHTGPWKPCTAACGRGFQSRKVDCIHTRSCKPVAKRHCVQKKKPISWRHCLGPSCDSTYTSQTATNKGAASHVKRDKPLEGS

SEQ ID NO: 388 - protein, 1074 aa, Homo Sapiens
MENWTGRPWLYLLLLLSLPQLCLDQEVLSGHSLQTPTEEGQGPEGVWGPWVQWASCSQPCGVGVQRRSRTCQLPTVQLHPSLPLPPRPPRHPEALLPRGQGPRPQTSPETLPLYRTQSRGRGGPLRGPASHLGREETQEIRAARRSRLRDPIKPGMFGYGRVPFALPLHRNRRHPRSPPRSELSLISSRGEEAIPSPTPRAEPFSANGSPQTELPPTELSVHTPSPQAEPLSPETAQTEVAPRTRPAPLRHHPRAQASGTEPPSPTHSLGEGGFFRASPQPRRPSSQGWASPQVAGRRPDPFPSVPRGRGQQGQGPWGTGGTPHGPRLEPDPQHPGAWLPLLSNGPHASSLWSLFAPSSPIPRCSGESEQLRACSQAPCPPEQPDPRALQCAAFNSQEFMGQLYQWEPFTEVQGSQRCELNCRPRGFRFYVRHTEKVQDGTLCQPGAPDICVAGRCLSPGCDGILGSGRRPDGCGVCGGDDSTCRLVSGNLTDRGGPLGYQKILWIPAGALRLQIAQLRPSSNYLALRGPGGRSIINGNWAVDPPGSYRAGGTVFRYNRPPREEGKGESLSAEGPTTQPVDVYMIFQEENPGVFYQYVISSPPPILENPTPEPPVPQLQPEILRVEPPLAPAPRPARTPGTLQRQVRIPQMPAPPHPRTPLGSPAAYWKRVGHSACSASCGKGVWRPIFLCISRESGEELDERSCAAGARPPASPEPCHGTPCPPYWEAGEWTSCSRSCGPGTQHRQLQCRQEFGGGGSSVPPERCGHLPRPNITQSCQLRLCGHWEVGSPWSQCSVRCGRGQRSRQVRCVGNNGDEVSEQECASGPPQPPSREACDMGPCTTAWFHSDWSSKCSAECGTGIQRRSVVCLGSGAALGPGQGEAGAGTGQSCPTGSRPPDMRACSLGPCERTWRWYTGPWGECSSECGSGTQRRDIICVSKLGTEFNVTSPSNCSHLPRPPALQPCQGQACQDRWFSTPWSPCSRSCQGGTQTREVQCLSTNQTLSTRCPPQLRPSRKRPCNSQPCSQRPDDQCKDSSPHCPLVVQARLCVYPYYTATCCRSCAHVLERSPQDPS

SEQ ID NO: 389 - protein, 1097 aa, Homo Sapiens
MENWTGRPWLYLLLLLSLPQLCLDQEVLSGHSLQTPTEEGQGPEGVWGPWVQWASCSQPCGVGVQRRSRTCQLPTVQLHPSLPLPPRPPRHPEALLPRGQGPRPQTSPETLPLYRTQSRGRGGPLRGPASHLGREETQEIRAARRSRLRDPIKPGMFGYGRVPFALPLHRNRRHPRSPPRSELSLISSRGEEAIPSPTPRAEPFSANGSPQTELPPTELSVHTPSPQAEPLSPETAQTEVAPRTRPAPLRHHPRAQASGTEPPSPTHSLGEGGFFRASPQPRRPSSQGWASPQVAGRRPDPFPSVPRGRGQQGQGPWGTGGTPHGPRLEPDPQHPGAWLPLLSNGPHASSLWSLFAPSSPIPRCSGESEQLRACSQAPCPPEQPDPRALQCAAFNSQEFMGQLYQWEPFTEAPLLPLRHAFFLLPGAGSGDSTGVQGSQRCELNCRPRGFRFYVRHTEKVQDGTLCQPGAPDICVAGRCLSPGCDGILGSGRRPDGCGVCGGDDSTCRLVSGNLTDRGGPLGYQKILWIPAGALRLQIAQLRPSSNYLALRGPGGRSIINGNWAVDPPGSYRAGGTVFRYNRPPREEGKGESLSAEGPTTQPVDVYMIFQEENPGVFYQYVISSPPPILENPTPEPPVPQLQPEILRVEPPLAPAPRPARTPGTLQRQVRIPQMPAPPHPRTPLGSPAAYWKRVGHSACSASCGKGVWRPIFLCISRESGEELDERSCAAGARPPASPEPCHGTPCPPYWEAGEWTSCSRSCGPGTQHRQLQCRQEFGGGGSSVPPERCGHLPRPNITQSCQLRLCGHWEVGSPWSQCSVRCGRGQRSRQVRCVGNNGDEVSEQECASGPPQPPSREACDMGPCTTAWFHSDWSSKCSAECGTGIQRRSVVCLGSGAALGPGQGEAGAGTGQSCPTGSRPPDMRACSLGPCERTWRWYTGPWGECSSECGSGTQRRDIICVSKLGTEFNVTSPSNCSHLPRPPALQPCQGQACQDRWFSTPWSPCSRSCQGGTQTREVQCLSTNQTLSTRCPPQLRPSRKRPCNSQPCSQRPDDQCKDSSPHCPLVVQARLCVYPYYTATCCRSCAHVLERSPQDPS

SEQ ID NO: 390 - protein, 1074 aa, Homo Sapiens; identical to SEQ ID NO: 388

SEQ ID NO: 391 - protein, 877 aa, Homo Sapiens
MENWTGRPWLYLLLLLSLPQLCLDQEVLSGHSLQTPTEEGQGPEGVWGPWVQWASCSQPCGVGVQRRSRTCQLPTVQLHPSLPLPPRPPRHPEALLPRGQGPRPQTSPETLPLYRTQSRGRGGPLRGPASHLGREETQEIRAARRSRLRDPIKPGMFGYGRVPFALPLHRNRRHPRSPPRSELSLISSRGEEAIPSPTPRAEPFSANGSPQTELPPTELSVHTPSPQAEPLSPETAQTEVAPRTRPAPLRHHPRAQASGTEPPSPTHSLGEGGFFRASPQPRRPSSQGWASPQVAGRRPDPFPSVPRGRGQQGQGPWGTGGTPHGPRLEPDPQHPGAWLPLLSNGPHASSLWSLFAPSSPIPRCSGESEQLRACSQAPCPPEQPDPRALQCAAFNSQEFMGQLYQWEPFTEVQGSQRCELNCRPRGFRFYVRHTEKVQDGTLCQPGAPDICVAGRCLSPGCDGILGSGRRPDGCGVCGGDDSTCRLVSGNLTDRGGPLGYQKILWIPAGALRLQIAQLRPSSNYLALRGPGGRSIINGNWAVDPPGSYRAGGTVFRYNRPPREEGKGESLSAEGPTTQPVDVYMIFQEENPGVFYQYVISSPPPILENPTPEPPVPQLQPEILRVEPPLAPAPRPARTPGTLQRQVRIPQMPAPPHPRTPLGSPAAYWKRVGHSACSASCGKGVWRPIFLCISRESGEELDERSCAAGARPPASPEPCHGTPCPPYWEAGEWTSCSRSCGPGTQHRQLQCRQEFGGGGSSVPPERCGHLPRPNITQSCQLRLCGHWEVGSPWSQCSVRCGRGQRSRQVRCVGNNGDEVSEQECASGPPQPPSREACDMGPCTTAWFHSDWSSKVSPEPPAISCILGNHAQDTSAFPA

SEQ ID NO: 392 - protein, 471 aa, Homo Sapiens
MDSAPLFPRPHLFQNLLLFLWALLNCGLGVSAQGPGEWTPWVSWTRCSSSCGRGVSVRSRRCLRLPGEEPCWGDSHEYRLCQLPDCPPGAVPFRDLQCALYNGRPVLGTQKTYQWVPFHGAPNQCDLNCLAEGHAFYHSFGRVLDGTACSPGAQGVCVAGRCLSAGCDGLLGSGALEDRCGRCGGANDSCLFVQRVFRDAGAFAGYWNVTLIPEGARHIRVEHRSRNHLALMGGDGRYVLNGHWVVSPPGTYEAAGTHVVYTRDTGPQETLQAAGPTSHDLLLQVLLQEPNPGIEFEFWLPRERYSPFQARVQALGWPLRQPQPRGVEPQPPAAPAVTPAQTPTLAPDPCPPCPDTRGRAHRLLHYCGSDFVFQARVLGHHHQAQETRYEVRIQLVYKNRSPLRAREYVWAPGHCPCPMLAPHRDYLMAVQRLVSPDGTQDQLLLPHAGYARPWSPAEDSRIRLTARRCPG

SEQ ID NO: 393 - protein, 131 aa, Homo Sapiens
MGGDGRYVLNGHWVVSPPGTYEAAGTHVVYTRDTGPQETLQAAGPTSHDLLLQVLLQEPNPGIEFEFWLPRERYSPFQARVQALGWPLRQPQPRGVEPQPPAAPAVTPAQTPTLAPGPSAGPPPPGPGDPL

SEQ ID NO: 394 - protein, 130 aa, Homo Sapiens
MGKLRPGRVEWLASGHTERPHLFQNLLLFLWALLNCGLGVSAQGPGEWTPWVSWTRCSSSCGRGVSVRSRRCLRLPGEEPCWGDSHEYRLCQLPDCPPGAVPFRDLQCALYNGRPVLGTQKTYQWVPFHG

SEQ ID NO: 395 - protein, 141 aa, Homo Sapiens
MGKLRPGRVEWLASGHTERPHLFQNLLLFLWALLNCGLGVSAQGPGEWTPWVSWTRCSSSCGRGVSVRSRRCLRLPGEEPCWGDSHEYRLCQLPDCPPGAVPFRDLQCALYNGRPVLGTQKTYQWVPFHGAPNQCDLNCLA

SEQ ID NO: 396 - protein, 210 aa, Homo Sapiens
MGKLRPGRVEWLASGHTERPHLFQNLLLFLWALLNCGLGVSAQGPGEWTPWVSWTRCSSSCGRGVSVRSRRCLRLPGEEPCWGDSHEYRLCQLPDCPPGAVPFRDLQCALYNGRPVLGTQKTYQWVPFHGAPNQCDLNCLAEGHAFYHSFGRVLDGTACSPGAQGVCVAGRCLSAGCDGLLGSGALEDRCGRCGGANDSCLFVQRVFRDA

SEQ ID NO: 397 - protein, 135 aa, Homo Sapiens
RHIRVEHRSRNHLGILGSLMGGDGRYVLNGHWVVSPPGTYEAAGTHVVYTRDTGPQETLQAAGPTSHDLLLQVLLQEPNPGIEFEFWLPRERYSPFQARVQALGWPLRQPQPRGVEPQPPAAPAVTPAQTPTLAP

SEQ ID NO: 398 - protein, 455 aa, Homo Sapiens
MARKALKLASWTSMALAASGIYFYSNKYLDPNDFGAVRVGRAVATTAVISYDYLTSLKSVPYGSEEYLQLRSKIHDLFQSFDDTPLGTASLAQVHKAVLHDGRTVAVKVQHPKVRAQSSKDILLMEVLVLAVKQLFPEFEFMWLVDEAKKNLPLELDFLNEGRNAEKVSQMLRHFDFLKVPRIHWDLSTERVLLMEFVDGGQVNDRDYMERNKIDVNEISRHLGKMYSEMIFVNGFVHCDPHPGNVLVRKHPGTGKAEIVLLDHGLYQMLTEEFRLNYCHLWQSLIWTDMKRVKEYSQRLGAGDLYPLFACMLTARSWDSVNRGISQAPVTATEDLEIRNNAANYLPQISHLLNHVPRQMLLILKTNDLLRGIEAALGTRASASSFLNMSRCCIRALAEHKKKNTCSFFRRTQISFSEAFNLWQINLHELILRVKGLKLADRVLALICWLFPAPL

SEQ ID NO: 399 - protein, 122 aa, Homo Sapiens
MARKALKLASWTSMALAASGIYFYSNKYLDPNDFGAVRVGRAVATTAVISYDYLTSLKSVPYGSEEYLQLRSKSLAVSPRLECIGVISAHCNLYLLGSSDSPASASQVAGTTGAPSLCQASL

SEQ ID NO: 400 - protein, 266 aa, Homo Sapiens
MARKALKLASWTSMALAASGIYFYSNKYLDPNDFGAVRVGRAVATTAVISYDYLTSLKSVPYGSEEYLQLRSKVHLRSARRLCELCCANRGTFIKVGQHLGALDYLLPEEYTSTLKVLHSQAPQSSMQEIRQVIREDLGKEIHDLFQSFDDTPLGTASLAQVHKAVLHDGRTVAVKVQHPKVRAQSSKDILLMEVLVLAVKQLFPEFEFMWLVDEAKKNLPLELDFLNEGRNAEKVSQMLRHFDFLKISRHLGKMYSEMIFVNGFV

SEQ ID NO: 401 - protein, 523 aa, Homo Sapiens
MARKALKLASWTSMALAASGIYFYSNKYLDPNDFGAVRVGRAVATTAVISYDYLTSLKSVPYGSEEYLQLRSKVHLRSARRLCELCCANRGTFIKVGQHLGALDYLLPEEYTSTLKVLHSQAPQSSMQEIRQVIREDLGKEIHDLFQSFDDTPLGTASLAQVHKAVLHDGRTVAVKVQHPKVRAQSSKDILLMEVLVLAVKQLFPEFEFMWLVDEAKKNLPLELDFLNEGRNAEKVSQMLRHFDFLKVPRIHWDLSTERVLLMEFVDGGQVNDRDYMERNKIDVNEISRHLGKMYSEMIFVNGFVHCDPHPGNVLVRKHPGTGKAEIVLLDHGLYQMLTEEFRLNYCHLWQSLIWTDMKRVKEYSQRLGAGDLYPLFACMLTARSWDSVNRGISQAPVTATEDLEIRNNAANYLPQISHLLNHVPRQMLLILKTNDLLRGIEAALGTRASASSFLNMSRCCIRALAEHKKKNTCSFFRRTQISFSEAFNLWQINLHELILRVKGLKLADRVLALICWLFPAPL

SEQ ID NO: 402 - protein, 218 aa, Homo Sapiens
MARKALKLASWTSMALAASGIYFYSNKYLDPNDFGAVRVGRAVATTAVISYDYLTSLKSVPYGSEEYLQLRSKVHLRSARRLCELCCANRGTFIKVGQHLGALDYLLPEEYTSTLKVLHSQAPQSSMQEIRQVIREDLGKEVLVLAVKQLFPEFEFMWLVDEAKKNLPLELDFLNEGRNAEKVSQMLRHFDFLKPGQQSETASQGTTTTTKKKWDRKL

SEQ ID NO: 403 - protein, 176 aa, Homo Sapiens
MTMCSGARLALLVYGIIMHSSVYSSPAAAGLRFPGIRPEEEAYGEDGNPLPDFDGSEPPGAGSPASAPRAAAAWYRPAGRRDVAHGILNEAYRKVLDQLSAGKHLQSLVARGVGGSLGGGAGDDAEPLSKRHSDGIFTDSYSRYRKQMAVKKYLAAVLGKRYKQRVKNKGRRIAYL

SEQ ID NO: 404 - protein, 176 aa, Homo Sapiens; identical to SEQ ID NO: 403

SEQ ID NO: 405 - protein, 74 aa, Homo Sapiens
MAGVVHVSLAALLLLPMAPAMHSDCIFKKEQAMCLEKIQRANELMGFNDSSPGCPGMWDNITCWKPAHVGEMVL

SEQ ID NO: 406 - protein, 447 aa, Homo Sapiens
MAGVVHVSLAALLLLPMAPAMHSDCIFKKEQAMCLEKIQRANELMGFNDSSPGCPGMWDNITCWKPAHVGEMVLVSCPELFRIFNPDQDMGVVSRNCTEDGWSEPFPHYFDACGFDEYESETGDQDYYYLSVKALYTVGYSTSLVTLTTAMVILCRFRKLHCTRNFIHMNLFVSFMLRAISVFIKDWILYAEQDSNHCFISTVECKAVMVFFHYCVVSNYFWLFIEGLYLFTLLVETFFPERRYFYWYTIIGWGTPTVCVTVWATLRLYFDDTGCWDMNDSTALWWVIKGPVVGSIMVNFVLFIGIIVILVQKLQSPDMGGNESSIYLRLARSTLLLIPLFGIHYTVFAFSPENVSKRERLVFELGLGSFQGFVVAVLYCFLNGEVQAEIKRKWRSWKVNRYFAVDFKHRHPSLASSGVNGGTQLSILSKSSSQIRMSGLPADNLAT

SEQ ID NO: 407 - protein, 468 aa, Homo Sapiens
MAGVVHVSLAALLLLPMAPAMHSDCIFKKEQAMCLEKIQRANELMGFNDSSPGCPGMWDNITCWKPAHVGEMVLVSCPELFRIFNPDQVWETETIGESDFGDSNSLDLSDMGVVSRNCTEDGWSEPFPHYFDACGFDEYESETGDQDYYYLSVKALYTVGYSTSLVTLTTAMVILCRFRKLHCTRNFIHMNLFVSFMLRAISVFIKDWILYAEQDSNHCFISTVECKAVMVFFHYCVVSNYFWLFIEGLYLFTLLVETFFPERRYFYWYTIIGWGTPTVCVTVWATLRLYFDDTGCWDMNDSTALWWVIKGPVVGSIMVNFVLFIGIIVILVQKLQSPDMGGNESSIYLRLARSTLLLIPLFGIHYTVFAFSPENVSKRERLVFELGLGSFQGFVVAVLYCFLNGEVQAEIKRKWRSWKVNRYFAVDFKHRHPSLASSGVNGGTQLSILSKSSSQIRMSGLPADNLAT

SEQ ID NO: 408 - protein, 524 aa, Homo Sapiens
MAGVVHVSLAALLLLPMAPAMHSDCIFKKEQAMCLEKIQRANELMGFNDSSPGCPGMWDNITCWKPAHVGEMVLVSCPELFRIFNPDQVWETETIGESDFGDSNSLDLSDMGVVSRNCTEDGWSEPFPHYFDACGFDEYESETGDQDYYYLSVKALYTVGYSTSLVTLTTAMVILCRFRKLHCTRNFIHMNLFVSFMLRAISVFIKDWILYAEQDSNHCFISTVECKAVMVFFHYCVVSNYFWLFIEGLYLFTLLVETFFPERRYFYWYTIIGWGTPTVCVTVWATLRLYFDDTGCWDMNDSTALWWVIKGPVVGSIMVNFVLFIGIIVILVQKLQSPDMGGNESSIYLTNLSPRVPKKAREDPLPVPSDQHSLPFLSCVQKCYCKPQRAQQHSCKMSELSTITLRLARSTLLLIPLFGIHYTVFAFSPENVSKRERLVFELGLGSFQGFVVAVLYCFLNGEVQAEIKRKWRSWKVNRYFAVDFKHRHPSLASSGVNGGTQLSILSKSSSQIRMSGLPADNLAT

SEQ ID NO: 409 - protein, 496 aa, Homo Sapiens
MAGVVHVSLAALLLLPMAPAMHSDCIFKKEQAMCLEKIQRANELMGFNDSSPGCPGMWDNITCWKPAHVGEMVLVSCPELFRIFNPDQVWETETIGESDFGDSNSLDLSDMGVVSRNCTEDGWSEPFPHYFDACGFDEYESETGDQDYYYLSVKALYTVGYSTSLVTLTTAMVILCRFRKLHCTRNFIHMNLFVSFMLRAISVFIKDWILYAEQDSNHCFISTVECKAVMVFFHYCVVSNYFWLFIEGLYLFTLLVETFFPERRYFYWYTIIGWGTPTVCVTVWATLRLYFDDTGCWDMNDSTALWWVIKGPVVGSIMVNFVLFIGIIVILVQKLQSPDMGGNESSIYFSCVQKCYCKPQRAQQHSCKMSELSTITLRLARSTLLLIPLFGIHYTVFAFSPENVSKRERLVFELGLGSFQGFVVAVLYCFLNGEVQAEIKRKWRSWKVNRYFAVDFKHRHPSLASSGVNGGTQLSILSKSSSQIRMSGLPADNLAT

SEQ ID NO: 410 - protein, 496 aa, Homo Sapiens; identical to SEQ ID NO: 409

SEQ ID NO: 411 - protein, 148 aa, Homo Sapiens
  misc_feature (1)..(1): Xaa can be any naturally occurring amino acid
XATLRLYFDDTGCWDMNDSTALWWVIKGPVVGSIMVNFVLFIGIIVILVQKLQSPDMGGNESSIYLTNLSPRVPKKAREDPLPVPSDQHSLPFLRLARSTLLLIPLFGIHYTVFAFSPENVSKRERLVFELGLGSFQGFVVAVLYCFL

SEQ ID NO: 412 - protein, 97 aa, Homo Sapiens
MASYIDQDMQVLWYQDGRIVETDESQGIFVEKNMIHNCSLIASALTISNIQAGSTGNWGCHVQTKRGNNTRTVDIVVLESSAQYCPPERVVNNKGDF

SEQ ID NO: 413 - protein, 1321 aa, Homo Sapiens
MEPPGRRRGRAQPPLLLPLSLLALLALLGGGGGGGAAALPAGCKHDGRPRGAGRAAGAAEGKVVCSSLELAQVLPPDTLPNRTVTLILSNNKISELKNGSFSGLSLLERLDLRNNLISSIDPGAFWGLSSLKRLDLTNNRIGCLNADIFRGLTNLVRLNLSGNLFSSLSQGTFDYLASLRSLEFQTEYLLCDCNILWMHRWVKEKNITVRDTRCVYPKSLQAQPVTGVKQELLTCDPPLELPSFYMTPSHRQVVFEGDSLPFQCMASYIDQDMQVLWYQDGRIVETDESQGIFVEKNMIHNCSLIASALTISNIQAGSTGNWGCHVQTKRGNNTRTVDIVVLESSAQYCPPERVVNNKGDFRWPRTLAGITAYLQCTRNTHGSGIYPGNPQDERKAWRRCDRGGFWADDDYSRCQYANDVTRVLYMFNQMPLNLTNAVATARQLLAYTVEAANFSDKMDVIFVAEMIEKFGRFTKEEKSKELGDVMVDIASNIMLADERVLWLAQREAKACSRIVQCLQRIATYRLAGGAHVYSTYSPNIALEAYVIKSTGFTGMTCTVFQKVAASDRTGLSDYGRRDPEGNLDKQLSFKCNVSNTFSSLALKNTIVEASIQLPPSLFSPKQKRELRPTDDSLYKLQLIAFRNGKLFPATGNSTNLADDGKRRTVVTPVILTKIDGVNVDTHHIPVNVTLRRIAHGADAVAARWDFDLLNGQGGWKSDGCHILYSDENITTIQCYSLSNYAVLMDLTGSELYTQAASLLHPVVYTTAIILLLCLLAVIVSYIYHHSLIRISLKSWHMLVNLCFHIFLTCVVFVGGITQTRNASICQAVGIILHYSTLATVLWVGVTARNIYKQVTKKAKRCQDPDEPPPPPRPMLRFYLIGGGIPIIVCGITAAANIKNYGSRPNAPYCWMAWEPSLGAFYGPASFITFVNCMYFLSIFIQLKRHPERKYELKEPTEEQQRLAANENGEINHQDSMSLSLISTSALENEHTFHSQLLGASLTLLLYVALWMFGALAVSLYYPLDLVFSFVFGATSLSFSAFFVVHHCVNREDVRLAWIMTCCPGRSSYSVQVNVQPPNSNGTNGEAPKCPNSSAESSCTNKSASSFKNSSQGCKLTNLQAAAAQCHANSLPLNSTPQLDNSLTEHSMDNDIKMHVAPLEVQFRTNVHSSRHHKNRSKGHRASRLTVLREYAYDVPTSVEGSVQNGLPKSRLGNNEGHSRSRRAYLAYRERQYNPPQQDSSDACSTLPKSSRNFEKPVSTTSKKDALRKPAVVELENQQKSYGLNLAIQNGPIKSNGQEGPLLGTDSTGNVRTGLWKHETTV

SEQ ID NO: 414 - protein, 616 aa, Homo Sapiens
MEPPGRRRGRAQPPLLLPLSLLALLALLGGGGGGGAAALPAGCKHDGRPRGAGRAAGAAEGKVVCSSLELAQVLPPDTLPNRTVTLILSNNKISELKNGSFSGLSLLERLDLRNNLISSIDPGAFWGLSSLKRLDLTNNRIGCLNADIFRGLTNLVRLNLSGNLFSSLSQGTFDYLASLRSLEFQTEYLLCDCNILWMHRWVKEKNITVRDTRCVYPKSLQAQPVTGVKQELLTCDPPLELPSFYMTPSHRQVVFEGDSLPFQCMASYIDQDMQVLWYQDGRIVETDESQGIFVEKNMIHNCSLIASALTISNIQAGSTGNWGCHVQTKRGNNTRTVDIVVLESSAQYCPPERVVNNKGDFRWPRTLAGITAYLQCTRNTHGSGIYPGNPQDERKAWRRCDRGGFWADDDYSRCQYANDVTRVLYMFNQMPLNLTNAVATARQLLAYTVEAANFSDKMDVIFVAEMIEKFGRFTKEEKSKELGDVMVDIASNIMLADERVLWLAQREAKACSRIVQCLQRIATYRLAGGAHVYSTYSPNIALEAYVIKSTGFTGMTCTVFQKVAASDRTGLSDYGRRDPEGNLDKQLSFKCNVSNTFSSLALKVCYILQSFKTIYS

SEQ ID NO: 415 - protein, 34 aa, Homo Sapiens
MLRFYLIGGGIPIIVCGITAAANIKNYGSRPNAP

SEQ ID NO: 416 - protein, 381 aa, Homo Sapiens
MPLKRNNSKYPPLELPSFYMTPSHRQVVFEGDSLPFQCMASYIDQDMQVLWYQDGRIVETDESQGIFVEKNMIHNCSLIASALTISNIQAGSTGNWGCHVQTKRGNNTRTVDIVVLESSAQYCPPERVVNNKGDFRWPRTLAGITAYLQCTRNTHGSGIYPGNPQDERKAWRRCDRGGFWADDDYSRCQYANDVTRVLYMFNQMPLNLTNAVATARQLLAYTVEAANFSDKMDVIFVAEMIEKFGRFTKEEKSKELGDVMVDIASNIMLADERVLWLAQREAKACSRIVQCLQRIATYRLAGGAHVYSTYSPNIALEAYVIKSTGFTGMTCTVFQKVAASDRTGLSDYGRRDPEGNLDKQLSFKCNVSNTFSSLALKGKFR

SEQ ID NO: 417 - protein, 847 aa, Homo Sapiens
GKGHRMTPACPLLLSVILSLRLATAFDPAPSACSALASGVLYGAFSLQDLFPTIASGCSWTLENPDPTKYSLYLRFNRQEQVCAHFAPRLLPLDHYLVNFTCLRPSPEEAVAQAESEVGRPEEEEAEAAAGLELCSGSGPFTFLHFDKNFVQLCLSAEPSEAPRLLAPAALAFRFVEVLLINNNNSSQFTCGVLCRWSEECGRAAGRACGFAQPGCSCPGEAGAGSTTTTSPGPPAAHTLSNALVPGGPAPPAEADLHSGSSNDLFTTEMRYGEEPEEEPKVKTQWPRSADEPGLYMAQTGDPAAEEWSPWSVCSLTCGQGLQVRTRSCVSSPYGTLCSGPLRETRPCNNSATCPVEGQWLEWGPWGPCSTSCANGTQQRSRKCSVAGPAWATCTGALTDTRECSNLECPATDSKWGPWNAWSLCSKTCDTGWQRRFRMCQATGTQGYPCEGTGEEVKPCSEKRCPAFHEMCRDEYVMLMTWKKAAAGEIIYNKCPPNASGSASRRCLLSAQGVAYWGLPSFARCISHEYRYLYLSLREHLAKGQRMLAGEGMSQVVRSLQELLARRTYYSGDLLFSVDILRNVTDTFKRATYVPSADDVQRFFQVVSFMVDAENKEKWDDAQQVSPGSVHLLRVVEDFIHLVGDALKAFQSSLIVTDNLVISIQREPVSAVSSDITFPMRGRRGMKDWVRHSEDRLFLPKEVLSLSSPGKPATSGAAGSPGRGRGPGTVPPGPGHSHQRLLPADPDESSYFVIGAVLYRTLGLILPPPRPPLAVTSRVMTVTVRPPTQPPAEPLITVELSYIINGTTDPHCASWDYSRADASSGDWDTENCQTLETQAAHTRCQCQ

SEQ ID NO: 418 - protein, 1585 aa, Homo Sapiens
MENTGWMGKGHRMTPACPLLLSVILSLRLATAFDPAPSACSALASGVLYGAFSLQDLFPTIASGCSWTLENPDPTKYSLYLRFNRQEQVCAHFAPRLLPLDHYLVNFTCLRPSPEEAVAQAESEVGRPEEEEAEAAAGLELCSGSGPFTFLHFDKNFVQLCLSAEPSEAPRLLAPAALAFRFVEVLLINNNNSSQFTCGVLCRWSEECGRAAGRACGFAQPGCSCPGEAGAGSTTTTSPGPPAAHTLSNALVPGGPAPPAEADLHSGSSNDLFTTEMRYGEEPEEEPKVKTQWPRSADEPGLYMAQTGDPAAEEWSPWSVCSLTCGQGLQVRTRSCVSSPYGTLCSGPLRETRPCNNSATCPVHGVWEEWGSWSLCSRSCGRGSRSRMRTCVPPQHGGKACEGPELQTKLCSMAACPVEGQWLEWGPWGPCSTSCANGTQQRSRKCSVAGPAWATCTGALTDTRECSNLECPATDSKWGPWNAWSLCSKTCDTGWQRRFRMCQATGTQGYPCEGTGEEVKPCSEKRCPAFHEMCRDEYVMLMTWKKAAAGEIIYNKCPPNASGSASRRCLLSAQGVAYWGLPSFARCISHEYRYLYLSLREHLAKGQRMLAGEGMSQVVRSLQELLARRTYYSGDLLFSVDILRNVTDTFKRATYVPSADDVQRFFQVVSFMVDAENKEKWDDAQQVSPGSVHLLRVVEDFIHLVGDALKAFQSSLIVTDNLVISIQREPVSAVSSDITFPMRGRRGMKDWVRHSEDRLFLPKEVLSLSSPGKPATSGAAGSPGRGRGPGTVPPGPGHSHQRLLPADPDESSYFVIGAVLYRTLGLILPPPRPPLAVTSRVMTVTVRPPTQPPAEPLITVELSYIINGTTDPHCASWDYSRADASSGDWDTENCQTLETQAAHTRCQCQHLSTFAVLAQPPKDLTLELAGSPSVPLVIGCAVSCMALLTLLAIYAAFWRFIKSERSIILLNFCLSILASNILILVGQSRVLSKGVCTMTAAFLHFFFLSSFCWVLTEAWQSYLAVIGRMRTRLVRKRFLCLGWGLPALVVAVSVGFTRTKGYGTSSYCWLSLEGGLLYAFVGPAAVIVLVNMLIGIIVFNKLMARDGISDKSKKQRAGSERCPWASLLLPCSACGAVPSPLLSSASARNAMASLWSSCVVLPLLALTWMSAVLAMTDRRSVLFQALFAVFNSAQGFVITAVHCFLRREVQDVVKCQMGVCRADESEDSPDSCKNGQLQILSDFEKDVDLACQTVLFKEVNTCNPSTITGTLSRLSLDEDEEPKSCLVGPEGSLSFSPLPGNILVPMAASPGLGEPPPPQEANPVYMCGEGGLRQLDLTWLRPTEPGSEGDYMVLPRRTLSLQPGGGGGGGEDAPRARPEGTPRRAAKTVAHTEGYPSFLSVDHSGLGLGPAYGSLQNPYGMTFQPPPPTPSARQVPEPGERSRTMPRTVPGSTMKMGSLERKKLRYSDLDFEKVMHTRKRHSELYHELNQKFHTFDRYRSQSTAKREKRWSVSSGGAAERSVCTDKPSPGERPSLSQHRRHQSWSTFKSMTLGSLPPKPRERLTLHRAAAWEPTEPPDGDFQTEV

SEQ ID NO: 419 - protein, 1584 aa, Homo Sapiens
MENTGWMGKGHRMTPACPLLLSVILSLRLATAFDPAPSACSALASGVLYGAFSLQDLFPTIASGCSWTLENPDPTKYSLYLRFNRQEQVCAHFAPRLLPLDHYLVNFTCLRPSPEEAVAQAESEVGRPEEEEAEAAAGLELCSGSGPFTFLHFDKNFVQLCLSAEPSEAPRLLAPAALAFRFVEVLLINNNNSSQFTCGVLCRWSEECGRAAGRACGFAQPGCSCPGEAGAGSTTTTSPGPPAAHTLSNALVPGGPAPPAEADLHSGSSNDLFTTEMRYGEEPEEEPKVKTQWPRSADEPGLYMAQTGDPAAEEWSPWSVCSLTCGQGLQVRTRSCVSSPYGTLCSGPLRETRPCNNSATCPVHGVWEEWGSWSLCSRSCGRGSRSRMRTCVPPQHGGKACEGPELQTKLCSMAACPVEGQWLEWGPWGPCSTSCANGTQQRSRKCSVAGPAWATCTGALTDTRECSNLECPATDSKWGPWNAWSLCSKTCDTGWQRRFRMCQATGTQGYPCEGTGEEVKPCSEKRCPAFHEMCRDEYVMLMTWKKAAAGEIIYNKCPPNASGSASRRCLLSAQGVAYWGLPSFARCISHEYRYLYLSLREHLAKGQRMLAGEGMSQVVRSLQELLARRTYYSGDLLFSVDILRNVTDTFKRATYVPSADDVQRFFQVVSFMVDAENKEKWDDAQQVSPGSVHLLRVVEDFIHLVGDALKAFQSSLIVTDNLVISIQREPVSAVSSDITFPMRGRRGMKDWVRHSEDRLFLPKEVLSLSSPGKPATSGAAGSPGRGRGPGTVPPGPGHSHQRLLPADPDESSYFVIGAVLYRTLGLILPPPRPPLAVTSRVMTVTVRPPTQPPAEPLITVELSYIINGTTDPHCASWDYSRADASSGDWDTENCQTLETQAAHTRCQCQHLSTFAVLAQPPKDLTLELAGSPSVPLVIGCAVSCMALLTLLAIYAAFWRFIKSERSIILLNFCLSILASNILILVGQSRVLSKGVCTMTAAFLHFFFLSSFCWVLTEAWQSYLAVIGRMRTRLVRKRFLCLGWGLPALVVAVSVGFTRTKGYGTSSYCWLSLEGGLLYAFVGPAAVIVLVNMLIGIIVFNKLMARDGISDKSKKQRAGSERCPWASLLLPCSACGAVPSPLLSSASARNAMASLWSSCVVLPLLALTWMSAVLAMTDRRSVLFQALFAVFNSAQGFVITAVHCFLRREVQDVVKCQMGVCRADESEDSPDSCKNGQLQILSDFEKDVDLACQTVLFKEVNTCNPSTITGTLSRLSLDEDEEPKSCLVGPEGSLSFSPLPGNILVPMAASPGLGEPPPPQEANPVYMCGEGGLRQLDLTWLRPTEPGSEGDYMVLPRRTLSLQPGGGGGGGEDAPRARPEGTPRRAAKTVAHTEGYPSFLSVDHSGLGLGPAYGSLQNPYGMTFQPPPPTPSARQVPEPGERSRTMPRTVPGSTMKMGSLERKKLRYSDLDFEVMHTRKRHSELYHELNQKFHTFDRYRSQSTAKREKRWSVSSGGAAERSVCTDKPSPGERPSLSQHRRHQSWSTFKSMTLGSLPPKPRERLTLHRAAAWEPTEPPDGDFQTEV

SEQ ID NO: 420 - protein, 1551 aa, Homo Sapiens
MENTGWMGKGHRMTPACPLLLSVILSLRLATAFDPAPSACSALASGVLYGAFSLQDLFPTIASGCSWTLENPDPTKYSLYLRFNRQEQVCAHFAPRLLPLDHYLVNFTCLRPSPEEAVAQAESEVGRPEEEEAEAAAGLELCSGSGPFTFLHFDKNFVQLCLSAEPSEAPRLLAPAALAFRFVEVLLINNNNSSQFTCGVLCRWSEECGRAAGRACGFAQPGCSCPGEAGAGSTTTTSPGPPAAHTLSNALVPGGPAPPAEADLHSGSSNDLFTTEMRYGEEPEEEPKVKTQWPRSADEPGLYMAQTGDPAAEEWSPWSVCSLTCGQGLQVRTRSCVSSPYGTLCSGPLRETRPCNNSATCPVHGVWEEWGSWSLCSRSCGRGSRSRMRTCVPPQHGGKACEGPELQTKLCSMAACPVEGQWLEWGPWGPCSTSCANGTQQRSRKCSVAGPAWATCTGALTDTRECSNLECPATDSKWGPWNAWSLCSKTCDTGWQRRFRMCQATGTQGYPCEGTGEEVKPCSEKRCPAFHEMCRDEYVMLMTWKKAAAGEIIYNKCPPNASGSASRRCLLSAQGVAYWGLPSFARCISHEYRYLYLSLREHLAKGQRMLAGEGMSQVVRSLQELLARRTYYSGDLLFSVDILRNVTDTFKRATYVPSADDVQRFFQVVSFMVDAENKEKWDDAQQVSPGSVHLLRVVEDFIHLVGDALKAFQSSLIVTDNLVISIQREPVSAVSSDITFPMRGRRGMKDWVRHSEDRLFLPKEVLSLSSPGKPATSGAAGSPGRGRGPGTVPPGPGHSHQRLLPADPDESSYFVIGAVLYRTLGLILPPPRPPLAVTSRVMTVTVRPPTQPPAEPLITVELSYIINGTTDPHCASWDYSRADASSGDWDTENCQTLETQAAHTRCQCQHLSTFAVLAQPPKDLTLELAGSPSVPLVIGCAVSCMALLTLLAIYAAFWRFIKSERSIILLNFCLSILASNILILVGQSRVLSKGVCTMTAAFLHFFFLSSFCWVLTEAWQSYLAVIGRMRTRLVRKRFLCLGWGLPALVVAVSVGFTRTKGYGTSSYCWLSLEGGLLYAFVGPAAVIVLVNMLIGIIVFNKLMARDGISDKSKKQRAGASLWSSCVVLPLLALTWMSAVLAMTDRRSVLFQALFAVFNSAQGFVITAVHCFLRREVQDVVKCQMGVCRADESEDSPDSCKNGQLQILSDFEKDVDLACQTVLFKEVNTCNPSTITGTLSRLSLDEDEEPKSCLVGPEGSLSFSPLPGNILVPMAASPGLGEPPPPQEANPVYMCGEGGLRQLDLTWLRPTEPGSEGDYMVLPRRTLSLQPGGGGGGGEDAPRARPEGTPRRAAKTVAHTEGYPSFLSVDHSGLGLGPAYGSLQNPYGMTFQPPPPTPSARQVPEPGERSRTMPRTVPGSTMKMGSLERKKLRYSDLDFEVMHTRKRHSELYHELNQKFHTFDRYRSQSTAKREKRWSVSSGGAAERSVCTDKPSPGERPSLSQHRRHQSWSTFKSMTLGSLPPKPRERLTLHRAAAWEPTEPPDGDFQTEV

SEQ ID NO: 421 - protein, 507 aa, Homo Sapiens
MHLPRQHGSAHLGHLYAYAKFSAHDWHLHAQGHAICNAHGKGKGHRMTPACPLLLSVILSLRLATAFDPAPSACSALASGVLYGAFSLQDLFPTIASGCSWTLENPDPTKYSLYLRFNRQEQVCAHFAPRLLPLDHYLVNFTCLRPSPEEAVAQAESEVGRPEEEEAEAAAGLELCSGSGPFTFLHFDKNFVQLCLSAEPSEAPRLLAPAALAFRFVEVLLINNNNSSQFTCGVLCRWSEECGRAAGRACGFAQPGCSCPGEAGAGSTTTTSPGPPAAHTLSNALVPGGPAPPAEADLHSGSSNDLFTTEMRYGEEPEEEPKVKTQWPRSADEPGLYMAQTVHGVWEEWGSWSLCSRSCGRGSRSRMRTCVPPQHGGKACEGPELQTKLCSMAACPVEGQWLEWGPWGPCSTSCANGTQQRSRKCSVAGPAWATCTGALTDTRECSNLECPATDSKWGPWNAWSLCSKTCDTGWQRRFRMCQATGTQGYPCEGTGEEVKPCSEKRCP

SEQ ID NO: 422 - protein, 1500 aa, Homo Sapiens
MLSLRGPDTHGKGHRMTPACPLLLSVILSLRLATAFDPAPSACSALASGVLYGAFSLQDLFPTIASGCSWTLENPDPTKYSLYLRFNRQEQVCAHFAPRLLPLDHYLVNFTCLRPSPEEAVAQAESEVGRPEEEEAEAAAGLELCSGSGPFTFLHFDKNFVQLCLSAEPSEAPRLLAPAALAFRFVEVLLINNNNSSQFTCGVLCRWSEECGRAAGRACGFAQPGCSCPGEAGAGSTTTTSPGPPAAHTLSNALVPGGPAPPAEADLHSGSSNDLFTTEMRYGEEPEEEPKVKTQWPRSADEPGLYMAQTVHGVWEEWGSWSLCSRSCGRGSRSRMRTCVPPQHGGKACEGPELQTKLCSMAACPVEGQWLEWGPWGPCSTSCANGTQQRSRKCSVAGPAWATCTGALTDTRECSNLECPATDSKWGPWNAWSLCSKTCDTGWQRRFRMCQATGTQGYPCEGTGEEVKPCSEKRCPAFHEMCRDEYVMLMTWKKAAAGEIIYNKCPPNASGSASRRCLLSAQGVAYWGLPSFARCISHEYRYLYLSLREHLAKGQRMLAGEGMSQVVRSLQELLARRTYYSGDLLFSVDILRNVTDTFKRATYVPSADDVQRFFQVVSFMVDAENKEKWDDAQQVSPGSVHLLRVVEDFIHLVGDALKAFQSSLIVTDNLVISIQREPVSAVSSDITFPMRGRRGMKDWVRHSEDRLFLPKEVLSLSSPGKPATSGAAGSPGRGRGPGTVPPGPGHSHQRLLPADPDESSYFVIGAVLYRTLGLILPPPRPPLAVTSRVMTVTVRPPTQPPAEPLITVELSYIINGTTDPHCASWDYSRADASSGDWDTENCQTLETQAAHTRCQCQHLSTFAVLAQPPKDLTLELAGSPSVPLVIGCAVSCMALLTLLAIYAAFWRFIKSERSIILLNFCLSILASNILILVGQSRVLSKGVCTMTAAFLHFFFLSSFCWVLTEAWQSYLAVIGRMRTRLVRKRFLCLGWGLPALVVAVSVGFTRTKGYGTSSYCWLSLEGGLLYAFVGPAAVIVLVNMLIGIIVFNKLMARDGISDKSKKQRAGASLWSSCVVLPLLALTWMSAVLAMTDRRSVLFQALFAVFNSAQGFVITAVHCFLRREVQDVVKCQMGVCRADESEDSPDSCKNGQLQILSDFEKDVDLACQTVLFKEVNTCNPSTITGTLSRLSLDEDEEPKSCLVGPEGSLSFSPLPGNILVPMAASPGLGEPPPPQEANPVYMCGEGGLRQLDLTWLRPTEPGSEGDYMVLPRRTLSLQPGGGGGGGEDAPRARPEGTPRRAAKTVAHTEGYPSFLSVDHSGLGLGPAYGSLQNPYGMTFQPPPPTPSARQVPEPGERSRTMPRTVPGSTMKMGSLERKKLRYSDLDFEKVMHTRKRHSELYHELNQKFHTFDRYRSQSTAKREKRWSVSSGGAAERSVCTDKPSPGERPSLSQHRRHQSWSTFKSMTLGSLPPKPRERLTLHRAAAWEPTEPPDGDFQTEV

SEQ ID NO: 423 - protein, 1554 aa, Homo Sapiens
MTPACPLLLSVILSLRLATAFDPAPSACSALASGVLYGAFSLQDLFPTIASGCSWTLENPDPTKYSLYLRFNRQEQVCAHFAPRLLPLDHYLVNFTCLRPSPEEAVAQAESEVGRPEEEEAEAAAGLELCSGSGPFTFLHFDKNFVQLCLSAEPSEAPRLLAPAALAFRFVEVLLINNNNSSQFTCGVLCRWSEECGRAAGRACGFAQPGCSCPGEAGAGSTTTTSPGPPAAHTLSNALVPGGPAPPAEADLHSGSSNDLFTTEMRYGEEPEEEPKVKTQWPRSADEPGLYMAQTGDPAAEEWSPWSVCSLTCGQGLQVRTRSCVSSPYGTLCSGPLRETRPCNNSATCPVHGVWEEWGSWSLCSRSCGRGSRSRMRTCVPPQHGGKACEGPELQTKLCSMAACPVEGQWLEWGPWGPCSTSCANGTQQRSRKCSVAGPAWATCTGALTDTRECSNLECPATDSKWGPWNAWSLCSKTCDTGWQRRFRMCQATGTQGYPCEGTGEEVKPCSEKRCPAFHEMCRDEYVMLMTWKKAAAGEIIYNKCPPNASGSASRRCLLSAQGVAYWGLPSFARCISHEYRYLYLSLREHLAKGQRMLAGEGMSQVVRSLQELLARRTYYSGDLLFSVDILRNVTDTFKRATYVPSADDVQRFFQVVSFMVDAENKEKWDDAQQVSPGSVHLLRVVEDFIHLVGDALKAFQSSLIVTDNLVISIQREPVSAVSSDITFPMRGRRGMKDWVRHSEDRLFLPKEVLSLSSPGKPATSGAAGSPGRGRGPGTVPPGPGHSHQRLLPADPDESSYFVIGAVLYRTLGLILPPPRPPLAVTSRVMTVTVRPPTQPPAEPLITVELSYIINGTTDPHCASWDYSRADASSGDWDTENCQTLETQAAHTRCQCQHLSTFAVLAQPPKDLTLELAGSPSVPLVIGCAVSCMALLTLLAIYAAFWRFIKSERSIILLNFCLSILASNILILVGQSRVLSKGVCTMTAAFLHFFFLSSFCWVLTEAWQSYLAVIGRMRTRLVRKRFLCLGWGLPALVVAVSVGFTRTKGYGTSSYCWLSLEGGLLYAFVGPAAVIVLVNMLIGIIVFNKLMARDGISDKSKKQRAGSERCPWASLLLPCSACGAVPSPLLSSASARNAMASLWSSCVVLPLLALTWMSAVLAMTDRRSVLFQALFAVFNSAQGFVITAVHCFLRREVQDVVKCQMGVCRADESEDSPDSCKNGQLQILSDFEKDVDLACQTVLFKEVNTCNPSTITGTLSRLSLDEDEEPKSCLVGPEGSLSFSPLPGNILVPMAASPGLGEPPPPQEANPVYMCGEGGLRQLDLTWLRPTEPGSEGDYMVLPRRTLSLQPGGGGGGGEDAPRARPEGTPRRAAKTVAHTEGYPSFLSVDHSGLGLGPAYGSLQNPYGMTFQPPPPTPSARQVPEPGERSRTMPRTVPGSTMKMGSLERKKLRYSDLDFEKVMHTRKRHSELYHELNQKFHTFDRYRSQSTAKDKPSPGERPSLSQHRRHQSWSTFKSMTLGSLPPKPRERLTLHRAAAWEPTEPPDGDFQTEV

SEQ ID NO: 424 - protein, 1499 aa, Homo Sapiens
MTPACPLLLSVILSLRLATAFDPAPSACSALASGVLYGAFSLQDLFPTIASGCSWTLENPDPTKYSLYLRFNRQEQVCAHFAPRLLPLDHYLVNFTCLRPSPEEAVAQAESEVGRPEEEEAEAAAGLELCSGSGPFTFLHFDKNFVQLCLSAEPSEAPRLLAPAALAFRFVEVLLINNNNSSQFTCGVLCRWSEECGRAAGRACGFAQPGCSCPGEAGAGSTTTTSPGPPAAHTLSNALVPGGPAPPAEADLHSGSSNDLFTTEMRYGEEPEEEPKVKTQWPRSADEPGLYMAQTVHGVWEEWGSWSLCSRSCGRGSRSRMRTCVPPQHGGKACEGPELQTKLCSMAACPVEGQWLEWGPWGPCSTSCANGTQQRSRKCSVAGPAWATCTGALTDTRECSNLECPATDSKWGPWNAWSLCSKTCDTGWQRRFRMCQATGTQGYPCEGTGEEVKPCSEKRCPAFHEMCRDEYVMLMTWKKAAAGEIIYNKCPPNASGSASRRCLLSAQGVAYWGLPSFARCISHEYRYLYLSLREHLAKGQRMLAGEGMSQVVRSLQELLARRTYYSGDLLFSVDILRNVTDTFKRATYVPSADDVQRFFQVVSFMVDAENKEKWDDAQQVSPGSVHLLRVVEDFIHLVGDALKAFQSSLIVTDNLVISIQREPVSAVSSDITFPMRGRRGMKDWVRHSEDRLFLPKEVLSLSSPGKPATSGAAGSPGRGRGPGTVPPGPGHSHQRLLPADPDESSYFVIGAVLYRTLGLILPPPRPPLAVTSRVMTVTVRPPTQPPAEPLITVELSYIINGTTDPHCASWDYSRADASSGDWDTENCQTLETQAAHTRCQCQHLSTFAVLAQPPKDLTLELAGSPSVPLVIGCAVSCMALLTLLAIYAAFWRFIKSERSIILLNFCLSILASNILILVGQSRVLSKGVCTMTAAFLHFFFLSSFCWVLTEAWQSYLAVIGRMRTRLVRKRFLCLGWGLPALVVAVSVGFTRTKGYGTSSYCWLSLEGGLLYAFVGPAAVIVLVNMLIGIIVFNKLMARDGISDKSKKQRAGSERCPWASLLLPCSACGAVPSPLLSSASARNAMASLWSSCVVLPLLALTWMSAVLAMTDRRSVLFQALFAVFNSAQGFVITAVHCFLRREVQDVVKCQMGVCRADESEDSPDSCKNGQLQILSDFEKDVDLACQTVLFKEVNTCNPSTITGTLSRLSLDEDEEPKSCLVGPEGSLSFSPLPGNILVPMAASPGLGEPPPPQEANPVYMCGEGGLRQLDLTWLRPTEPGSEGDYMVLPRRTLSLQPGGGGGGGEDAPRARPEGTPRRAAKTVAHTEGYPSFLSVDHSGLGLGPAYGSLQNPYGMTFQPPPPTPSARQVPEPGERSRTMPRTVPGSTMKMGSLERKKLRYSDLDFEKVMHTRKRHSELYHELNQKFHTFDRYRSQSTAKDKPSPGERPSLSQHRRHQSWSTFKSMTLGSLPPKPRERLTLHRAAAWEPTEPPDGDFQTEV

SEQ ID NO: 425 - protein, 1466 aa, Homo Sapiens
MTPACPLLLSVILSLRLATAFDPAPSACSALASGVLYGAFSLQDLFPTIASGCSWTLENPDPTKYSLYLRFNRQEQVCAHFAPRLLPLDHYLVNFTCLRPSPEEAVAQAESEVGRPEEEEAEAAAGLELCSGSGPFTFLHFDKNFVQLCLSAEPSEAPRLLAPAALAFRFVEVLLINNNNSSQFTCGVLCRWSEECGRAAGRACGFAQPGCSCPGEAGAGSTTTTSPGPPAAHTLSNALVPGGPAPPAEADLHSGSSNDLFTTEMRYGEEPEEEPKVKTQWPRSADEPGLYMAQTGDPAAEEWSPWSVCSLTCGQGLQVRTRSCVSSPYGTLCSGPLRETRPCNNSATCPVEGQWLEWGPWGPCSTSCANGTQQRSRKCSVAGPAWATCTGALTDTRECSNLECPATDSKWGPWNAWSLCSKTCDTGWQRRFRMCQATGTQGYPCEGTGEEVKPCSEKRCPAFHEMCRDEYVMLMTWKKAAAGEIIYNKCPPNASGSASRRCLLSAQGVAYWGLPSFARCISHEYRYLYLSLREHLAKGQRMLAGEGMSQVVRSLQELLARRTYYSGDLLFSVDILRNVTDTFKRATYVPSADDVQRFFQVVSFMVDAENKEKWDDAQQVSPGSVHLLRVVEDFIHLVGDALKAFQSSLIVTDNLVISIQREPVSAVSSDITFPMRGRRGMKDWVRHSEDRLFLPKEVLSLSSPGKPATSGAAGSPGRGRGPGTVPPGPGHSHQRLLPADPDESSYFVIGAVLYRTLGLILPPPRPPLAVTSRVMTVTVRPPTQPPAEPLITVELSYIINGTTDPHCASWDYSRADASSGDWDTENCQTLETQAAHTRCQCQHLSTFAVLAQPPKDLTLELAGSPSVPLVIGCAVSCMALLTLLAIYAAFWRFIKSERSIILLNFCLSILASNILILVGQSRVLSKGVCTMTAAFLHFFFLSSFCWVLTEAWQSYLAVIGRMRTRLVRKRFLCLGWGLPALVVAVSVGFTRTKGYGTSSYCWLSLEGGLLYAFVGPAAVIVLVNMLIGIIVFNKLMARDGISDKSKKQRAGASLWSSCVVLPLLALTWMSAVLAMTDRRSVLFQALFAVFNSAQGFVITAVHCFLRREVQDVVKCQMGVCRADESEDSPDSCKNGQLQILSDFEKDVDLACQTVLFKEVNTCNPSTITGTLSRLSLDEDEEPKSCLVGPEGSLSFSPLPGNILVPMAASPGLGEPPPPQEANPVYMCGEGGLRQLDLTWLRPTEPGSEGDYMVLPRRTLSLQPGGGGGGGEDAPRARPEGTPRRAAKTVAHTEGYPSFLSVDHSGLGLGPAYGSLQNPYGMTFQPPPPTPSARQVPEPGERSRTMPRTVPGSTMKMGSLERKKLRYSDLDFEKVMHTRKRHSELYHELNQKFHTFDRYRSQSTAKDKPSPGERPSLSQHRRHQSWSTFKSMTLGSLPPKPRERLTLHRAAAWEPTEPPDGDFQTEV

SEQ ID NO: 426 - protein, 906 aa, Homo Sapiens
MEKLLRLCCWYSWLLLFYYNFQVRGVYSRSQDHPGFQVLASASHYWPLENVDGIHELQDTTGASRTHKLTVLPSRNATFVYSNDSAYSNLSATVDIVEGKVNKGIYLKEEKGVTLLYYGRYNSSCISKPEQCGPEGVTFSFFWKTQGEQSRPIPSAYGGQVISNGFKVCSSGGRGSVELYTRDNSMTWEASFSPPGPYWTHVLFTWKSKEGLKVYVNGTLSTSDPSGKVSRDYGESNVNLVIGSEQDQAKCYENGAFDEFIIWERALTPDEIAMYFTAAIGKHALLSSTLPSLFMTSTASPVMPTDAYHPIITNLTEERKTFQSPGVILSYLQNVSLSLPSKSLSEQTALNLTKTFLKAVGEILLLPGWIALSEDSAVVLSLIDTIDTVMGHVSSNLHGSTPQVTVEGSSAMAEFSVAKILPKTVNSSHYRFPAHGQSFIQIPHEAFHRHAWSTVVGLLYHSMHYYLNNIWPAHTKIAEAMHHQDCLLFATSHLISLEVSPPPTLSQNLSGSPLITVHLKHRLTRKQHSEATNSSNRVFVYCAFLDFSSGEGVWSNHGCALTRGNLTYSVCRCTHLTNFAILMQVVPLELARGHQVALSSISYVGCSLSVLCLVATLVTFAVLSSVSTIRNQRYHIHANLSFAVLVAQVLLLISFRLEPGTTPCQVMAVLLHYFFLSAFAWMLVEGLHLYSMVIKVFGSEDSKHRYYYGMGWGFPLLICIISLSFAMDSYGTSNNCWLSLASGAIWAFVAPALFVIVVNIGILIAVTRVISQISADNYKIHGDPSAFKLTAKAVAVLLPILGTSWVFGVLAVNGCAVVFQYMFATLNSLQGLFIFLFHCLLNSEVRAAFKHKTKVWSLTSSSARTSNAKPFHSDLMNGTRPGMASTKLSPWDKSSHSAHRVDLSAV

SEQ ID NO: 427 - protein, 221 aa, Homo Sapiens
MEKLLRLCCWYSWLLLFYYNFQVRGVYSRSQDHPGFQVLASASHYWPLENVDGIHELQDTTGDIVEGKVNKGIYLKEEKGVTLLYYGRYNSSCISKPEQCGPEGPYWTHVLFTWKSKEGLKVYVNGTLSTSDPSGKVSRDYGESNVNLVIGSEQDQAKCYENGAFDEFIIWERALTPDEIAMYFTAAIGKHALLSSTLPSLFMTSTASPVMPTDAYHPIIT

SEQ ID NO: 428 - protein, 874 aa, Homo Sapiens
MEKLLRLCCWYSWLLLFYYNFQVRGVYSRSQDHPGFQVLASASHYWPLENVDGIHELQDTTGDIVEGKVNKGIYLKEEKGVTLLYYGRYNSSCISKPEQCGPEGVTFSFFWKTQGEQSRPIPSAYGGQVISNGFKVCSSGGRGSVELYTRDNSMTWEASFSPPGPYWTHVLFTWKSKEGLKVYVNGTLSTSDPSGKVSRDYGESNVNLVIGSEQDQAKCYENGAFDEFIIWERALTPDEIAMYFTAAIGKHALLSSTLPSLFMTSTASPVMPTDAYHPIITNLTEERKTFQSPGVILSYLQNVSLSLPSKSLSEQTALNLTKTFLKAVGEILLLPGWIALSEDSAVVLSLIDTIDTVMGHVSSNLHGSTPQVTVEGSSAMAEFSVAKILPKTVNSSHYRFPAHGQSFIQIPHEAFHRHAWSTVVGLLYHSMHYYLNNIWPAHTKIAEAMHHQDCLLFATSHLISLEVSPPPTLSQNLSGSPLITVHLKHRLTRKQHSEATNSSNRVFVYCAFLDFSSGEGVWSNHGCALTRGNLTYSVCRCTHLTNFAILMQVVPLELARGHQVALSSISYVGCSLSVLCLVATLVTFAVLSSVSTIRNQRYHIHANLSFAVLVAQVLLLISFRLEPGTTPCQVMAVLLHYFFLSAFAWMLVEGLHLYSMVIKVFGSEDSKHRYYYGMGWGFPLLICIISLSFAMDSYGTSNNCWLSLASGAIWAFVAPALFVIVVNIGILIAVTRVISQISADNYKIHGDPSAFKLTAKAVAVLLPILGTSWVFGVLAVNGCAVVFQYMFATLNSLQGLFIFLFHCLLNSEVRAAFKHKTKVWSLTSSSARTSNAKPFHSDLMNGTRPGMASTKLSPWDKSSHSAHRVDLSAV

SEQ ID NO: 429 - protein, 393 aa, Homo Sapiens
MHRVCFLSFQTRKQHSEATNSSNRVFVYCAFLDFSSGEGVWSNHGCALTRGNLTYSVCRCTHLTNFAILMQVVPLELARGHQVALSSISYVGCSLSVLCLVATLVTFAVLSSVSTIRNQRYHIHANLSFAVLVAQVLLLISFRLEPGTTPCQVMAVLLHYFFLSAFAWMLVEGLHLYSMVIKVFGSEDSKHRYYYGMGWGFPLLICIISLSFAMDSYGTSNNCWLSLASGAIWAFVAPALFVIVVNIGILIAVTRVISQISADNYKIHGDPSAFKLTAKAVAVLLPILGTSWVFGVLAVNGCAVVFQYMFATLNSLQGLFIFLFHCLLNSEVRAAFKHKTKVWSLTSSSARTSNAKPFHSDLMNGTRPGMASTKLSPWDKSSHSAHRVDLSAV

SEQ ID NO: 430 - protein, 345 aa, Homo Sapiens
MQVVPLELARGHQVALSSISYVGCSLSVLCLVATLVTFAVLSSVSTIRNQRYHIHANLSFAVLVAQVLLLISFRLEPGTTPCQVMAVLLHYFFLSAFAWMLVEGLHLYSMVIKVFGSEDSKHRYYYGMGWGFPLLICIISLSFAMDSYGTSNNCWLSLASGAIWAFVAPALFVIVVNIGILIAVTRVISQISADNYKIHGDPSAFKLTAKAVAVLLPILGTSWVFGVLAVNGCAVVFQYMFATLNSLQGLFIFLFHCLLNSEARWAKEGRAESLSRMVAGQKGCMITKPSDPLIATPSDPLQGLRWIPVAGRQCSHGSPPAHPPACPPRICLFASLSHSPRDIHC

SEQ ID NO: 431 - protein, 156 aa, Homo Sapiens
MQVVPLEVNIGILIAVTRVISQISADNYKIHGDPSAFKLTAKAVAVLLPILGTSWVFGVLAVNGCAVVFQYMFATLNSLQGLFIFLFHCLLNSEVRAAFKHKTKVWSLTSSSARTSNAKPFHSDLMNGTRPGMASTKLSPWDKSSHSAHRVDLSAV

SEQ ID NO: 432 - protein, 437 aa, Homo Sapiens
MNSMDIRCSDIIQGDTQGPSAIAFISYSSLGNIINATFFEEMDKKDQVYLNSQVVSAAIGPKRNVSLSKSVTLTFQHVKMTPSTKKVFCVYWKSTGQGSQWSRDGCFLIHVNKSHTMCNCSHLSSFAVLMALTSQEEDPVLTVITYVGLSVSLLCLLLAALTFLLCKAIRNTSTSLHLQLSLCLFLAHLLFLVGIDRTEPKVLCSIIAGALHYLYLAAFTWMLLEGVHLFLTARNLTVVNYSSINRLMKWIMFPVGYGVPAVTVAISAASWPHLYGTADRCWLHLDQGFMWSFLGPVCAIFSANLVLFILVFWILKRKLSSLNSEVSTIQNTRMLAFKATAQLFILGCTWCLGLLQVGPAAQVMAYLFTIINSLQGFFIFLVYCLLSQQVQKQYQKWFREIVKSKSESETYTLSSKMGPDSKPSEGDVFPGQVKRKY

SEQ ID NO: 433 - protein, 57 aa, Homo Sapiens
MQGPLLLPGLCFLLSLFGAVTQKTKSECSEPEQRTCGPRAGPGATHGLQWAGEKCLF

SEQ ID NO: 434 - protein, 526 aa, Homo Sapiens
MQGPLLLPGLCFLLSLFGAVTQKTKTSCAKCPPNASCVNNTHCTCNHGYTSGSGQKLFTFPLETCNAIETQAITDNCSEERKTFNLNVQMNSMDIRCSDIIQGDTQGPSAIAFISYSSLGNIINATFFEEMDKKDQVYLNSQVVSAAIGPKRNVSLSKSVTLTFQHVKMTPSTKKVFCVYWKSTGQGSQWSRDGCFLIHVNKSHTMCNCSHLSSFAVLMALTSQEEDPVLTVITYVGLSVSLLCLLLAALTFLLCKAIRNTSTSLHLQLSLCLFLAHLLFLVGIDRTEPKVLCSIIAGALHYLYLAAFTWMLLEGVHLFLTARNLTVVNYSSINRLMKWIMFPVGYGVPAVTVAISAASWPHLYGTADRCWLHLDQGFMWSFLGPVCAIFSANLVLFILVFWILKRKLSSLNSEVSTIQNTRMLAFKATAQLFILGCTWCLGLLQVGPAAQVMAYLFTIINSLQGFFIFLVYCLLSQQVQKQYQKWFREIVKSKSESETYTLSSKMGPDSKPSEGDVFPGQVKRKY

SEQ ID NO: 435 - protein, 652 aa, Homo Sapiens
MQGPLLLPGLCFLLSLFGAVTQKTKTSCAKCPPNASCVNNTHCTCNHGYTSGSGQKLFTFPLETCNDINECTPPYSVYCGFNAVCYNVEGSFYCQCVPGYRLHSGNEQFSNSNENTCQDTTSSKTTEGRKELQKIVDKFESLLTNQTLWRTEGRQEISSTATTILRDVESKVLETALKDPEQKVLKIQNDSVAIETQAITDNCSEERKTFNLNVQMNSMDIRCSDIIQGDTQGPSAIAFISYSSLGNIINATFFEEMDKKDQVYLNSQVVSAAIGPKRNVSLSKSVTLTFQHVKMTPSTKKVFCVYWKSTGQGSQWSRDGCFLIHVNKSHTMCNCSHLSSFAVLMALTSQEEDPVLTVITYVGLSVSLLCLLLAALTFLLCKAIRNTSTSLHLQLSLCLFLAHLLFLVGIDRTEPKVLCSIIAGALHYLYLAAFTWMLLEGVHLFLTARNLTVVNYSSINRLMKWIMFPVGYGVPAVTVAISAASWPHLYGTADRCWLHLDQGFMWSFLGPVCAIFSANLVLFILVFWILKRKLSSLNSEVSTIQNTRMLAFKATAQLFILGCTWCLGLLQVGPAAQVMAYLFTIINSLQGFFIFLVYCLLSQQVQKQYQKWFREIVKSKSESETYTLSSKMGPDSKPSEGDVFPGQVKRKY

SEQ ID NO: 436 - protein, 600 aa, Homo Sapiens
MQGPLLLPGLCFLLSLFGAVTQKTKTSCAKCPPNASCVNNTHCTCNHGYTSGSGQKLFTFPLETCNDTTSSKTTEGRKELQKIVDKFESLLTNQTLWRTEGRQEISSTATTILRDVESKVLETALKDPEQKVLKIQNDSVAIETQAITDNCSEERKTFNLNVQMNSMDIRCSDIIQGDTQGPSAIAFISYSSLGNIINATFFEEMDKKDQVYLNSQVVSAAIGPKRNVSLSKSVTLTFQHVKMTPSTKKVFCVYWKSTGQGSQWSRDGCFLIHVNKSHTMCNCSHLSSFAVLMALTSQEEDPVLTVITYVGLSVSLLCLLLAALTFLLCKAIRNTSTSLHLQLSLCLFLAHLLFLVGIDRTEPKVLCSIIAGALHYLYLAAFTWMLLEGVHLFLTARNLTVVNYSSINRLMKWIMFPVGYGVPAVTVAISAASWPHLYGTADRCWLHLDQGFMWSFLGPVCAIFSANLVLFILVFWILKRKLSSLNSEVSTIQNTRMLAFKATAQLFILGCTWCLGLLQVGPAAQVMAYLFTIINSLQGFFIFLVYCLLSQQVQKQYQKWFREIVKSKSESETYTLSSKMGPDSKPSEGDVFPGQVKRKY

SEQ ID NO: 437 - protein, 786 aa, Homo Sapiens
MGGRVFLAFCVWLTLPGAETQDSRGCARWCPQNSSCVNATACRCNPGFSSFSEIITTPTETCDDINECATPSKVSCGKFSDCWNTEGSYDCVCSPGYEPVSGAKTFKNESENTCQDVDECQQNPRLCKSYGTCVNTLGSYTCQCLPGFKFIPEDPKVCTDVDECSSGQHQCDSSTVCFNTVGSYSCRCRPGWKPRHGIPNNQKDTVCEDMTFSTWTPPPGVHSQTLSRFFDKVQDLGRDSKTSSAEVTIQNVIKLVDELMEAPGDVEALAPPVRHLIATQLLSNLEDIMRILAKSLPKGPFTYISPSNTELTLMIQERGDKNVTMGQSSARMKLNWAVAAGAEDPGPAVAGILSIQNMTTLLANASLNLHSKKQAELEEIYESSIRGVQLRRLSAVNSIFLSHNNTKELNSPILFAFSHLESSDGEAGRDPPAKDVMPGPRQELLCAFWKSDSDRGGHWATEGCQVLGSKNGSTTCQCSHLSSFAILMAHYDVEDWKLTLITRVGLALSLFCLLLCILTFLLVRPIQGSRTTIHLHLCICLFVGSTIFLAGIENEGGQVGLRCRLVAGLLHYCFLAAFCWMSLEGLELYFLVVRVFQGQGLSTRWLCLIGYGVPLLIVGVSAAIYSKGYGRPRYCWLDFEQGFLWSFLGPVTFIILCNAVIFVTTVWKLTQKFSEINPDMKKLKKARALTITAIAQLFLLGCTWVFGLFIFDDRSLVLTYVFTILNCLQGAFLYLLHCLLNKKVREEYRKWACLVAGGSKYSEFTSTTSGTGHNQTRALRASESGI

SEQ ID NO: 438 - protein, 835 aa, Homo Sapiens
MGGRVFLAFCVWLTLPGAETQDSRGCARWCPQNSSCVNATACRCNPGFSSFSEIITTPTETCDDINECATPSKVSCGKFSDCWNTEGSYDCVCSPGYEPVSGAKTFKNESENTCQDVDECQQNPRLCKSYGTCVNTLGSYTCQCLPGFKFIPEDPKVCTDVNECTSGQNPCHSSTHCLNNVGSYQCRCRPGWQPIPGSPNGPNNTVCEDVDECSSGQHQCDSSTVCFNTVGSYSCRCRPGWKPRHGIPNNQKDTVCEDMTFSTWTPPPGVHSQTLSRFFDKVQDLGRDSKTSSAEVTIQNVIKLVDELMEAPGDVEALAPPVRHLIATQLLSNLEDIMRILAKSLPKGPFTYISPSNTELTLMIQERGDKNVTMGQSSARMKLNWAVAAGAEDPGPAVAGILSIQNMTTLLANASLNLHSKKQAELEEIYESSIRGVQLRRLSAVNSIFLSHNNTKELNSPILFAFSHLESSDGEAGRDPPAKDVMPGPRQELLCAFWKSDSDRGGHWATEGCQVLGSKNGSTTCQCSHLSSFAILMAHYDVEDWKLTLITRVGLALSLFCLLLCILTFLLVRPIQGSRTTIHLHLCICLFVGSTIFLAGIENEGGQVGLRCRLVAGLLHYCFLAAFCWMSLEGLELYFLVVRVFQGQGLSTRWLCLIGYGVPLLIVGVSAAIYSKGYGRPRYCWLDFEQGFLWSFLGPVTFIILCNAVIFVTTVWKLTQKFSEINPDMKKLKKARALTITAIAQLFLLGCTWVFGLFIFDDRSLVLTYVFTILNCLQGAFLYLLHCLLNKKVREEYRKWACLVAGGSKYSEFTSTTSGTGHNQTRALRASESGI

SEQ ID NO: 439 - protein, 742 aa, Homo Sapiens
MGGRVFLAFCVWLTLPGAETQDSRGCARWCPQNSSCVNATACRCNPGFSSFSEIITTPTETCDDINECATPSKVSCGKFSDCWNTEGSYDCVCSPGYEPVSGAKTFKNESENTCQDVDECSSGQHQCDSSTVCFNTVGSYSCRCRPGWKPRHGIPNNQKDTVCEDMTFSTWTPPPGVHSQTLSRFFDKVQDLGRDSKTSSAEVTIQNVIKLVDELMEAPGDVEALAPPVRHLIATQLLSNLEDIMRILAKSLPKGPFTYISPSNTELTLMIQERGDKNVTMGQSSARMKLNWAVAAGAEDPGPAVAGILSIQNMTTLLANASLNLHSKKQAELEEIYESSIRGVQLRRLSAVNSIFLSHNNTKELNSPILFAFSHLESSDGEAGRDPPAKDVMPGPRQELLCAFWKSDSDRGGHWATEGCQVLGSKNGSTTCQCSHLSSFAILMAHYDVEDWKLTLITRVGLALSLFCLLLCILTFLLVRPIQGSRTTIHLHLCICLFVGSTIFLAGIENEGGQVGLRCRLVAGLLHYCFLAAFCWMSLEGLELYFLVVRVFQGQGLSTRWLCLIGYGVPLLIVGVSAAIYSKGYGRPRYCWLDFEQGFLWSFLGPVTFIILCNAVIFVTTVWKLTQKFSEINPDMKKLKKARALTITAIAQLFLLGCTWVFGLFIFDDRSLVLTYVFTILNCLQGAFLYLLHCLLNKKVREEYRKWACLVAGGSKYSEFTSTTSGTGHNQTRALRASESGI

SEQ ID NO: 440 - protein, 164 aa, Homo Sapiens
MGGRVFLAFCVWLTLPGAETQDSRGCARWCPQNSSCVNATACRCNPGFSSFSEIITTPTETCDDINECATPSKVSCGKFSDCWNTEGSYDCVCSPGYEPVSGAKTFKNESENTCQDVNECTSGQNPCHSSTHCLNNVGSYQCRCRPGWQPIPGSPNGPNNTVCE

SEQ ID NO: 441 - protein, 154 aa, Homo Sapiens
MGGRVFLAFCVWLTLPGAETQDSRGCARWCPQNSSCVNATACRCNPGFSSFSEIITTPTETCDDINECATPSKVSCGKFSDCWNTEGSYDCVCSPGYEPVSGAKTFKNESENTCQGKNHPTSSDFPSMRFGVTRAILAASREQGLGCRVSAWRL

SEQ ID NO: 442 - protein, 157 aa, Homo Sapiens [sequence omitted]

SEQ ID NO: 443 - protein, 160 aa, Homo Sapiens
EYQLLLQVTYRDSKEKRDLRNFLKLLKPPLLWSHGLIRIIRAKATTDCNSLNGVLQCTCEDSYTWFPPSCLDPQNCYLHTAGALPSCECHLNNLSQSVNFCERTKIWGTFKINERFTNDLLNSSSAIYSKYANGIEIQLKKAYERIQGFESVQVTQFRPV

SEQ ID NO: 444 - protein, 713 aa, Homo Sapiens
MDISIQRNGSIVAGYEVVGSSSASELLSAIEHVAEKAKTALHKLFPLEDGSFRVFGKAQCNDIVFGFGSKDDEYTLPCSSGYRGNITAKCESSGWQVIRETCVLSLLEELNKNFSMIVGNATEAAVSSFVQNLSVIIRQNPSTTVGNLASVVSILSNISSLSLASHFRVSNSTMEDVISIADNILNSASVTNWTVLLREEKYASSRLLETLENISTLVPPTALPLNFSRKFIDWKGIPVNKSQLKRGYSYQIKMCPQNTSIPIRGRVLIGSDQFQRSLPETIISMASLTLGNILPVSKNGNAQVNGPVISTVIQNYSINEVFLFFSKIESNLSQPHCVFWDFSHLQWNDAGCHLVNETQDIVTCQCTHLTSFSILMSPFVPSTIFPVVKWITYVGLGISIGSLILCLIIEALFWKQIKKSQTSHTRRICMVNIALSLLIADVWFIVGATVDTTVNPSGVCTAAVFFTHFFYLSLFFWMLMLGILLAYRIILVFHHMAQHLMMAVGFCLGYGCPLIISVITIAVTQPSNTYKRKDVCWLNWSNGSKPLLAFVVPALAIVAVNFVVVLLVLTKLWRPTVGERLSRDDKATIIRVGKSLLILTPLLGLTWGFGIGTIVDSQNLAWHVIFALLNAFQGFFILCFGILLDSKLRQLLFNKLSALSSWKQTEKQNSSDLSAKPKFSKPFNPLQNKGHYAFSHTGDSSDNIMLTQFVSNE

SEQ ID NO: 445 - protein, 218 aa, Homo Sapiens
MKVGVLWLISFFTFTDGHGGFLGKNDGIKTKKELIVNKKKHLGPVEEYQLLLQVTYRDSKEKRDLRNFLKLLKPPLLWSHGLIRIIRAKATTDCNSLNGVLQCTCEDSYTWFPPSCLDPQNCYLHTAGALPSCECHLNNLSQSVNFCERTKIWGTFKINERFTNDLLNSSSAIYSKYANGIEIQLKKAYERIQGFESVQVTQFRMSLLSPKLECNGTI

SEQ ID NO: 446 - protein, 910 aa, Homo Sapiens
MKVGVLWLISFFTFTDGHGGFLGKNDGIKTKKELIVNKKKHLGPVEEYQLLLQVTYRDSKEKRDLRNFLKLLKPPLLWSHGLIRIIRAKATTDCNSLNGVLQCTCEDSYTWFPPSCLDPQNCYLHTAGALPSCECHLNNLSQSVNFCERTKIWGTFKINERFTNDLLNSSSAIYSKYANGIEIQLKKAYERIQGFESVQVTQFRNGSIVAGYEVVGSSSASELLSAIEHVAEKAKTALHKLFPLEDGSFRVFGKAQCNDIVFGFGSKDDEYTLPCSSGYRGNITAKCESSGWQVIRETCVLSLLEELNKNFSMIVGNATEAAVSSFVQNLSVIIRQNPSTTVGNLASVVSILSNISSLSLASHFRVSNSTMEDVISIADNILNSASVTNWTVLLREEKYASSRLLETLENISTLVPPTALPLNFSRKFIDWKGIPVNKSQLKRGYSYQIKMCPQNTSIPIRGRVLIGSDQFQRSLPETIISMASLTLGNILPVSKNGNAQVNGPVISTVIQNYSINEVFLFFSKIESNLSQPHCVFWDFSHLQWNDAGCHLVNETQDIVTCQCTHLTSFSILMSPFVPSTIFPVVKWITYVGLGISIGSLILCLIIEALFWKQIKKSQTSHTRRICMVNIALSLLIADVWFIVGATVDTTVNPSGVCTAAVFFTHFFYLSLFFWMLMLGILLAYRIILVFHHMAQHLMMAVGFCLGYGCPLIISVITIAVTQPSNTYKRKDVCWLNWSNGSKPLLAFVVPALAIVAVNFVVVLLVLTKLWRPTVGERLSRDDKATIIRVGKSLLILTPLLGLTWGFGIGTIVDSQNLAWHVIFALLNAFQGFFILCFGILLDSKLRQLLFNKLSALSSWKQTEKQNSSDLSAKPKFSKPFNPLQNKGHYAFSHTGDSSDNIMLTQFVSNE

SEQ ID NO: 447 - protein, 137 aa, Homo Sapiens
  misc_feature (1)..(1): Xaa can be any naturally occurring amino acid
XWSHGLIRIIRAKATTDCNSLNGVLQCTCEDSYTWFPPSCLDPQNCYLHTAGALPSCECHLNNLSQSVNFCERTKIWGTFKINERFTNDLLNSSSAIYSKYANGIEIQLKKAYERIQGFESVQVTQFRTVIHLWNLV

SEQ ID NO: 448 - protein, 6 aa, Homo Sapiens
MTPQSL

SEQ ID NO: 449 - protein, 95 aa, Homo Sapiens
MTPQSLLQTTLFLLSLLFLVQAHPASRSFPDPRGLYHFCLYWNRHAGRLHLLYGKRDFLLSDKASSLLCFQHQEESLAQGPPLLATSVTSWWSPQ

SEQ ID NO: 450 - protein, 125 aa, Homo Sapiens
MTPQSLLQTTLFLLSLLFLVQAHPASRSFPDPRGLYHFCLYWNRHAGRLHLLYGKRDFLLSDKASSLLCFQHQEESLAQGPPLLATSVTSWWSPQNISLPSAASFTFSFHSPPHTAAHNASVDMC

SEQ ID NO: 451 - protein, 90 aa, Homo Sapiens
MTPQSLLQTTLFLLSLLFLVQAPATGSHLQPLPPQVPTAGATGKTFASAASGTRHTGAASTTNPHQTCASPSRTPKRPSQSMPLSLQPTL

SEQ ID NO: 452 - protein, 118 aa, Homo Sapiens
MTPQSLLQTTLFLLSLLFLVQAPATGSHLQPLPPQVPTAGATGKTFASAASGTRHTGAASTTNPHQTCASPSRTPKRPSQSMPLSLQPTLLPDPSLTPGASTTSASTGTDMLGDYIFS

SEQ ID NO: 453 - protein, 91 aa, Homo Sapiens
MTPQSLLQTTLFLLSLLFLVQASASSGAHGRGHREDFRFCSQRNQTHRSSLHYKPTPDLRISIENSEEALTVHAPFPAAHPASRSFPDPRG

SEQ ID NO: 454 - protein, 98 aa, Homo Sapiens
MTPQSLLQTTLFLLSLLFLVQASASSGAHGRGHREDFRFCSQRNQTHRSSLHYKPTPDLRISIENSEEALTVHAPFPAAHPASRSFPDPRGLYHFCLY

SEQ ID NO: 455 - protein, 103 aa, Homo Sapiens
MTPQSLLQTTLFLLSLLFLVQASASSGAHGRGHREDFRFCSQRNQTHRSSLHYKPTPDLRISIENSEEALTVHAPFPAAHPASRSFPDPRGLYHFCLYWNRHA

SEQ ID NO: 456 - protein, 114 aa, Homo Sapiens
MTPQSLLQTTLFLLSLLFLVQASASSGAHGRGHREDFRFCSQRNQTHRSSLHYKPTPDLRISIENSEEALTVHAPFPAAHPASRSFPDPRGLYHFCLYWNRHAGRLHLLYGKRD

SEQ ID NO: 457 - protein, 118 aa, Homo Sapiens
MTPQSLLQTTLFLLSLLFLVQASASSGAHGRGHREDFRFCSQRNQTHRSSLHYKPTPDLRISIENSEEALTVHAPFPAAHPASRSFPDPRGLYHFCLYWNRHAGRLHLLYGKRDFLLS

SEQ ID NO: 458 - protein, 118 aa, Homo Sapiens; identical to SEQ ID NO: 457

SEQ ID NO: 459 - protein, 125 aa, Homo Sapiens
MTPQSLLQTTLFLLSLLFLVQASASSGAHGRGHREDFRFCSQRNQTHRSSLHYKPTPDLRISIENSEEALTVHAPFPAAHPASRSFPDPRGLYHFCLYWNRHAGRLHLLYGKRDFLLSDKASSLL

SEQ ID NO: 460 - protein, 145 aa, Homo Sapiens
MTPQSLLQTTLFLLSLLFLVQASASSGAHGRGHREDFRFCSQRNQTHRSSLHYKPTPDLRISIENSEEALTVHAPFPAAHPASRSFPDPRGLYHFCLYWNRHAGRLHLLYGKRDFLLSDKASSLLCFQHQEESLAQGPPLLATSV

SEQ ID NO: 461 - protein, 146 aa, Homo Sapiens
MTPQSLLQTTLFLLSLLFLVQASASSGAHGRGHREDFRFCSQRNQTHRSSLHYKPTPDLRISIENSEEALTVHAPFPAAHPASRSFPDPRGLYHFCLYWNRHAGRLHLLYGKRDFLLSDKASSLLCFQHQEESLAQGPPLLATSVT

SEQ ID NO: 462 - protein, 164 aa, Homo Sapiens
MTPQSLLQTTLFLLSLLFLVQASASSGAHGRGHREDFRFCSQRNQTHRSSLHYKPTPDLRISIENSEEALTVHAPFPAAHPASRSFPDPRGLYHFCLYWNRHAGRLHLLYGKRDFLLSDKASSLLCFQHQEESLAQGPPLLATSVTSWWSPQNISLPSAASFTF

SEQ ID NO: 463 - protein, 168 aa, Homo Sapiens
MTPQSLLQTTLFLLSLLFLVQASASSGAHGRGHREDFRFCSQRNQTHRSSLHYKPTPDLRISIENSEEALTVHAPFPAAHPASRSFPDPRGLYHFCLYWNRHAGRLHLLYGKRDFLLSDKASSLLCFQHQEESLAQGPPLLATSVTSWWSPQNISLPSAASFTFSFHS

SEQ ID NO: 464 - protein, 198 aa, Homo Sapiens
MTPQSLLQTTLFLLSLLFLVQASASSGAHGRGHREDFRFCSQRNQTHRSSLHYKPTPDLRISIENSEEALTVHAPFPAAHPASRSFPDPRGLYHFCLYWNRHAGRLHLLYGKRDFLLSDKASSLLCFQHQEESLAQGPPLLATSVTSWWSPQNISLPSAASFTFSFHSPPHTAAHNASVDMCELKRDLQLLSQFLKHP

SEQ ID NO: 465 - protein, 692 aa, Homo Sapiens
MTPQSLLQTTLFLLSLLFLVQASASSGAHGRGHREDFRFCSQRNQTHRSSLHYKPTPDLRISIENSEEALTVHAPFPAAHPASRSFPDPRGLYHFCLYWNRHAGRLHLLYGKRDFLLSDKASSLLCFQHQEESLAQGPPLLATSVTSWWSPQNISLPSAASFTFSFHSPPHTAAHNASVDMCELKRDLQLLSQFLKHPQKASRRPSAAPASQQLQSLESKLTSVRFMGDMVSFEEDRINATVWKLQPTAGLQDLHIHSRQEEEQSEIMEYSVLLPRTLFQRTKGRSGEAEKRLLLVDFSSQALFQDKNSSQVLGEKVLGIVVQNTKVANLTEPVVLTFQHQLQPKNVTLQCVFWVEDPTLSSPGHWSSAGCETVRRETQTSCFCNHLTYFAVLMVSSVEVDAVHKHYLSLLSYVGCVVSALACLVTIAAYLCSRRKPRDYTIKVHMNLLLAVFLLDTSFLLSEPVALTGSEAGCRASAIFLHFSLLTCLSWMGLEGYNLYRLVVEVFGTYVPGYLLKLSAMGWGFPIFLVTLVALVDVDNYGPIILAVHRTPEGVIYPSMCWIRDSLVSYITNLGLFSLVFLFNMAMLATMVVQILRLRPHTQKWSHVLTLLGLSLVLGLPWALIFFSFASGTFQLVVLYLFSIITSFQGFLIFIWYWSMRLQARGGPSPLKSNSDSARLPISSGSTSSSRI

SEQ ID NO: 466 - protein, 97 aa, Homo Sapiens
MTPQSLLQTTLFLLSLLFLVQASGTRHTGAASTTNPHQTCASPSRTPKRPSQSMPLSLQPTLLPDPSLTPGASTTSASTGTDMLGDYIFSMASVTSC

SEQ ID NO: 467 - protein, 97 aa, Homo Sapiens; identical to SEQ ID NO: 466

SEQ ID NO: 468 - protein, 97 aa, Homo Sapiens; identical to SEQ ID NO: 466

SEQ ID NO: 469 - protein, 68 aa, Homo Sapiens
MTPQSLLQTTLFLLSLLFLVQASSLLCFQHQEESLAQGPPLLATSVTSWWSPQNISLPSAASFTFSFH

SEQ ID NO: 470 - protein, 42 aa, Homo Sapiens
MTPQSLLQTTLFLLSLLFLVQGAHGRGHREDFRFCSQRNQTH

SEQ ID NO: 471 - protein, 50 aa, Homo Sapiens
MTPQSLLQTTLFLLSLLFLVQGAHGRGHREDFRFCSQRNQTHRSSLHYKP

SEQ ID NO: 472 - protein, 55 aa, Homo Sapiens
MTPQSLLQTTLFLLSLLFLVQGAHGRGHREDFRFCSQRNQTHRSSLHYKPTPDLR

SEQ ID NO: 473 - protein, 56 aa, Homo Sapiens
MTPQSLLQTTLFLLSLLFLVQGAHGRGHREDFRFCSQRNQTHRSSLHYKPTPDLRI

SEQ ID NO: 474 - protein, 70 aa, Homo Sapiens
MTPQSLLQTTLFLLSLLFLVQGAHGRGHREDFRFCSQRNQTHRSSLHYKPTPDLRISIENSEEALTVHAP

SEQ ID NO: 475 - protein, 77 aa, Homo Sapiens
MTPQSLLQTTLFLLSLLFLVQGAHGRGHREDFRFCSQRNQTHRSSLHYKPTPDLRISIENSEEALTVHAPFPAAHPA

SEQ ID NO: 476 - protein, 84 aa, Homo Sapiens
MTPQSLLQTTLFLLSLLFLVQGAHGRGHREDFRFCSQRNQTHRSSLHYKPTPDLRISIENSEEALTVHAPFPAAHPASRSFPDP

SEQ ID NO: 477 - protein, 84 aa, Homo Sapiens; identical to SEQ ID NO: 476

SEQ ID NO: 478 - protein, 94 aa, Homo Sapiens
MTPQSLLQTTLFLLSLLFLVQGAHGRGHREDFRFCSQRNQTHRSSLHYKPTPDLRISIENSEEALTVHAPFPAAHPASRSFPDPRGLYHFCLYW

SEQ ID NO: 479 - protein, 94 aa, Homo Sapiens; identical to SEQ ID NO: 478

SEQ ID NO: 480 - protein, 100 aa, Homo Sapiens
MTPQSLLQTTLFLLSLLFLVQGAHGRGHREDFRFCSQRNQTHRSSLHYKPTPDLRISIENSEEALTVHAPFPAAHPASRSFPDPRGLYHFCLYWNRHAGR

SEQ ID NO: 481 - protein, 107 aa, Homo Sapiens
MTPQSLLQTTLFLLSLLFLVQGAHGRGHREDFRFCSQRNQTHRSSLHYKPTPDLRISIENSEEALTVHAPFPAAHPASRSFPDPRGLYHFCLYWNRHAGRLHLLYGK

SEQ ID NO: 482 - protein, 110 aa, Homo Sapiens
MTPQSLLQTTLFLLSLLFLVQGAHGRGHREDFRFCSQRNQTHRSSLHYKPTPDLRISIENSEEALTVHAPFPAAHPASRSFPDPRGLYHFCLYWNRHAGRLHLLYGKRDF

SEQ ID NO: 483 - protein, 111 aa, Homo Sapiens
MTPQSLLQTTLFLLSLLFLVQGAHGRGHREDFRFCSQRNQTHRSSLHYKPTPDLRISIENSEEALTVHAPFPAAHPASRSFPDPRGLYHFCLYWNRHAGRLHLLYGKRDFL

SEQ ID NO: 484 - protein, 113 aa, Homo Sapiens
MTPQSLLQTTLFLLSLLFLVQGAHGRGHREDFRFCSQRNQTHRSSLHYKPTPDLRISIENSEEALTVHAPFPAAHPASRSFPDPRGLYHFCLYWNRHAGRLHLLYGKRDFLLS

SEQ ID NO: 485 - protein, 116 aa, Homo Sapiens
MTPQSLLQTTLFLLSLLFLVQGAHGRGHREDFRFCSQRNQTHRSSLHYKPTPDLRISIENSEEALTVHAPFPAAHPASRSFPDPRGLYHFCLYWNRHAGRLHLLYGKRDFLLSDKA

SEQ ID NO: 486 - protein, 116 aa, Homo Sapiens; identical to SEQ ID NO: 485

SEQ ID NO: 487 - protein, 119 aa, Homo Sapiens
MTPQSLLQTTLFLLSLLFLVQGAHGRGHREDFRFCSQRNQTHRSSLHYKPTPDLRISIENSEEALTVHAPFPAAHPASRSFPDPRGLYHFCLYWNRHAGRLHLLYGKRDFLLSDKASSL

SEQ ID NO: 488 - protein, 119 aa, Homo Sapiens; identical to SEQ ID NO: 487

SEQ ID NO: 489 - protein, 122 aa, Homo Sapiens
MTPQSLLQTTLFLLSLLFLVQGAHGRGHREDFRFCSQRNQTHRSSLHYKPTPDLRISIENSEEALTVHAPFPAAHPASRSFPDPRGLYHFCLYWNRHAGRLHLLYGKRDFLLSDKASSLLCF

SEQ ID NO: 490 - protein, 131 aa, Homo Sapiens
MTPQSLLQTTLFLLSLLFLVQGAHGRGHREDFRFCSQRNQTHRSSLHYKPTPDLRISIENSEEALTVHAPFPAAHPASRSFPDPRGLYHFCLYWNRHAGRLHLLYGKRDFLLSDKASSLLCFQHQEESLAQ

SEQ ID NO: 491 - protein, 131 aa, Homo Sapiens; identical to SEQ ID NO: 490

SEQ ID NO: 492 - protein, 141 aa, Homo Sapiens
MTPQSLLQTTLFLLSLLFLVQGAHGRGHREDFRFCSQRNQTHRSSLHYKPTPDLRISIENSEEALTVHAPFPAAHPASRSFPDPRGLYHFCLYWNRHAGRLHLLYGKRDFLLSDKASSLLCFQHQEESLAQGPPLLATSVT

SEQ ID NO: 493 - protein, 153 aa, Homo Sapiens
MTPQSLLQTTLFLLSLLFLVQGAHGRGHREDFRFCSQRNQTHRSSLHYKPTPDLRISIENSEEALTVHAPFPAAHPASRSFPDPRGLYHFCLYWNRHAGRLHLLYGKRDFLLSDKASSLLCFQHQEESLAQGPPLLATSVTSWWSPQNISLPS

SEQ ID NO: 494 - protein, 154 aa, Homo Sapiens
MTPQSLLQTTLFLLSLLFLVQGAHGRGHREDFRFCSQRNQTHRSSLHYKPTPDLRISIENSEEALTVHAPFPAAHPASRSFPDPRGLYHFCLYWNRHAGRLHLLYGKRDFLLSDKASSLLCFQHQEESLAQGPPLLATSVTSWWSPQNISLPSA

SEQ ID NO: 495 - protein, 160 aa, Homo Sapiens
MTPQSLLQTTLFLLSLLFLVQGAHGRGHREDFRFCSQRNQTHRSSLHYKPTPDLRISIENSEEALTVHAPFPAAHPASRSFPDPRGLYHFCLYWNRHAGRLHLLYGKRDFLLSDKASSLLCFQHQEESLAQGPPLLATSVTSWWSPQNISLPSAASFTFS

SEQ ID NO: 496 - protein, 162 aa, Homo Sapiens
MTPQSLLQTTLFLLSLLFLVQGAHGRGHREDFRFCSQRNQTHRSSLHYKPTPDLRISIENSEEALTVHAPFPAAHPASRSFPDPRGLYHFCLYWNRHAGRLHLLYGKRDFLLSDKASSLLCFQHQEESLAQGPPLLATSVTSWWSPQNISLPSAASFTFSFH

SEQ ID NO: 497 - protein, 167 aa, Homo Sapiens
MTPQSLLQTTLFLLSLLFLVQGAHGRGHREDFRFCSQRNQTHRSSLHYKPTPDLRISIENSEEALTVHAPFPAAHPASRSFPDPRGLYHFCLYWNRHAGRLHLLYGKRDFLLSDKASSLLCFQHQEESLAQGPPLLATSVTSWWSPQNISLPSAASFTFSFHSPPHT

SEQ ID NO: 498 - protein, 167 aa, Homo Sapiens; identical to SEQ ID NO: 497

SEQ ID NO: 499 - protein, 199 aa, Homo Sapiens
MTPQSLLQTTLFLLSLLFLVQGAHGRGHREDFRFCSQRNQTHRSSLHYKPTPDLRISIENSEEALTVHAPFPAAHPASRSFPDPRGLYHFCLYWNRHAGRLHLLYGKRDFLLSDKASSLLCFQHQEESLAQGPPLLATSVTSWWSPQNISLPSAASFTFSFHSPPHTAAHNASVDMCELKRDLQLLSQFLKHPQKASRR

SEQ ID NO: 500 - protein, 687 aa, Homo Sapiens
MTPQSLLQTTLFLLSLLFLVQGAHGRGHREDFRFCSQRNQTHRSSLHYKPTPDLRISIENSEEALTVHAPFPAAHPASRSFPDPRGLYHFCLYWNRHAGRLHLLYGKRDFLLSDKASSLLCFQHQEESLAQGPPLLATSVTSWWSPQNISLPSAASFTFSFHSPPHTAAHNASVDMCELKRDLQLLSQFLKHPQKASRRPSAAPASQQLQSLESKLTSVRFMGDMVSFEEDRINATVWKLQPTAGLQDLHIHSRQEEEQSEIMEYSVLLPRTLFQRTKGRSGEAEKRLLLVDFSSQALFQDKNSSQVLGEKVLGIVVQNTKVANLTEPVVLTFQHQLQPKNVTLQCVFWVEDPTLSSPGHWSSAGCETVRRETQTSCFCNHLTYFAVLMVSSVEVDAVHKHYLSLLSYVGCVVSALACLVTIAAYLCSRRKPRDYTIKVHMNLLLAVFLLDTSFLLSEPVALTGSEAGCRASAIFLHFSLLTCLSWMGLEGYNLYRLVVEVFGTYVPGYLLKLSAMGWGFPIFLVTLVALVDVDNYGPIILAVHRTPEGVIYPSMCWIRDSLVSYITNLGLFSLVFLFNMAMLATMVVQILRLRPHTQKWSHVLTLLGLSLVLGLPWALIFFSFASGTFQLVVLYLFSIITSFQGFLIFIWYWSMRLQARGGPSPLKSNSDSARLPISSGSTSSSRI

SEQ ID NO: 501 - protein, 687 aa, Homo Sapiens; identical to SEQ ID NO: 500

SEQ ID NO: 502 - protein, 687 aa, Homo Sapiens; identical to SEQ ID NO: 500

SEQ ID NO: 503 - protein, 687 aa, Homo Sapiens; identical to SEQ ID NO: 500

SEQ ID NO: 504 - protein, 693 aa, Homo Sapiens
MTPQSLLQTTLFLLSLLFLVQGAHGRGHREDFRFCSQRNQTHRSSLHYKPTPDLRISIENSEEALTVHAPFPAAHPASRSFPDPRGLYHFCLYWNRHAGRLHLLYGKRDFLLSDKASSLLCFQHQEESLAQGPPLLATSVTSWWSPQNISLPSAASFTFSFHSPPHTAAHNASVDMCELKRDLQLLSQFLKHPQKASRRPSAAPASQQLQSLESKLTSVRFMGDMVSFEEDRINATVWKLQPTAGLQDLHIHSRQEEEQSEIMEYSVLLPRTLFQRTKGRSGEAEKRLLLVDFSSQALFQDKNSSQVLGEKVLGIVVQNTKVANLTEPVVLTFQHQLQPKNVTLQCVFWVEDPTLSSPGHWSSAGCETVRRETQTSCFCNHLTYFAVLMVSSVEVDAVHKHYLSLLSYVGCVVSALACLVTIAAYLCSRVPLPCRRKPRDYTIKVHMNLLLAVFLLDTSFLLSEPVALTGSEAGCRASAIFLHFSLLTCLSWMGLEGYNLYRLVVEVFGTYVPGYLLKLSAMGWGFPIFLVTLVALVDVDNYGPIILAVHRTPEGVIYPSMCWIRDSLVSYITNLGLFSLVFLFNMAMLATMVVQILRLRPHTQKWSHVLTLLGLSLVLGLPWALIFFSFASGTFQLVVLYLFSIITSFQGFLIFIWYWSMRLQARGGPSPLKSNSDSARLPISSGSTSSSRI

SEQ ID NO: 505 - protein, 693 aa, Homo Sapiens; identical to SEQ ID NO: 504

SEQ ID NO: 506 - protein, 687 aa, Homo Sapiens; identical to SEQ ID NO: 500

SEQ ID NO: 507 - protein, 256 aa, Homo Sapiens
MTPQSLLQTTLFLLSLLFLVQGAHGRGHREDFRFCSQRNQTHRSSLHYKPTPDLRISIENSEEALTVHAPFPAAHPASRSFPDPRGLYHFCLYWNRHAGRLHLLYGKRDFLLSDKASSLLCFQHQEESLAQGPPLLATSVTSWWSPQNISLPSAASFTFSFHSPPHTAAHNASVDMCELKRDLQLLSQFLKHPQKASRRPSAAPASQQLQSLESKLTSVRFMGDMVSFEEDRINATVWKLQPTAGLQDLHIHSRQE

SEQ ID NO: 508 - protein, 78 aa, Homo Sapiens
MTPQSLLQTTLFLLSLLFLVQGRCPRQGPQGRLSLLQPAEPDTQEQPPLQTHTRPAHLHRELRRGPHSPCPFPCSPPC

SEQ ID NO: 509 - protein, 81 aa, Homo Sapiens
MTPQSLLQTTLFLLSLLFLVQGRCPRQGPQGRLSLLQPAEPDTQEQPPLQTHTRPAHLHRELRRGPHSPCPFPCSPPCFPI

SEQ ID NO: 510 - protein, 97 aa, Homo Sapiens
MTPQSLLQTTLFLLSLLFLVQGSGTRHTGAASTTNPHQTCASPSRTPKRPSQSMPLSLQPTLLPDPSLTPGASTTSASTGTDMLGDYIFSMASVTSC

SEQ ID NO: 511 - protein, 97 aa, Homo Sapiens; identical to SEQ ID NO: 510

SEQ ID NO: 512 - protein, 187 aa, Homo Sapiens
  misc_feature (1)..(1): Xaa can be any naturally occurring amino acid
XSVDMCELKRDLQLLSQFLKHPQKASRRPSAAPASQQLQSLESKLTSVRFMGDMVSFEEDRINATVWKLQPTAGLQDLHIHSRQEEEQSEIMEYSVLLPRTLFQRTKGRSGEAEKRLLLVDFSSQALFQDKNSSQVLGEKVFGTYVPGYLLKLSAMGWGFPIFLVTLVALVDVDNYGPIILAVHRTP

SEQ ID NO: 513 - protein, 528 aa, Homo Sapiens
MDHCGALFLCLCLLTLQNATTETWEELLSYMENMQVSRGRSSVFSSRQLHQLEQMLLNTSFPGYNLTLQTPTIQSLAFKLSCDFSGLSLTSATLKRVPQAGGQHARGQHAMQFPAELTRDACKTRPRELRLICIYFSNTHFFKDENNSSLLNNYVLGAQLSHGHVNNLRDPVNISFWHNQSLEGYTLTCVFWKEGARKQPWGGWSPEGCRTEQPSHSQVLCRCNHLTYFAVLMQLSPALVPAELLAPLTYISLVGCSISIVASLITVLLHFHFRKQSDSLTRIHMNLHASVLLLNIAFLLSPAFAMSPVPGSACTALAAALHYALLSCLTWMAIEGFNLYLLLGRVYNIYIRRYVFKLGVLGWGAPALLVLLSLSVKSSVYGPCTIPVFDSWENGTGFQNMSICWVRSPVVHSVLVMGYGGLTSLFNLVVLAWALWTLRRLRERADAPSVRACHDTVTVLGLTVLLGTTWALAFFSFGVFLLPQLFLFTILNSLYGFFLFLWFCSQRCRSEAEAKAQIEAFSSSQTTQ

SEQ ID NO: 514 - protein, 528 aa, Homo Sapiens; identical to SEQ ID NO: 513

SEQ ID NO: 515 - protein, 221 aa, Homo Sapiens
MDHCGALFLCLCLLTLQNATTETWEELLSYMENMQVSRGRSSVFSSRQLHQLEQMLLNTSFPGYNLTLQTPTIQSLAFKLSCDFSGLSLTSATLKRVPQAGGQHARGQHAMQFPAELTRDACKTRPRELRLICIYFSNTHFFKDENNSSLLNNYVLGAQLSHGHVNNLRDPVNISFWHNQSLVLLGAPPFPLHPCPSVTLLLNTGLTRPKPVEPSWKSITL

SEQ ID NO: 516 - protein, 141 aa, Homo Sapiens
MFRSDRMWSCHWKWKPSPLLFLFALYIMCVPHSAVWGCANCRVVLSNPSGTFTSPCYPNDYPNSQACMWTLRAPTGYIIQITFNDFDIEEAPNCIYDSLSLDNGESQTKFCGATAKGLSFNSSANEMHVSFSSDFSIQKKG

SEQ ID NO: 517 - protein, 241 aa, Homo Sapiens
MFRSDRMWSCHWKWKPSPLLFLFALYIMCVPHSVWGCANCRVVLSNPSGTFTSPCYPNDYPNSQACMWTLRAPTGYIIQITFNDFDIEEAPNCIYDSLSLDNGESQTKFCGATAKGLSFNSSANEMHVSFSSDFSIQKKGFNASYIRVAVSLRNQKVILPQTSDAYQVSVAKSISIPELSAFTLCFEATKVGHEDSDWTAFSYSNASFTQLLSFGKAKSGYFLSISDSKCLLNNALPVKEK

SEQ ID NO: 518 - protein, 1221 aa, Homo Sapiens
MMFRSDRMWSCHWKWKPSPLLFLFALYIMCVPHSVWGCANCRVVLSNPSGTFTSPCYPNDYPNSQACMWTLRAPTGYIIQITFNDFDIEEAPNCIYDSLSLDNGESQTKFCGATAKGLSFNSSANEMHVSFSSDFSIQKKGFNASYIRVAVSLRNQKVILPQTSDAYQVSVAKSISIPELSAFTLCFEATKVGHEDSDWTAFSYSNASFTQLLSFGKAKSGYFLSISDSKCLLNNALPVKEKEDIFAESFEQLCLVWNNSLGSIGVNFKRNYETVPCDSTISKVIPGNGKLLLGSNQNEIVSLKGDIYNFRLWNFTMNAKILSNLSCNVKGNVVDWQNDFWNIPNLALKAESNLSCGSYLIPLPAAELASCADLGTLCQATVNSPSTTPPTVTTNMPVTNRIDKQRNDGIIYRISVVIQNILRHPEVKVQSKVAEWLNSTFQNWNYTVYVVNISFHLSAGEDKIKVKRSLEDEPRLVLWALLVYNATNNTNLEGKIIQQKLLKNNESLDEGLRLHTVNVRQLGHCLAMEEPKGYYWPSIQPSEYVLPCPDKPGFSASRICFYNATNPLVTYWGPVDISNCLKEANEVANQILNLTADGQNLTSANITNIVEQVKRIVNKEENIDITLGSTLMNIFSNILSSSDSDLLESSSEALKTIDELAFKIDLNSTSHVNITTRNLALSVSSLLPGTNAISNFSIGLPSNNESYFQMDFESGQVDPLASVILPPNLLENLSPEDSVLVRRAQFTFFNKTGLFQDVGPQRKTLVSYVMACSIGNITIQNLKDPVQIKIKHTRTQEVHHPICAFWDLNKNKSFGGWNTSGCVAHRDSDASETVCLCNHFTHFGVLMDLPRSASQLDARNTKVLTFISYIGCGISAIFSAATLLTYVAFEKLRRDYPSKILMNLSTALLFLNLLFLLDGWITSFNVDGLCIAVAVLLHFFLLATFTWMGLEAIHMYIALVKVFNTYIRRYILKFCIIGWGLPALVVSVVLASRNNNEVYGKESYGKEKGDEFCWIQDPVIFYVTCAGYFGVMFFLNIAMFIVVMVQICGRNGKRSNRTLREEVLRNLRSVVSLTFLLGMTWGFAFFAWGPLNIPFMYLFSIFNSLQGLFIFIFHCAMKENVQKQWRQHLCCGRFRLADNSDWSKTATNIIKKSSDNLGKSLSSSSIGSNSTYLTSKSKSSSTTYFKRNSHTDNVSYEHSFNKSGSLRQCFHGQVLVKTGPC

SEQ ID NO: 519 - protein, 1193 aa, Homo Sapiens
MMFRSDRMWSCHWKWKPSPLLFLFALYIMCVPHSVWGCANCRVVLSNPSGTFTSPCYPNDYPNSQACMWTLRAPTGYIIQITFNDFDIEEAPNCIYDSLSLDNGESQTKFCGATAKGLSFNSSANEMHVSFSSDFSIQKKGFNASYIRVAVSLRNQKVILPQTSDAYQVSVAKSISIPELSAFTLCFEATKVGHEDSDWTAFSYSNASFTQLLSFGKAKSGYFLSISDSKCLLNNALPVKEKEDIFAESFEQLCLVWNNSLGSIGVNFKRNYETVPCDSTISKVIPGNGKLLLGSNQNEIVSLKGDIYNFRLWNFTMNAKILSNLSCNVKGNVVDWQNDFWNIPNLALKAESNLSCGSYLIPLPAAELASCADLGTLCQDGIIYRISVVIQNILRHPEVKVQSKVAEWLNSTFQNWNYTVYVVNISFHLSAGEDKIKVKRSLEDEPRLVLWALLVYNATNNTNLEGKIIQQKLLKNNESLDEGLRLHTVNVRQLGHCLAMEEPKGYYWPSIQPSEYVLPCPDKPGFSASRICFYNATNPLVTYWGPVDISNCLKEANEVANQILNLTADGQNLTSANITNIVEQVKRIVNKEENIDITLGSTLMNIFSNILSSSDSDLLESSSEALKTIDELAFKIDLNSTSHVNITTRNLALSVSSLLPGTNAISNFSIGLPSNNESYFQMDFESGQVDPLASVILPPNLLENLSPEDSVLVRRAQFTFFNKTGLFQDVGPQRKTLVSYVMACSIGNITIQNLKDPVQIKIKHTRTQEVHHPICAFWDLNKNKSFGGWNTSGCVAHRDSDASETVCLCNHFTHFGVLMDLPRSASQLDARNTKVLTFISYIGCGISAIFSAATLLTYVAFEKLRRDYPSKILMNLSTALLFLNLLFLLDGWITSFNVDGLCIAVAVLLHFFLLATFTWMGLEAIHMYIALVKVFNTYIRRYILKFCIIGWGLPALVVSVVLASRNNNEVYGKESYGKEKGDEFCWIQDPVIFYVTCAGYFGVMFFLNIAMFIVVMVQICGRNGKRSNRTLREEVLRNLRSVVSLTFLLGMTWGFAFFAWGPLNIPFMYLFSIFNSLQGLFIFIFHCAMKENVQKQWRQHLCCGRFRLADNSDWSKTATNIIKKSSDNLGKSLSSSSIGSNSTYLTSKSKSSSTTYFKRNSHTDNVSYEHSFNKSGSLRQCFHGQVLVKTGPC

SEQ ID NO: 520 - protein, 1250 aa, Homo Sapiens
MMFRSDRMWSCHWKWKPSPLLFLFALYIMCVPHSVWGCANCRVVLSNPSGTFTSPCYPNDYPNSQACMWTLRAPTGYIIQITFNDFDIEEAPNCIYDSLSLDNGESQTKFCGATAKGLSFNSSANEMHVSFSSDFSIQKKGFNASYIRVAVSLRNQKVILPQTSDAYQVSVAKSISIPELSAFTLCFEATKVGHEDSDWTAFSYSNASFTQLLSFGKAKSGYFLSISDSKCLLNNALPVKEKEDIFAESFEQLCLVWNNSLGSIGVNFKRNYETVPCDSTISKVIPGNGKLLLGSNQNEIVSLKGDIYNFRLWNFTMNAKILSNLSCNVKGNVVDWQNDFWNIPNLALKAESNLSCGSYLIPLPAAELASCADLGTLCQATVNSPSTTPPTVTTNMPVTNRIDKQRNDGIIYRISVVIQNILRHPEVKVQSKVAEWLNSTFQNWNYTVYVVNISFHLSAGEDKIKVKRSLEDEPRLVLWALLVYNATNNTNLEGKIIQQKLLKNNESLDEGLRLHTVNVRQLGHCLAMEEPKGYYWPSIQPSEYVLPCPDKPGFSASRICFYNATNPLVTYWGPVDISNCLKEANEVANQILNLTADGQNLTSANITNIVEQVKRIVNKEENIDITLGSTLMNIFSNILSSSDSDLLESSSEALKTIDELAFKIDLNSTSHVNITTRNLALSVSSLLPGTNAISNFSIGLPSNNESYFQMDFESGQVDPLASVILPPNLLENLSPEDSVLVRRAQFTFFNKTGLFQDVGPQRKTLVSYVMACSIGNITIQNLKDPVQIKIKHTRTQEVHHPICAFWDLNKNKSFGGWNTSGCVAHRDSDASETVCLCNHFTHFGVLMDLPRSASQLDARNTKVLTFISYIGCGISAIFSAATLLTYVAFEKLRRDYPSKILMNLSTALLFLNLLFLLDGWITSFNVDGLCIAVAVLLHFFLLATFTWMGLEAIHMYIALVKVFNTYIRRYILKFCIIGWGLPALVVSVVLASRNNNEVYGKESYGKEKGDEFCWIQDPVIFYVTCAGYFGVMFFLNIAMFIVVMVQICGRNGKRSNRTLREEVLRNLRSVVSLTFLLGMTWGFAFFAWGPLNIPFMYLFSIFNSLQGLFIFIFHCAMKENVQKQWRQHLCCGRFRLADNSDWSKTATNIIKKSSDNLGKSLSSSSIGSNSTYLTSKSKSSSTTYFKRNSHTDSASMDKSLSKLAHADGDQTSIIPVHQVIDKVKGYCNAHSDNFYKNIIMSDTFSHSTKF

SEQ ID NO: 521 - protein, 1222 aa, Homo Sapiens
MMFRSDRMWSCHWKWKPSPLLFLFALYIMCVPHSVWGCANCRVVLSNPSGTFTSPCYPNDYPNSQACMWTLRAPTGYIIQITFNDFDIEEAPNCIYDSLSLDNGESQTKFCGATAKGLSFNSSANEMHVSFSSDFSIQKKGFNASYIRVAVSLRNQKVILPQTSDAYQVSVAKSISIPELSAFTLCFEATKVGHEDSDWTAFSYSNASFTQLLSFGKAKSGYFLSISDSKCLLNNALPVKEKEDIFAESFEQLCLVWNNSLGSIGVNFKRNYETVPCDSTISKVIPGNGKLLLGSNQNEIVSLKGDIYNFRLWNFTMNAKILSNLSCNVKGNVVDWQNDFWNIPNLALKAESNLSCGSYLIPLPAAELASCADLGTLCQDGIIYRISVVIQNILRHPEVKVQSKVAEWLNSTFQNWNYTVYVVNISFHLSAGEDKIKVKRSLEDEPRLVLWALLVYNATNNTNLEGKIIQQKLLKNNESLDEGLRLHTVNVRQLGHCLAMEEPKGYYWPSIQPSEYVLPCPDKPGFSASRICFYNATNPLVTYWGPVDISNCLKEANEVANQILNLTADGQNLTSANITNIVEQVKRIVNKEENIDITLGSTLMNIFSNILSSSDSDLLESSSEALKTIDELAFKIDLNSTSHVNITTRNLALSVSSLLPGTNAISNFSIGLPSNNESYFQMDFESGQVDPLASVILPPNLLENLSPEDSVLVRRAQFTFFNKTGLFQDVGPQRKTLVSYVMACSIGNITIQNLKDPVQIKIKHTRTQEVHHPICAFWDLNKNKSFGGWNTSGCVAHRDSDASETVCLCNHFTHFGVLMDLPRSASQLDARNTKVLTFISYIGCGISAIFSAATLLTYVAFEKLRRDYPSKILMNLSTALLFLNLLFLLDGWITSFNVDGLCIAVAVLLHFFLLATFTWMGLEAIHMYIALVKVFNTYIRRYILKFCIIGWGLPALVVSVVLASRNNNEVYGKESYGKEKGDEFCWIQDPVIFYVTCAGYFGVMFFLNIAMFIVVMVQICGRNGKRSNRTLREEVLRNLRSVVSLTFLLGMTWGFAFFAWGPLNIPFMYLFSIFNSLQGLFIFIFHCAMKENVQKQWRQHLCCGRFRLADNSDWSKTATNIIKKSSDNLGKSLSSSSIGSNSTYLTSKSKSSSTTYFKRNSHTDSASMDKSLSKLAHADGDQTSIIPVHQVIDKVKGYCNAHSDNFYKNIIMSDTFSHSTKF

SEQ ID NO: 522 - protein, 103 aa, Homo Sapiens
  misc_feature (1)..(1): Xaa can be any naturally occurring amino acid
XLGSTLMNIFSNILSSSDSDLLESSSEALKTIDELAFKIDLNSTSHVNITTRNLALSVSSLLPGTNAISNFSIGLPSNNESYFQLLSFTTCFEKTSKSAADGF

SEQ ID NO: 523 - protein, 135 aa, Homo Sapiens
  misc_feature (1)..(1): Xaa can be any naturally occurring amino acid
XVKVQSKVAEWLNSTFQNWNYTVYVVNISFHLSAGEDKIKVKRSLEDEPRLVLWALLVYNATNNTNLEGKIIQQKLLKNNESLDEGLRLHTVNVRQLGHCLAMEEPKGYYWPSIQPSEYVLPCPDKPGFSASRIW

SEQ ID NO: 524 - protein, 73 aa, Homo Sapiens
GQNLIRSIQINITRLAGTFGDVAVGLRISSDHKEQPIVTENAERQLVVKDGATYKVDVVPIKNQVVGCQSLPW

SEQ ID NO: 525 - protein, 123 aa, Homo Sapiens
MAAVTHYLYLCQFSWMLIQSVNFWYVLVMNDEHTERRYLLFFLLSWGLPAFVVILLIVILKGIYHQSMSQIYGLIHGDLCFIPNVYAALFTAALVPLTCLVVVFVVFIHAYQVKPQWKAYDDV

SEQ ID NO: 526 - protein, 123 aa, Homo Sapiens; identical to SEQ ID NO: 525

SEQ ID NO: 527 - protein, 334 aa, Homo Sapiens
MAAVTHYLYLCQFSWMLIQSVNFWYVLVMNDEHTERRYLLFFLLSWGLPAFVVILLIVILKGIYHQSMSQIYGLIHGDLCFIPNVYAALFTAALVPLTCLVVVFVVFIHAYQVKPQWKAYDDVFRGRTNAAEIPLILYLFALISVTWLWGGLHMAYRHFWMLVLFVIFNSLQGLYVFMVYFILHNQMCCPMKASYTVEMNGHPGPSTAFFTPGSGMPPAGGEISKSTQNLIGAMEEVPPDWERASFQQGSQASPDLKPSPQNGATFPSSGGYGQGSLIADEESQEFDDLIFALKTGAGLSVSDNESGQGSQEGGTLTDSQIVELRRIPIADTHL

SEQ ID NO: 528 - protein, 192 aa, Homo Sapiens
MAAVTHYLYLCQFSWMLIQSVNFWYVLVMNDEHTERRYLLFFLLSWGLPAFVVILLIVILKGIYHQSMSQIYGLIHGDLCFIPNVYAALFTAALVPLTCLVVVFVVFIHAYQVKPQWKAYDDVFRGRTNAAEIPLILYLFALISVTWLWGGLHMAYRHFWMLVLFVIFNSLQVLVSVSVIMNLVKAARRGAP

SEQ ID NO: 529 - protein, 148 aa, Homo Sapiens
MAKRSAAAAVPGMPSASLLVNLLSALLILFVFGETEIRFTGQTEFVVNETSTTVIRLIIERIGEPANVTAIVSLYGEDAGDFFDTYAAAFIPAGETNRTVYIAVCDDDLPEPDETFIFHLTLQLPSIAVSEPKGRNESMPLTLIREKG

SEQ ID NO: 530 - protein, 2038 aa, Homo Sapiens
MINESKGDAIYSAVYDVVRNRGNFGDVSVSWVVSPDFTQDVFPVQGTVVFGDQEFSKNITIYSLPDEIPEEMEEFTVILLNGTGGAKVGNRTTATLRIRRNDDPIYFAEPRVVRVQEGETANFTVLRNGSVDVTCMVQYATKDGKATARERDFIPVEKGETLIFEVGSRQQSISIFVNEDGIPETDEPFYIILLNSTGDTVVYQYGVATVIIEANDDPNGIFSLEPIDKAVEEGKTNAFWILRHRGYFGSVSVSWQLFQNDSALQPGQEFYETSGTVNFMDGEEAKPIILHAFPDKIPEFNEFYFLKLVNISGPGGQLAETNLQVTVMVPFNDDPFGVFILDPECLEREVAEDVLSEDDMSYITNFTILRQQGVFGDVQLGWEILSSEFPAGLPPMIDFLLVGIFPTTVHLQQHMRRHHSGTDALYFTGLEGAFGTVNPKYHPSRNNTIANFTFSAWVMPNANTNGFIIAKDDGNGSIYYGVKIQTNESHVTLSLHYKTLGSNATYIAKTTVMKYLEESVWLHLLIILEDGIIEFYLDGNAMPRGIKSLKGEAITDGPGILRIGAGINGNDRFTGLMQDVRSYERKLTLEEIYELHAMPAKSDLHPISGYLEFRQGETNKSFIISARDDNDEEGEELFILKLVSVYGGARISEENTTARLTIQKSDNANGLFGFTGACIPEIAEEGSTISCVVERTRGALDYVHVFYTISQIETDGINYLVDDFANASGTITFLPWQRSEVLNIYVLDDDIPELNEYFRVTLVSAIPGDGKLGSTPTSGASIDPEKETTDITIKASDHPYGLLQFSTGLPPQPKDAMTLPASSVPHITVEEEDGEIRLLVIRAQGLLGRVTAEFRTVSLTAFSPEDYQNVAGTLEFQPGERYKYIFINITDNSIPELEKSFKVELLNLEGGVAELFRVDGSGSGDGDMEFFLPTIHKRASLGVASQILVTIAASDHAHGVFEFSPESLFVSGTEPEDGYSTVTLNVIRHHGTLSPVTLHWNIDSDPDGDLAFTSGNITFEIGQTSANITVEILPDEDPELDKAFSVSVLSVSSGSLGAHINATLTVLASDDPYGIFIFSEKNRPVKVEEATQNITLSIIRLKGLMGKVLVSYATLDDMEKPPYFPPNLARATQGRDYIPASGFALFGANQSEATIAISILDDDEPERSESVFIELLNSTLVAKVQSRSIPNSPRLGPKVETIAQLIIIANDDAFGTLQLSAPIVRVAENHVGPIINVTRTGGAFADVSVKFKAVPITAIAGEDYSIASSDVVLLEGETSKAVPIYVINDIYPELEESFLVQLMNETTGGARLGALTEAVIIIEASDDPYGLFGFQITKLIVEEPEFNSVKVNLPIIRNSGTLGNVTVQWVATINGQLATGDLRVVSGNVTFAPGETIQTLLLEVLADDVPEIEEVIQVQLTDASGGGTIGLDRIANIIIPANDDPYGTVAFAQMVYRVQEPLERSSCANITVRRSGGHFGRLLLFYSTSDIDVVALAMEEGQDLLSYYESPIQGVPDPLWRTWMNVSAVGEPLYTCATLCLKEQACSAFSFFSASEGPQCFWMTSWISPAVNNSDFWTYRKNMTRVASLFSGQAVAGSDYEPVTRQWAIMQEGDEFANLTVSILPDDFPEMDESFLISLLEVHLMNISASLKNQPTIGQPNISTVVIALNGDAFGVFVIYNISPNTSEDGLFVEVQEQPQTLVELMIHRTGGSLGQVAVEWRVVGGTATEGLDFIGAGEILTFAEGETKKTVILTILDDSEPEDDESIIVSLVYTEGGSRILPSSDTVRVNILANDNVAGIVSFQTASRSVIGHEGEILQFHVIRTFPGRGNVTVNWKIIGQNLELNFANFSGQLFFPEGSLNTTLFVHLLDDNIPEEKEVYQVILYDVRTQGVPPAGIALLDAQGYAAVLTVEASDEPHGVLNFALSSRFVLLQEANITIQLFINREFGSLGAINVTYTTVPGMLSLKNQTVGNLAEPEVDFVPIIGFLILEEGETAAAINITILEDDVPELEEYFLVNLTYVGLTMAASTSFPPRL

SEQ ID NO: 531 - protein, 6306 aa, Homo Sapiens
MSVFLGPGMPSASLLVNLLSALLILFVFGETEIRFTGQTEFVVNETSTTVIRLIIERIGEPANVTAIVSLYGEDAGDFFDTYAAAFIPAGETNRTVYIAVCDDDLPEPDETFIFHLTLQKPSANVKLGWPRTVTVTILSNDNAFGIISFNMLPSIAVSEPKGRNESMPLTLIREKGTYGMVMVTFEVEGGPNPPDEDLSPVKGNITFPPGRATVIYNLTVLDDEVPENDEIFLIQLKSVEGGAEINTSRNSIEIIIKKNDSPVRFLQSIYLVPEEDHILIIPVVRGKDNNGNLIGSDEYEVSISYAVTTGNSTAHAQQNLDFIDLQPNTTVVFPPFIHESHLKFQIVDDTIPEIAESFHIMLLKDTLQGDAVLISPSVVQVTIKPNDKPYGVLSFNSVLFERTVIIDEDRISRYEEITVVRNGGTHGNVSANWVLTRNSTDPSPVTADIRPSSGVLHFAQGQMLATIPLTVVDDDLPEEAEAYLLQILPHTIRGGAEVSEPAELLFYIQDSDDVYGLITFFPMENQKIESSPGERYLSLSFTRLGGTKGDVRLLYSVLYIPAGAVDPLQAKEGILNISRRNDLIFPEQKTQVTTKLPIRNDAFLQNGAHFLVQLETVELLNIIPLIPPISPRFGEICNISLLVTPAIANGEIGFLSNLPIILHEPEDFAAEVVYIPLHRDGTDGQATVYWSLKPSGFNSKAVTPDDIGPFNGSVLFLSGQSDTTINITIKGDDIPEMNETVTLSLDRVNVENQVLKSGYTSRDLIILENDDPGGVFEFSPASRGPYVIKEGESVELHIIRSRGSLVKQFLHYRVEPRDSNEFYGNTGVLEFKPGEREIVITLLARLDGIPELDEHYWVVLSSHGERESKLGSATIVNITILKNDDPHGIIEFVSDGLIVMINESKGDAIYSAVYDVVRNRGNFGDVSVSWVVSPDFTQDVFPVQGTVVFGDQEFSKNITIYSLPDEIPEEMEEFTVILLNGTGGAKVGNRTTATLRIRRNDDPIYFAEPRVVRVQEGETANFTVLRNGSVDVTCMVQYATKDGKATARERDFIPVEKGETLIFEVGSRQQSISIFVNEDGIPETDEPFYIILLNSTGDTVVYQYGVATVIIEANDDPNGIFSLEPIDKAVEEGKTNAFWILRHRGYFGSVSVSWQLFQNDSALQPGQEFYETSGTVNFMDGEEAKPIILHAFPDKIPEFNEFYFLKLVNISGGSPGPGGQLAETNLQVTVMVPFNDDPFGVFILDPECLEREVAEDVLSEDDMSYITNFTILRQQGVFGDVQLGWEILSSEFPAGLPPMIDFLLVGIFPTTVHLQQHMRRHHSGTDALYFTGLEGAFGTVNPKYHPSRNNTIANFTFSAWVMPNANTNGFIIAKDDGNGSIYYGVKIQTNESHVTLSLHYKTLGSNATYIAKTTVMKYLEESVWLHLLIILEDGIIEFYLDGNAMPRGIKSLKGEAITDGPGILRIGAGINGNDRFTGLMQDVRSYERKLTLEEIYELHAMPAKSDLHPISGYLEFRQGETNKSFIISARDDNDEEGEELFILKLVSVYGGARISEENTTARLTIQKSDNANGLFGFTGACIPEIAEEGSTISCVVERTRGALDYVHVFYTISQIETDGINYLVDDFANASGTITFLPWQRSEVLNIYVLDDDIPELNEYFRVTLVSAIPGDGKLGSTPTSGASIDPEKETTDITIKASDHPYGLLQFSTGLPPQPKDAMTLPASSVPHITVEEEDGEIRLLVIRAQGLLGRVTAEFRTVSLTAFSPEDYQNVAGTLEFQPGERYKYIFINITDNSIPELEKSFKVELLNLEGGVAELFRVDGSGSGDGDMEFFLPTIHKRASLGVASQILVTIAASDHAHGVFEFSPESLFVSGTEPEDGYSTVTLNVIRHHGTLSPVTLHWNIDSDPDGDLAFTSGNITFEIGQTSANITVEILPDEDPELDKAFSVSVLSVSSGSLGAHINATLTVLASDDPYGIFIFSEKNRPVKVEEATQNITLSIIRLKGLMGKVLVSYATLDDMEKPPYFPPNLARATQGRDYIPASGFALFGANQSEATIAISILDDDEPERSESVFIELLNSTLVAKVQSRSIPNSPRLGPKVETIAQLIIIANDDAFGTLQLSAPIVRVAENHVGPIINVTRTGGAFADVSVKFKAVPITAIAGEDYSIASSDVVLLEGETSKAVPIYVINDIYPELEESFLVQLMNETTGGARLGALTEAVIIIEASDDPYGLFGFQITKLIVEEPEFNSVKVNLPIIRNSGTLGNVTVQWVATINGQLATGDLRVVSGNVTFAPGETIQTLLLEVLADDVPEIEEVIQVQLTDASGGGTIGLDRIANIIIPANDDPYGTVAFAQMVYRVQEPLERSSCANITVRRSGGHFGRLLLFYSTSDIDVVALAMEEGQDLLSYYESPIQGVPDPLWRTWMNVSAVGEPLYTCATLCLKEQACSAFSFFSASEGPQCFWMTSWISPAVNNSDFWTYRKNMTRVASLFSGQAVAGSDYEPVTRQWAIMQEGDEFANLTVSILPDDFPEMDESFLISLLEVHLMNISASLKNQPTIGQPNISTVVIALNGDAFGVFVIYNISPNTSEDGLFVEVQEQPQTLVELMIHRTGGSLGQVAVEWRVVGGTATEGLDFIGAGEILTFAEGETKKTVILTILDDSEPEDDESIIVSLVYTEGGSRILPSSDTVRVNILANDNVAGIVSFQTASRSVIGHEGEILQFHVIRTFPGRGNVTVNWKIIGQNLELNFANFSGQLFFPEGSLNTTLFVHLLDDNIPEEKEVYQVILYDVRTQGVPPAGIALLDAQGYAAVLTVEASDEPHGVLNFALSSRFVLLQEANITIQLFINREFGSLGAINVTYTTVPGMLSLKNQTVGNLAEPEVDFVPIIGFLILEEGETAAAINITILEDDVPELEEYFLVNLTYVGLTMAASTSFPPRLDSEGLTAQVIIDANDGARGVIEWQQSRFEVNETHGSLTLVAQRSREPLGHVSLFVYAQNLEAQVGLDYIFTPMILHFADGERYKNVNIMILDDDIPEGDEKFQLILTNPSPGLELGKNTIALIIVLANDDGPGVLSFNNSEHFFLREPTALYVQESVAVLYIVREPAQGLFGTVTVQFIVTEVNSSNESKDLTPSKGYIVLEEGVRFKALQISAILDTEPEMDEYFVCTLFNPTGGARLGVHVQTLITVLQNQAPLGLFSISAVENRATSIDIEEANRTVYLNVSRTNGIDLAVSVQWETVSETAFGMRGMDVVFSVFQSFLDESASGWCFFTLENLIYGIMLRKSSVTVYRWQGIFIPVEDLNIENPKTCEAFNIGFSPYFVITHEERNEEKPSLNSVFTFTSGFKLFLVQTIIILESSQVRYFTSDSQDYLIIASQRDDSELTQVFRWNGGSFVLHQKLPVRGVLTVALFNKGGSVFLAISQANARLNSLLFRWSGSGFINFQEVPVSGTTEVEALSSANDIYLIFAENVFLGDQNSIDIFIWEMGQSSFRYFQSVDFAAVNRIHSFTPASGIAHILLIGQDMSALYCWNSERNQFSFVLEVPSAYDVASVTVKSLNSSKNLIALVGAHSHIYELAYISSHSDFIPSSGELIFEPGEREATIAVNILDDTVPEKEESFKVQLKNPKGGAEIGINDSVTITILSNDDAYGIVAFAQNSLYKQVEEMEQDSLVTLNVERLKGTYGRITIAWEADGSISDIFPTSGVILFTEGQVLSTITLTILADNIPELSEVVIVTLTRITTEGVEDSYKGATIDQDRSKSVITTLPNDSPFGLVGWRAASVFIRVAEPKENTTTLQLQIARDKGLLGDIAIHLRAQPNFLLHVDNQATENEDYVLQETIIIMKENIKEAHAEVSILPDDLPELEEGFIVTITEVNLVNSDFSTGQPSVRRPGMEIAEIMIEENDDPRGIFMFHVTRGAGEVITAYEVPPPLNVLQVPVVRLAGSFGAVNVYWKASPDSAGLEDFKPSHGILEFADKQVTAMIEITIIDDAEFELTETFNISLISVAGGGRLGDDVVVTVVIPQNDSPFGVFGFEEKTVMIDESLSSDDPDSYVTLTVVRSPGGKGTVRLEWTIDEKAKHNLSPLNGTLHFDETESQKTIVLHTLQDTVLEEDRRFTIQLISIDEVEISPVKGSASIIIRGDKRASGEVGIAPSSRHILIGEPSAKYNGTAIISLVRGPGILGEVTVFWRIFPPSVGEFAETSGKLTMRDEQSAVIVVIQALNDDIPEEKSFYEFQLTAVSEGGVLSESSSTANITVVASDSPYGRFAFSHEQLRVSEAQRVNITIIRSSGDFGHVRLWYKTMSGTAEAGLDFVPAAGELLFEAGEMRKSLHVEILDDDYPEGPEEFSLTITKVELQGRGYDFTIQENGLQIDQPPEIGNISIVRIIIMKNDNAEGIIEFDPKYTAFEVEEDVGLIMIPVVRLHGTYGYVTADFISQSSSASPGGVDYILHGSTVTFQHGQNLSFINISIIDDNESEFEEPIEILLTGATGGAVLGRHLVSRIIIAKSDSPFGVIRFLNQSKISIANPNSTMILSLVLERTGGLLGEIQVNWETVGPNSQEALLPQNRDIADPVSGLFYFGEGEGGVRTIILTIYPHEEIEVEETFIIKLHLVKGEAKLDSRAKDVTLTIQEFGDPNGVVQFAPETLSKKTYSEPLALEGPLLITFFVRRVKGTFGEIMVYWELSSEFDITEDFLSTSGFFTIADGESEASFDVHLLPDEVPEIEEDYVIQLVSVEGGAELDLEKSITWFSVYANDDPHGVFALYSDRQSILIGQNLIRSIQINITRLAGTFGDVAVGLRISSDHKEQPIVTENAERQLVVKDGATYKVDVVPIKNQVFLSLGSNFTLQLVTVMLVGGRFYGMPTILQEAKSAVLPVSEKAANSQVGFESTAFQLMNITAGTSHVMISRRGTYGALSVAWTTGYAPGLEIPEFIVVGNMTPTLGSLSFSHGEQRKGVFLWTFPSPGWPEAFVLHLSGVQSSAPGGAQLRSGFIVAEIEPMGVFQFSTSSRNIIVSEDTQMIRLHVQRLFGFHSDLIKVSYQTTAGSAKPLEDFEPVQNGELFFQKFQTEVDFEITIINDQLSEIEEFFYINLTSVEIRGLQKFDVNWSPRLNLDFSVAVITILDNDDLAGMDISFPETTVAVAVDTTLIPVETESTTYLSTSKTTTILQPTNVVAIVTEATGVSAIPEKLVTLHGTPAVSEKPDVATVTANVSIHGTFSLGPSIVYIEEEMKNGTFNTAEVLIRRTGGFTGNVSITVKTFGERCAQMEPNALPFRGIYGISNLTWAVEEEDFEEQTLTLIFLDGERERKVSVQILDDDEPEGQEFFYVFLTNPQGGAQIVEEKDDTGFAAFAMVIITGSDLHNGIIGFSEESQSGLELREGAVMRRLHLIVTRQPNRAFEDVKVFWRVTLNKTVVVLQKDGVNLVEELQSVSGTTTCTMGQTKCFISIELKPEKVPQVEVYFFVELYEATAGAAINNSARFAQIKILESDESQSLVYFSVGSRLAVAHKKATLISLQVARDSGTGLMMSVNFSTQELRSAETIGRTIISPAISGKDFVITEGTLVFEPGQRSTVLDVILTPETGSLNSFPKRFQIVLFDPKGGARIDKVYGTANITLVSDADSQAIWGLADQLHQPVNDDILNRVLHTISMKVATENTDEQLSAMMHLIEKITTEGKIQAFSVASRTLFYEILCSLINPKRKDTRGFSHFAEVTENFAFSLLTNVTCGSPGEKSKTILDSCPYLSILALHWYPQQINGHKFEGKEGDYIRIPERLLDVQDAEIMAGKSTCKLVQFTEYSSQQWFISGNNLPTLKNKVLSLSVKGQSSQLLTNDNEVLYRIYAAEPRIIPQTSLCLLWNQAAASWLSDSQFCKVVEETADYVECACSHMSVYAVYARTDNLSSYNEAFFTSGFICISGLCLAVLSHIFCARYSMFAAKLLTHMMAASLGTQILFLASAYASPQLAEESCSAMAAVTHYLYLCQFSWMLIQSVNFWYVLVMNDEHTERRYLLFFLLSWGLPAFVVILLIVILKGIYHQSMSQIYGLIHGDLCFIPNVYAALFTAALVPLTCLVVVFVVFIHAYQVKPQWKAYDDVFRGRTNAAEIPLILYLFALISVTWLWGGLHMAYRHFWMLVLFVIFNSLQGLYVFMVYFILHNQMCCPMKASYTVEMNGHPGPSTAFFTPGSGMPPAGGEISKSTQNLIGAMEEVPPDWERASFQQGSQASPDLKPSPQNGATFPSSGGYGQGSLIADEESQEFDDLIFALKTGAGLSVSDNESGQGSQEGGTLTDSQIVELRRIPIADTHL

SEQ ID NO: 532 - protein, 6306 aa, Homo Sapiens; identical to SEQ ID NO: 531

SEQ ID NO: 533 - protein, 938 aa, Homo Sapiens
NSTMILSLVLERTGGLLGEIQVNWETVGPNSQEALLPQNRDIADPVSGLFYFGEGEGGVRTIILTIYPHEEIEVEETFIIKLHLVKGEAKLDSRAKDVTLTIQEFGDPNGVVQFAPETLSKKTYSEPLALEGPLLITFFVRRVKGTFGEIMVYWELSSEFDITEDFLSTSGFFTIADGESEASFDVHLLPDEVPEIEEDYVIQLVSVEGGAELDLEKSITWFSVYANDDPHGVFALYSDRQSILIGQNLIRSIQINITRLAGTFGDVAVGLRISSDHKEQPIVTENAERQLVVKDGATYKVDVVPIKNQVFLSLGSNFTLQLVTVMLVGGRFYGMPTILQEAKSAVLPVSEKAANSQVGFESTAFQLMNITAGTSHVMISRRGTYGALSVAWTTGYAPGLEIPEFIVVGNMTPTLGSLSFSHGEQRKGVFLWTFPSPGWPEAFVLHLSGVQSSAPGGAQLRSGFIVAEIEPMGVFQFSTSSRNIIVSEDTQMIRLHVQRLFGFHSDLIKVSYQTTAGSAKPLEDFEPVQNGELFFQKFQTEVDFEITIINDQLSEIEEFFYINLTSVEIRGLQKFDVNWSPRLNLDFSVAVITILDNDDLAGMDISFPETTVAVAVDTTLIPVETESTTYLSTSKTTTILQPTNVVAIVTEATGVSAIPEKLVTLHGTPAVSEKPDVATVTANVSIHGTFSLGPSIVYIEEEMKNGTFNTAEVLIRRTGGFTGNVSITVKTFGERCAQMEPNALPFRGIYGISNLTWAVEEEDFEEQTLTLIFLDGERERKVSVQILDDDEPEGQEFFYVFLTNPQGGAQIVEEKDDTGFAAFAMVIITGSDLHNGIIGFSEESQSGLELREGAVMRRLHLIVTRQPNRAFEDVKVFWRVTLNKTVVVLQKDGVNLVEELQSVSGTTTCTMGQTKCFISIELKPEKRNATEPIIKSFS

SEQ ID NO: 534 - protein, 2624 aa, Homo Sapiens
QLKNPKGGAEIGINDSVTITILSNDDAYGIVAFAQNSLYKQVEEMEQDSLVTLNVERLKGTYGRITIAWEADGSISDIFPTSGVILFTEGQVLSTITLTILADNIPELSEVVIVTLTRITTEGVEDSYKGATIDQDRSKSVITTLPNDSPFGLVGWRAASVFIRVAEPKENTTTLQLQIARDKGLLGDIAIHLRAQPNFLLHVDNQATENEDYVLQETIIIMKENIKEAHAEVSILPGAGEVITAYEVPPPLNVLQVPVVRLAGSFGAVNVYWKASPDSAGLEDFKPSHGILEFADKQVTAMIEITIIDDAEFELTETFNISLISVAGGGRLGDDVVVTVVIPQNDSPFGVFGFEEKTVMIDESLSSDDPDSYVTLTVVRSPGGKGTVRLEWTIDEKAKHNLSPLNGTLHFDETESQKTIVLHTLQDTVLEEDRRFTIQLISIDEVEISPVKGSASIIIRGDKRASGEVGIAPSSRHILIGEPSAKYNGTAIISLVRGPGILGEVTVFWRIFPPSVGEFAETSGKLTMRDEQSAVIVVIQALNDDIPEEKSFYEFQLTAVSEGGVLSESSSTANITVVASDSPYGRFAFSHEQLRVSEAQRVNITIIRSSGDFGHVRLWYKTMSGTAEAGLDFVPAAGELLFEAGEMRKSLHVEILDDDYPEGPEEFSLTITKVELQGRGYDFTIQENGLQIDQPPEIGNISIVRIIIMKNDNAEGIIEFDPKYTAFEVEEDVGLIMIPVVRLHGTYGYVTADFISQSSSASPGGVDYILHGSTVTFQHGQNLSFINISIIDDNESEFEEPIEILLTGATGGAVLGRHLVSRIIIAKSDSPFGVIRFLNQSKISIANPNSTMILSLVLERTGGLLGEIQVNWETVGPNSQEALLPQNRDIADPVSGLFYFGEGEGGVRTIILTIYPHEEIEVEETFIIKLHLVKGEAKLDSRAKDVTLTIQEFGDPNGVVQFAPETLSKKTYSEPLALEGPLLITFFVRRVKGTFGEIMVYWELSSEFDITEDFLSTSGFFTIADGESEASFDVHLLPDEVPEIEEDYVIQLVSVEGGAELDLEKSITWFSVYANDDPHGVFALYSDRQSILIGQNLIRSIQINITRLAGTFGDVAVGLRISSDHKEQPIVTENAERQLVVKDGATYKVDVVPIKNQVFLSLGSNFTLQLVTVMLVGGRFYGMPTILQEAKSAVLPVSEKAANSQVGFESTAFQLMNITAGTSHVMISRRGTYGALSVAWTTGYAPGLEIPEFIVVGNMTPTLGSLSFSHGEQRKGVFLWTFPSPGWPEAFVLHLSGVQSSAPGGAQLRSGFIVAEIEPMGVFQFSTSSRNIIVSEDTQMIRLHVQRLFGFHSDLIKVSYQTTAGSAKPLEDFEPVQNGELFFQKFQTEVDFEITIINDQLSEIEEFFYINLTSVEIRGLQKFDVNWSPRLNLDFSVAVITILDNDDLAGMDISFPETTVAVAVDTTLIPVETESTTYLSTSKTTTILQPTNVVAIVTEATGVSAIPEKLVTLHGTPAVSEKPDVATVTANVSIHGTFSLGPSIVYIEEEMKNGTFNTAEVLIRRTGGFTGNVSITVKTFGERCAQMEPNALPFRGIYGISNLTWAVEEEDFEEQTLTLIFLDGERERKVSVQILDDDEPEGQEFFYVFLTNPQGGAQIVEEKDDTGFAAFAMVIITGSDLHNGIIGFSEESQSGLELREGAVMRRLHLIVTRQPNRAFEDVKVFWRVTLNKTVVVLQKDGVNLVEELQSVSGTTTCTMGQTKCFISIELKPEKVPQVEVYFFVELYEATAGAAINNSARFAQIKILESDESQSLVYFSVGSRLAVAHKKATLISLQVARDSGTGLMMSVNFSTQELRSAETIGRTIISPAISGKDFVITEGTLVFEPGQRSTVLDVILTPETGSLNSFPKRFQIVLFDPKGGARIDKVYGTANITLVSDADSQAIWGLADQLHQPVNDDILNRVLHTISMKVATENTDEQLSAMMHLIEKITTEGKIQAFSVASRTLFYEILCSLINPKRKDTRGFSHFAEVTENFAFSLLTNVTCGSPGEKSKTILDSCPYLSILALHWYPQQINGHKFEGKEGDYIRIPERLLDVQDAEIMAGKSTCKLVQFTEYSSQQWFISGNNLPTLKNKVLSLSVKGQSSQLLTNDNEVLYRIYAAEPRIIPQTSLCLLWNQAAASWLSDSQFCKVVEETADYVECACSHMSVYAVYARTDNLSSYNEAFFTSGFICISGLCLAVLSHIFCARYSMFAAKLLTHMMAASLGTQILFLASAYASPQLAEESCSAMAAVTHYLYLCQFSWMLIQSVNFWYVLVMNDEHTERRYLLFFLLSWGLPAFVVILLIVILKGIYHQSMSQIYGLIHGDLCFIPNVYAALFTAALVPLTCLVVVFVVFIHAYQVKPQWKAYDDVFRGRTNAAEIPLILYLFALISVTWLWGGLHMAYRHFWMLVLFVIFNSLQGLYVFMVYFILHNQMCCPMKASYTVEMNGHPGPSTAFFTPGSGMPPAGGEISKSTQNLIGAMEEVPPDWERASFQQGSQASPDLKPSPQNGATFPSSGGYGQGSLIADEESQEFDDLIFALKTGAGLSVSDNESGQGSQEGGTLTDSQIVELRRIPIADTHL

SEQ ID NO: 535 - protein, 390 aa, Homo Sapiens
TFQHGQNLSFINISIIDDNESEFEEPIEILLTGATGGAVLGRHLVSRIIIAKSDSPFGVIRFLNQSKISIANPNSTMILSLVLERTGGLLGEIQVNWETVGPNSQEALLPQNRDIADPVSGLFYFGEGEGGVRTIILTIYPHEEIEVEETFIIKLHLVKGEAKLDSRAKDVTLTIQEFGDPNGVVQFAPETLSKKTYSEPLALEGPLLITFFVRRVKGTFGEIMVYWELSSEFDITEDFLSTSGFFTIADGESEASFDVHLLPDEVPEIEEDYVIQLVSVEGGAELDLEKSITWFSVYANDDPHGVFALYSDRQSILIGQNLIRSIQINITRLAGTFGDVAVGLRISSDHKEQPIVTENAERQLVVKDGATYKVDVVPIKNQVCGISSVS

SEQ ID NO: 536 - protein, 99 aa, Homo Sapiens
VPHITVEEEDGEIRLLVIRAQGLLGRVTAEFRTVSLTAFSPEDYQNVAGTLEFQPGERYKYIFINITDNSIPELEKSFKVELLNLEGGVCEFLVRAGDE

SEQ ID NO: 537 - protein, 80 aa, Homo Sapiens
  misc_feature (1)..(1): Xaa can be any naturally occurring amino acid
XDEQLSAMMHLIEKITTEGKIQAFSVASRTLFYEILCSLINPKRKDTRGFSHFAEVTENFAFSLLTNVTCGSPGEKSPAC

SEQ ID NO: 538 - protein, 72 aa, Homo Sapiens
  misc_feature (1)..(1): Xaa can be any naturally occurring amino acid
XEGSTISCVVERTRGALDYVHVFYTISQIETDGINYLVDDFANASGTITFLPWQRSELLIEVSLPIIIYNCN

SEQ ID NO: 539 - protein, 567 aa, Homo Sapiens
  misc_feature (1)..(1): Xaa can be any naturally occurring amino acid
XITVEEEDGEIRLLVIRAQGLLGRVTAEFRTVSLTAFSPEDYQNVAGTLEFQPGERYKYIFINITDNSIPELEKSFKVELLNLEGGAELFRVDGSGSGDGDMEFFLPTIHKRASLGVASQILVTIAASDHAHGVFEFSPESLFVSGTEPEDGYSTVTLNVIRHHGTLSPVTLHWNIDSDPDGDLAFTSGNITFEIGQTSANITVEILPDEDPELDKAFSVSVLSVSSGSLGAHINATLTVLASDDPYGIFIFSEKNRPVKVEEATQNITLSIIRLKGLMGKVLVSYATLDDMEKPPYFPPNLARATQGRDYIPASGFALFGANQSEATIAISILDDDEPERSESVFIELLNSTLVAKVQSRSIPNSPRLGPKVETIAQLIIIANDDAFGTLQLSAPIVRVAENHVGPIINVTRTGGAFADVSVKFKAVPITAIAGEDYSIASSDVVLLEGETSKAVPIYVINDIYPELEESFLVQLMNETTGGARLGALTEAVIIIEASDDPYGLFGFQITKLIVEEPEFNSVKVNLPIIRNSGTLGNVTVQWVATINGQLATGDLRVVSGYPSATN

SEQ ID NO: 540 - protein, 65 aa, Homo Sapiens
  misc_feature (1)..(1): Xaa can be any naturally occurring amino acid
XLPTIHKRASLGVASQILVTIAASDHAHGVFEFSPESLFVSGTEPEDGYSTVTLNFQILHVLGLR

SEQ ID NO: 541 - protein, 173 aa, Homo Sapiens
MSVKSSKLMFLCHGSSRSLHSGSLTSCNTGVCCSLDADKYENDPELEKIRRERNYSWMDIITICKDKLPNYEEKIKMFYEEHLHLDDEIRYILDGSGYFDVRDKEDQWIRIFMEKGDMVTLPAGIYHRFTVDEKNYTKAMRLFVGEPVWTAYNRPADHFEARGQYVKFLAQTA

SEQ ID NO: 542 - protein, 179 aa, Homo Sapiens
MVQAWYMDDAPGDPRQPHRPDPGRPVGLEQLRRLGVLYWKLDADKYENDPELEKIRRERNYSWMDIITICKDKLPNYEEKIKMFYEEHLHLDDEIRYILDGSGYFDVRDKEDQWIRIFMEKGDMVTLPAGIYHRFTVDEKNYTKAMRLFVGEPVWTAYNRPADHFEARGQYVKFLAQTA

SEQ ID NO: 543 - protein, 117 aa, Homo Sapiens
  misc_feature (1)..(1): Xaa can be any naturally occurring amino acid
XRWECCAFSPGPACVVALAVASLPLNCAASADSKRGRWARDSSTCASRRVCGAAGDVRGDSCPSVAASVAPACDPGGQNYTKAMRLFVGEPVWTAYNRPADHFEARGQYVKFLAQTA

SEQ ID NO: 544 - protein, 59 aa, Homo Sapiens
MKYPLMPLVNDLTFSFLVFWFCLPVGLLLLLIIWLRFLLSQDILQVRRYRYDANILTAS

SEQ ID NO: 545 - protein, 80 aa, Homo Sapiens
MKYPLMPLVNDLTFSFLVFWFCLPVGLLLLLIIWLRFLLSQDSEENDSSVCLDWEPWSKGPAEFCWKGTLHGQEKERPCW

SEQ ID NO: 546 - protein, 80 aa, Homo Sapiens; identical to SEQ ID NO: 545

SEQ ID NO: 547 - protein, 179 aa, Homo Sapiens
  misc_feature (1)..(1): Xaa can be any naturally occurring amino acid
XWFCLPVGLLLLLIIWLRFLLSQDSEENDSSVCLDWEPWSKGPAEFCWKGTLHGQEKERPCCLVFLESAGQWQWQKWMGETCQGGKRTLATVVPPWNPQLISSSDRHVKASRGPSPSPASQMTSSPAGSRSSLGGHGSSEQAHGEKLANLIQRGLKAGLGRRVWVHIKEARVFPYPGDP

SEQ ID NO: 548 - protein, 244 aa, Homo Sapiens
MLLLGAVLLLLALPGHDQETTTQGPGVLLPLPKGACTGWMAGIPGHPGHNGAPGRDGRDGTPGEKGEKGDPGLIGPKGDIGETGVPGAEGPRGFPGIQGRKGEPGEGAYVYRSAFSVGLETYVTIPNMPIRFTKIFYNQQNHYDGSTGKFHCNIPGLYYFAYHITVYMKDVKVSLFKKDKAMLFTYDQYQENNVDQASGSVLLHLEVGDQVWLQVYGEGERNGLYADNDNDSTFTGFLLYHDTN

SEQ ID NO: 549 - protein, 244 aa, Homo Sapiens; identical to SEQ ID NO: 548

SEQ ID NO: 550 - protein, 117 aa, Homo Sapiens
MGSQVAFLPPPPARSSPDAARIRVKRYRQSMNNFQGLRSFGCRFGTCTVQKLAHQIYQFTDKDKDNVAPRSKISPQGYGRRRRRSLPEAGPGRTLVSSKPQAHGAPAPPSGSAPHFL

SEQ ID NO: 551 - protein, 83 aa, Homo Sapiens
MKLVSVALMYLGSLAFLGADTARLDVASEFRKKWNKWALSRGKRELRMSSSYPTGLADVKAGPAQTLIRPQDMKGASRSPEDR

SEQ ID NO: 552 - protein, 83 aa, Homo Sapiens; identical to SEQ ID NO: 551

SEQ ID NO: 553 - protein, 139 aa, Homo Sapiens
MKLVSVALMYLGSLAFLGADTARLDVASEFRKKWNKWALSRGKRELRMSSSYPTGLADVKAGPAQTLIRPQDMKGASRSPEDSCLSSPSPRPQQSGCRPHPSQALPPEHEQLPGPPELWLPLRDVHGAEAGTPDLPVHR

SEQ ID NO: 554 - protein, 185 aa, Homo Sapiens
MKLVSVALMYLGSLAFLGADTARLDVASEFRKKWNKWALSRGKRELRMSSSYPTGLADVKAGPAQTLIRPQDMKGASRSPEDSSPDAARIRVKRYRQSMNNFQGLRSFGCRFGTCTVQKLAHQIYQFTDKDKDNVAPRSKISPQGYGRRRRRSLPEAGPGRTLVSSKPQAHGAPAPPSGSAPHFL

SEQ ID NO: 555 - protein, 185 aa, Homo Sapiens; identical to SEQ ID NO: 554

SEQ ID NO: 556 - protein, 185 aa, Homo Sapiens; identical to SEQ ID NO: 554

SEQ ID NO: 557 - protein, 138 aa, Homo Sapiens
MSSSYPTGLADVKAGPAQTLIRPQDMKGASRSPEDSSPDAARIRVKRYRQSMNNFQGLRSFGCRFGTCTVQKLAHQIYQFTDKDKDNVAPRSKISPQGYGRRRRRSLPEAGPGRTLVSSKPQAHGAPAPPSGSAPHFL

SEQ ID NO: 558 - protein, 148 aa, Homo Sapiens
MARIPTAALGCISLLCLQLPGSLSRSLGGDPRPVKPREPPARSPSSSLQPRHPAPRPVVWKLHRALQAQRGAGLAPVMGQPLRDGGRQHSGPRRHSGPRRTQAQLLRVGCVLGTCQVQNLSHRLWQLMGPAGRQDSAPVDPSSPHSYG

SEQ ID NO: 559 - protein, 148 aa, Homo Sapiens; identical to SEQ ID NO: 558

SEQ ID NO: 560 - protein, 153 aa, Homo Sapiens
MTIHILILLLLLAFSAQGDLDTAARRGQHQVPQHRGHVCYLGVCRTHRLAEIIYWIRCLHQGALGEGQPRAPGPLQLWAPPVARGGSPARFPGFRPAARGLAQCPARWVTSGTARPLLGFSLPICMLELLLHISSPLTPAPETVFPSPSPGCD

SEQ ID NO: 561 - protein, 57 aa, Homo Sapiens
LLEPELPGSALRSLWSSLCLGPAPAPPGPVSPEGRLAAAWDALIVRPVRRWRRVAVG

SEQ ID NO: 562 - protein, 222 aa, Homo Sapiens
MAASCRVVTSISDIPTGIPVHLELASMTNRELMSSIVHQVFPAVTSLGLNEQELLFLTQSASGPHSSLSSWNGVPDVGMVSDILFWILKEHGRSKSRASDLTRIHFHTLVYHILATVDGHWANQLAAVAAGARVAGTQACATETIDTSRVSLRAPQEFMTSHSEAGSRIVLNPNKPVVEWHREGISFHFTPVLVCKDPIRTVGLGDAISAEGLFYSEVHPHY

SEQ ID NO: 563 - protein, 78 aa, Homo Sapiens
MALWRGSAYAGFLALAVGCVFLLEPELPGSALRSLWSSLCLGPAPAPPGPVSPEGRLAAAWDALIVRPVRRWRRVAVG

SEQ ID NO: 564 - protein, 78 aa, Homo Sapiens; identical to SEQ ID NO: 563

SEQ ID NO: 565 - protein, 78 aa, Homo Sapiens; identical to SEQ ID NO: 563

SEQ ID NO: 566 - protein, 113 aa, Homo Sapiens
MALWRGSAYAGFLALAVGCVFLLEPELPGSALRSLWSSLCLGPAPAPPGPVSPEGRLAAAWDALIVRPVRRWRRVAVGFFFAVQLVQSYMSFLMTMSLFHQSHCRKWMSSTSF

SEQ ID NO: 567 - protein, 496 aa, Homo Sapiens
MALWRGSAYAGFLALAVGCVFLLEPELPGSALRSLWSSLCLGPAPAPPGPVSPEGRLAAAWDALIVRPVRRWRRVAVGVNACVDVVLSGVKLLQALGLSPGNGKDHSILHSRNDLEEAFIHFMGKGAAAERFFSDKETFHDIAQVASEFPGAQHYVGGNAALIGQKFAANSDLKVLLCGPVGPKLHELLDDNVFVPPESLQEVDEFHLILEYQAGEEWGQLKAPHANRFIFSHDLSNGAMNMLEVFVSSLEEFQPDLVVLSGLHMMEGQSKELQRKRLLEVVTSISDIPTGIPVHLELASMTNRELMSSIVHQVFPAVTSLGLNEQELLFLTQSASGPHSSLSSWNGVPDVGMVSDILFWILKEHGRSKSRASDLTRIHFHTLVYHILATVDGHWANQLAAVAAGARVAGTQACATETIDTSRVSLRAPQEFMTSHSEAGSRIVLNPNKPVVEWHREGISFHFTPVLVCKDPIRTVGLGDAISAEGLFYSEVHPHY

SEQ ID NO: 568 - protein, 154 aa, Homo Sapiens
MGKGAAAERFFSDKETFHDIAQVASEFPGAQHYVGGNAALIGQKFAANSDLKVLLCGPVGPKLHELLDDNVFVPPESLQEVDEFHLILEYQAGEEWGQLKAPHANRFIFSHDLSNGAMNMLEVFVSSLEEFQPDLVVLSGLHMMEGQSKELQRK

SEQ ID NO: 569 - protein, 204 aa, Homo Sapiens
  misc_feature (1)..(1): Xaa can be any naturally occurring amino acid
XEPELPGSALRSLWSSLCLGPAPAPPGPVSPEGRLAAAWDALIVRPVRRWRRVAVGVNACVDVVLSGVKLLQALGLSPGNGKDHSILHSRNDLEEAFIHFMGKGAAAERFFSDKETFHDIAQVASEFPGAQHYVGGNAALIGQKFAANSDLKVLLCGPVGPKLHELLDDNVFVPPESLQEVDEFHLILEYQAAGLSRGDFPWAE

SEQ ID NO: 570 - protein, 26 aa, Homo Sapiens
  misc_feature (1)..(1): Xaa can be any naturally occurring amino acid
XKRLLEVLASQGHILAAGCGACLLLQ

SEQ ID NO: 571 - protein, 363 aa, Homo Sapiens
MAAAAMAAAAGGGAGAARSLSRFRGCLAGALLGDCVGSFYEAHDTVDLTSVLRHVQSLEPDPGTPGSERTEALYYTDDTAMARALVQSLLAKEAFDEVDMAHRFAQEYKKDPDRGYGAGVVTVFKKLLNPKCRDVFEPARAQFNGKGSYGNGGAMRVAGISLAYSSVQDVQKFARLSAQLTHASSLGYNGAILQALAVHLALQGESSSEHFLKQLLGHMEDLEGDAQSVLDARELGMEERPYSSRLKKIGELLDQASVTREEVVSELGNGIAAFESVPTAIYCFLRCMEPDPEIPSAFNSLQRTLIYSISLGGDTDTIATMAGAIAGAYYGMDQVPESWQQSCEGYEETDILAQSLHRVFQKS

SEQ ID NO: 572 - protein, 69 aa, Homo Sapiens
KPDAERQTDEEKEELKKPKKEDSSPKEETDKWAVEKGKDHKEPRKGEELEEEWTPTEKVRPLCRRSPSG

SEQ ID NO: 573 - protein, 54 aa, Homo Sapiens
LMKVVNEECPTITRTYSLGKSSRGLKIYAMEISDNPGEHELGEGLWGPAAGLCC

SEQ ID NO: 574 - protein, 1158 aa, Homo Sapiens
MAAVRGAPLLSCLLALLALCPGGRPQTVLTDDEIEEFLEGFLSELEPEPREDDVEAPPPPEPTPRVRKAQAGGKPGKRPGTAAEVPPEKTKDKGKKGKKDKGPKVPKESLEGSPRPPKKGKEKPPKATKKPKEKPPKATKKPKEKPPKATKKPKEKPPKATKKPPSGKRPPILAPSETLEWPLPPPPSPGPEELPQEGGAPLSNNWQNPGEETHVEAREHQPEPEEETEQPTLDYNDQIEREDYEDFEYIRRQKQPRPPPSRRRRPERVWPEPPEEKAPAPAPEERIEPPVKPLLPPLPPDYGDGYVIPNYDDMDYYFGPPPPQKPDAERQTDEEKEELKKPKKEDSSPKEETDKWAVEKGKDHKEPRKGEELEEEWTPTEKVKCPPIGMESHRIEDNQIRASSMLRHGLGAQRGRLNMQTGATEDDYYDGAWCAEDDARTQWIEVDTRRTTRFTGVITQGRDSSIHDDFVTTFFVGFSNDSQTWVMYTNGYEEMTFHGNVDKDTPVLSELPEPVVARFIRIYPLTWNGSLCMRLEVLGCSVAPVYSYYAQNEVVATDDLDFRHHSYKDMRQLMKVVNEECPTITRTYSLGKSSRGLKIYAMEISDNPGEHELGEPEFRYTAGIHGNEVLGRELLLLLMQYLCREYRDGNPRVRSLVQDTRIHLVPSLNPDGYEVAAQMGSEFGNWALGLWTEEGFDIFEDFPDLNSVLWGAEERKWVPYRVPNNNLPIPERYLSPDATVSTEVRAIIAWMEKNPFVLGANLNGGERLVSYPYDMARTPTQEQLLAAAMAAARGEDEDEVSEAQETPDHAIFRWLAISFASAHLTLTEPYRGGCQAQDYTGGMGIVNGAKWNPRTGTINDFSYLHTNCLELSFYLGCDKFPHESELPREWENNKEALLTFMEQVHRGIKGVVTDEQGIPIANATISVSGINHGVKTASGGDYWRILNPGEYRVTAHAEGYTPSAKTCNVDYDIGATQCNFILARSNWKRIREIMAMNGNRPIPHIDPSRPMTPQQRRLQQRRLQHRLRLRAQMRLRRLNATTTLGPHTVPPTLPPAPATTLSTTIEPWGLIPPTTAGWEESETETYTEVVTEFGTEVEPEFGTKVEPEFETQLEPEFETQLEPEFEEEEEEEKEEEIATGQAFPFTTVETYTVNFGDF

SEQ ID NO: 575 - protein, 162 aa, Homo Sapiens
MPPEKTKDKGKKGKKDKGPKVPKESLEGSPRPPKKGKEKPPKATKKPKEKPPKATKKPKEKPPKATKKPKEKPPKATKKPPSGKRPPILAPSETLEWPLPPPPSPGPEELPQEGGAPLSNNWQNPGEETHVEAREHQPEPEEETEQPTLDYNDQIEREDYED

SEQ ID NO: 576 - protein, 733 aa, Homo Sapiens
MRKWWAPCPGSWLCSHCLGEGWALRGAGSTALRPASPQTFHGNVDKDTPVLSELPEPVVARFIRIYPLTWNGSLCMRLEVLGCSVARECGGLAGALSGGGVLGWASRHPAKDNPASLAAVYSYYAQNEVVATDDLDFRHHSYKDMRQLMKVVNEECPTITRTYSLGKSSRGLKIYAMEISDNPGEHELGEPEFRYTAGIHGNEVLGRELLLLLMQYLCREYRDGNPRVRSLVQDTRIHLVPSLNPDGYEVAAQMGSEFGNWALGLWTEEGFDIFEDFPDLNSVLWGAEERKWVPYRVPNNNLPIPERYLSPDATVSTEVRAIIAWMEKNPFVLGANLNGGERLVSYPYDMARTPTQEQLLAAAMAAARGEDEDEVSEAQETPDHAIFRWLAISFASAHLTLTEPYRGGCQAQDYTGGMGIVNGAKWNPRTGTINDFSYLHTNCLELSFYLGCDKFPHESELPREWENNKEALLTFMEQVHRGIKGVVTDEQGIPIANATISVSGINHGVKTASGGDYWRILNPGEYRVTAHAEGYTPSAKTCNVDYDIGATQCNFILARSNWKRIREIMAMNGNRPIPHIDPSRPMTPQQRRLQQRRLQHRLRLRAQMRLRRLNATTTLGPHTVPPTLPPAPATTLSTTIEPWGLIPPTTAGWEESETETYTEVVTEFGTEVEPEFGTKVEPEFETQLEPEFETQLEPEFEEEEEEEKEEEIATGQAFPFTTVETYTVNFGDF

SEQ ID NO: 577 - protein, 104 aa, Homo Sapiens
RTQWIEVDTRRTTRFTGVITQGRDSSIHDDFVTTFFVGFSNDSQTWVMYTNGYEEMVGTMPRLLALLPLSGRGVGSQRGWQYCSEACLSPDLSWERGQGHTRAE

SEQ ID NO: 578 - protein, 251 aa, Homo Sapiens
  misc_feature (1)..(1): Xaa can be any naturally occurring amino acid
XELEPEPREDDVEAPPPPEPTPRVRKAQAGGKPGKRPGTAAEVPPEKTKDKGKKGKKDKGPKVPKESLEGSPRPPKKGKEKPPKATKKPKEKPPKATKKPKEKPPKATKKPKEKPPKATKKPPSGKRPPILAPSETLEWPLPPPPSPGPEELPQEGGAPLSNNWQNPGEETHVEAREHQPEPPVKPLLPPLPPDYGDGYVIPNYDDMDYYFGPPPPQKPDAERQTDEEKEELKKPKKEDSSPKEETDKWAV

SEQ ID NO: 579 - protein, 66 aa, Homo Sapiens
  misc_feature (1)..(1): Xaa can be any naturally occurring amino acid
XFRHHSYKDMRQLMKVVNEECPTITRTYSLGKSSRGLKIYAMEISDNPGEHELGEGLWGPAAGLCC

SEQ ID NO: 580 - protein, 481 aa, Homo Sapiens
MAASWSLLVTLRPLAQSPLRGRCVGCGAWAAALAPLATAPGKPFWKAYTVQTSESMTPTATSETYLKALAVCHGPLDHYDFLIKAHELKDDEHQRRVIQCLQKLHEDLKGYNIEAEGLFSKLFSRSKPPRGLYVYGDVGTGKTMVMDMFYAYVEMKRKKRVHFHGFMLDVHKRIHRLKQSLPKRKPGFMAKSYDPIAPIAEEISEEACLLCFDEFQVTDIADAMILKQLFENLFKNGVVVVATSNRPPEDLYKNGLQRANFVPFIAVLKEYCNTVQLDSGIDYRKRELPAAGKLYYLTSEADVEAVMDKLFDELAQKQNDLTRPRILKVQGRELRLNKACGTVADCTFEELCERPLGASDYLELSKNFDTIFLRNIPQFTLANRTQGRRFITLIDNFYDLKVRIICSASTPISSLFLHQHHDSELEQSRILMDDLGLSQDSAEGLSMFTGEEEIFAFQRTISRLTEMQTEQYWNEGDRTKK

SEQ ID NO: 581 - protein, 160 aa, Homo Sapiens
MCATPPSLNFKKLAYTVQTSESMTPTATSETYLKALAVCHGPLDHYDFLIKAHELKDDEHQRRVIQCLQKLHEDLKGYNIEAEGLFSKLFSRSKPPRGLYVYGDVGTGKTMVMDMFYAYVEMKRKKRVHFHGFMLDVHKRIHRLKQSLPKRKPGFMAKSY

SEQ ID NO: 582 - protein, 80 aa, Homo Sapiens
  misc_feature (1)..(1): Xaa can be any naturally occurring amino acid
XIHRLKQSLPKRKPGFMAKSYDPIAPIAEEISEEACLLCFDEFQVTDIADAMILKQLFENLFKNGVVVVATSNRPPEGIL

SEQ ID NO: 583 - protein, 349 aa, Homo Sapiens
  misc_feature (1)..(1): Xaa can be any naturally occurring amino acid
XKPFWKGTGKTMVMDMFYAYVEMKRKKRVHFHGFMLDVHKRIHRLKQSLPKRKPGFMAKSYDPIAPIAEEISEEACLLCFDEFQVTDIADAMILKQLFENLFKNGVVVVATSNRPPEDLYKNGLQRANFVPFIAVLKEYCNTVQLDSGIDYRKRELPAAGKLYYLTSEADVEAVMDKLFDELAQKQNDLTRPRILKVQGRELRLNKACGTVADCTFEELCERPLGASDYLELSKNFDTIFLRNIPQFTLANRTQGRRFITLIDNFYDLKVRIICSASTPISSLFLHQHHDSELEQSRILMDDLGLSQDSAEGLSMFTGEEEIFAFQRTISRLTEMQTEQYWNEGDRTKK

SEQ ID NO: 584 - protein, 599 aa, Homo Sapiens
MKLLKLTGFIFFLFFLTESLTLPTQPRDIENFNSTQKFIEDNIEYITIIAFAQYVQEATFEEMEKLVKDMVEYKDRCMADKTLPECSKLPNNVLQEKICAMEGLPQKHNFSHCCSKVDAQRRLCFFYNKKSDVGFLPPFPTLDPEEKCQAYESNRESLLNHFLYEVARRNPFVFAPTLLTVAVHFEEVAKSCCEEQNKVNCLQTRAIPVTQYLKAFSSYQKHVCGALLKFGTKVVHFIYIAILSQKFPKIEFKELISLVEDVSSNYDGCCEGDVVQCIRDTSKVMNHICSKQDSISSKIKECCEKKIPERGQCIINSNKDDRPKDLSLREGKFTDSENVCQERDADPDTFFAKFTFEYSRRHPDLSIPELLRIVQIYKDLLRNCCNTENPPGCYRYAEDKFNETTEKSLKMVQQECKHFQNLGKDGLKYHYLIRLTKIAPQLSTEELVSLGEKMVTAFTTCCTLSEEFACVDNLADLVFGELCGVNENRTINPAVDHCCKTNFAFRRPCFESLKADKTYVPPPFSQDLFTFHADMCQSQNEELQRKTDRFLVNLVKLKHELTDEELQSLFTNFANVVDKCCKAESPEVCFNEESPKIGN

SEQ ID NO: 585 - protein, 622 aa, Homo Sapiens
MKWVESIFLIFLLNFTESRTLHRNEYGIASILDSYQCTAEISLADLATIFFAQFVQEATYKEVSKMVKDALTAIEKPTGDEQSSGCLENQLPAFLEELCHEKEILEKYGHSDCCSQSEEGRHNCFLAHKKPTPASIPLFQVPEPVTSCEAYEEDRETFMNKFIYEIARRHPFLYAPTILLWAARYDKIIPSCCKAENAVECFQTKAATVTKELRESSLLNQHACAVMKNFGTRTFQAITVTKLSQKFTKVNFTEIQKLVLDVAHVHEHCCRGDVLDCLQDGEKIMSYICSQQDTLSNKITECCKLTTLERGQCIIHAENDEKPEGLSPNLNRFLGDRDFNQFSSGEKNIFLASFVHEYSRRHPQLAVSVILRVAKGYQELLEKCFQTENPLECQDKGEEELQKYIQESQALAKRSCGLFQKLGEYYLQNAFLVAYTKKAPQLTSSELMAITRKMAATAATCCQLSEDKLLACGEGAADIIIGHLCIRHEMTPVNPGVGQCCTSSYANRRPCFSSLVVDETYVPPAFSDDKFIFHKDLCQAQGVALQTMKQEFLINLVKQKPQITEEQLEAVIADFSGLLEKCCQGQEQEVCFAEEGKRRQNESFIRCELFSLILTDLTLFVN

SEQ ID NO: 586 - protein, 609 aa, Homo Sapiens
MKWVESIFLIFLLNFTESRTLHRNEYGIASILDSYQCTAEISLADLATIFFAQFVQEATYKEVSKMVKDALTAIEKPTGDEQSSGCLENQLPAFLEELCHEKEILEKYGHSDCCSQSEEGRHNCFLAHKKPTPASIPLFQVPEPVTSCEAYEEDRETFMNKFIYEIARRHPFLYAPTILLWAARYDKIIPSCCKAENAVECFQTKAATVTKELRESSLLNQHACAVMKNFGTRTFQAITVTKLSQKFTKVNFTEIQKLVLDVAHVHEHCCRGDVLDCLQDGEKIMSYICSQQDTLSNKITECCKLTTLERGQCIIHAENDEKPEGLSPNLNRFLGDRDFNQFSSGEKNIFLASFVHEYSRRHPQLAVSVILRVAKGYQELLEKCFQTENPLECQDKGEEELQKYIQESQALAKRSCGLFQKLGEYYLQNAFLVAYTKKAPQLTSSELMAITRKMAATAATCCQLSEDKLLACGEGAADIIIGHLCIRHEMTPVNPGVGQCCTSSYANRRPCFSSLVVDETYVPPAFSDDKFIFHKDLCQAQGVALQTMKQEFLINLVKQKPQITEEQLEAVIADFSGLLEKCCQGQEQEVCFAEEGQKLISKTRAALGV

SEQ ID NO: 587 - protein, 346 aa, Homo Sapiens
MARKSNLPVLLVPFLLCQALVRCSSPLPLVVNTWPFKNATEAAWRALASGGSALDAVESGCAMCEREQCDGSVGFGGSPDELGETTLDAMIMDGTTMDVGAVGDLRRIKNAIGVARKVLEHTTHTLLVGESATTFAQSMGFINEDLSTTASQALHSDWLARNCQPNYWRNVIPDPSKYCGPYKPPGILKQDIPIHKETEDDRGHDTIGMVVIHKTGHIAAGTSTNGIKFKIHGRVGDSPIPGAGAYADDTAGAAAATGNGDILMRFLPSYQAVEYMRRGEDPTIACQKVISRIQKHFPEFFGAVICANVTGSYGAACNKLSTFTQFSFMVYNSEKNQPTEEKVDCI

SEQ ID NO: 588 - protein, 155 aa, Homo Sapiens
RKVLEHTTHTLLVGESATTFAQSMGFINEDLSTTASQALHSDWLARNCQPNYWRNVIPDPSKYCGPYKPPGILKQDIPIHKETEDDRGHDTIGDSPIPGAGAYADDTAGAAAATGNGDILMRFLPSYQAVEYMRRGEDPTIACQKVISRIQKHFP

SEQ ID NO: 589 - protein, 138 aa, Homo Sapiens
  misc_feature (1)..(1): Xaa can be any naturally occurring amino acid
XGDLRRIKNAIGVARKVLEHTTHTLLVGESATTFAQSMGFINEDLSTTASQALHSDWLARNCQPNYWRNVIPDPSKYCGPYKPPGILKQDIPIHKETEDDRGHDTIGMVVIHKTGHIAAGTSTNGDSPIPGAGAYADD

SEQ ID NO: 590 - protein, 342 aa, Homo Sapiens
MAAGTAVGAWVLVLSLWGAVVGAQNITARIGEPLVLKCKGAPKKPPQRLEWKLGGGPWDSVARVLPNGSLFLPAVGIQDEGIFRCQAMNRNGKETKSNYRVRVYQIPGKPEIVDSASELTAGVPNKVGTCVSEGSYPAGTLSWHLDGKPLVPNEKGVSVKEQTRRHPETGLFTLQSELMVTPARGGDPRPTFSCSFSPGLPRHRALRTAPIQPRVWEPVPLEEVQLVVEPEGGAVAPGGTVTLTCEVPAQPSPQIHWMKDVSDLERGAGRTRRGGANCRLCGRIRAGNSSPGPGDPGRPGDSRPAHWGHLVAKAATPRRGEEGPRKPGGRGGACRTESVGGT

SEQ ID NO: 591 - protein, 234 aa, Homo Sapiens
MAAGTAVGAWVLVLSLWGAVVGAQNITARIGEPLVLKCKGAPKKPPQRLEWKLNTGRTEAWKVLSPQGGGPWDSVARVLPNGSLFLPAVGIQDEGIFRCQAMNRNGKETKSNYRSLRTFTITASDWIFPPSEIPGKPEIVDSASELTAGVPNKVGTCVSEGSYPAGTLSWHLDGKPLVPNEKGVSVKEQTRRHPETGLFTLQSELMVTPARGGDPRPTFSCSFSPGLPRHRALR

SEQ ID NO: 592 - protein, 128 aa, Homo Sapiens
MAAGTAVGAWVLVLSLWGAVVGAQNITARIGEPLVLKCKGAPKKPPQRLEWKLNTGRTEAWKVLSPQGGGPWDSVARVLPNGSLFLPAVGIQDEGIFRCQAMNRNGKETKSNYRVRVYQFENLHNYSL

SEQ ID NO: 593 - protein, 404 aa, Homo Sapiens
MAAGTAVGAWVLVLSLWGAVVGAQNITARIGEPLVLKCKGAPKKPPQRLEWKLNTGRTEAWKVLSPQGGGPWDSVARVLPNGSLFLPAVGIQDEGIFRCQAMNRNGKETKSNYRVRVYQIPGKPEIVDSASELTAGVPNKVGTCVSEGSYPAGTLSWHLDGKPLVPNEKGVSVKEQTRRHPETGLFTLQSELMVTPARGGDPRPTFSCSFSPGLPRHRALRTAPIQPRVWEPVPLEEVQLVVEPEGGAVAPGGTVTLTCEVPAQPSPQIHWMKDGVPLPLPPSPVLILPEIGPQDQGTYSCVATHSSHGPQESRAVSISIIEPGEEGPTAGSVGGSGLGTLALALGILGGLGTAALLIGVILWQRRQRRGEERKAPENQEEEEERAELNQSEEPEAGESSTGGP

SEQ ID NO: 594 - protein, 347 aa, Homo Sapiens
MAAGTAVGAWVLVLSLWGAVVGAQNITARIGEPLVLKCKGAPKKPPQRLEWKLNTGRTEAWKVLSPQGGGPWDSVARVLPNGSLFLPAVGIQDEGIFRCQAMNRNGKETKSNYRVRVYQIPGKPEIVDSASELTAGVPNKVGTCVSEGSYPAGTLSWHLDGKPLVPNEKGVSVKEQTRRHPETGLFTLQSELMVTPARGGDPRPTFSCSFSPGLPRHRALRTAPIQPRVWEPVPLEEVQLVVEPEGGAVAPGGTVTLTCEVPAQPSPQIHWMKDGVPLPLPPSPVLILPEIGPQDQGTYSCVATHSSHGPQESRAVSISIIEPGEEGPTAGEGFDKVREAEDSPQHM

SEQ ID NO: 595 - protein, 233 aa, Homo Sapiens
MAAGTAVGAWVLVLSLWGAVVGAQNITARIGEPLVLKCKGAPKKPPQRLEWKLNTGRTEAWKVLSPQGGGPWDSVARVLPNGSLFLPAVGIQDEGIFRCQAMNRNGKETKSNYRVRVYQIPGKPEIVDSASELTAGVPNKVVEESRRSRKRPCEQEVGTCVSEGSYPAGTLSWHLDGKPLVPNEKGVSVKEQTRRHPETGLFTLQSELMVTPARGGDPRPTFSCSFSPGLPRH

SEQ ID NO: 596 - protein, 363 aa, Homo Sapiens
MAAGTAVGAWVLVLSLWGAVVGAQNITARIGEPLVLKCKGAPKKPPQRLEWKLNTGRTEAWKVLSPQGGGPWDSVARVLPNGSLFLPAVGIQDEGIFRCQAMNRNGKETKSNYRVRVYQIPGKPEIVDSASELTAGVPNKVVEESRRSRKRPCEQEVGTCVSEGSYPAGTLSWHLDGKPLVPNEKGVSVKEQTRRHPETGLFTLQSELMVTPARGGDPRPTFSCSFSPGLPRHRALRTAPIQPRVWEPVPLEEVQLVVEPEGGAVAPGGTVTLTCEVPAQPSPQIHWMKDGVPLPLPPSPVLILPEIGPQDQGTYSCVATHSSHGPQESRAVSISIIEPGEEGPTAGEGFDKVREAEDSPQHM

SEQ ID NO: 597 - protein, 420 aa, Homo Sapiens
MAAGTAVGAWVLVLSLWGAVVGAQNITARIGEPLVLKCKGAPKKPPQRLEWKLNTGRTEAWKVLSPQGGGPWDSVARVLPNGSLFLPAVGIQDEGIFRCQAMNRNGKETKSNYRVRVYQIPGKPEIVDSASELTAGVPNKVVEESRRSRKRPCEQEVGTCVSEGSYPAGTLSWHLDGKPLVPNEKGVSVKEQTRRHPETGLFTLQSELMVTPARGGDPRPTFSCSFSPGLPRHRALRTAPIQPRVWEPVPLEEVQLVVEPEGGAVAPGGTVTLTCEVPAQPSPQIHWMKDGVPLPLPPSPVLILPEIGPQDQGTYSCVATHSSHGPQESRAVSISIIEPGEEGPTAGSVGGSGLGTLALALGILGGLGTAALLIGVILWQRRQRRGEERKAPENQEEEEERAELNQSEEPEAGESSTGGP

SEQ ID NO: 598 - protein, 153 aa, Homo Sapiens
MAAGTAVGAWVLVLSLWGAVVGAQNITARIGEPLVLKCKGAPKKPPQRLEWKLNTGRTEAWKVLSPQGGGPWDSVARVLPNGSLFLPAVGIQDEGILGGLGTAALLIGVILWQRRQRRGEERKAPENQEEEEERAELNQSEEPEAGESSTGGP

SEQ ID NO: 599 - protein, 133 aa, Homo Sapiens
MKDGVPLPLPPSPVLILPEIGPQDQGTYSCVATHSSHGPQESRAVSISIIEPGEEGPTAGSVGGSGLGTLALALGILGGLGTAALLIGVILWQRRQRRGEERKAPENQEEEEERAELNQSEEPEAGESSTGGP

SEQ ID NO: 600 - protein, 294 aa, Homo Sapiens
MNRNGKETKSNYRVRVYQIPGKPEIVDSASELTAGVPNKVGTCVSEGSYPAGTLSWHLDGKPLVPNEKGVSVKEQTRRHPETGLFTLQSELMVTPARGGDPRPTFSCSFSPGLPRHRALRTAPIQPRVWEPVPLEEVQLVVEPEGGAVAPGGTVTLTCEVPAQPSPQIHWMKDGVPLPLPPSPVLILPEIGPQDQGTYSCVATHSSHGPQESRAVSISIIGSVGGSGLGTLALALGILGGLGTAALLIGVILWQRRQRRGEERKAPENQEEEEERAELNQSEEPEAGESSTGGP

SEQ ID NO: 601 - protein, 394 aa, Homo Sapiens
MENTDSDNLLRRAACQEAQVFGNQLIPPNAQVKKATVFLNPAACKGKARTLFEKNAAPILHLSGMDVTIVKTDYEGQAKKLLELMENTDVIIVAGGDGTLQEVVTGVLRRTDEATFSKIPIGFIPLGETSSLSHTLFAESGNKVQHITDATLAIVKGETVPLDVLQIKGEKEQPVFAMTGLRWGSFRDAGVKVSKYWYLGPLKIKAAHFFSTLKEWPQTHQASISYTGPTERPPNEPEETPVQRPSLYRRILRRLASYWAQPQDALSQEVSPEVWKDVQLSTIELSITTRNNQLDPTSKEDFLNICIEPDTISKGDFITIGSRKVRNPKLHVEGTECLQASQCTLLIPEGAGGSFSIDSEEYEAMPVEVKLLPRKLQFFCDPRKREQMLTSPTQ

SEQ ID NO: 602 - protein, 65 aa, Homo Sapiens
MTVFFKTLRNHWKKTTAGLCLLTWGGHWLYGKHCDNLLRRAACQEAQHYQDESRWEPTLSRTPGS

SEQ ID NO: 603 - protein, 422 aa, Homo Sapiens
MTVFFKTLRNHWKKTTAGLCLLTWGGHWLYGKHCDNLLRRAACQEAQVFGNQLIPPNAQVKKATVFLNPAACKGKARTLFEKNAAPILHLSGMDVTIVKTDYEGQAKKLLELMENTDVIIVAGGDGTLQEVVTGVLRRTDEATFSKIPIGFIPLGETSSLSHTLFAESGNKVQHITDATLAIVKGETVPLDVLQIKGEKEQPVFAMTGLRWGSFRDAGVKVSKYWYLGPLKIKAAHFFSTLKEWPQTHQASISYTGPTERPPNEPEETPVQRPSLYRRILRRLASYWAQPQDALSQEVSPEVWKDVQLSTIELSITTRNNQLDPTSKEDFLNICIEPDTISKGDFITIGSRKVRNPKLHVEGTECLQASQCTLLIPEGAGGSFSIDSEEYEAMPVEVKLLPRKLQFFCDPRKREQMLTSPTQ

SEQ ID NO: 604 - protein, 244 aa, Homo Sapiens
MTVFFKTLRNHWKKTTAGLCLLTWGGHWLYGKHCDNLLRRAACQEAQVFGNQLIPPNAQVKKATVFLNPAACKGTLFEKNAAPILHLSGMDVTIVKTDYEGQAKKLLELMENTDVIIVAGGDGTLQEVVTGVLRRTDEATFSKIPIGFIPLGETSSLSHTLFAESGNKVQHITDATLAIVKGETVPLDVLQIKGEKEQPVFAMTGLRWGSFRDAGVKVSKYWYLGPLKIKAAHFFSTLKPFPKR

SEQ ID NO: 605 - protein, 244 aa, Homo Sapiens; identical to SEQ ID NO: 604

SEQ ID NO: 606 - protein, 46 aa, Homo Sapiens
MTVFFKTLRNHWKKTTAGLCLLTWGGHWLYGKHWCLAINSFLPMHK

SEQ ID NO: 607 - protein, 189 aa, Homo Sapiens
MAEAAAAAGGTGLGAGASYGSAADRDRDPDPDRAGRRLRVLSGHLLGRPREALSTNECKARRAASAATAAPTATPAAQESGTIPKKRQEVMKWNGWGYNDSKFIFNKKGQIELTGKRGISDPLTVFEQTEAAAREEILANGGSLSHHHGVGKLRKQWLKESISDVGFGMLKSVKEYVDPNNIFGNRNLL

SEQ ID NO: 608 - protein, 658 aa, Homo Sapiens
MAEAAAAAGGTGLGAGASYGSAADRDRDPDPDRAGRRLRVLSGHLLGRPREALSTNECKARRAASAATAAPTATPAAQESGTIPKKRQEVMKWNGWGYNDSKFIFNKKGQIELTGKRYPLSGMGLPTFKEWIQNTLGVNVEHKTTSKASLNPSDTPPSVVNEDFLHDLKETNISYSQEADDRVFRAHGHCLHEIFLLREGMFERIPDIVLWPTCHDDVVKIVNLACKYNLCIIPIGGGTSVSYGLMCPADETRTIISLDTSQMNRILWVDENNLTAHVEAGITGQELERQLKESGYCTGHEPDSLEFSTVGGWVSTRASGMKKNIYGNIEDLVVHIKMVTPRGIIEKSCQGPRMSTGPDIHHFIMGSEGTLGVITEATIKIRPVPEYQKYGSVAFPNFEQGVACLREIAKQRCAPASIRLMDNKQFQFGHALKPQVSSIFTSFLDGLKKFYITKFKGFDPNQLSVATLLFEGDREKVLQHEKQVYDIAAKFGGLAAGEDNGQRGYLLTYVIAYIRDLALEYYVLGESFETSAPWDRVVDLCRNVKERITRECKEKGVQFAPFSTCRVTQTYDAGACIYFYFAFNYRGISDPLTVFEQTEAAAREEILANGGSLSHHHGVGKLRKQWLKESISDVGFGMLKSVKEYVDPNNIFGNRNLL

SEQ ID NO: 609 - protein, 543 aa, Homo Sapiens
  misc_feature (1)..(1): Xaa can be any naturally occurring amino acid
XQEVMKWNGWGYNDSKFIFNKKGQIELTGKRYPLSGMGLPTFKEWIQNTLGVNVEHKTTSKASLNPSDTPPSVVNEDFLHDLKETNISYSQEADDRVFRAHGHCLHEIFLLREGMFERIPDIVLWPTCHDDVVKIVNLACKYNLCIIPIGGGTSVSYGLMCPADETRTIISLDTSQMNRILWVDENNLTAHVEAGITGQELERQLKESGYCTGHEPDSLEFSTVGGWVSTRASGMKKNIYGNIEDLVVHIKMVTPRGIIEKSCQGPRMSTGPDIHHFIMGSEGTLGVITEATIKIRPVPEYQKYGSVAFPNFEQGVACLREIAKQRCAPASIRLMDNKQFQFGHALKPQVSSIFTSFLDGLKKFYITKFKGFDPNQLSVATLLFEGDREKVLQHEKQVYDIAAKFGGLAAGEDNGQRGYLLTYVIAYIRDLALEYYVLGESFETSAPWDRVVDLCRNVKERITRECKEKGVQFAPFSTCRVTQTYDAGACIYFYFAFNYRGISDPLTVFEQTEAAAREEILANGGSLSHHHGGLQLEGTCYES

SEQ ID NO: 610 - protein, 560 aa, Homo Sapiens
  misc_feature (1)..(1): Xaa can be any naturally occurring amino acid
XYPLSGMGLPTFKEWIQNTLGVNVEHKTTSKASLNPSDTPPSVVNEDFLHDLKETNISYSQEADDRVFRAHGHCLHEIFLLREGMFERIPDIVLWPTCHDDVVKIVNLACKYNLCIIPIGGGTSVSYGLMCPADETRTIISLDTSQMNRILWVDENNLTAHVEAGITGQELERQLKESGYCTGHEPDSLEFSTVGGWVSTRASGMKKNIYGNIEDLVVHIKMVTPRGIIEKSCQGPRMSTGPDIHHFIMGSEGTLGVITEATIKIRPVPEYQKYGSVAFPNFEQGVACLREIAKQRCAPASIRLMDNKQFQFGHALKPQVSSIFTSFLDGLKKFYITKFKGFDPNQLSVATLLFEGDREKVLQHEKQVYDIAAKFGGLAAGEDNGQRGYLLTYVIAYIRDLALEYYVLGESFETSAPWDRVVDLCRNVKERITRECKEKGVQFAPFSTCRVTQTYDAGACIYFYFAFNYRGISDPLTVFEQTEAAAREEILANGGSLSHHHGEHEPHSTSTHHGRYRIPQICGRSFPPLDNFQDSSRFLPEPSTQECISPWFHHIHSLPF

SEQ ID NO: 611 - protein, 131 aa, Homo Sapiens
MEKIPVSAFLLLVALSYTLARDTTVKPGAKKDTKDSRPKLPQTLSRGWGDQLIWTQTYEEALYKSKTSNKPLMIIHHLDECPHSQALKKVFAENKEIQKLAEQFVLLNLVYETTDKHLSPDGQYVPRIMFV

SEQ ID NO: 612 - protein, 188 aa, Homo Sapiens
MEKIPVSAFLLLVALSYTLARDTTVKPGAKKDTKDSRPKLPQTLSRGWGDQLIWTQTYEEALYKSKTSNKPLMIIHHLDECPHSQALKKVFAENKEIQKLAEQFVLLNLVYETTDKHLSPDGQYVPRIMFVDPSLTVRADITGRYSNRLYAYEPADTALCKCDLQFGCCPRVEHLYCCSDGTRGCMVR

SEQ ID NO: 613 - protein, 175 aa, Homo Sapiens
MEKIPVSAFLLLVALSYTLARDTTVKPGAKKDTKDSRPKLPQTLSRGWGDQLIWTQTYEEALYKSKTSNKPLMIIHHLDECPHSQALKKVFAENKEIQKLAEQFVLLNLVYETTDKHLSPDGQYVPRIMFVDPSLTVRADITGRYSNRLYAYEPADTALLLDNMKKALKLLKTEL

SEQ ID NO: 614 - protein, 119 aa, Homo Sapiens
PLMIIHHLDECPHSQALKKVFAENKEIQKLAEQFVLLNLVYETTDKHLSPDGQYVPRIMFVDPSLTVRADITGRYSNRLYAYEPADTALCKCDLQFGCCPRVEHLYCCSDGTRGCMVSA

SEQ ID NO: 615 - protein, 163 aa, Homo Sapiens
MMLHSALGLCLLLVTVSSNLAIAIKKEKRPPQTLSRGWGDDITWVQTYEEGLFYAQKSKKPLMVIHHLEDCQYSQALKKVFAQNEEIQEMAQNKFIMLNLMHETTDKNLSPDGQYVPRIMFVDPSLTVRADIAGRYSNRLYTYEPRDLPLCKYSQMISNSGHS

SEQ ID NO: 616 - protein, 166 aa, Homo Sapiens
MMLHSALGLCLLLVTVSSNLAIAIKKEKRPPQTLSRGWGDDITWVQTYEEGLFYAQKSKKPLMVIHHLEDCQYSQALKKVFAQNEEIQEMAQNKFIMLNLMHETTDKNLSPDGQYVPRIMFVDPSLTVRADIAGRYSNRLYTYEPRDLPLLIENMKKALRLIQSEL

SEQ ID NO: 617 - protein, 129 aa, Homo Sapiens
  misc_feature (1)..(1): Xaa can be any naturally occurring amino acid
XNIQNTFPTRALAKSGWGDDITWVQTYEEGLFYAQKSKKPLMVIHHLEDCQYSQALKKVFAQNEEIQEMAQNKFIMLNLMHETTDKNLSPDGQYVPRIMFVDPSLTVRADIAGRYSNRLYTYEPRDLPL

SEQ ID NO: 618 - protein, 2045 aa, Homo Sapiens
MAGRSHPGPLRPLLPLLVVAACVLPGAGGTCPERALERREEEANVVLTGTVEEILNVDPVQHTYSCKVRVWRYLKGKDLVARESLLDGGNKVVISGFGDPLICDNQVSTGDTRIFFVNPAPPYLWPAHKNELMLNSSLMRITLRNLEEVEFCVEDKPGTHFTPVPPTPPDACRGMLCGFGAVCEPNAEGPGRASCVCKKSPCPSVVAPVCGSDASTYSNECELQRAQCSQQRRIRLLSRGPCGSRDPCSNVTCSFGSTCARSADGLTASCLCPATCRGAPEGTVCGSDGADYPGECQLLRRACARQENVFKKFDGPCDPCQGALPDPSRSCRVNPRTRRPEMLLRPESCPARQAPVCGDDGVTYENDCVMGRSGAARGLLLQKVRSGQCQGRDQCPEPCRFNAVCLSRRGRPRCSCDRVTCDGAYRPVCAQDGRTYDSDCWRQQAECRQQRAIPSKHQGPCDQAPSPCLGVQCAFGATCAVKNGQAACECLQACSSLYDPVCGSDGVTYGSACELEATACTLGREIQVARKGPCDRCGQCRFGALCEAETGRCVCPSECVALAQPVCGSDGHTYPSECMLHVHACTHQISLHVASAGPCETCGDAVCAFGAVCSAGQCVCPRCEHPPPGPVCGSDGVTYGSACELREAACLQQTQIEEARAGPCEQAECGSGGSGSGEDGDCEQELCRQRGGIWDEDSEDGPCVCDFSCQSVPGSPVCGSDGVTYSTECELKKARCESQRGLYVAAQGACRGPTFAPLPPVAPLHCAQTPYGCCQDNITAARGVGLAGCPSACQCNPHGSYGGTCDPATGQCSCRPGVGGLRCDRCEPGFWNFRGIVTDGRSGCTPCSCDPQGAVRDDCEQMTGLCSCKPGVAGPKCGQCPDGRALGPAGCEADASAPATCAEMRCEFGARCVEESGSAHCVCPMLTCPEANATKVCGSDGVTYGNECQLKTIACRQGLQISIQSLGPCQEAVAPSTHPTSASVTVTTPGLLLSQALPAPPGALPLAPSSTAHSQTTPPPSSRPRTTASVPRTTVWPVLTVPPTAPSPAPSLVASAFGESGSTDGSSDEELSGDQEASGGGSGGLEPLEGSSVATPGPPVERASCYNSALGCCSDGKTPSLDAEGSNCPATKVFQGVLELEGVEGQELFYTPEMADPKSELFGETARSIESTLDDLFRNSDVKKDFRSVRLRDLGPGKSVRAIVDVHFDPTTAFRAPDVARALLRQIQVSRRRSLGVRRPLQEHVRFMDFDWFPAFITGATSGAIAAGATARATTASRLPSSAVTPRAPHPSHTSQPVAKTTAAPTTRRPPTTAPSRVPGRRPPAPQQPPKPCDSQPCFHGGTCQDWALGGGFTCSCPAGRGGAVCEKVLGAPVPAFEGRSFLAFPTLRAYHTLRLALEFRALEPQGLLLYNGNARGKDFLALALLDGRVQLRFDTGSGPAVLTSAVPVEPGQWHRLELSRHWRRGTLSVDGETPVLGESPSGTDGLNLDTDLFVGGVPEDQAAVALERTFVGAGLRGCIRLLDVNNQRLELGIGPGAATRGSGVGECGDHPCLPNPCHGGAPCQNLEAGRFHCQCPPGRVGPTCADEKSPCQPNPCHGAAPCRVLPEGGAQCECPLGREGTFCQTASGQDGSGPFLADFNGFSHLELRGLHTFARDLGEKMALEVVFLARGPSGLLLYNGQKTDGKGDFVSLALRDRRLEFRYDLGKGAAVIRSREPVTLGAWTRVSLERNGRKGALRVGDGPRVLGESPVPHTVLNLKEPLYVGGAPDFSKLARAAAVSSGFDGAIQLVSLGGRQLLTPEHVLRQVDVTSFAGHPCTRASGHPCLNGASCVPREAAYVCLCPGGFSGPHCEKGLVEKSAGDVDTLAFDGRTFVEYLNAVTESEKALQSNHFELSLRTEATQGLVLWSGKATERADYVALAIVDGHLQLSYNLGSQPVVLRSTVPVNTNRWLRVVAHREQREGSLQVGNEAPVTGSSPLGATQLDTDGALWLGGLPELPVGPALPKAYGTGFVGCLRDVVVGRHPLHLLEDAVTKPELRPCPTP

SEQ ID NO: 619 - protein, 86 aa, Homo Sapiens
MPPLPLARDTRQPPGASLLVRGFMVPCNACLILLATATLGFAVLLFLNNYKPGTHFTPVPPTPPDACRGMLCGFGAVCEPNAEGPG

SEQ ID NO: 620 - protein, 1930 aa, Homo Sapiens
MRITLRNLEEVEFCVEDKPGTHFTPVPPTPPDACRGMLCGFGAVCEPNAEGPGRASCVCKKSPCPSVVAPVCGSDASTYSNECELQRAQCSQQRRIRLLSRGPCGSRDPCSNVTCSFGSTCARSADGLTASCLCPATCRGAPEGTVCGSDGADYPGECQLLRRACARQENVFKKFDGPCDPCQGALPDPSRSCRVNPRTRRPEMLLRPESCPARQAPVCGDDGVTYENDCVMGRSGAARGLLLQKVRSGQCQGRDQCPEPCRFNAVCLSRRGRPRCSCDRVTCDGAYRPVCAQDGRTYDSDCWRQQAECRQQRAIPSKHQGPCDQAPSPCLGVQCAFGATCAVKNGQAACECLQACSSLYDPVCGSDGVTYGSACELEATACTLGREIQVARKGPCDRCGQCRFGALCEAETGRCVCPSECVALAQPVCGSDGHTYPSECMLHVHACTHQISLHVASAGPCETCGDAVCAFGAVCSAGQCVCPRCEHPPPGPVCGSDGVTYGSACELREAACLQQTQIEEARAGPCEQAECGSGGSGSGEDGDCEQELCRQRGGIWDEDSEDGPCVCDFSCQSVPGSPVCGSDGVTYSTECELKKARCESQRGLYVAAQGACRGPTFAPLPPVAPLHCAQTPYGCCQDNITAARGVGLAGCPSACQCNPHGSYGGTCDPATGQCSCRPGVGGLRCDRCEPGFWNFRGIVTDGRSGCTPCSCDPQGAVRDDCEQMTGLCSCKPGVAGPKCGQCPDGRALGPAGCEADASAPATCAEMRCEFGARCVEESGSAHCVCPMLTCPEANATKVCGSDGVTYGNECQLKTIACRQGLQISIQSLGPCQEAVAPSTHPTSASVTVTTPGLLLSQALPAPPGALPLAPSSTAHSQTTPPPSSRPRTTASVPRTTVWPVLTVPPTAPSPAPSLVASAFGESGSTDGSSDEELSGDQEASGGGSGGLEPLEGSSVATPGPPVERASCYNSALGCCSDGKTPSLDAEGSNCPATKVFQGVLELEGVEGQELFYTPEMADPKSELFGETARSIESTLDDLFRNSDVKKDFRSVRLRDLGPGKSVRAIVDVHFDPTTAFRAPDVARALLRQIQVSRRRSLGVRRPLQEHVRFMDFDWFPAFITGATSGAIAAGATARATTASRLPSSAVTPRAPHPSHTSQPVAKTTAAPTTRRPPTTAPSRVPGRRPPAPQQPPKPCDSQPCFHGGTCQDWALGGGFTCSCPAGRGGAVCEKVLGAPVPAFEGRSFLAFPTLRAYHTLRLALEFRALEPQGLLLYNGNARGKDFLALALLDGRVQLRFDTGSGPAVLTSAVPVEPGQWHRLELSRHWRRGTLSVDGETPVLGESPSGTDGLNLDTDLFVGGVPEDQAAVALERTFVGAGLRGCIRLLDVNNQRLELGIGPGAATRGSGVGECGDHPCLPNPCHGGAPCQNLEAGRFHCQCPPGRVGPTCADEKSPCQPNPCHGAAPCRVLPEGGAQCECPLGREGTFCQTASGQDGSGPFLADFNGFSHLELRGLHTFARDLGEKMALEVVFLARGPSGLLLYNGQKTDGKGDFVSLALRDRRLEFRYDLGKGAAVIRSREPVTLGAWTRVSLERNGRKGALRVGDGPRVLGESPKSRKVPHTVLNLKEPLYVGGAPDFSKLARAAAVSSGFDGAIQLVSLGGRQLLTPEHVLRQVDVTSFAGHPCTRASGHPCLNGASCVPREAAYVCLCPGGFSGPHCEKGLVEKSAGDVDTLAFDGRTFVEYLNAVTESELANEIPVPETLDSGALHSEKALQSNHFELSLRTEATQGLVLWSGKATERADYVALAIVDGHLQLSYNLGSQPVVLRSTVPVNTNRWLRVVAHREQREGSLQVGNEAPVTGSSPLGATQLDTDGALWLGGLPELPVGPALPKAYGTGFVGCLRDVVVGRHPLHLLEDAVTKPELRPCPTP

SEQ ID NO: 621 - protein, 287 aa, Homo Sapiens
  misc_feature (1)..(1): Xaa can be any naturally occurring amino acid
XKGDFVSLALRDRRLEFRYDLGKGAAVIRSREPVTLGAWTRVSLERNGRKGALRVGDGPRVLGESPKSRKVPHTVLNLKEPLYVGGAPDFSKLARAAAVSSGFDGAIQLVSLGGRQLLTPEHVLRQVDVTSFAGHPCTRASGHPCLNGASCVPREAAYVCLCPGGFSGPHCEKGLVEKSAGDVDTLAFDGRTFVEYLNAVTESELANEIPVPETLDSGALHSEKALQSNHFELSLRTEATQGLVLWSGKATERADYVALAIVDGHLQLSYNLGSQPVVLRSTVPVNT

SEQ ID NO: 622 - protein, 132 aa, Homo Sapiens
MLTAAVLSCALLLALPATRGAQMGLAPMEGIRRPDQALLPELPGLGLRAPLKKTTAEQAEEDLLQEAQALAEVLDLQDREPRSSRRCVRLHESCLGQQVPCCDPCATCYCRFFNAFCYCRKLGTAMNPCSRT

SEQ ID NO: 623 - protein, 485 aa, Homo Sapiens
MRKRAPQSEMAPAGVSLRATILCLLAWAGLAAGDRVYIHPFHLVIHNESTCEQLAKANAGKPKDPTFIPAPIQAKTSPVDEKALQDQLVLVAAKLDTEDKLRAAMVGMLANFLGFRIYGMHSELWGVVHGATVLSPTAVFGTLASLYLGALDHTADRLQAILGVPWKDKNCTSRLDAHKVLSALQAVQGLLVAQGRADSQAQLLLSTVVGVFTAPGLHLKQPFVQGLALYTPVVLPRSLDFTELDVAAEKIDRFMQAVTGWKTGCSLMGASVDSTLAFNTYVHFQGKMKGFSLLAEPQEFWVDNSTSVSVPMLSGMGTFQHWSDIQDNFSVTQVPFTESACLLLIQPHYASDLDKVEGLTFQQNSLNWMKKLSPRTIHLTMPQLVLQGSYDLQDLLAQAELPAILHTELNLQKLSNDRIRVGEVLNSIFFELEADEREPTESTQQLNKPEVLEVTLNRPFLFAVYDQSATALHFLGRVANPLSTA

SEQ ID NO: 624 - protein, 1278 aa, Homo Sapiens
MRTGSAASSAAAAAAAAAASASPATGVCMKTPGGGRRGIRRDPGAEPGAAALRGPRQRPILSRLTNNSRIVGLLAQLEKINAEPSESDTARYVTSKILHLAQSQEKTRREMTAKGSTGMEILLSTLENTKDLQTTLNILSILVELVSAGGGRRVSFLVTKGGSQILLQLLMNASKESPPHEDLMVQIHSILAKIGPKDKKFGVKARINGALNITLNLVKQNLQNHRLVLPCLQLLRVYSANSVNSVSLGKNGVVELMFKIIGPFSKKNSSLIKVALDTLAALLKSKTNARRAVDRGYVQVLLTIYVDWHRHDNRHRNMLIRKGILQSLKSVTNIKLGRKAFIDANGMKILYNTSQECLAVRTLDPLVNTSSLIMRKCFPKNRLPLPTIKSSFHFQLPVIPVTGPVAQLYSLPPEVDDVVDESDDNDDIDVEAENETENEDDLDQNFKNDDIETDINKLKPQQEPGRTIEDLKMYEHLFPELVDDFQDYDLISKEPKPFVFEGKVRGPIVVPTAGEETSGNSGNLRKVVMKENISSKGDEGEKKSTFMDLAKEDIKDNDRTLQQQPGDQNRTISSVHGLNNDIVKALDRITLQNIPSQTAPGFTAEMKKDCSLPLTVLTCAKACPHMATCGNVLFEGRTVQLGKLCCTGVETEDDEDTESNSSVEQASVEVPDGPTLHDPDLYIEIVKNTKSVPEYSEVAYPDYFGHIPPPFKEPILERPYGVQRTKIAQDIERLIHQSDIIDRVVYDLDNPNYTIPEEGDILKFNSKFESGNLRKVIQIRKNEYDLILNSDINSNHYHQWFYFEVSGMRPGVAYRFNIINCEKSNSQFNYGMQPLMYSVQEALNARPWWIRMGTDICYYKNHFSRSSVAAGGQKGKSYYTITFTVNFPHKDDVCYFAYHYPYTYSTLQMHLQKLESAHNPQQIYFRKDVLCETLSGNSCPLVTITAMPESNYYEHICHFRNRPYVFLSARVHPGETNASWVMKGTLEYLMSNNPTAQSLRESYIFKIVPMLNPDGVINGNHRCSLSGEDLNRQWQSPSPDLHPTIYHAKGLLQYLAAVKRLPLVYCDYHGHSRKKNVFMYGCSIKETVWHTNDNATSCDVVEDTGYRTLPKILSHIAPAFCMSSCSFVVEKSKESTARVVVWREIGVQRSYTMESTLCGCDQGKYKGLQIGTRELEEMGAKFCVGLLRLKRLTSPLEYNLPSSLLDFENDLIESSCKVTSPTTYVLDEDEPRFLEEVDYSAESNDELDIELAENVGDYEPSAQEEVLSDSELSRTYLP

SEQ ID NO: 625 - protein, 1238 aa, Homo Sapiens
MRTGSAASSAAAAAAAAAASASPATGVCMKTPGGGRRGIRRDPGAEPGAAALRGPRQRPILSRLTNNSRIVGLLAQLEKINAEPSESDTARYVTSKILHLAQSQEKTRREMTAKGSTGMEILLSTLENTKDLQTTLNILSILVELVSAGGGRRVSFLVTKGGSQILLQLLMNASKESPPHEDLMVQIHSILAKIGPKDKKFGVKARINGALNITLNLVKQNLQNHRLVLPCLQLLRVYSANSVNSVSLGKNGVVELMFKIIGPFSKKNSSLIKVALDTLAALLKSKTNARRAVDRGYVQVLLTIYVDWHRHDNRHRNMLIRKGILQSLKSVTNIKLGRKAFIDANGMKILYNTSQLPVIPVTGPVAQLYSLPPEVDDVVDESDDNDDIDVEAENETENEDDLDQNFKNDDIETDINKLKPQQEPGRTIEDLKMYEHLFPELVDDFQDYDLISKEPKPFVFEGKVRGPIVVPTAGEETSGNSGNLRKVVMKENISSKGDEGEKKSTFMDLAKEDIKDNDRTLQQQPGDQNRTISSVHGLNNDIVKALDRITLQNIPSQTAPGFTAEMKKDCSLPLTVLTCAKACPHMATCGNVLFEGRTVQLGKLCCTGVETEDDEDTESNSSVEQASVEVPDGPTLHDPDLYIEIVKNTKSVPEYSEVAYPDYFGHIPPPFKEPILERPYGVQRTKIAQDIERLIHQSDIIDRVVYDLDNPNYTIPEEGDILKFNSKFESGNLRKVIQIRKNEYDLILNSDINSNHYHQWFYFEVSGMRPGVAYRFNIINCEKSNSQFNYGMQPLMYSVQEALNARPWWIRMGTDICYYKNHFSRSSVAAGGQKGKSYYTITFTVNFPHKDDVCYFAYHYPYTYSTLQMHLQKLESAHNPQQIYFRKDVLCETLSGNSCPLVTITAMPESNYYEHICHFRNRPYVFLSARVHPGETNASWVMKGTLEYLMSNNPTAQSLRESYIFKIVPMLNPDGVINGNHRCSLSGEDLNRQWQSPSPDLHPTIYHAKGLLQYLAAVKRLPLVYCDYHGHSRKKNVFMYGCSIKETVWHTNDNATSCDVVEDTGYRTLPKILSHIAPAFCMSSCSFVVEKSKESTARVVVWREIGVQRSYTMESTLCGCDQGKYKGLQIGTRELEEMGAKFCVGLLRLKRLTSPLEYNLPSSLLDFENDLIESSCKVTSPTTYVLDEDEPRFLEEVDYSAESNDELDIELAENVGDYEPSAQEEVLSDSELSRTYLP

SEQ ID NO: 626 - protein, 1226 aa, Homo Sapiens
MSKLKVIPEKSLTNNSRIVGLLAQLEKINAEPSESDTARYVTSKILHLAQSQEKTRREMTAKGSTGMEILLSTLENTKDLQTTLNILSILVELVSAGGGRRVSFLVTKGGSQILLQLLMNASKESPPHEDLMVQIHSILAKIGPKDKKFGVKARINGALNITLNLVKQNLQNHRLVLPCLQLLRVYSANSVNSVSLGKNGVVELMFKIIGPFSKKNSSLIKVALDTLAALLKSKTNARRAVDRGYVQVLLTIYVDWHRHDNRHRNMLIRKGILQSLKSVTNIKLGRKAFIDANGMKILYNTSQECLAVRTLDPLVNTSSLIMRKCFPKNRLPLPTIKSSFHFQLPVIPVTGPVAQLYSLPPEVDDVVDESDDNDDIDVEAENETENEDDLDQNFKNDDIETDINKLKPQQEPGRTIEDLKMYEHLFPELVDDFQDYDLISKEPKPFVFEGKVRGPIVVPTAGEETSGNSGNLRKVVMKENISSKGDEGEKKSTFMDLAKEDIKDNDRTLQQQPGDQNRTISSVHGLNNDIVKALDRITLQNIPSQTAPGFTAEMKKDCSLPLTVLTCAKACPHMATCGNVLFEGRTVQLGKLCCTGVETEDDEDTESNSSVEQASVEVPDGPTLHDPDLYIEIVKNTKSVPEYSEVAYPDYFGHIPPPFKEPILERPYGVQRTKIAQDIERLIHQSDIIDRVVYDLDNPNYTIPEEGDILKFNSKFESGNLRKVIQIRKNEYDLILNSDINSNHYHQWFYFEVSGMRPGVAYRFNIINCEKSNSQFNYGMQPLMYSVQEALNARPWWIRMGTDICYYKNHFSRSSVAAGGQKGKSYYTITFTVNFPHKDDVCYFAYHYPYTYSTLQMHLQKLESAHNPQQIYFRKDVLCETLSGNSCPLVTITAMPESNYYEHICHFRNRPYVFLSARVHPGETNASWVMKGTLEYLMSNNPTAQSLRESYIFKIVPMLNPDGVINGNHRCSLSGEDLNRQWQSPSPDLHPTIYHAKGLLQYLAAVKRLPLVYCDYHGHSRKKNVFMYGCSIKETVWHTNDNATSCDVVEDTGYRTLPKILSHIAPAFCMSSCSFVVEKSKESTARVVVWREIGVQRSYTMESTLCGCDQGKYKGLQIGTRELEEMGAKFCVGLLRLKRLTSPLEYNLPSSLLDFENDLIESSCKVTSPTTYVLDEDEPRFLEEVDYSAESNDELDIELAENVGDYEPSAQEEVLSDSELSRTYLP

SEQ ID NO: 627 - protein, 1186 aa, Homo Sapiens
MSKLKVIPEKSLTNNSRIVGLLAQLEKINAEPSESDTARYVTSKILHLAQSQEKTRREMTAKGSTGMEILLSTLENTKDLQTTLNILSILVELVSAGGGRRVSFLVTKGGSQILLQLLMNASKESPPHEDLMVQIHSILAKIGPKDKKFGVKARINGALNITLNLVKQNLQNHRLVLPCLQLLRVYSANSVNSVSLGKNGVVELMFKIIGPFSKKNSSLIKVALDTLAALLKSKTNARRAVDRGYVQVLLTIYVDWHRHDNRHRNMLIRKGILQSLKSVTNIKLGRKAFIDANGMKILYNTSQLPVIPVTGPVAQLYSLPPEVDDVVDESDDNDDIDVEAENETENEDDLDQNFKNDDIETDINKLKPQQEPGRTIEDLKMYEHLFPELVDDFQDYDLISKEPKPFVFEGKVRGPIVVPTAGEETSGNSGNLRKVVMKENISSKGDEGEKKSTFMDLAKEDIKDNDRTLQQQPGDQNRTISSVHGLNNDIVKALDRITLQNIPSQTAPGFTAEMKKDCSLPLTVLTCAKACPHMATCGNVLFEGRTVQLGKLCCTGVETEDDEDTESNSSVEQASVEVPDGPTLHDPDLYIEIVKNTKSVPEYSEVAYPDYFGHIPPPFKEPILERPYGVQRTKIAQDIERLIHQSDIIDRVVYDLDNPNYTIPEEGDILKFNSKFESGNLRKVIQIRKNEYDLILNSDINSNHYHQWFYFEVSGMRPGVAYRFNIINCEKSNSQFNYGMQPLMYSVQEALNARPWWIRMGTDICYYKNHFSRSSVAAGGQKGKSYYTITFTVNFPHKDDVCYFAYHYPYTYSTLQMHLQKLESAHNPQQIYFRKDVLCETLSGNSCPLVTITAMPESNYYEHICHFRNRPYVFLSARVHPGETNASWVMKGTLEYLMSNNPTAQSLRESYIFKIVPMLNPDGVINGNHRCSLSGEDLNRQWQSPSPDLHPTIYHAKGLLQYLAAVKRLPLVYCDYHGHSRKKNVFMYGCSIKETVWHTNDNATSCDVVEDTGYRTLPKILSHIAPAFCMSSCSFVVEKSKESTARVVVWREIGVQRSYTMESTLCGCDQGKYKGLQIGTRELEEMGAKFCVGLLRLKRLTSPLEYNLPSSLLDFENDLIESSCKVTSPTTYVLDEDEPRFLEEVDYSAESNDELDIELAENVGDYEPSAQEEVLSDSELSRTYLP

SEQ ID NO: 628 - protein, 159 aa, Homo Sapiens
MELPAVNLKCASSSVPRNHPHVILLGHWLLTTCFWRHFSAKPRLETIELTCALCKLRSAAHRATAGLHCILRLLCLGQLHHPGLGRVGCGSAGLHRRHKHVSGWLAGHHLPGHRAHQHLLPAGQPHGHGPLWRGHGHPQLAAQAALLLLRLPHVPGARG

SEQ ID NO: 629 - protein, 111 aa, Homo Sapiens
MELPAVNLKGLHCILRLLCLGQLHHPGLGRVGCGSAGLHRRHKHVSGWLAGHHLPGHRAHQHLLPAGQPHGHGPLWRGHGHPQLAAQAALLLLRLPHVPGARGFPWVFSGP

SEQ ID NO: 630 - protein, 147 aa, Homo Sapiens
MELPAVNLKVILLGHWLLTTCFWRHFSAKPRLETIELTCALCKLRSAAHRATAGLHCILRLLCLGQLHHPGLGRVGCGSAGLHRRHKHVSGWLAGHHLPGHRAHQHLLPAGQPHGHGPLWRGHGHPQLAAQAALLLLRLPHVPGARG

SEQ ID NO: 631 - protein, 155 aa, Homo Sapiens
MELPAVNLKVILLGHWLLTTCFWRHFSAKPRLETIELTCALCKLRSAAHRATAGLHCILRLLCLGQLHHPGLGRVGCGSAGLHRRHKHVSGWLAGHHLPGHRAHQHLLPAGQPHGHGPLWRGHGHPQLAAQAALLLLRLPHVPGARGFPWVFSGP

SEQ ID NO: 632 - protein, 155 aa, Homo Sapiens
MELPAVNLKVILLGHWLLTTCFWVACWPPSSWTSCTSASSTRGSASRTRAALAWAWPSSACCSSRSPAASSTTCTGSAGVSSWSTLVSLGLLRTVVPTRRLTQQRRPQIPLQSQRAGVKMPEGTEASHAAPGPAPGLPRAWEVVLGMLLTSVSWT

SEQ ID NO: 633 - protein, 159 aa, Homo Sapiens
MELPAVNLKVILLGHWLLTTWGCIVFSGSYAWANFTILALGVWAVAQRDSIDAISMFLGGLLATIFLDIVHISIFYPRVSLTDTGRFGVGMAILSLLLKPLSCCFVYHMYRERGGELLVHTGFLGSSQDRSAYQTIDSAEAPADPFAVPEGRSQDARGY

SEQ ID NO: 634 - protein, 152 aa, Homo Sapiens
MELPAVNLKVILLGHWLLTTWGCIVFSGSYAWANFTILALGVWAVAQRDSIDAISMFLGGLLATIFLDIVHISIFYPRVSLTDTGRFGVGMAILSLLLKPLSCCFVYHMYRERGGFLGSSQDRSAYQTIDSAEAPADPFAVPEGRSQDARGY

SEQ ID NO: 635 - protein, 63 aa, Homo Sapiens
MELPAVNLKVILLGHWLLTTWHKDCTPCRSWEGDVEVLIRAPQGLPHSEASALQLDFHLYHLF

SEQ ID NO: 636 - protein, 508 aa, Homo Sapiens
MEKWDGNEGTSAFHMPEWMIQFADQKQEFNKRPTKIGRRSLSRSISQSSTDSYSSAASYTDSSDDETSPRDKQQKNSKGSSDFCVKNIKQAEFGRREIEIAEQEMPALMALRKRAQGEKPLAGAKIVGCTHITAQTAVLMETLGALGAQCRWAACNIYSTLNEVAAALAESGFPVFAWKGESEDDFWWCIDRCVNVEGWQPNMILDDGGDLTHWIYKKYPNMFKKIKGIVEESVTGVHRLYQLSKAGKLCVPAMNVNDSVTKQKFDNLYCCRESILDGLKRTTDMMFGGKQVVVCGYGEVGKGCCAALKAMGSIVYVTEIDPICALQACMDGFRLVKLNEVIRQVDIVITCTGNKNVVTREHLDRMKNSCIVCNMGHSNTEIDVASLRTPELTWERVRSQVDHVIWPDGKRIVLLAEGRLLNLSCSTVPTFVLSITATTQALALIELYNAPEGRYKQDVYLLPKKMDEYVASLHLPTFDAHLTELTDEQAKYLGLNKNGPFKPNYYRY

SEQ ID NO: 637 - protein, 75 aa, Homo Sapiens
MEKWDGNEGTSAFHMPEWMQIQFADQKQEFNKRPTKIGRRSLSRSISQSSTDSYSSAASYTDSSDDETSPRDKQQ

SEQ ID NO: 638 - protein, 508 aa, Homo Sapiens
MLGSKKKYIVNGNSGIKAQIQFADQKQEFNKRPTKIGRRSLSRSISQSSTDSYSSAASYTDSSDDETSPRDKQQKNSKGSSDFCVKNIKQAEFGRREIEIAEQEMPALMALRKRAQGEKPLAGAKIVGCTHITAQTAVLMETLGALGAQCRWAACNIYSTLNEVAAALAESGFPVFAWKGESEDDFWWCIDRCVNVEGWQPNMILDDGGDLTHWIYKKYPNMFKKIKGIVEESVTGVHRLYQLSKAGKLCVPAMNVNDSVTKQKFDNLYCCRESILDGLKRTTDMMFGGKQVVVCGYGEVGKGCCAALKAMGSIVYVTEIDPICALQACMDGFRLVKLNEVIRQVDIVITCTGNKNVVTREHLDRMKNSCIVCNMGHSNTEIDVASLRTPELTWERVRSQVDHVIWPDGKRIVLLAEGRLLNLSCSTVPTFVLSITATTQALALIELYNAPEGRYKQDVYLLPKKMDEYVASLHLPTFDAHLTELTDEQAKYLGLNKNGPFKPNYYRY

SEQ ID NO: 639 - protein, 183 aa, Homo Sapiens [sequence omitted]

SEQ ID NO: 640 - protein, 610 aa, Homo Sapiens
MSVQVVSAAAAAKVPEVELKDLSPSEAESQLGLSTAAVGAMAPPAGGGDPEAPAPAAERPPVPGPGSGPAAALSPAAGKVPQASAMKRSDPHHQHQRHRDGGEALVSPDGTVTEAPRTVKKIQFADQKQEFNKRPTKIGRRSLSRSISQSSTDSYSSAASYTDSSDDETSPRDKQQKNSKGSSDFCVKNIKQAEFGRREIEIAEQEMPALMALRKRAQGEKPLAGAKIVGCTHITAQTAVLMETLGALGAQCRWAACNIYSTLNEVAAALAESGFPVFAWKGESEDDFWWCIDRCVNVEGWQPNMILDDGGDLTHWIYKKYPNMFKKIKGIVEESVTGVHRLYQLSKAGKLCVPAMNVNDSVTKQKFDNLYCCRESILDGLKRTTDMMFGGKQVVVCGYGEVGKGCCAALKAMGSIVYVTEIDPICALQACMDGFRLVKLNEVIRQVDIVITCTGNKNVVTREHLDRMKNSCIVCNMGHSNTEIDVASLRTPELTWERVRSQVDHVIWPDGKRIVLLAEGRLLNLSCSTVPTFVLSITATTQALALIELYNAPEGRYKQDVYLLPKKMDEYVASLHLPTFDAHLTELTDEQAKYLGLNKNGPFKPNYYRY

SEQ ID NO: 641 - protein, 611 aa, Homo Sapiens
MSVQVVSAAAAAKVPEVELKDLSPSEAESQLGLSTAAVGAMAPPAGGGDPEAPAPAAERPPVPGPGSGPAAALSPAAGKVPQASAMKRSDPHHQHQRHRDGGEALVSPDGTVTEAPRTVKKQIQFADQKQEFNKRPTKIGRRSLSRSISQSSTDSYSSAASYTDSSDDETSPRDKQQKNSKGSSDFCVKNIKQAEFGRREIEIAEQEMPALMALRKRAQGEKPLAGAKIVGCTHITAQTAVLMETLGALGAQCRWAACNIYSTLNEVAAALAESGFPVFAWKGESEDDFWWCIDRCVNVEGWQPNMILDDGGDLTHWIYKKYPNMFKKIKGIVEESVTGVHRLYQLSKAGKLCVPAMNVNDSVTKQKFDNLYCCRESILDGLKRTTDMMFGGKQVVVCGYGEVGKGCCAALKAMGSIVYVTEIDPICALQACMDGFRLVKLNEVIRQVDIVITCTGNKNVVTREHLDRMKNSCIVCNMGHSNTEIDVASLRTPELTWERVRSQVDHVIWPDGKRIVLLAEGRLLNLSCSTVPTFVLSITATTQALALIELYNAPEGRYKQDVYLLPKKMDEYVASLHLPTFDAHLTELTDEQAKYLGLNKNGPFKPNYYRY

SEQ ID NO: 642 - protein, 518 aa, Homo Sapiens
  misc_feature (1)..(1): Xaa can be any naturally occurring amino acid
XRKWSRQFLLSFWCTVCSAHQGTIFLSLKIQFADQKQEFNKRPTKIGRRSLSRSISQSSTDSYSSAASYTDSSDDETSPRDKQQKNSKGSSDFCVKNIKQAEFGRREIEIAEQEMPALMALRKRAQGEKPLAGAKIVGCTHITAQTAVLMETLGALGAQCRWAACNIYSTLNEVAAALAESGFPVFAWKGESEDDFWWCIDRCVNVEGWQPNMILDDGGDLTHWIYKKYPNMFKKIKGIVEESVTGVHRLYQLSKAGKLCVPAMNVNDSVTKQKFDNLYCCRESILDGLKRTTDMMFGGKQVVVCGYGEVGKGCCAALKAMGSIVYVTEIDPICALQACMDGFRLVKLNEVIRQVDIVITCTGNKNVVTREHLDRMKNSCIVCNMGHSNTEIDVASLRTPELTWERVRSQVDHVIWPDGKRIVLLAEGRLLNLSCSTVPTFVLSITATTQALALIELYNAPEGRYKQDVYLLPKKMDEYVASLHLPTFDAHLTELTDEQAKYLGLNKNGPFKPNYYRY

SEQ ID NO: 643 - protein, 368 aa, Homo Sapiens
MKSLVLLLCLAQLWGCHSAPHGPGLIYRQPNCDDPETEEAALVAIDYINQNLPWGYKHTLNQIDEVKVWPQQPSGELFEIEIDTLETTCHVLDPTPVARCSVRQLKEHAVEGDCDFQLLKLDGKFSVVYAKCDSSPADSAEDVRKVCQDCPLLAPLNDTRVVHAAKAALAAFNAQNNGSNFQLEEISRAQLVPLPPSTYVEFTVSGTDCVAKEATEAAKCNLLAEKQYGFCKATLSEKLGGAEVAVTCMVFQTQPVSSQPQPEGANEAVPTPVVDPDAPPSPPLGAPGLPPAGSPPDSHVLLAAPPGHQLHRAHYDLRHTFMGVVSLGSPSGEVSHPRKTRTVVQPSVGAAAGPVVPPCPGRIRHFKV

SEQ ID NO: 644 - protein, 367 aa, Homo Sapiens
MKSLVLLLCLAQLWGCHSAPHGPGLIYRQPNCDDPETEEAALVAIDYINQNLPWGYKHTLNQIDEVKVWPQQPSGELFEIEIDTLETTCHVLDPTPVARCSVRQLKEHAVEGDCDFQLLKLDGKFSVVYAKCDSSPDSAEDVRKVCQDCPLLAPLNDTRVVHAAKAALAAFNAQNNGSNFQLEEISRAQLVPLPPSTYVEFTVSGTDCVAKEATEAAKCNLLAEKQYGFCKATLSEKLGGAEVAVTCMVFQTQPVSSQPQPEGANEAVPTPVVDPDAPPSPPLGAPGLPPAGSPPDSHVLLAAPPGHQLHRAHYDLRHTFMGVVSLGSPSGEVSHPRKTRTVVQPSVGAAAGPVVPPCPGRIRHFKV

SEQ ID NO: 645 - protein, 47 aa, Homo Sapiens
MALVPCQVLRMAILLSYCSILCNYKAIEMPSHQTYGGSWKFLTFIDL

SEQ ID NO: 646 - protein, 124 aa, Homo Sapiens
MALVPCQVLRMAILLSYCSILCNYKAIEMPSHQTYGGSWKFLTFIDLFVVAVFWIIYAYDREMIYPKLLDNFIPGWLNHGMHTTVLPFILIEMRTSHHQYPSRSSGLTAICTFSVGYILWVCWV

SEQ ID NO: 647 - protein, 137 aa, Homo Sapiens
MALVPCQVLRMAILLSYCSILCNYKAIEMPSHQTYGGSWKFLTFIDLVIQAVFFGICVLTDLSSLLTRGSGNQEQERQLKKLISLRDWMLAVLAFPVGVFVVAVFWIIYAYDREMIYPKLLDNFIPGWLNHGMHFKA

SEQ ID NO: 648 - protein, 245 aa, Homo Sapiens
MALVPCQVLRMAILLSYCSILCNYKAIEMPSHQTYGGSWKFLTFIDLVIQAVFFGICVLTDLSSLLTRGSGNQEQERQLKKLISLRDWMLAVLAFPVGVFVVAVFWIIYAYDREMIYPKLLDNFIPGWLNHGMHTTVLPFILIEMRTSHHQYPSRSSGLTAICTFSVGYILWVCWVHHVTGMWVYPFLEHIGPGARIIFFGSTTILMNFLYLLGEVLNNYIWDTQKKPPSWQDMKIKFMYLGPSS

SEQ ID NO: 649 - protein, 238 aa, Homo Sapiens
MALVPCQVLRMAILLSYCSILCNYKAIEMPSHQTYGGSWKFLTFIDLVIQAVFFGICVLTDLSSLLTRGSGNQEQERQLKKLISLRDWMLAVLAFPVGVFVVAVFWIIYAYDREMIYPKLLDNFIPGWLNHGMHTTVLPFILIEMRTSHHQYPSRSSGLTAICTFSVGYILWVCWVHHVTGMWVYPFLEHIGPGARIIFFGSTTILMNFLYLLGEVLNNYIWDTQKSMEEEKEKPKLE

SEQ ID NO: 650 - protein, 231 aa, Homo Sapiens
MALVPCQVLRMAILLSYCSILCNYKAIEMPSHQTYGGSWKFLTFIDLVIQAVFFGICVLTDLSSLLTRGSGNQEQERQLKKLISLRDWMLAVLAFPVGVFVVAVFWIIYAYDREMIYPKLLDNFIPGWLNHGMHTTVLPFILIEMRTSHHQYPSRSSGLTAICTFSVGYILWVCWVHHVTGMWVYPFLEHIGPGARIIFFGSTTILMNFLYLLGEVLNNYIWDTQKTAKLK

SEQ ID NO: 651 - protein, 134 aa, Homo Sapiens
MALVPCQVLRMAILLSYCSILCNYKAIEMPSHQTYGGSWKFLTFIDLVIQAVFFGICVLTDLSSLLTRGSGNQEQERQLKKLISLRDWMLAVLAFPVGVFVVAVFWIIYAYDREMIYPKLLDNFIPGWLNHGML

SEQ ID NO: 652 - protein, 138 aa, Homo Sapiens
MLAVLAFPVGVFVVAVFWIIYAYDREMIYPKLLDNFIPGWLNHGMHTTVLPFILIEMRTSHHQYPSRSSGLTAICTFSVGYILWVCWVHHVTGMWVYPFLEHIGPGARIIFFGSTTILMNFLYLLGEVLNNYIWDTQK

SEQ ID NO: 653 - protein, 192 aa, Homo Sapiens
MTKVLRMAILLSYCSILCNYKAIEMPSHQTYGGSWKFLTFIDLVIQAVFFGICVLTDLSSLLTRGSGNQEQERQLKKLISLRDWMLAVLAFPVGVFVVAVFWIIYAYDREMIYPKLLDNFIPGWLNHGMHTTVLPFILIEMRTSHHQYPSRSSGLTAICTFSVGYILWVCWVHHVTGMWVYPFLEHIGPGAR

SEQ ID NO: 654 - protein, 171 aa, Homo Sapiens
MAKQYIEKSLLVPDHVITRLMMSELENRRGQHWLLDGFPRTLGQAEALDKICEVDLVISLNIPFETLKDRLSRRWIHPPSGRVYNLDFNPPHVHGIDDVTGEPLVQQEDDKPEAVAARLRQYKDVAKPVIELYKSRGVLHQFSGTETNKIWPYVYTLFSNKITPIQSKEAY

SEQ ID NO: 655 - protein, 223 aa, Homo Sapiens
MASKLLRAVILGPPGSGKGTVCQRIAQNFGLQHLSSGHFLRENIKASTEVGEMAKQYIEKSLLVPDHVITRLMMSELENRRGQHWLLDGFPRTLGQAEALDKICEVDLVISLNIPFETLKDRLSRRWIHPPSGRVYNLDFNPPHVHGIDDVTGEPLVQQEDDKPEAVAARLRQYKDVAKPVIELYKSRGVLHQFSGTETNKIWPYVYTLFSNKITPIQSKEAY

SEQ ID NO: 656 - protein, 223 aa, Homo Sapiens; identical to SEQ ID NO: 655

SEQ ID NO: 657 - protein, 223 aa, Homo Sapiens; identical to SEQ ID NO: 655

SEQ ID NO: 658 - protein, 78 aa, Homo Sapiens
LALLALLMSLTQGVLTALRLRKMTFGRVSDLGQFIRESEPEPDVRKSKGSMFSQAMKKWVQGNTDEAQEELAWKIAKM

SEQ ID NO: 659 - protein, 138 aa, Homo Sapiens
MRGAGPSPRQSPRTLRPDPGPAMSFFRRKVKGKEQEKTSDVKSIKALKIMPCWRLQDQVMLQSMPFLPTWTPFQVAGQPHLRSSQATWRPLILVTWADLVWTTRLKRPNQAFLRPLNKSCTTLLSSLTSFNSWNFGEW

SEQ ID NO: 660 - protein, 150 aa, Homo Sapiens
MRGAGPSPRQSPRTLRPDPGPAMSFFRRKVKGKEQEKTSDVKSIKASISVHSPQKSTKNHALLEAAGPSHVAINAISANMDSFSSSRTATLKKQPSHMEAAHFGDLDLVWTTRLKRPNQAFLRPLNKSCTTLLSSLTSFNSWNFGEWSIW

SEQ ID NO: 661 - protein, 662 aa, Homo Sapiens
MRGAGPSPRQSPRTLRPDPGPAMSFFRRKVKGKEQEKTSDVKSIKASISVHSPQKSTKNHALLEAAGPSHVAINAISANMDSFSSSRTATLKKQPSHMEAAHFGDLGRSCLDYQTQETKSSLSKTLEQVLHDTIVLPYFIQFMELRRMEHLVKFWLEAESFHSTTWSRIRAHSLNTVKQSSLAEPVSPSKKHETTASFLTDSLDKRLEDSGSAQLFMTHSEGIDLNNRTNSTQNHLLLSQECDSAHSLRLEMARAGTHQVSMETQESSSTLTVASRNSPASPLKELSGKLMKSIEQDAVNTFTKYISPDAAKPIPITEAMRNDIIARICGEDGQVDPNCFVLAQSIVFSAMEQEHFSEFLRSHHFCKYQIEVLTSGTVYLADILFCESALFYFSEYMEKEDAVNILQFWLAADNFQSQLAAKKGQYDGQEAQNDAMILYDKYFSLQATHPLGFDDVVRLEIESNICREGGPLPNCFTTPLRQAWTTMEKVFLPGFLSSNLYYKYLNDLIHSVRGDEFLGGNVSLTAPGSVGPPDESHPGSSDSSASQSSVKKASIKILKNFDEAIIVDAASLDPESLYQRTYAGKMTFGRVSDLGQFIRESEPEPDVRKSKGSMFSQAMKKWVQGNTDEAQEELAWKIAKMIVSDIMQQAQYDQPLEKSTKL

SEQ ID NO: 662 - protein, 604 aa, Homo Sapiens
MRGAGPSPRQSPRTLRPDPGPAMSFFRRKVKGKEQEKTSDVKSIKASISVHSPQKSTKNHALLEAAGPSHVAINAISANMDSFSSSRTATLKKQPSHMEAAHFGDLGRSCLDYQTQETKSSLSKTLEQVLHDTIVLPYFIQFMELRRMEHLVKFWLEAESFHSTTWSRIRAHSLNTVKQSSLAEPVSPSKKHETTASFLTDSLDKRLEDSGSAQLFMTHSEGIDLNNRTNSTQNHLLLSQECDSAHSLRLEMARAGTHQVSMETQESSSTLTVASRNSPASPLKELSGKLMKSIEQDAVNTFTKYISPDAAKPIPITEAMRNDIIARICGEDGQVDPNCFVLAQSIVFSAMEQEHFSEFLRSHHFCKYQIEVLTSGTVYLADILFCESALFYFSEYMEKEDAVNILQFWLAADNFQSQLAAKKGQYDGQEAQNDAMILYDKYFSLQATHPLGFDDVVRLEIESNICREGGPLPNCFTTPLRQAWTTMEKSSVKKASIKILKNFDEAIIVDAASLDPESLYQRTYAGKMTFGRVSDLGQFIRESEPEPDVRKSKGSMFSQAMKKWVQGNTDEAQEELAWKIAKMIVSDIMQQAQYDQPLEKSTKL

SEQ ID NO: 663 - protein, 66 aa, Homo Sapiens
MRGAGPSPRQSPRTLRPDPGPAMSFFRRKVKGKEQEKTSDVKSIKGCRTKSCCNQCHFCQHGLLFK

SEQ ID NO: 664 - protein, 63 aa, Homo Sapiens
MRGAGPSPRQSPRTLRPDPGPAMSFFRRKVKGKEQEKTSDVKSIKVETEFHHVSQYGLDLLTL

SEQ ID NO: 665 - protein, 59 aa, Homo Sapiens
  misc_feature (1)..(1): Xaa can be any naturally occurring amino acid
XKYISPDAAKPIPITEAMRNDIIARICGEDGQVDPNCFVLAQSIVFSAMEQDTWKKRMQ

SEQ ID NO: 666 - protein, 31 aa, Homo Sapiens
  misc_feature (1)..(1): Xaa can be any naturally occurring amino acid
XLTAPGSVGPPDESHPGSSDSSASQCEKSQY

SEQ ID NO: 667 - protein, 323 aa, Homo Sapiens
MDSKYQCVKLNDGHFMPVLGFGTYAPAEVPKSKALEATKLAIEAGFRHIDSAHLYNNEEQVGLAIRSKIADGSVKREDIFYTSKLWCNSHRPELVRPALERSLKNLQLDYVDLYLIHFPVSVKPGEEVIPKDENGKILFDTVDLCATWEAVEKCKDAGLAKSIGVSNFNRRQLEMILNKPGLKYKPVCNQVECHPYFNQRKLLDFCKSKDIVLVAYSALGSHREEPWVDPNSPVLLEDPVLCALAKKHKRTPALIALRYQLQRGVVVLAKSYNEQRIRQNVQVFEFQLTSEEMKAIDGLNRNVRYLTLDIFAGPPNYPFSDEY

SEQ ID NO: 668 - protein, 205 aa, Homo Sapiens
MGVVSLFLCIVEQIFTSSKKIQFRGIFMAKVPKSKALEATKLAIEAGFRHIDSAHLYNNEEQVGLAIRSKIADGSVKREDIFYTSKLWCNSHRPELVRPALERSLKNLQLDYVDLYLIHFPVSVKPGEEVIPKDENGKILFDTVDLCATWEAVEKCKDAGLAKSIGVSNFNRRQLEMILNKPGLKYKPVCNQPRDNSIFSLSPDW

SEQ ID NO: 669 - protein, 248 aa, Homo Sapiens
  misc_feature (1)..(1): Xaa can be any naturally occurring amino acid
XSKYQCVKLNDGHFMPVLGFGTYAPAEVGLAIRSKIADGSVKREDIFYTSKLWCNSHRPELVRPALERSLKNLQLDYVDLYLIHFPVSVKPGEEVIPKDENGKILFDTVDLCATWEAVEKCKDAGLAKSIGVSNFNRRQLEMILNKPGLKYKPVCNQVECHPYFNQRKLLDFCKSKDIVLVAYSALGSHREEPWVDPNSPVLLEDPVLCALAKKHKRTPALIALRYQLQRGVVVLAKSYNEQRIRQNV

SEQ ID NO: 670 - protein, 172 aa, Homo Sapiens
MPVPASWPHLPSPFLLMTLLLGRLTGVAGEDELQVIQPEKSVSVAAGESATLRCAMTSLIPVGPIMWFRGAGAGRELIYNQKEGHFPRVTTVSELTKRNNLDFSISISNITPADAGTYYCVKFRKGSPDDVEFKSGAGTELSVRAFFQESHMCSMCNKRRCHRLYQLGSQSS

SEQ ID NO: 671 - protein, 177 aa, Homo Sapiens
MPVPASWPHPPCPFLLLTLLLGLTGVAGEDELQVIQPEKSVSVAAGESATLRCAMTSLIPVGPIMWFRGAGAGRELIYNQKEGHFPRVTTVSELTKRNNLDFSISISNITPADAGTYYCVKFRKGSPDDVEFKSGAGTELSVRGVTHVFHVQQTEMSQTVSTGESIILSCSVPNTLP

SEQ ID NO: 672 - protein, 140 aa, Homo Sapiens
  misc_feature (1)..(1): Xaa can be any naturally occurring amino acid
XLIYNQKEGHFPRVTTVSDLTKRNNMDFSIRISNITPADAGTYYCVKFRKGSPDHVEFKSGAGTELSVREARTVFSARSTESRASPGQAFRQSKLQVSPQCPSLPPHSTHLCLPYCCICCLNWQSLTVLEARSLKSASLD

SEQ ID NO: 673 - protein, 45 aa, Homo Sapiens
  misc_feature (1)..(1): Xaa can be any naturally occurring amino acid
XVHKAVVEVDESGTRAAAATGTIFTFRYSLNGHCVPGTVPSAEEK

SEQ ID NO: 674 - protein, 85 aa, Homo Sapiens
KKEHVFIHERPRKINGICISPKKVACQNLSAIFCFQSETKFKMTVCQLIEGTRYPACRYHYSPTEGFVLVTCDDLRPDSFLGYVK

SEQ ID NO: 675 - protein, 96 aa, Homo Sapiens
MIIMVIIFLVLLFWENEVNDEAVMSTLEHLHVDYPQNDVPVPARRDYTTSEMETFPLLLLSLGLVLAEASESTMKIIKEEFTDEEMQYDMAKSGQE

SEQ ID NO: 676 - protein, 31 aa, Homo Sapiens
MVMGLGVLLLVFVLGLGLTPPTLAQDNSRHL

SEQ ID NO: 677 - protein, 190 aa, Homo Sapiens
MCLCVCLYVCICVYVCVCHFVCFWVCLPLRVSVYLYLRVCVCVCVFVCLCMCVRGCVSVCVCVCIEREGERKGATDGSAWKVYPHSQPWEESVNPPTGQDQLWWCLADSGNVTFHLRMGLHFLGKECRSWSLKECFFFPFVIERAQPCVHWLTVTNLRVGDSHREETEGTADSEQESGGTSLPLGPNPQL

SEQ ID NO: 678 - protein, 23 aa, Homo Sapiens
MSRLVRGSSLLTYLVVALVLQSR

SEQ ID NO: 679 - protein, 1266 aa, Homo Sapiens
MGPLMVLFCLLFLYPGLADSAPSCPQNVNISGGTFTLSHGWAPGSLLTYSCPQGLYPSPASRLCKSSGQWQTPGATRSLSKAVCKPGHCPNPGISLGAVRTGFRFGHGDKVRYRCSSNLVLTGSSERECQGNGVWSGTEPICRQPYSYDFPEDVAPALGTSFSHMLGATNPTQKTKDHENGTGTNTYAALNSVYLMMNNQMRLLGMETMAWQEIRHAIILLTDGKSNMGGSPKTAVDHIREILNINQKRNDYLDIYAIGVGKLDVDWRELNELGSKKDGERHAFILQDTKALHQVFEHMLDVSKLTDTICGVGNMSANASDQERTPWHVTIKPKSQETCRGALISDQWVLTAAHCFRDGNDHSLWRVNVGDPKSQWGKEFLIEKAVISPGFDVFAKKNQGILEFYGDDIALLKLAQKVKMSTHARPICLPCTMEANLALRRPQGSTCRDHENELLNKQSVPAHFVALNGSKLNINLKMGVEWTSCAEVVSQEKTMFPNLTDVREVVTDQFLCSGTQEDESPCKGVTTTPWSLARPQGSCSLEGVEIKGGSFRLLQEGQALEYVCPSGFYPYPVQTRTCRSTGSWSTLKTQDQKTVRKAECRAIHCPRPHDFENGEYWPRSPYYNVSDEISFHCYDGYTLRGSANRTCQVNGRWSGQTAICDNGAGYCSNPGIPIGTRKVGSQYRLEDSVTYHCSRGLTLRGSQRRTCQEGGSWSGTEPSCQDSFMYDTPQEVAEAFLSSLTETIEGVDAEDGHGPGEQQKRKIVLDPSGSMNIYLVLDGSDSIGASNFTGAKKCLVNLIEKVASYGVKPRYGLVTYATYPKIWVKVSEADSSNADWVTKQLNEINYEDHKLKSGTNTKKALQAVYSMMSWPDDVPPEGWNRTRHVIILMTDGLHNMGGDPITVIDEIRDLLYIGKDRKNPREDYLDVYVFGVGPLVNQVNINALASKKDNEQHVFKVKDMENLEDVFYQMIDESQSLSLCGMVWEHRKGTDYHKQPWQAKISVIRPSKGHESCMGAVVSEYFVLTAAHCFTVDDKEHSIKVSVGGEKRDLEIEVVLFHPNYNINGKKEAGIPEFYDYDVALIKLKNKLKYGQTIRPICLPCTEGTTRALRLPPTTTCQQQKEELLPAQDIKALFVSEEEKKLTRKEVYIKNGDKKGSCERDAQYAPGYDKVKDISEVVTPRFLCTGGVSPYADPNTCRGDSGGPLIVHKRSRFIQVGVISWGVVDVCKNQKRQKQVPAHARDFHINLFQVLPWLKEKLQDEDLGFL

SEQ ID NO: 680 - protein, 1115 aa, Homo Sapiens
MGPLMVLFCLLFLYPGLADSAPSCPQNVNISGGTFTLSHGWAPGSLLTYSCPQGLYPSPASRLCKSSGQWQTPGATRSLSKAVCKPVRCPAPVSFENGIYTPRLGSYPVGGNVSFECEDGFILRGSPVRQCRPNGMWDGETAVCDNGDHENGTGTNTYAALNSVYLMMNNQMRLLGMETMAWQEIRHAIILLTDGKSNMGGSPKTAVDHIREILNINQKRNDYLDVSKLTDTICGVGNMSANASDQERTPWHVTIKPKSQETCRGALISDQWVLTAAHCFRDGNDHSLWRVNVGDPKSQWGKEFLIEKAVISPGFDVFAKKNQGILEFYGDDIALLKLAQKVKMSTHARPICLPCTMEANLALRRPQGSTCRDHENELLNKQSVPAHFVALNGSKLNINLKMGVEWTSCAEVVSQEKTMFPNLTDVREVVTDQFLCSGTQEDESPCKGGSAIHCPRPHDFENGEYWPRSPYYNVSDEISFHCYDGYTLRGSANRTCQVNGRWSGQTAICDNGAGYCSNPGIPIGTRKVGSQYRLEDSVTYHCSRGLTLRGSQRRTCQEGGSWSGTEPSCQDSFMYDTPQEVAEAFLSSLTETIEGVDAEDGHGPGEQQKRKIVLDPSGSMNIYLVLDGSDSIGASNFTGAKKCLVNLIEKVASYGVKPRYGLVTYATYPKIWVKVSEADSSNADWVTKQLNEINYEDHKLKSGTNTKKALQAVYSMMSWPDDVPPEGWNRTRHVIILMTDGLHNMGGDPITVIDEIRDLLYIGKDRKNPREDYLDVYVFGVGPLVNQVNINALASKKDNEQHVFKVKDMENLEDVFYQMIDESQSLSLCGMVWEHRKGTDYHKQPWQAKISVIRPSKGHESCMGAVVSEYFVLTAAHCFTVDDKEHSIKVSVGGEKRDLEIEVVLFHPNYNINGKKEAGIPEFYDYDVALIKLKNKLKYGQTIRPICLPCTEGTTRALRLPPTTTCQQQKEELLPAQDIKALFVSEEEKKLTRKEVYIKNGDKKGSCERDAQYAPGYDKVKDISEVVTPRFLCTGGVSPYADPNTCRGDSGGPLIVHKRSRFIQVGVISWGVVDVCKNQKRQKQVPAHARDFHINLFQVLPWLKEKLQDEDLGFL

SEQ ID NO: 681 - protein, 175 aa, Homo Sapiens
MGHEQNQGAALLQMLPLLWLLPHSWAVPEEQSMITFLPLLLGLSLGCTGAGGFVAHVESTCLLDDAGTPKDFTYCISFNKDLLTCWDPEENKMAPCEFGVLNSLANVLSQHLNQKDTLMQRLRNGLQNCATHTQPFWGSLTNRTRPPSVQVAKTTPFNTREPVMLACYVWGFYPA

SEQ ID NO: 682 - protein, 63 aa, Homo Sapiens
MGTSSIFLCVLFLCGALGLTMSPARGRLRCYICGFTKPCHPVPTECRDDEACGISIGTSDAHC

SEQ ID NO: 683 - protein, 33 aa, Homo Sapiens
  misc_feature (1)..(1): Xaa can be any naturally occurring amino acid
XLGLTYLSLLLIPAAGASSCPRTPLPAMAPLPQ

SEQ ID NO: 684 - protein, 198 aa, Homo Sapiens
MLSELQDGKSKIVQKAAPEVQEDVKAFKTDLPSSLVSVSLRKPFSGPQEQEQISGKVTHLIQNNMPGNYVFSYDQFFRDKIMEKKQDHTYRVFKTVNRWADAYPFAQHFSEASVASKDVSVWCSNDYLGMSRHPQVLQATQETLQRHGAGAGGTRNISGTSKFHVELEQELAELHQKDSALLFSSCFVANDSTLFTLA

SEQ ID NO: 685 - protein, 171 aa, Homo Sapiens
MLSELQDGKSKIVQKAAPEVQEDVKAFKTGNYVFSYDQFFRDKIMEKKQDHTYRVFKTVNRWADAYPFAQHFSEASVASKDVSVWCSNDYLGMSRHPQVLQATQETLQRHGAGAGGTRNISGTSKFHVELEQELAELHQKDSALLFSSCFVANDSTLFTLAKILPGCEIYS

SEQ ID NO: 686 - protein, 165 aa, Homo Sapiens
MRGGEVALGWNKKKRLFCEDFRFKMVTAAMLLQCCPVLARGPTSLLGKVVKTHQFLFGIGRCPILATQGPNCSQIHLKATKAGGDSPSWAKGHCPFMLSELQDGKSKIVQKAAPEVQEDVKAFKTDLPSSLVSVSLRKPFSGPQEQEQISGKVTHLIQNNMPGNY

SEQ ID NO: 687 - protein, 574 aa, Homo Sapiens
MRGGEVALGWNKKKRLFCEDFRFKMVTAAMLLQCCPVLARGPTSLLGKVVKTHQFLFGIGRCPILATQGPNCSQIHLKATKAGGDSPSWAKGHCPFMLSELQDGKSKIVQKAAPEVQEDVKAFKTGNYVFSYDQFFRDKIMEKKQDHTYRVFKTVNRWADAYPFAQHFSEASVASKDVSVWCSNDYLGMSRHPQVLQATQETLQRHGAGAGGTRNISGTSKFHVELEQELAELHQKDSALLFSSCFVANDSTLFTLAKILPGCEIYSDAGNHASMIQGIRNSGAAKFVFRHNDPDHLKKLLEKSNPKIPKIVAFETVHSMDGAICPLEELCDVSHQYGALTFVDEVHAVGLYGSRGAGIGERDGIMHKIDIISGTLGKAFGCVGGYIASTRDLVDMVRSYAAGFIFTTSLPPMVLSGALESVRLLKGEEGQALRRAHQRNVKHMRQLLMDRGLPVIPCPSHIIPIRVGNAALNSKLCDLLLSKHGIYVQAINYPTVPRGEELLRLAPSPHHSPQMMEDFVEKLLLAWTAVGLPLQDVSVAACNFCRRPVHFELMSEWERSYFGNMGPQYVTTYA

SEQ ID NO: 688 - protein, 587 aa, Homo Sapiens
MVTAAMLLQCCPVLARGPTSLLGKVVKTHQFLFGIGRCPILATQGPNCSQIHLKATKAGGDSPSWAKGHCPFMLSELQDGKSKIVQKAAPEVQEDVKAFKTDLPSSLVSVSLRKPFSGPQEQEQISGKVTHLIQNNMPGNYVFSYDQFFRDKIMEKKQDHTYRVFKTVNRWADAYPFAQHFSEASVASKDVSVWCSNDYLGMSRHPQVLQATQETLQRHGAGAGGTRNISGTSKFHVELEQELAELHQKDSALLFSSCFVANDSTLFTLAKILPGCEIYSDAGNHASMIQGIRNSGAAKFVFRHNDPDHLKKLLEKSNPKIPKIVAFETVHSMDGAICPLEELCDVSHQYGALTFVDEVHAVGLYGSRGAGIGERDGIMHKIDIISGTLGKAFGCVGGYIASTRDLVDMVRSYAAGFIFTTSLPPMVLSGALESVRLLKGEEGQALRRAHQRNVKHMRQLLMDRGLPVIPCPSHIIPIRVGNAALNSKLCDLLLSKHGIYVQAINYPTVPRGEELLRLAPSPHHSPQMMEDFVEKLLLAWTAVGLPLQDVSVAACNFCRRPVHFELMSEWERSYFGNMGPQYVTTYA

SEQ ID NO: 689 - protein, 550 aa, Homo Sapiens
MVTAAMLLQCCPVLARGPTSLLGKVVKTHQFLFGIGRCPILATQGPNCSQIHLKATKAGGDSPSWAKGHCPFMLSELQDGKSKIVQKAAPEVQEDVKAFKTGNYVFSYDQFFRDKIMEKKQDHTYRVFKTVNRWADAYPFAQHFSEASVASKDVSVWCSNDYLGMSRHPQVLQATQETLQRHGAGAGGTRNISGTSKFHVELEQELAELHQKDSALLFSSCFVANDSTLFTLAKILPGCEIYSDAGNHASMIQGIRNSGAAKFVFRHNDPDHLKKLLEKSNPKIPKIVAFETVHSMDGAICPLEELCDVSHQYGALTFVDEVHAVGLYGSRGAGIGERDGIMHKIDIISGTLGKAFGCVGGYIASTRDLVDMVRSYAAGFIFTTSLPPMVLSGALESVRLLKGEEGQALRRAHQRNVKHMRQLLMDRGLPVIPCPSHIIPIRVGNAALNSKLCDLLLSKHGIYVQAINYPTVPRGEELLRLAPSPHHSPQMMEDFVEKLLLAWTAVGLPLQDVSVAACNFCRRPVHFELMSEWERSYFGNMGPQYVTTYA

SEQ ID NO: 690 - protein, 141 aa, Homo Sapiens
MVTAAMLLQCCPVLARGPTSLLGKVVKTHQFLFGIGRCPILATQGPNCSQIHLKATKAGGDSPSWAKGHCPFMLSELQDGKSKIVQKAAPEVQEDVKAFKTGRPCSVMVLELVAPATSQAPILPGCEIYSDAGNHASMIQG

SEQ ID NO: 691 - protein, 276 aa, Homo Sapiens
  misc_feature (1)..(1): Xaa can be any naturally occurring amino acid
XELEQELAELHQKDSALLFSSCFVANDSTLFTLAKILPGCEIYSDAGNHASMIQGIRNSGAAKFVFRHNDPDHLKKLLEKSNPKIPKIVAFETVHSMDGAICPLEELCDVSHQYGALTFVDEVHAVGLYGSRGAGIGERDGIMHKIDIISGTLGKAFGCVGGYIASTRDLVDMVRSYAAGFIFTTSLPPMVLSGALESVRLLKGEEGQALRRAHQRNVKHMRQLLMDRGLPVIPCPSHIIPIRRSCCWLGLRWGCPSRMCLWLPAISVAVLYTLSS

SEQ ID NO: 692 - protein, 197 aa, Homo Sapiens
GFEWGGQRRASHNSTFSAYSRGVFRRDAHKSEVAHRFKDLGEENFKALVLIAFAQYLQQCPFEDHVKLVNEVTEFAKTCVADESAENCDKSLHTLFGDKLCTVATLRETYGEMADCCAKQEPERNECFLQHKDDNPNLPRLVRPEVDVMCTAFHDNEETFLKKYLYEIARRHPYFYAPELLFFAKRYKAAFTECCQA

SEQ ID NO: 693 - protein, 417 aa, Homo Sapiens
MKWVTFISLLFLFSSAYSRGVFRRDAHKSEVAHRFKDLGEENFKALAVARLSQRFPKAEFAEVSKLVTDLTKVHTECCHGDLLECADDRADLAKYICENQDSISSKLKECCEKPLLEKSHCIAEVENDEMPADLPSLAADFVESKDVCKNYAEAKDVFLGMFLYEYARRHPDYSVVLLLRLAKTYETTLEKCCAAADPHECYAKVFDEFKPLVEEPQNLIKQNCELFEQLGEYKFQNALLVRYTKKVPQVSTPTLVEVSRNLGKVGSKCCKHPEAKRMPCAEDYLSVVLNQLCVLHEKTPVSDRVTKCCTESLVNRRPCFSALEVDETYVPKEFNAETFTFHADICTLSEKERQIKKQTALVELVKHKPKATKEQLKAVMDDFAAFVEKCCKADDKETCFAEEGKKLVAASQAALGL

SEQ ID NO: 694 - protein, 609 aa, Homo Sapiens [sequence omitted]

SEQ ID NO: 695 - protein, 604 aa, Homo Sapiens
MKWVTFISLLFLFSSAYSRGVFRRDAHKSEVAHRFKDLGEENFKALVLIAFAQYLQQCPFEDHVKLVNEVTEFAKTCVADESAENCDKSLHTLFGDKLCTVATLRETYGEMADCCAKQEPERNECFLQHKDDNPNLPRLVRPEVDVMCTAFHDNEETFLKKYLYEIARRHPYFYAPELLFFAKRYKAAFTECCQAADKAACLLPKLDELRDEGKASSAKQRLKCASLQKFGERAFKAWAVARLSQRFPKAEFAEVSKLVTDLTKVHTECCHGDLLECADDRADLAKYICENQDSISSKLKECCEKPLLEKSHCIAEVENDEMPADLPSLAADFVESKDVCKNYAEAKDVFLGMFLYEYARRHPDYSVVLLLRLAKTYETTLEKCCAAADPHECYAKVFDEFKPLVEEPQNLIKQNCELFEQLGEYKFQNALLVRYTKKVPQVSTPTLVEVSRNLGKVGSKCCKHPEAKRMPCAEDYLSVVLNQLCVLHEKTPVSDRVTKCCTESLVNRRPCFSALEVDETYVPKEFNAETFTFHADICTLSEKERQIKKQTALVELVKHKPKATKEQLKAVMDDFAAFVEKCCKADDKETCFAEEPTMRIRERK

SEQ ID NO: 696 - protein, 396 aa, Homo Sapiens
MKWVTFISLLFLFSSAYSRGVFRRDAHKSEVAHRFKDLGEENFKALVLIAFAQYLQQCPFEDHVKLVNEVTEFAKTCVADESAENCDKSLHTLFGDKLCTVATLRETYGEMADCCAKQEPERNECFLQHKDDNPNLPRLVRPEVDVMCTAFHDNEETFLKKYLYETTLEKCCAAADPHECYAKVFDEFKPLVEEPQNLIKQNCELFEQLGEYKFQNALLVRYTKKVPQVSTPTLVEVSRNLGKVGSKCCKHPEAKRMPCAEDYLSVVLNQLCVLHEKTPVSDRVTKCCTESLVNRRPCFSALEVDETYVPKEFNAETFTFHADICTLSEKERQIKKQTALVELVKHKPKATKEQLKAVMDDFAAFVEKCCKADDKETCFAEEGKKLVAASQAALGL

SEQ ID NO: 697 - protein, 396 aa, Homo Sapiens
MKWVTFISLLFLFSSAYSRGVFRRDAHKSEVAHRFKDLGEENFKALVLIAFAQYLQQCPFEDHVKLVNEVTEFAKTCVADESAENCDKSLHTLFGDKLCTVATLRETYGEMADCCAKQEPERNECFLQHKDDNPNLPRLVRPEVDVMCTAFHDNEETFLKKYTYETTLEKCCAAADPHECYAKVFDEFKPLVEEPQNLIKQNCELFEQLGEYKFQNALLVRYTKKVPQVSTPTLVEVSRNLGKVGSKCCKHPEAKRMPCAEDYLSVVLNQLCVLHEKTPVSDRVTKCCTESLVNRRPCFSALEVDETYVPKEFNAETFTFHADICTLSEKERQIKKQTALVELVKHKPKATKEQLKAVMDDFAAFVEKCCKADDKETCFAEEGKKLVAASQAALGL

SEQ ID NO: 698 - protein, 494 aa, Homo Sapiens
MKWVTFISLLFLFSSAYSRGVFRRDAHKSEVAHRFKDLGEENFKALYLYEIARRHPYFYAPELLFFAKRYKAAFTECCQAADKAACLLPKLDELRDEGKASSAKQRLKCASLQKFGERAFKAWAVARLSQRFPKAEFAEVSKLVTDLTKVHTECCHGDLLECADDRADLAKYICENQDSISSKLKECCEKPLLEKSHCIAEVENDEMPADLPSLAADFVESKDVCKNYAEAKDVFLGMFLYEYARRHPDYSVVLLLRLAKTYETTLEKCCAAADPHECYAKVFDEFKPLVEEPQNLIKQNCELFEQLGEYKFQNALLVRYTKKVPQVSTPTLVEVSRNLGKVGSKCCKHPEAKRMPCAEDYLSVVLNQLCVLHEKTPVSDRVTKCCTESLVNRRPCFSALEVDETYVPKEFNAETFTFHADICTLSEKERQIKKQTALVELVKHKPKATKEQLKAVMDDFAAFVEKCCKADDKETCFAEEGKKLVAASQAALGL

SEQ ID NO: 699 - protein, 105 aa, Homo Sapiens
MKWVTFISLLFLFSSAYSRGVFRRDAHTYMKLPEDILTFMPRNSFSLLKGIKLLLQNVAKLLIKLPACCQSSMNFGMKGRLRLPNRDSSVPVSKNLEKELSKHGQ

SEQ ID NO: 700 - protein, 459 aa, Homo Sapiens
MSQLKIVTNHLYLYEIARRHPYFYAPELLFFAKRYKAAFTECCQAADKAACLLPKLDELRDEGKASSAKQRLKCASLQKFGERAFKAWAVARLSQRFPKAEFAEVSKLVTDLTKVHTECCHGDLLECADDRADLAKYICENQDSISSKLKECCEKPLLEKSHCIAEVENDEMPADLPSLAADFVESKDVCKNYAEAKDVFLGMFLYEYARRHPDYSVVLLLRLAKTYETTLEKCCAAADPHECYAKVFDEFKPLVEEPQNLIKQNCELFEQLGEYKFQNALLVRYTKKVPQVSTPTLVEVSRNLGKVGSKCCKHPEAKRMPCAEDYLSVVLNQLCVLHEKTPVSDRVTKCCTESLVNRRPCFSALEVDETYVPKEFNAETFTFHADICTLSEKERQIKKQTALVELVKHKPKATKEQLKAVMDDFAAFVEKCCKADDKETCFAEEGKKLVAASQAALGL

SEQ ID NO: 701 - protein, 454 aa, Homo Sapiens
  misc_feature (1)..(1): Xaa can be any naturally occurring amino acid
XFSKFRYLYEIARRHPYFYAPELLFFAKRYKAAFTECCQAADKAACLLPKLDELRDEGKASSAKQRLKCASLQKFGERAFKAWAVARLSQRFPKAEFAEVSKLVTDLTKVHTECCHGDLLECADDRADLAKYICENQDSISSKLKECCEKPLLEKSHCIAEVENDEMPADLPSLAADFVESKDVCKNYAEAKDVFLGMFLYEYARRHPDYSVVLLLRLAKTYETTLEKCCAAADPHECYAKVFDEFKPLVEEPQNLIKQNCELFEQLGEYKFQNALLVRYTKKVPQVSTPTLVEVSRNLGKVGSKCCKHPEAKRMPCAEDYLSVVLNQLCVLHEKTPVSDRVTKCCTESLVNRRPCFSALEVDETYVPKEFNAETFTFHADICTLSEKERQIKKQTALVELVKHKPKATKEQLKAVMDDFAAFVEKCCKADDKETCFAEEGKKLVAASQAALGL

SEQ ID NO: 702 - protein, 518 aa, Homo Sapiens
MFLRAGLAALSPLLRSLRPSPVAAMSTGTFVVSQPLNYRGGARVEPADASGTEKAFEPATGRVIATFTCSGEKEVNLAVQNAKAAFKIWSQKSGMERCRILLEAARIIREREDEIATMECINNGKSIFEARLDIDISWQCLEYYAGLAASMAGEHIQLPGGSFGYTRREPLGVCVGIGAWNYPFQIASWKSAPALACGNAMVFKPSPFTPVSALLLAEIYSEAGVPPGLFNVVQGGAATGQFLCQHPDVAKVSFTGSVPTGMKIMEMSAKGIKPVTLELGGKSPLIIFSDCDMNNAVKGALMANFLTQGQVCCNGTRVFVQKEILDKFTEEVVKQTQRIKIGDPLLEDTRMGPLINRPHLERVLGFVKVAKEQGAKVLCGGDIYVPEDPKLKDGYYMRPCVLTNCRDDMTCVKEEIFGPVMSILSFDTEAEVLERANDTTFGLAAGVFTRDIQRAHRVVAELQAGTCFINNYNVSPVELPFGGYKKSGFGRENGRVTIEYYSQLKTVCVEMGDVESAF

SEQ ID NO: 703 - protein, 418 aa, Homo Sapiens
MARRKPEGSSFNMTHLSMAMAFSFPPVASGQLHPQLGNTQHQTELGKELATTSTMPYQYPALTPEQKKELSDIAHRIVAPGKGILAADESTGSIAKRLQSIGTENTEENRRFYRQLLLTADDRVNPCIGGVILFHETLYQKADDGRPFPQVIKSKGGVVGIKVDKGVVPLAGTNGETTTQGLDGLSERCAQYKKDGADFAKWRCVLKIGEHTPSALAIMENANVLARYASICQQNGIVPIVEPEILPDGDHDLKRCQYVTEKVLAAVYKALSDHHIYLEGTLLKPNMVTPGHACTQKFSHEEIAMATVTALRRTVPPAVTGITFLSGGQSEEEASINLNAINKCPLLKPWALTFSYGRALQASALKAWGGKKENLKAAQEEYVKRALANSLACQGKYTPSGQAGAAASESLFVSNHAY

SEQ ID NO: 704 - protein, 278 aa, Homo Sapiens
MARRKPEGSSFNMTHLSMAMAFSFPPVASGQLHPQLGNTQHQTELGKELATTSTMPYQYPALTPEQKKELSDIAHRIVAPGKGILAADESTGSIAKRLQSIGTENTEENRRFYRQLLLTADDRVNPCIGGVILFHETLYQKADDGRPFPQVIKSKGGVVGIKVDKGVVPLAGTNGETTTQGLDGLSERCAQYKKDGADFAKWRCVLKIGEHTPSALAIMENANVLARYASICQQNGIVPIVEPEILPDGDHDLKRCQYVTEKVLAAVYKALSDHHIYL

SEQ ID NO: 705 - protein, 418 aa, Homo Sapiens; identical to SEQ ID NO: 703

SEQ ID NO: 706 - protein, 155 aa, Homo Sapiens
MPYQYPALTPEQKKELSDIAHRIVAPGKGILAADESTGSIAKRLQSIGTENTEENRRFYRQLLLTADDRVNPCIGGVILFHETLYQKADDGRPFPQVIKSKGGVVGIKVDKGVVPLAGTNGETTTQGLDGLSERCAQYKKDGADFAKWRCVLKIG

SEQ ID NO: 707 - protein, 364 aa, Homo Sapiens
MPYQYPALTPEQKKELSDIAHRIVAPGKGILAADESTGSIAKRLQSIGTENTEENRRFYRQLLLTADDRVNPCIGGVILFHETLYQKADDGRPFPQVIKSKGGVVGIKVDKGVVPLAGTNGETTTQGLDGLSERCAQYKKDGADFAKWRCVLKIGEHTPSALAIMENANVLARYASICQQNGIVPIVEPEILPDGDHDLKRCQYVTEKVLAAVYKALSDHHIYLEGTLLKPNMVTPGHACTQKFSHEEIAMATVTALRRTVPPAVTGITFLSGGQSEEEASINLNAINKCPLLKPWALTFSYGRALQASALKAWGGKKENLKAAQEEYVKRALANSLACQGKYTPSGQAGAAASESLFVSNHAY

SEQ ID NO: 708 - protein, 364 aa, Homo Sapiens; identical to SEQ ID NO: 707

SEQ ID NO: 709 - protein, 364 aa, Homo Sapiens; identical to SEQ ID NO: 707

SEQ ID NO: 710 - protein, 364 aa, Homo Sapiens; identical to SEQ ID NO: 707

SEQ ID NO: 711 - protein, 361 aa, Homo Sapiens
MPYQYPALTPEQKKELSDIAHRIVAPGKGILAADESTGSIAKRLQSIGTENTEENRRFYRQLLLTADDRVNPCIGGVILFHETLYQKADDGRPFPQVIKSKGGVVGIKVDKGVVPLAGTNGETTTQGLDGLSERCAQYKKDGADFAKWRCVLKIGEHTPSALAIMENANVLARYASICQQNGIVPIVEPEILPDGDHDLKRCQYVTEKVLAAVYKALSDHHIYLEGTLLKPNMVTPGHACTQKFSHEEIAMATVTALRRTVPPAVTGITFLSGGQSEEEASINLNAINKCPLLKPWALTFSYGRALQASALKAWGGKKENLKAAQEEYVKRALVRIGRRWAGCLGGWDSEKSPSHSTPLPA

SEQ ID NO: 712 - protein, 364 aa, Homo Sapiens; identical to SEQ ID NO: 707

SEQ ID NO: 713 - protein, 368 aa, Homo Sapiens
MPYQYPALTPEQKKELSDIAHRIVAPGKGILAADESTGSIAKRLQSIGTENTEENRRFYRQLLLTADDRVNPCIGGVILFHETLYQKADDGRPFPQVIKSKGGVVGIKVDKGVVPLAGTNGETTTQGLDGLSERCAQYKKDGADFAKWRCVLKIGEHTPSALAIMENANVLARYASICQQVGLQNGIVPIVEPEILPDGDHDLKRCQYVTEKVLAAVYKALSDHHIYLEGTLLKPNMVTPGHACTQKFSHEEIAMATVTALRRTVPPAVTGITFLSGGQSEEEASINLNAINKCPLLKPWALTFSYGRALQASALKAWGGKKENLKAAQEEYVKRALANSLACQGKYTPSGQAGAAASESLFVSNHAY

SEQ ID NO: 714 - protein, 140 aa, Homo Sapiens
MPYQYPALTPEQKKELSDIAHRIVAPGSIAKRLQSIGTENTEENRRFYRQLLLTADDRVNPCIGGVILFHETLYQKADDGRPFPQVIKSKGGVVGIKVDKGVVPLAGTNGETTTQGLDGLSERCAQYKKDGADFAKWRCV

SEQ ID NO: 715 - protein, 162 aa, Homo Sapiens
MPYQYPALTPEQKKELSDIAHRIVAPGSIAKRLQSIGTENTEENRRFYRQLLLTADDRVNPCIGGVILFHETLYQKADDGRPFPQVIKSKGGVVGIKVDKGVVPLAGTNGETTTQGLDGLSERCAQYKKDGADFAKWRCVLKIGEHTPSALAIMENANVLAR

SEQ ID NO: 716 - protein, 204 aa, Homo Sapiens
RRFYRQLLLTADDRVNPCIGGVILFHETLYQKADDGRPFPQVIKSKGGVVGIKVDKGVVPLAGTNGETTTQGLDGLSERCAQYKKDGADFAKWRCVLKIGEHTPSALAIMENANVLARYASICQQVLAAVYKALSDHHIYLEGTLLKPNMVTPGHACTQKFSHEEIAMATVTALRRTVPPAVTGITFLSGGQSEEEASINLNAI

SEQ ID NO: 717 - protein, 130 aa, Homo Sapiens
  misc_feature (1)..(1): Xaa can be any naturally occurring amino acid
XPGHACTQKFSHEEIAMATVTALRRTVPPAVTGITFLSGGQSEEEASINLNAINKCPLLKPWALTFSYGRALQASALKAWGGKKENLKAAQEEYVKRALANSLACQGKYTPSGQAGAAASESLFVSNHAY

SEQ ID NO: 718 - protein, 464 aa, Homo Sapiens
MAASCLVLLALCLLLPLLLLGGWKRWRRGRAARHVVAVVLGDVGRSPRMQYHALSLAMHGFSVTLLGFCNSKPHDELLQNNRIQIVGLTELQSLAVGPRVFQYGVKVVLQAMYLLWKLMWREPGAYIFLQNPPGLPSIAVCWFVGCLCGSKLVIDWHNYGYSIMGLVHGPNHPLVLLAKWYEKFFGRLSHLNLCVTNAMREDLADNWHIRAVTVYDKPASFFKETPLDLQHRLFMKLGSMHSPFRARSEPEDPVTERSAFTERDAGSGLVTRLRERPALLVSSTSWTEDEDFSILLAALEKFEQLTLDGHNLPSLVCVITGKGPLREYYSRLIHQKHFQHIQVCTPWLEAEDYPLLLGSADLGVCLHTSSSGLDLPMKVVDMFGCCLPVCAVNFKCLHELVKHEENGLVFEDSEELAAQLQMLFSNFPDPAGKLNQFRKNLRESQQLRWDESWVQTVLPLVMDT

SEQ ID NO: 719 - protein, 184 aa, Homo Sapiens
MAASCLVLLALCLLLPLLLLGGWKRWRRGRAARHVVAVVLGDVGRSPRMQYHALSLAMHGFSVTLLGFCNSKPHDELLQNNRIQIVGLTELQSLAVGPRVFQYGVKVVLQAMYLLWKLMWREPGAYIFLQVCLALLSAGSWAAFVEASSSLTGTTMATPSWVWCMAPTIPSFCWPSGTRSSLGA

SEQ ID NO: 720 - protein, 84 aa, Homo Sapiens
MAASCLVLLALCLLLPLLLLGGWKRWRRGRAARHVVAVVLGDVGRSPRMQYHALSLAMHGFSVTLLGFCSEWPRVWEGRCSLSR

SEQ ID NO: 721 - protein, 168 aa, Homo Sapiens
MYLLWKLMWREPGAYIFLQNPPGLPSIAVCWFVGCLCGSKLVIDWHNYGYSIMGLVHGPNHPLVLLAKWYEKFFGRLSHLNLCVTNAMREDLADNWHIRAVTVYDKPASFFKETPLDLQHRLFMKLGSMHSPFRARSEPEDPVTERSAFTERDAGSGLVTRLRERPAL

SEQ ID NO: 722 - protein, 353 aa, Homo Sapiens
MYLLWKLMWREPGAYIFLQNPPGLPSIAVCWFVGCLCGSKLVIDWHNYGYSIMGLVHGPNHPLVLLAKWYEKFFGRLSHLNLCVTNAMREDLADNWHIRAVTVYDKPASFFKETPLDLQHRLFMKLGSMHSPFRARSEPEDPVTERSAFTERDAGSGLVTRLRERPALLVSSTSWTEDEDFSILLAALEKFEQLTLDGHNLPSLVCVITGKGPLREYYSRLIHQKHFQHIQVCTPWLEAEDYPLLLGSADLGVCLHTSSSGLDLPMKVVDMFGCCLPVCAVNFKCLHELVKHEENGLVFEDSEELAAQLQMLFSNFPDPAGKLNQFRKNLRESQQLRWDESWVQTVLPLVMDT

SEQ ID NO: 723 - protein, 353 aa, Homo Sapiens; identical to SEQ ID NO: 722

SEQ ID NO: 724 - protein, 324 aa, Homo Sapiens
MAPLLLQLAVLGAALAAAALVLISIVAFTTATKMPALHRHEEEKFFLNAKGQKETLPSIWDSPTKQLSVVVPSYNEEKRLPVMMDEALSYLEKRQKRDPAFTYEVIVVDDGSKDQTSKVAFKYCQKYGSDKVRVITLVKNRGKGGAIRMGIFSSRGEKILMADADGATKFPDVEKLEKGLNDLQPWPNQMAIACGSRAHLEKESIAQRSYFRTLLMYGFHFLVWFLCVKGIRDTQCGFKLFTREAASRTFSSLHVERWAFDVELLYIAQFFKIPIAEIAVNWTEIEGSKLVPFWSWLQMGKDLLFIRLRYLTGAWRLEQTRKMN

SEQ ID NO: 725 - protein, 294 aa, Homo Sapiens
MAPLLLQLAVLGAALAAAALVLISIVAFTTATKMPALHRHEEEKFFLNAKGQKETLPSIWDSPTKQLSVVVPSYNEEKRLPVMMDEALSYLEKRQKYGSDKVRVITLVKNRGKGGAIRMGIFSSRGEKILMADADGATKFPDVEKLEKGLNDLQPWPNQMAIACGSRAHLEKESIAQRSYFRTLLMYGFHFLVWFLCVKGIRDTQCGFKLFTREAASRTFSSLHVERWAFDVELLYIAQFFKIPIAEIAVNWTEIEGSKLVPFWSWLQMGKDLLFIRLRYLTGAWRLEQTRKMN

SEQ ID NO: 726 - protein, 102 aa, Homo Sapiens
MASRGARQRLKGSGASSGDTAPAADKLRELLGSREAGGAEHRTEHTTSSMGKGFRLGNIPQHMPFAPMLTCCFMPGQLHFMQEFYKLIRFLCFTFCDVFWLL

SEQ ID NO: 727 - protein, 168 aa, Homo Sapiens
MASRGARQRLKGSGASSGDTAPAADKLRELLGSREAGGAEHRTELSGNKAGQVWAPEGSTAFKCLLSARLCAALLSNISDCDETFNYWEPTHYLIYGEGFQTWEYSPAYAIRSYAYLLLHAWPAAFHARILQTNKGCVQEVWVARESNDASLLGSQHWHVLLIISIPS

SEQ ID NO: 728 - protein, 618 aa, Homo Sapiens
MASRGARQRLKGSGASSGDTAPAADKLRELLGSREAGGAEHRTELSGNKAGQVWAPEGSTAFKCLLSARLCAALLSNISDCDETFNYWEPTHYLIYGEGFQTWEYSPAYAIRSYAYLLLHAWPAAFHARILQTNKILVFYFLRCLLAFVSCICELYFYKAVCKKFGLHVSRMMLAFLVLSTGMFCSSSAFLPSSFCMYTTLIAMTGWYMDKTSIAVLGVAAGAILGWPFSAALGLPIAFDLLVMKHRWKSFFHWSLMALILFLVPVVVIDSYYYGKLVIAPLNIVLYNVFTPHGPDLYGTEPWYFYLINGFLNFNVAFALALLVLPLTSLMEYLLQRFHVQNLGHPYWLTLAPMYIWFIIFFIQPHKEERFLFPVYPLICLCGAVALSALQHSFLYFQKCYHFVFQRYRLEHYTVTSNWLALGTVFLFGLLSFSRSVALFRGYHGPLDLYPEFYRIATDPTIHTVPEGRPVNVCVGKEWYRFPSSFLLPDNWQLQFIPSEFRGQLPKPFAEGPLATRIVPTDMNDQNLEEPSRYIDISKCHYLVDLDTMRETPREPKYSSNKEEWISLAYRPFLDASRSSKLLRAFYVPFLSDQYTVYVNYTILKPRKAKQIRKKSGG

SEQ ID NO: 729 - protein, 611 aa, Homo Sapiens
MASRGARQRLKGSGASSGDTAPAADKLRELLGSREAGGAEHRTELSGNKAGQVWAPEGSTAFKCLLSARLCAALLSNISDCDETFNYWEPTHYLIYGEGFQTWEYSPAYAIRSYAYLLLHAWPAAFHARILQTNKILVFYFLRCLLAFVSCICELYFYKAVCKKFGLHVSRMMLAFLVLSTGMFCSSSAFLPSSFCMYTTLIAMTGWYMDKTSIAVLGVAAGAILGWPFSAALGLPIAFDLLVMKHRWKSFFHWSLMALILFLVPVVVIDSYYYGKLVIAPLNIVLYNVFTPHGPDLYGTEPWYFYLINGFLNFNVAFALALLVLPLTSLMEYLLQRFHVQNLGHPYWLTLAPMYIWFIIFFIQPHKEERFLFPVYPLICLCGAVALSALQKCYHFVFQRYRLEHYTVTSNWLALGTVFLFGLLSFSRSVALFRGYHGPLDLYPEFYRIATDPTIHTVPEGRPVNVCVGKEWYRFPSSFLLPDNWQLQFIPSEFRGQLPKPFAEGPLATRIVPTDMNDQNLEEPSRYIDISKCHYLVDLDTMRETPREPKYSSNKEEWISLAYRPFLDASRSSKLLRAFYVPFLSDQYTVYVNYTILKPRKAKQIRKKSGG

SEQ ID NO: 730 - protein, 198 aa, Homo Sapiens
MASRGARQRLKGSGASSGDTAPAADKLRELLGSREAGGAEHRTELSGNKAGQVWAPEGSTAFKCLLSARLCAALLSNISDCDETFNYWEPTHYLIYGEGFQTWEYSPAYAIRSYAYLLLHAWPAAFHARILQTNKILVFYFLRCLLAFVSCICELYFYKAVCKKFGLHVSRMMLAFLVLSTGMFCSSSVYPLPLICWS

SEQ ID NO: 731 - protein, 134 aa, Homo Sapiens
MASRGARQRLKGSGASSGDTAPAADKLRELLGSREAGGAEHRTELSGNKAGQVWAPEGSTAFKCLLSARLCAALLSNISDCDETFNYWEPVDTLPHLWGRVSDLGIFPSICHSLLCLPVASCLASCISCKNSTN

SEQ ID NO: 732 - protein, 447 aa, Homo Sapiens
MMLAFLVLSTGMFCSSSAFLPSSFCMYTTLIAMTGWYMDKTSIAVLGVAAGAILGWPFSAALGLPIAFDLLVMKHRWKSFFHWSLMALILFLVPVVVIDSYYYGKLVIAPLNIVLYNVFTPHGPDLYGTEPWYFYLINGFLNFNVAFALALLVLPLTSLMEYLLQRFHVQNLGHPYWLTLAPMYIWFIIFFIQPHKEERFLFPVYPLICLCGAVALSALQHSFLYFQKCYHFVFQRYRLEHYTVTSNWLALGTVFLFGLLSFSRSVALFRGYHGPLDLYPEFYRIATDPTIHTVPEGRPVNVCVGKEWYRFPSSFLLPDNWQLQFIPSEFRGQLPKPFAEGPLATRIVPTDMNDQNLEEPSRYIDISKCHYLVDLDTMRETPREPKYSSNKEEWISLAYRPFLDASRSSKLLRAFYVPFLSDQYTVYVNYTILKPRKAKQIRKKSGG

SEQ ID NO: 733 - protein, 440 aa, Homo Sapiens
MMLAFLVLSTGMFCSSSAFLPSSFCMYTTLIAMTGWYMDKTSIAVLGVAAGAILGWPFSAALGLPIAFDLLVMKHRWKSFFHWSLMALILFLVPVVVIDSYYYGKLVIAPLNIVLYNVFTPHGPDLYGTEPWYFYLINGFLNFNVAFALALLVLPLTSLMEYLLQRFHVQNLGHPYWLTLAPMYIWFIIFFIQPHKEERFLFPVYPLICLCGAVALSALQKCYHFVFQRYRLEHYTVTSNWLALGTVFLFGLLSFSRSVALFRGYHGPLDLYPEFYRIATDPTIHTVPEGRPVNVCVGKEWYRFPSSFLLPDNWQLQFIPSEFRGQLPKPFAEGPLATRIVPTDMNDQNLEEPSRYIDISKCHYLVDLDTMRETPREPKYSSNKEEWISLAYRPFLDASRSSKLLRAFYVPFLSDQYTVYVNYTILKPRKAKQIRKKSGG

SEQ ID NO: 734 - protein, 24 aa, Homo Sapiens
  misc_feature (1)..(1): Xaa can be any naturally occurring amino acid
XEEWISLAYRPFLDASRVSLCCPG

SEQ ID NO: 735 - protein, 35 aa, Homo Sapiens
  misc_feature (1)..(1): Xaa can be any naturally occurring amino acid
XKYSSNKEEWISLAYRPFLDASSFEGWKTKITMPV

SEQ ID NO: 736 - protein, 207 aa, Homo Sapiens
  misc_feature (1)..(1): Xaa can be any naturally occurring amino acid
XTVFLFGLLSFSRSVALFRGYHGPLDLYPEFYRIATDPTIHTVPEGRPVNVCVGKEWYRFPSSFLLPDNWQLQFIPSEFRGQLPKPFAEGPLATRIVPTDMNDQNLEEPSRYIDISKCHYLVDLDTMRETPREPKYSSNKEEWISLAYRPFLDASRSSKLLRAFYVPFLSDQYTVYVNYTILKPRKAKQIRKKSGDRRRAEPTYRKN

SEQ ID NO: 737 - protein, 111 aa, Homo Sapiens
MRPLKPGAPLPALFLLALALSPHGAHGRPRGRRGARVTDKEPKPLLFLPAAGAGRTPSGSRSAEIFPRDSNLKDKFIKHFTGPVTFSPECSKHFHRLYYNTRECSTPAYIS

SEQ ID NO: 738 - protein, 129 aa, Homo Sapiens
MRPLKPGAPLPALFLLALALSPHGAHGRPRGRRGARVTDKEPKPLLFLPAAGAGRTPSGSRSAEIFPRDSNLKDKFIKHFTGPVTFSPECSKHFHRLYYNTRECSTPAYYKRCARLLTRLAVSPLCSQT

SEQ ID NO: 739 - protein, 59 aa, Homo Sapiens
MKDKFLKHLTGPLYFSPKCSKHFHRLYHNTRDCTIPAYYKRCARLLTRLAVSPVCMEDK

SEQ ID NO: 740 - protein, 59 aa, Homo Sapiens; identical to SEQ ID NO: 739

SEQ ID NO: 741 - protein, 60 aa, Homo Sapiens
MKDKFLKHLTGPLYFSPKCSKHFHRLYHNTRDCTIPAYYKRCARLLTRLAVSPVCMEDKQ

SEQ ID NO: 742 - protein, 151 aa, Homo Sapiens
MRGPGHPLLLGLLLVLGAAGRGRGGAEPREPADGQALLRLVVELVQELRKHHSAEHKGLQLLGRDCALGRAEAAGLGPSPEQRVEIVPRDLRMKDKFLKHLTGPLYFSPKCSKHFHRLYHNTRDCTIPAYYKRCARLLTRLAVSPVCMEDK

SEQ ID NO: 743 - protein, 152 aa, Homo Sapiens
MRGPGHPLLLGLLLVLGAAGRGRGGAEPREPADGQALLRLVVELVQELRKHHSAEHKGLQLLGRDCALGRAEAAGLGPSPEQRVEIVPRDLRMKDKFLKHLTGPLYFSPKCSKHFHRLYHNTRDCTIPAYYKRCARLLTRLAVSPVCMEDKQ

SEQ ID NO: 744 - protein, 91 aa, Homo Sapiens
MRGPGHPLLLGLLLVLGPSPEQRVEIVPRDLRMKDKFLKHLTGPLYFSPKCSKHFHRLYHNTRDCTIPAYYKRCARLLTRLAVSPVCMEDK

SEQ ID NO: 745 - protein, 102 aa, Homo Sapiens
  misc_feature (1)..(1): Xaa can be any naturally occurring amino acid
XHHSAEHKGLQLLGRDCALGRAEAAGLGPSPEQRVEIVPRDLRMKDKFLKHLTGPLYFSPKCSKHFHRLYHNTRDCTIPAYYKRCARLLTRLAVSPVCMEDK

SEQ ID NO: 746 - protein, 112 aa, Homo Sapiens
AAAVGSVATLATEPGEDAFRKLFRFYRQSRPGTADLEGVIDFSAAHAARGKGPGAQKVIKSQLNVSSVSEQNAYRAGLQPVSKWQAYGLKGYPGIKKRLNGDPEVYWRNCVG

SEQ ID NO: 747 - protein, 389 aa, Homo Sapiens
MGKMAAAVGSVATLATEPGEDAFRKLFRFYRQSRPGTADLEGVIDFSAAHAARGKGPGAQKVIKSQLNVSSVSEQNAYRAGLQPVSKWQAYGLKGYPGFIFIPNPFLPGYQWHWVKQCLKLYSQKPNVCNLDKHMSKEETQDLWEQSKEFLRYKEATKRRPRSLLEKLRWVTVGYHYNWDSKKYSADHYTPFPSDLGFLSEQVAAACGFEDFRAEAGILNYYRLDSTLGIHVDRSELDHSKPLLSFSFGQSAIFLLGGLQRDEAPTAMFMHSGDIMIMSGFSRLLNHAVPRVLPNPEGEGLPHCLEAPLPAVLPRDSMVEPCSMEDWQVCASYLKTARVNMTVRQVLATDQNFPLEPIEDEKRDISTEGFCHLDDQNSEVKRARINPDS

SEQ ID NO: 748 - protein, 116 aa, Homo Sapiens
MGKMAAAVGSVATLATEPGEDAFRKLFRFYRQSRPGTADLEGVIDFSAAHAARGKGPGAQKVIKSQLNVSSVSEQNAYRAGLQPVSKWQAYGLKGYPGIKKRLNGDPEVYWRNCVG

SEQ ID NO: 749 - protein, 394 aa, Homo Sapiens
MAAASGYTDLREKLKSMTSRDNYKAGSREAAAAAAAAVAAAAAAAAAAEPYPVSGAKRKYQEDSDPERSDYEEQQLQKEEEARKVKSGIRQMRLFSQDECAKIEARIDEVVSRAEKGLYNEHTVDRAPLRNKYFFGEGYTYGAQLQKRGPGQERLYPPGDVDEIPEWVHQLVIQKLVEHRVIPEGFVNSAVINDYQPGGCIVSHVDPIHIFERPIVSVSFFSDSALCFGCKFQFKPIRVSEPVLSLPVRRGSVTVLSGYAADEITHCIRPQDIKERRAVIILRKTRLDAPRLETKSLSSSVLPPSYASDRLSGNNRDPALKPKRSHRKADPDAAHRPRILEMDKEENRRSVLLPTHRRRGSFSSENYWRKSYESSEDCSEAAGSPARKVKMRRH

SEQ ID NO: 750 - protein, 53 aa, Homo Sapiens
MDKEENRRSVLLPTHRRRGSFSSENYWRKSYESSEDCSEAAGSPARKVKMRRH

SEQ ID NO: 751 - protein, 528 aa, Homo Sapiens
MQGPWVLLLLGLRLQLSLGVIPAEEENPAFWNRQAAEALDAAKKLQPIQKVAKNLILFLGDGLGVPTVTATRILKGQKNGKLGPETPLAMDRFPYLALSKTYNVDRQVPDSAATATAYLCGVKANFQTIGLSAAARFNQCNTTRGNEVISVMNRAKQAGKSVGVVTTTRVQHASPAGTYAHTVNRNWYSDADMPASARQEGCQDIATQLISNMDIDVILGGGRKYMFPMGTPDPEYPADASQNGIRLDGKNLVQEWLAKHQGAWYVWNRTELMQASLDQSVTHLMGLFEPGDTKYEIHRDPTLDPSLMEMTEAALRLLSRNPRGFYLFVEGGRIDHGHHEGVAYQALTEAVMFDDAIERAGQLTSEEDTLTLVTADHSHVFSFGGYTLRGSSIFGLAPSKAQDSKAYTSILYGNGPGYVFNSGVRPDVNESESGSPDYQQQAAVPLSSETHGGEDVAVFARGPQAHLVHGVQEQSFVAHVMAFAACLEPYTACDLAPPACTTDAAHPVAASLPLLAGTLLLLGASAAP

SEQ ID NO: 752 - protein, 50 aa, Homo Sapiens
MQGPWVLLLLGLRLQLSLGVIPGNEAPQAVPHTGHPLSQADLISTLPLAS

SEQ ID NO: 753 - protein, 469 aa, Homo Sapiens
MFLGDGMGVSTVTAARILKGQLHHNPGEETRLEMDKFPFVALSKTYNTNAQVPDSAGTATAYLCGVKANEGTVGVSAATERSRCNTTQGNEVTSILRWAKDAGKSVGIVTTTRVNHATPSAAYAHSADRDWYSDNEMPPEALSQGCKDIAYQLMHNIRDIDVIMGGGRKYMYPKNKTDVEYESDEKARGTRLDGLDLVDTWKSFKPRYKHSHFIWNRTELLTLDPHNVDYLLGLFEPGDMQYELNRNNVTDPSLSEMVVVAIQILRKNPKGFFLLVEGGRIDHGHHEGKAKQALHEAVEMDRAIGQAGSLTSSEDTLTVVTADHSHVFTFGGYTPRGNSIFGLAPMLSDTDKKPFTAILYGNGPGYKVVGGERENVSMVDYAHNNYQAQSAVPLRHETHGGEDVAVFSKGPMAHLLHGVHEQNYVPHVMAYAACIGANLGHCAPASSAGSLAAGPLLLALALYPLSVLF

SEQ ID NO: 754 - protein, 524 aa, Homo Sapiens
MISPFLVLAIGTCLTNSLVPEKEKDPKYWRDQAQETLKYALELQKLNTNVAKNVIMFLGDGMGVSTVTAARILKGQLHHNPGEETRLEMDKFPFVALSKTYNTNAQVPDSAGTATAYLCGVKANEGTVGVSAATERSRCNTTQGNEVTSILRWAKDAGKSVGIVTTTRVNHATPSAAYAHSADRDWYSDNEMPPEALSQGCKDIAYQLMHNIRDIDVIMGGGRKYMYPKNKTDVEYESDEKARGTRLDGLDLVDTWKSFKPRYKHSHFIWNRTELLTLDPHNVDYLLGLFEPGDMQYELNRNNVTDPSLSEMVVVAIQILRKNPKGFFLLVEGGRIDHGHHEGKAKQALHEAVEMDRAIGQAGSLTSSEDTLTVVTADHSHVFTFGGYTPRGNSIFGLAPMLSDTDKKPFTAILYGNGPGYKVVGGERENVSMVDYAHNNYQAQSAVPLRHETHGGEDVAVFSKGPMAHLLHGVHEQNYVPHVMAYAACIGANLGHCAPASSAGSLAAGPLLLALALYPLSVLF

SEQ ID NO: 755 - protein, 524 aa, Homo Sapiens; identical to SEQ ID NO: 754

SEQ ID NO: 756 - protein, 447 aa, Homo Sapiens
MPWSFRSSTPTWLRMSSCSWEMTYNTNAQVPDSAGTATAYLCGVKANEGTVGVSAATERSRCNTTQGNEVTSILRWAKDAGKSVGIVTTTRVNHATPSAAYAHSADRDWYSDNEMPPEALSQGCKDIAYQLMHNIRDIDVIMGGGRKYMYPKNKTDVEYESDEKARGTRLDGLDLVDTWKSFKPRYKHSHFIWNRTELLTLDPHNVDYLLGLFEPGDMQYELNRNNVTDPSLSEMVVVAIQILRKNPKGFFLLVEGGRIDHGHHEGKAKQALHEAVEMDRAIGQAGSLTSSEDTLTVVTADHSHVFTFGGYTPRGNSIFGLAPMLSDTDKKPFTAILYGNGPGYKVVGGERENVSMVDYAHNNYQAQSAVPLRHETHGGEDVAVFSKGPMAHLLHGVHEQNYVPHVMAYAACIGANLGHCAPASSAGSLAAGPLLLALALYPLSVLF

SEQ ID NO: 757 - protein, 216 aa, Homo Sapiens
  misc_feature (1)..(1): Xaa can be any naturally occurring amino acid
XHSHFIWNRTELLTLDPHNVDYLLGGRIDHGHHEGKAKQALHEAVEMDRAIGQAGSLTSSEDTLTVVTADHSHVFTFGGYTPRGNSIFGLAPMLSDTDKKPFTAILYGNGPGYKVVGGERENVSMVDYAHNNYQAQSAVPLRHETHGGEDVAVFSKGPMAHLLHGVHEQNYVPHVMAYAACIGANLGHCAPASSAGSLAAGPLLLALALYPLSVLF

SEQ ID NO: 758 - protein, 535 aa, Homo Sapiens
MLGPCMLLLLLLLGLRLQLSLGIIPVEEENPDFWNREAAEALGAAKKLQPAQTAAKNLIIFLGDGMGVSTVTAARILKGQKKDKLGPEIPLAMDRFPYVALSKTYNVDKHVPDSGATATAYLCGVKGNFQTIGLSAAARFNQCNTTRGNEVISVMNRAKKAGKSVGVVTTTRVQHASPAGTYAHTVNRNWYSDADVPASARQEGCQDIATQLISNMDIDVILGGGRKYMFRMGTPDPEYPDDYSQGGTRLDGKNLVQEWLAKRQGARYVWNRTELMQASLDPSVTHLMGLFEPGDMKYEIHRDSTLDPSLMEMTEAALRLLSRNPRGFFLFVEGGRIDHGHHESRAYRALTETIMFDDAIERAGQLTSEEDTLSLVTADHSHVFSFGGYPLRGSSIFGLAPGKARDRKAYTVLLYGNGPGYVLKDGARPDVTESESGSPEYRQQSAVPLDEETHAGEDVAVFARGPQAHLVHGVQEQTFIAHVMAFAACLEPYTACDLAPPAGTTDAAHPGRSVVPALLPLLAGTLLLLETATAP

SEQ ID NO: 759 - protein, 532 aa, Homo Sapiens
MQGPWVLLLLGLRLQLSLGIIPVEEENPDFWNRQAAEALGAAKKLQPAQTAAKNLIIFLGDGMGVSTVTAARILKGQKKDKLGPETFLAMDRFPYVALSKTYSVDKHVPDSGATATAYLCGVKGNFQTIGLSAAARFNQCNTTRGNEVISVMNRAKKAGKSVGVVTTTRVQHASPAGAYAHTVNRNWYSDADVPASARQEGCQDIATQLISNMDIDVILGGGRKYMFPMGTPDPEYPDDYSQGGTRLDGKNLVQEWLAKHQGARYVWNRTELLQASLDPSVTHLMGLFEPGDMKYEIHRDSTLDPSLMEMTEAALLLLSRNPRGFFLFVEGGRIDHGHHESRAYRALTETIMFDDAIERAGQLTSEEDTLSLVTADHSHVFSFGGYPLRGSSIFGLAPGKARDRKAYTVLLYGNGPGYVLKDGARPDVTESESGSPEYRQQSAVPLDGETHAGEDVAVFARGPQAHLVHGVQEQTFIAHVMAFAACLEPYTACDLAPRAGTTDAAHPGPSVVPALLPLLAGTLLLLGTATAP

SEQ ID NO: 760 - protein, 432 aa, Homo Sapiens
MSASKIPLFKMKDLILILCLLEMSFAVPFFPQQSGTPGMASLSLETMRQLGSLQRLNTLSQYSRYGFGKSFNSLWMHGLLPPHSSLPWMRPREHETQQPSLKPQQPGLKPFLQSAAATTNQATALKEALQPPIHLGHLPLQEGELPLVQQQVAPSDKPPKPELPGVDFADPQGPSLPGMDFPDPQGPSLPGLDFADPQGSTIFQIARLISHGPMPQNKQSPLYPGMLYVPFGANQLNAPARLGIMSSEEVAGGREDPMAYGAMFPGFGGMRPGFEGMPHNPAMGGDFTLEFDSPVAATKGPENEEGGAQGSPMPEANPDNLENPAFLTELEPAPHAGLLALPKDDIPGLPRSPSGKMKGLPSVTPAAADPLMTPELADVYRTYDADMTTSVDFQEEATMDTTMAPNSLQTSMPGNKAQEPEMMHDAWHFQEP

SEQ ID NO: 761 - protein, 447 aa, Homo Sapiens
MSASKIPLFKMKDLILILCLLEMSFAVPFFPQQSGTPGMASLSLETMRQLGSLQRLNTLSQYSRYGFGKSFNSLWMHGLLPPHSSLPWMRPREHETQQYEYSLPVHPPPLPSQPSLKPQQPGLKPFLQSAAATTNQATALKEALQPPIHLGHLPLQEGELPLVQQQVAPSDKPPKPELPGVDFADPQGPSLPGMDFPDPQGPSLPGLDFADPQGSTIFQIARLISHGPMPQNKQSPLYPGMLYVPFGANQLNAPARLGIMSSEEVAGGREDPMAYGAMFPGFGGMRPGFEGMPHNPAMGGDFTLEFDSPVAATKGPENEEGGAQGSPMPEANPDNLENPAFLTELEPAPHAGLLALPKDDIPGLPRSPSGKMKGLPSVTPAAADPLMTPELADVYRTYDADMTTSVDFQEEATMDTTMAPNSLQTSMPGNKAQEPEMMHDAWHFQEP

SEQ ID NO: 762 - protein, 446 aa, Homo Sapiens [sequence omitted]

SEQ ID NO: 763 - protein, 193 aa, Homo Sapiens
HKSKWNITMESYVVHTNYDEYAIFLTKKFSRHHGPTITAKLYGRAPQLRETLLQDFRVVAQGVGIPEDSIFTMADRGECVPGEQEPEPILIPRVRRAVLPQEEEGSGGGQLVTEVTKKEDSCQLGYSAGPCMGMTSRYFYNGTSMACETFQYGGCMGNGNNFVTVRGPCRAFIQLWAFDAVKGKCVLFPYGGC

SEQ ID NO: 764 - protein, 352 aa, Homo Sapiens
MRSLGALLLLLSACLAVSAGPVPTPPDNIQVQENFNISRIYGKWYNLAIGSTCPWLKKIMDRMTVSTLVLGEGATEAEISMTSTRWRKGVCEETSGAYEKTDTDGKFLYHKSKWNITMESYVVHTNYDEYAIFLTKKFSRHHGPTITAKLYGRAPQLRETLLQDFRVVAQGVGIPEDSIFTMADRGECVPGEQEPEPILIPRVRRAVLPQEEEGSGGGQLVTEVTKKEDSCQLGYSAGPCMGMTSRYFYNGTSMACETFQYGGCMGNGNNFVTEKECLQTCRTVAACNLPIVRGPCRAFIQLWAFDAVKGKCVLFPYGGCQGNGNKFYSEKECREYCGVPGDGDEELLRFSN

SEQ ID NO: 765 - protein, 238 aa, Homo Sapiens
MRSLGALLLLLSACLAVSAGPVPTPPDNIQVQENFNISRIYGKWYNLAIGSTCPWLKKIMDRMTVSTLVLGEGATEAEISMTSTRWRKGVCEETSGAYEKTDTDGKFLYHKSKWNITMESYVVHTNYDEYAIFLTKKFSRHHGPTITAKLYGRAPQLRETLLQDFRVVAQGVGIPEDSIFTMADRVNGLEQATQAGPFMKWTKARQVPSTMLTKDTNPGLGWPLGLVLLFTPLSCSVT

SEQ ID NO: 766 - protein, 205 aa, Homo Sapiens
MGTWILFACLLGAAFAMPLPPHPGHPGYINFSYENSHSQAINVDRTALVLTPLKWYQSIRPPYPSYGYEPMGGWLHHQIIPVLSQQHPPTHTLQPHHHIPVVPAQQPVIPQQPMMPVPGQHSMTPIQHHQPNLPPPAQQPYQPQPVQPQPHQPMQPQPPVHPMQPLPPQPPLPPMFPMQPLPPMLPDLTLEAWPSTDKTKREEVD

SEQ ID NO: 767 - protein, 191 aa, Homo Sapiens
MGTWILFACLLGAAFAMPLPPHPGHPGYINFSYEVLTPLKWYQSIRPPYPSYGYEPMGGWLHHQIIPVLSQQHPPTHTLQPHHHIPVVPAQQPVIPQQPMMPVPGQHSMTPIQHHQPNLPPPAQQPYQPQPVQPQPHQPMQPQPPVHPMQPLPPQPPLPPMFPMQPLPPMLPDLTLEAWPSTDKTKREEVD

SEQ ID NO: 768 - protein, 175 aa, Homo Sapiens
MGTWILFACLLGAAFAMPVLTPLKWYQSIRPPYPSYGYEPMGGWLHHQIIPVLSQQHPPTHTLQPHHHIPVVPAQQPVIPQQPMMPVPGQHSMTPIQHHQPNLPPPAQQPYQPQPVQPQPHQPMQPQPPVHPMQPLPPQPPLPPMFPMQPLPPMLPDLTLEAWPSTDKTKREEVD

SEQ ID NO: 769 - protein, 206 aa, Homo Sapiens
MGTWILFACLVGAAFAMPLPPHPGHPGYINFSYENSHSQAINVDRIALVLTPLKWYQSMIRPPYSSYGYEPMGGWLHHQIIPVVSQQHPLTHTLQSHHHIPVVPAQQPRVRQQALMPVPGQQSMTPTQHHQPNLPLPAQQPFQPQPVQPQPHQPMQPQPPVQPMQPLLPQPPLPPMFPLRPLPPILPDLHLEAWPATDKTKQEEVD

SEQ ID NO: 770 - protein, 192 aa, Homo Sapiens
MGTWILFACLVGAAFAMPLPPHPGHPGYINFSYEVLTPLKWYQSMIRPPYSSYGYEPMGGWLHHQIIPVVSQQHPLTHTLQSHHHIPVVPAQQPRVRQQALMPVPGQQSMTPTQHHQPNLPLPAQQPFQPQPVQPQPHQPMQPQPPVQPMQPLLPQPPLPPMFPLRPLPPILPDLHLEAWPATDKTKQEEVD

SEQ ID NO: 771 - protein, 560 aa, Homo Sapiens
MRDLPLTSLALVLSALGALLGTEALRAEEPAVGTSGLIFREDLDWPPGSPQEPLCLVALGGDSNGSSSPLRVVGALSAYEQAFLGAVQRARWGPRDLATFGVCNTGDRQAALPSLRRLGAWLRDPGGQRLVVLHLEEVTWEPTPSLRFQEPPPGGAGPPELALLVLYPGPGPEVTVTRAGLPGAQSLCPSRDTRYLVLAVDRPAGAWRGSGLALTLQPRGEDSRLSTARLQALLFGDDHRCFTRMTPALLLLPRSEPAPLPAHGQLDTVPFPPPRPSAELEESPPSADPFLETLTRLVRALRVPPARASAPRLALDPDALAGFPQGLVNLSDPAALERLLDGEEPLLLLLRPTAATTGDPAPLHDPTSAPWATALARRVAAELQAAAAELRSLPGLPPATAPLLARLLALCPGGPGGLGDPLRALLLLKALQGLRVEWRGRDPRGPGRAQRSAGATAADGPCALRELSVDLRAERSVLIPETYQANNCQGVCGWPQSDRNPRYGNHVVLLLKMQVRGAALARPPCCVPTAYAGKLLISLSEERISAHHVPNMVATECGCR

SEQ ID NO: 772 - protein, 780 aa, Homo Sapiens
MNVRIFYSVSQSPHSLLSLLFYCAILESRISATMPLFKLPAEEKQIDDAMRNFAEKVFASEVKDEGGRQEISPFDVDEICPISHHEMQAHIFHLETLSTSTEARRKKRFQGRKTVNLSIPLSETSSTKLSHIDEYISSSPTYQTVPDFQRVQITGDYASGVTVEDFEIVCKGLYRALCIREKYMQKSFQRFPKTPSKYLRNIDGEAWVANESFYPVFTPPVKKGEDPFRTDNLPENLGYHLKMKDGVVYVYPNEAAVSKDEPKPLPYPNLDTFLDDMNFLLALIAQGPVKTYTHRRLKFLSSKFQVHQMLNEMDELKELKNNPHRDFYNCRKVDTHIHAAACMNQKHLLRFIKKSYQIDADRVVYSTKEKNLTLKELFAKLKMHPYDLTVDSLDVHAGRQTFQRFDKFNDKYNPVGASELRDLYLKTDNYINGEYFATIIKEVGADLVEAKYQHAEPRLSIYGRSPDEWSKLSSWFVCNRIHCPNMTWMIQVPRIYDVFRSKNFLPHFGKMLENIFMPVFEATINPQADPELSVFLKHITGFDSVDDESKHSGHMFSSKSPKPQEWTLEKNPSYTYYAYYMYANIMVLNSLRKERGMNTFLFRPHCGEAGALTHLMTAFMIADDISHGLNLKKSPVLQYLFFLAQIPIAMSPLSNNSLFLEYAKNPFLDFLQKGLMISLSTDDPMQFHFTKEPLMEEYAIAAQVFKLSTCDMCEVARNSVLQCGISHEEKVKFLGDNYLEEGPAGNDIRRTNVAQIRMAYRYETWCYELNLIAEGLKSTE

SEQ ID NO: 773 - protein, 776 aa, Homo Sapiens
MNVRIFYSVSQSPHSLLSLLFYCAILESRISATMPLFKLPEIDDAMRNFAEKVFASEVKDEGGRQEISPFDVDEICPISHHEMQAHIFHLETLSTSTEARRKKRFQGRKTVNLSIPLSETSSTKLSHIDEYISSSPTYQTVPDFQRVQITGDYASGVTVEDFEIVCKGLYRALCIREKYMQKSFQRFPKTPSKYLRNIDGEAWVANESFYPVFTPPVKKGEDPFRTDNLPENLGYHLKMKDGVVYVYPNEAAVSKDEPKPLPYPNLDTFLDDMNFLLALIAQGPVKTYTHRRLKFLSSKFQVHQMLNEMDELKELKNNPHRDFYNCRKVDTHIHAAACMNQKHLLRFIKKSYQIDADRVVYSTKEKNLTLKELFAKLKMHPYDLTVDSLDVHAGRQTFQRFDKFNDKYNPVGASELRDLYLKTDNYINGEYFATIIKEVGADLVEAKYQHAEPRLSIYGRSPDEWSKLSSWFVCNRIHCPNMTWMIQVPRIYDVFRSKNFLPHFGKMLENIFMPVFEATINPQADPELSVFLKHITGFDSVDDESKHSGHMFSSKSPKPQEWTLEKNPSYTYYAYYMYANIMVLNSLRKERGMNTFLFRPHCGEAGALTHLMTAFMIADDISHGLNLKKSPVLQYLFFLAQIPIAMSPLSNNSLFLEYAKNPFLDFLQKGLMISLSTDDPMQFHFTKEPLMEEYAIAAQVFKLSTCDMCEVARNSVLQCGISHEEKVKFLGDNYLEEGPAGNDIRRTNVAQIRMAYRYETWCYELNLIAEGLKSTE

SEQ ID NO: 774 - protein, 191 aa, Homo Sapiens
QCLCSNSQVGVQKIDDAMRNFAEKVFASEVKDEGGRQEISPFDVDEICPISHHEMQAHIFHLETLSTSTEARRKKRFQGRKTVNLSIPLSETSSTKLSHIDEYISSSPTYQTVPDFQRVQITGDYASGVTVEDFEIVCKGLYRALCIREKYMQKSFQRFPKTPSKYLRNIDGEAWVANESFYPVRPIPTGA

SEQ ID NO: 775 - protein, 208 aa, Homo Sapiens
MRSTILLFCLLGSTRSLPLKPALGLPPTKLAPDQGTLPNQQQSNQVFPSLSLIPLTQMLTLGPDLHLLNPAAGMTPGTQTHPLTLGGLNVQQQLHPHVLPIFVTQLGAQGTILSSEELPQIFTSLIIHSLFPGGILPTSQAGANPDVQDGSLPAGGAGVNPATQGTPAGRLPTPSGTDDDFAVTTPAGIQRSTHAIEEATTESANGIQ

SEQ ID NO: 776 - protein, 209 aa, Homo Sapiens
MRSTILLFCLLGSTRSLPQLKPALGLPPTKLAPDQGTLPNQQQSNQVFPSLSLIPLTQMLTLGPDLHLLNPAAGMTPGTQTHPLTLGGLNVQQQLHPHVLPIFVTQLGAQGTILSSEELPQIFTSLIIHSLFPGGILPTSQAGANPDVQDGSLPAGGAGVNPATQGTPAGRLPTPSGTDDDFAVTTPAGIQRSTHAIEEATTESANGIQ

SEQ ID NO: 777 - protein, 105 aa, Homo Sapiens
MKLFWLLFTIGFCWAQYSSNTQQGRTSIVHLFEWRWVDIALECERYLAPKGFGGVQVSPPNENVAIHNPFRPWWERYQPVSYKLCTRSGNEDEFRNMVTRCNNVG

SEQ ID NO: 778 - protein, 226 aa, Homo Sapiens
MKLFWLLFTIGFCWAQYSSNTQQGRTSIVHLFEWRWVDIALECERYLAPKGFGGVQVSPPNENVAIHNPFRPWWERYQPVSYKLCTRSGNEDEFRNMVTRCNNVGVRIYVDAVINHMCGNAVSAGTSSTCGSYFNPGSRDFPAVPYSGWDFNDGKCKTGSGDIENYNDATQVRDCRLSGLLDLALGKDYVRSKIAEYMNHLIDIGVAGFRIDASKHMWPGDIKAIL

SEQ ID NO: 779 - protein, 511 aa, Homo Sapiens
MKLFWLLFTIGFCWAQYSSNTQQGRTSIVHLFEWRWVDIALECERYLAPKGFGGVQVSPPNENVAIHNPFRPWWERYQPVSYKLCTRSGNEDEFRNMVTRCNNVGVRIYVDAVINHMCGNAVSAGTSSTCGSYFNPGSRDFPAVPYSGWDFNDGKCKTGSGDIENYNDATQVRDCRLSGLLDLALGKDYVRSKIAEYMNHLIDIGVAGFRIDASKHMWPGDIKAILDKLHNLNSNWFPEGSKPFIYQEVIDLGGEPIKSSDYFGNGRVTEFKYGAKLGTVIRKWNGEKMSYLKNWGEGWGFMPSDRALVFVDNHDNQRGHGAGGASILTFWDARLYKMAVGFMLAHPYGFTRVMSSYRWPRYFENGKDVNDWVGPPNDNGVTKEVTINPDTTCGNDWVCEHRWRQIRNMVNFRNVVDGQPFTNWYDNGSNQVAFGRGNRGFIVFNNDDWTFSLTLQTGLPAGTYCDVISGDKINGNCTGIKIYVSDDGKAHFSISNSAEDPFIAIHAESKL

SEQ ID NO: 780 - protein, 105 aa, Homo Sapiens; identical to SEQ ID NO: 777

SEQ ID NO: 781 - protein, 226 aa, Homo Sapiens; identical to SEQ ID NO: 778

SEQ ID NO: 782 - protein, 511 aa, Homo Sapiens; identical to SEQ ID NO: 779

SEQ ID NO: 783 - protein, 511 aa, Homo Sapiens; identical to SEQ ID NO: 779

SEQ ID NO: 784 - protein, 511 aa, Homo Sapiens; identical to SEQ ID NO: 779

SEQ ID NO: 785 - protein, 511 aa, Homo Sapiens
MKFFLLLFTIGFCWAQYSPNTQQGRTSIVHLFEWRWVDIALECERYLAPKGFGGVQVSPPNENVAIYNPFRPWWERYQPVSYKLCTRSGNEDEFRNMVTRCNNVGVRIYVDAVINHMCGNAVSAGTSSTCGSYFNPGSRDFPAVPYSGWDFNDGKCKTGSGDIENYNDATQVRDCRLTGLLDLALEKDYVRSKIAEYMNHLIDIGVAGFRLDASKHMWPGDIKAILDKLHNLNSNWFPAGSKPFIYQEVIDLGGEPIKSSDYFGNGRVTEFKYGAKLGTVIRKWNGEKMSYLKNWGEGWGFVPSDRALVFVDNHDNQRGHGAGGASILTFWDARLYKMAVGFMLAHPYGFTRVMSSYRWPRQFQNGNDVNDWVGPPNNNGVIKEVTINPDTTCGNDWVCEHRWRQIRNMVIFRNVVDGQPFTNWYDNGSNQVAFGRGNRGFIVFNNDDWSFSLTLQTGLPAGTYCDVISGDKINGNCTGIKIYVSDDGKAHFSISNSAEDPFIAIHAESKL

SEQ ID NO: 786 - protein, 511 aa, Homo Sapiens; identical to SEQ ID NO: 785

SEQ ID NO: 787 - protein, 209 aa, Homo Sapiens
  misc_feature (1)..(1): Xaa can be any naturally occurring amino acid
XFFLLLFTIGFCWAQYSPNTQQGRTSIVHLFEWRWVDIALECERYLAPKGFGGVQVSPPNENVAIYNPFRPWWERYQPVSYKLCTRSGNEDEFRNMVTRCNNVGVRIYVDAVINHMCGNAVSAGTSSTCGSYFNPGSRDFPAVPYSGWDFNDGKCKTGSGDIENYNDATQVIDLGGEPIKSSDYFGNGRVTEFKYGAKLGTVIRKWNGE

SEQ ID NO: 788 - protein, 86 aa, Homo Sapiens
MKFFLLLFTIGFCWAQYSPNTQQGRTSIVHLFEWRWVDIALECERYLAPKGFGGVQVSPPNENVAIHNPFRPWWERYQPVSYKLCT

SEQ ID NO: 789 - protein, 96 aa, Homo Sapiens
MKFFLLLFTIGFCWAQYSPNTQQGRTSIVHLFEWRWVDIALECERYLAPKGFGGVQVSPPNENVAIHNPFRPWWERYQPVSYKLCTRSGNEDEFRN

SEQ ID NO: 790 - protein, 511 aa, Homo Sapiens
MKFFLLLFTIGFCWAQYSPNTQQGRTSIVHLFEWRWVDIALECERYLAPKGFGGVQVSPPNENVAIHNPFRPWWERYQPVSYKLCTRSGNEDEFRNMVTRCNNVGVRIYVDAVINHMSGNAVSAGTSSTCGSYFNPGSRDFPAVPYSGWDFNDGKCKTGSGDIENYNDATQVRDCRLVGLLDLALEKDYVRSKIAEYMNHLIDIGVAGFRLDASKHMWPGDIKAILDKLHNLNSNWFPAGSKPFIYQEVIDLGGEPIKSSDYFGNGRVTEFKYGAKLGTVIRKWNGEKMSYLKNWGEGWGFMPSDRALVFVDNHDNQRGHGAGGASILTFWDARLYKMAVGFMLAHPYGFTRVMSSYRWPRQFQNGNDVNDWVGPPNNNGVIKEVTINPDTTCGNDWVCEHRWRQIRNMVNFRNVVDGQPFTNWYDNGSNQVAFGRGNRGFIVFNNDDWTFSLTLQTGLPAGTYCDVISGDKINGNCTGIKIYVSDDGKAHFSISNSAEDPFIAIHAESKL

SEQ ID NO: 791 - protein, 370 aa, Homo Sapiens
MKFFLLLFTIGFCWAQYSPNTQQGRTSIVHLFEWRWVDIALECERYLAPKGFGGVQVSPPNENVAIHNPFRPWWERYQPVSYKLCTRSGNEDEFRNMVTRCNNVGVRIYVDAVINHMSGNAVSAGTSSTCGSYFNPGSRDFPAVPYSGWDFNDGKCKTGSGDIENYNDATQVRDCRLVGLLDLALEKDYVRSKIAEYMNHLIDIGVAGFRLDASKHMWPGDIKAILDKLHNLNSNWFPAGSKPFIYQEVIDLGGEPIKSSDYFGNGRVTEFKYGAKLGTVIRKWNGEKMSYLKNWGEGWGFMPSDRALVFVDNHDNQRGHGAGGASILTFWDARLYKMAVGFMLAHPYGFTRVMSSYRWPRQFQNGNEHG

SEQ ID NO: 792 - protein, 511 aa, Homo Sapiens; identical to SEQ ID NO: 790

SEQ ID NO: 793 - protein, 147 aa, Homo Sapiens
MVMGLGVLLLVFVLGLGLTPPTLAQDNSRYTHFLTQHYDAKPQGRDDRYCESIMRRRGLTSPCKDINTFIHGNKRSIKAICENKNGNPHRENLRISKSSFQVTTCKLHGGSPWPPCQYRATAGFRNVVVACENGLPVHLDQSIFRRP

SEQ ID NO: 794 - protein, 147 aa, Homo Sapiens; identical to SEQ ID NO: 793

SEQ ID NO: 795 - protein, 129 aa, Homo Sapiens
MAPRGPEQEECEGLLQQWREEGLSQVLSTASEGPLIDKGLAQSSLALLMDNPGEENAASEDRWSSRQLSDLRAAENLDEPFPEMLGEEPLLEVEGVEGSMWAAIPMQSEPQYADCAALPVGALATEQWE

SEQ ID NO: 796 - protein, 67 aa, Homo Sapiens
MEGVTDTKPERPAGWAESVLEEDASELEPAFSRTVGTIQHCLHLTSVYTHFLPQRGRPEVTTMPLGL

SEQ ID NO: 797 - protein, 670 aa, Homo Sapiens
MIASCLCYLLLPATRLFRALSDAFFTCRKNVLLANSSSPQVEGDFAMAPRGPEQEECEGLLQQWREEGLSQVLSTASEGPLIDKGLAQSSLALLMDNPGEENAASEDRWSSRQLSDLRAAENLDEPFPEMLGEEPLLEVEGVEGSMWAAIPMQSEPQYADCAALPVGALATEQWEEDPAVLAWSIAPEPVPQEEASIWPFEGLGQLQPPAVEIPYHEILWREWEDFSTQPDAQGLKAGDGPQFQFTLMSYNILAQDLMQQSSELYLHCHPDILNWNYRFVNLMQEFQHWDPDILCLQEVQEDHYWEQLEPSLRMMGFTCFYKRRTGCKTDGCAVCYKPTRFRLLCASPVEYFRPGLELLNRDNVGLVLLLQPLVPEGLGQVSVAPLCVANTHILYNPRRGDVKLAQMAILLAEVDKVARLSDGSHCPIILCGDLNSVPDSPLYNFIRDGELQYHGMPAWKVSGQEDFSHQLYQRKLQAPLWPSSLGITDCCQYVTSCHPKRSERRKYGRDFLLRFRFCSIACQRPVGLVLMEGVTDTKPERPAGWAESVLEEDASELEPAFSRTVGTIQHCLHLTSVYTHFLPQRGRPEVTTMPLGLGMTVDYIFFSAESCENGNRTDHRLYRDGTLKLLGRLSLLSEEILWAANGLPNPFCSSDHLCLLASFGMEVTAP

SEQ ID NO: 798 - protein, 235 aa, Homo Sapiens
MSQNMGCYFLFLSWFPYSHPSFSTQVSGQEDFSHQLYQRKLQAPLWPSSLGITDCCQYVTSCHPKRSERRKYGRDFLLRFRFCSIACQRPVGLVLMEGVTDTKPERPAGWAESVLEEDASELEPAFSRTVGTIQHCLHLTSVYTHFLPQRGRPEVTTMPLGLGMTVDYIFFSAESCENGNRTDHRLYRDGTLKLLGRLSLLSEEILWAANGLPNPFCSSDHLCLLASFGMEVTAP

SEQ ID NO: 799 - protein, 298 aa, Homo Sapiens
MEGKHKEELDTLKEEKENLQGLVTRQTYIIQELEKQLNRATTNNSVLQKQQLELMDTVHNLVNLCTKEGVLLKGGKREEEKPFRDCADVYQAGFNKSGIYTIYINNMPEPKKVFCNMDVNGGGWTVIQHREDGSLDFQRGWKEYKMGFGNPSGEYWLGNEFIFAITSQRQYMLRIELMDWEGNRAYSQYDRFHIGNEKQNYRLYLKGHTGTAGKQSSLILHGADFSTKDADNDNCMCKCALMLTGGWWFDACGPSNLNGMFYTAGQNHGKLNGIKWHYFKGPSYSLRSTTMMIRPLDF

SEQ ID NO: 800 - protein, 297 aa, Homo Sapiens
MEGKHKEELDTLKEEKENLQGLVTRQTYIIQELEKQLNRATTNNSVLQKQQLELMDTVHNLVNLCTKEVLLKGGKREEEKPFRDCADVYQAGFNKSGIYTIYINNMPEPKKVFCNMDVNGGGWTVIQHREDGSLDFQRGWKEYKMGFGNPSGEYWLGNEFIFAITSQRQYMLRIELMDWEGNRAYSQYDRFHIGNEKQNYRLYLKGHTGTAGKQSSLILHGADFSTKDADNDNCMCKCALMLTGGWWFDACGPSNLNGMFYTAGQNHGKLNGIKWHYFKGPSYSLRSTTMMIRPLDF

SEQ ID NO: 801 - protein, 30 aa, Homo Sapiens
MKSEMAQIQQNAVQNHTATMLEIGTSLLSQ

SEQ ID NO: 802 - protein, 497 aa, Homo Sapiens
MTVFLSFAFLAAILTHIGCSNQRRSPENSGRRYNRIQHGQCAYTFILPEHDGNCRESTTDQYNTNALQRDAPHVEPDFSSQKLQHLEHVMENYTQWLQKLENYIVENMKSEMAQIQQNAVQNHTATMLEIGTSLLSQTAEQTRKLTDVETQVLNQTSRLEIQLLENSLSTYKLEKQLLQQTNEILKIHEKNSLLEHKILEMEGKHKEELDTLKEEKENLQGLVTRQTYIIQELEKQLNRATTNNSVLQKQQLELMDTVHNLVNLCTKEVLLKGGKREEEKPFRDCADVYQAGFNKSGIYTIYINNMPEPKKVFCNMDVNGGGWTVIQHREDGSLDFQRGWKEYKMGFGNPSGEYWLGNEFIFAITSQRQYMLRIELMDWEGNRAYSQYDRFHIGNEKQNYRLYLKGHTGTAGKQSSLILHGADFSTKDADNDNCMCKCALMLTGGWWFDACGPSNLNGMFYTAGQNHGKLNGIKWHYFKGPSYSLRSTTMMIRPLDF

SEQ ID NO: 803 - protein, 498 aa, Homo Sapiens
MTVFLSFAFLAAILTHIGCSNQRRSPENSGRRYNRIQHGQCAYTFILPEHDGNCRESTTDQYNTNALQRDAPHVEPDFSSQKLQHLEHVMENYTQWLQKLENYIVENMKSEMAQIQQNAVQNHTATMLEIGTSLLSQTAEQTRKLTDVETQVLNQTSRLEIQLLENSLSTYKLEKQLLQQTNEILKIHEKNSLLEHKILEMEGKHKEELDTLKEEKENLQGLVTRQTYIIQELEKQLNRATTNNSVLQKQQLELMDTVHNLVNLCTKEGVLLKGGKREEEKPFRDCADVYQAGFNKSGIYTIYINNMPEPKKVFCNMDVNGGGWTVIQHREDGSLDFQRGWKEYKMGFGNPSGEYWLGNEFIFAITSQRQYMLRIELMDWEGNRAYSQYDRFHIGNEKQNYRLYLKGHTGTAGKQSSLILHGADFSTKDADNDNCMCKCALMLTGGWWFDACGPSNLNGMFYTAGQNHGKLNGIKWHYFKGPSYSLRSTTMMIRPLDF

SEQ ID NO: 804 - protein, 496 aa, Homo Sapiens
MWQIVFFTLSCDLVLAAAYNNFRKSMDSIGKKQYQVQHGSCSYTFLLPEMDNCRSSSSPYVSNAVQRDAPLEYDDSVQRLQVLENIMENNTQWLMKLENYIQDNMKKEMVEIQQNAVQNQTAVMIEIGTNLLNQTAEQTRKLTDVEAQVLNQTTRLELQLLEHSLSTNKLEKQILDQTSEINKLQDKNSFLEKKVLAMEDKHIIQLQSIKEEKDQLQVLVSKQNSIIEELEKKIVTATVNNSVLQKQQHDLMETVNNLLTMMSTSNSAKDPTVAKEEQISFRDCAEVFKSGHTTNGIYTLTFPNSTEEIKAYCDMEAGGGGWTIIQRREDGSVDFQRTWKEYKVGFGNPSGEYWLGNEFVSQLTNQQRYVLKIHLKDWEGNEAYSLYEHFYLSSEELNYRIHLKGLTGTAGKISSISQPGNDFSTKDGDNDKCICKCSQMLTGGWWFDACGPSNLNGMYYPQRQNTNKFNGIKWYYWKGSGYSLKATTMMIRPADF

SEQ ID NO: 805 - protein, 459 aa, Homo Sapiens
MWQIVFFTLSCDLVLAAAYNNFRKSMDSIGKKQYQVQHGSCSYTFLLPEMDNCRSSSSPYVSNAVQRDAPLEYDDSVQRLQVLENIMENNTQWLMKLENYIQDNMKKEMVEIQQNAVQNQTAVMIEIGTNLLNQTAEQTRKLTDVEAQVLNQTTRLELQLLEHSLSTNKLEKQILDQTSEINKLQDKNSFLEKKVLAMEDKHIIQLQSIKEEKDQLQVLVSKQNSIIEELEKKIVTATVNNSVLQKQQHDLMETVNNLLTMMSTSNSKDPTVAKEEQISFRDCAEVFKSGHTTNGIYTLTFPNSTEEIKAYCDMEAGGGGWTIIQRREDGSVDFQRTWKEYKVGFGNPSGEYWLGNEFVSQLTNQQRYVLKIHLKDWEGNEAYSLYEHFYLSSEELNYRIHLKGLTGTAGKISSISQPGNDFSTKDGDNDKCICKCSQMLTGGRDDFLSSYLYWQGMIS

SEQ ID NO: 806 - protein, 495 aa, Homo Sapiens
MWQIVFFTLSCDLVLAAAYNNFRKSMDSIGKKQYQVQHGSCSYTFLLPEMDNCRSSSSPYVSNAVQRDAPLEYDDSVQRLQVLENIMENNTQWLMKLENYIQDNMKKEMVEIQQNAVQNQTAVMIEIGTNLLNQTAEQTRKLTDVEAQVLNQTTRLELQLLEHSLSTNKLEKQILDQTSEINKLQDKNSFLEKKVLAMEDKHIIQLQSIKEEKDQLQVLVSKQNSIIEELEKKIVTATVNNSVLQKQQHDLMETVNNLLTMMSTSNSKDPTVAKEEQISFRDCAEVFKSGHTTNGIYTLTFPNSTEEIKAYCDMEAGGGGWTIIQRREDGSVDFQRTWKEYKVGFGNPSGEYWLGNEFVSQLTNQQRYVLKIHLKDWEGNEAYSLYEHFYLSSEELNYRIHLKGLTGTAGKISSISQPGNDFSTKDGDNDKCICKCSQMLTGGWWFDACGPSNLNGMYYPQRQNTNKFNGIKWYYWKGSGYSLKATTMMIRPADF

SEQ ID NO: 807 - protein, 444 aa, Homo Sapiens
MWQIVFFTLSCDLVLAAAYNNFRKSMDSIGKKQYQVQHGSCSYTFLLPEMDNCRSSSSPYVSNAVQRDAPLEYDDSVQRLQVLENIMENNTQWLMKVLNQTTRLELQLLEHSLSTNKLEKQILDQTSEINKLQDKNSFLEKKVLAMEDKHIIQLQSIKEEKDQLQVLVSKQNSIIEELEKKIVTATVNNSVLQKQQHDLMETVNNLLTMMSTSNSAKDPTVAKEEQISFRDCAEVFKSGHTTNGIYTLTFPNSTEEIKAYCDMEAGGGGWTIIQRREDGSVDFQRTWKEYKVGFGNPSGEYWLGNEFVSQLTNQQRYVLKIHLKDWEGNEAYSLYEHFYLSSEELNYRIHLKGLTGTAGKISSISQPGNDFSTKDGDNDKCICKCSQMLTGGWWFDACGPSNLNGMYYPQRQNTNKFNGIKWYYWKGSGYSLKATTMMIRPADF

SEQ ID NO: 808 - protein, 503 aa, Homo Sapiens
MLSQLAMLQGSLLLVVATMSVAQQTRQEADRGCETLVVQHGHCSYTFLLPKSEPCPPGPEVSRDSNTLQRESLANPLHLGKLPTQQVKQLEQALQNNTQWLKKLERAIKTILRSKLEQVQQQMAQNQTAPMLELGTSLLNQTTAQIRKLTDMEAQLLNQTSRMDAQMPETFLSTNKLENQLLLQRQKLQQLQGQNSALEKRLQALETKQQEELASILSKKAKLLNTLSRQSAALTNIERGLRGVRHNSSLLQDQQHSLRQLLVLLRHLVQERANASAPAFIMAGEQVFQDCAEIQRSGASASGVYTIQVSNATKPRKVFCDLQSSGGRWTLIQRRENGTVNFQRNWKDYKQGFGDPAGEHWLGNEVVHQLTRRAAYSLRVELQDWEGHEAYAQYEHFHLGSENQLYRLSVVGYSGSAGRQSSLVLQNTSFSTLDSDNDHCLCKCAQVMSGGWWFDACGLSNLNGVYYHAPDNKYKMDGIRWHYFKGPSYSLRASRMMIRPLDI

SEQ ID NO: 809 - protein, 114 aa, Homo Sapiens
MKTFTWTLGVLFFLLVDTGHCRGGQFKIKKINQRRYPRATDGKEEAKKCAYTFLVPEQRITGPICVNTKGQDASTIKDMITRMDLENLKDVLSRQKREIDVLQLVVDVDGNIVN

SEQ ID NO: 810 - protein, 491 aa, Homo Sapiens
MKTFTWTLGVLFFLLVDTGHCRGGQFKIKKINQRRYPRATDGKEEAKKCAYTFLVPEQRITGPICVNTKGQDASTIKDMITRMDLENLKDVLSRQKREIDVLQLVVDVDGNIVNEVKLLRKESRNMNSRVTQLYMQLLHEIIRKRDNSLELSQLENKILNVTTEMLKMATRYRELEVKYASLTDLVNNQSVMITLLEEQCLRIFSRQDTHVSPPLVQVVPQHIPNSQQYTPGLLGGNEIQRDPGYPRDLMPPPDLATSPTKSPFKIPPVTFINEGPFKDCQQAKEAGHSVSGIYMIKPENSNGPMQLWCENSLDPGGWTVIQKRTDGSVNFFRNWENYKKGFGNIDGEYWLGLENIYMLSNQDNYKLLIELEDWSDKKVYAEYSSFRLEPESEFYRLRLGTYQGNAGDSMMWHNGKQFTTLDRDKDMYAGNCAHFHKGGWWYNACAHSNLNGVWYRGGHYRSKHQDGIFWAEYRGGSYSLRAVQMMIKPID

SEQ ID NO: 811 - protein, 491 aa, Homo Sapiens; identical to SEQ ID NO: 810

SEQ ID NO: 812 - protein, 191 aa, Homo Sapiens
MQVWCDQRHDPGGWTVIQRRLDGSVNFFRNWETYKQGFGNIDGEYWLGLENIYWLTNQGNYKLLVTMEDWSGRKVFAEYASFRLEPESEYYKLRLGRYHGNAGDSFTWHNGKQFTTLDRDHDVYTGNCAHYQKGGWWYNACAHSNLNGVWYRGGHYRSRYQDGVYWAEFRGGSYSLKKVVMMIRPNPNTFH

SEQ ID NO: 813 - protein, 493 aa, Homo Sapiens
MRPLCVTCWWLGLLAAMGAVAGQEDGFEGTEEGSPREFIYLNRYKRAGESQDKCTYTFIVPQQRVTGAICVNSKEPEVLLENRVHKQELELLNNELLKQKRQIETLQQLVEVDGGIVSEVKLLRKESRNMNSRVTQLYMQLLHEIIRKRDNALELSQLENRILNQTADMLQLASKYKDLEHKYQHLATLAHNQSEIIAQLEEHCQRVPSARPVPQPPPAAPPRVYQPPTYNRIINQISTNEIQSDQNLKVLPPPLPTMPTLTSLPSSTDKPSGPWRDCLQALEDGHDTSSIYLVKPENTNRLMQVWCDQRHDPGGWTVIQRRLDGSVNFFRNWETYKQGFGNIDGEYWLGLENIYWLTNQGNYKLLVTMEDWSGRKVFAEYASFRLEPESEYYKLRLGRYHGNAGDSFTWHNGKQFTTLDRDHDVYTGNCAHYQKGGWWYNACAHSNLNGVWYRGGHYRSRYQDGVYWAEFRGGSYSLKKVVMMIRPNPNTFH

SEQ ID NO: 814 - protein, 460 aa, Homo Sapiens
MFTIKLLLFIVPLVISSRIDQDNSSFDSLSPEPKSRFAMLDDVKILANGLLQLGHGLKDFVHKTKGQINDIFQKLNIFDQSFYDLSLQTSEIKEEEKELRRTTYKLQVKNEEVKNMSLELNSKLESLLEEKILLQQKVKYLEEQLTNLIQNQPETPEHPEVTSLKTFVEKQDNSIKDLLQTVEDQYKQLNQQHSQIKEIENQLRRTSIQEPTEISLSSKPRAPRTTPFLQLNEIRNVKHDGIPAECTTIYNRGEHTSGMYAIRPSNSQVFHVYCDVISGSPWTLIQHRIDGSQNFNETWENYKYGFGRLDGEFWLGLEKIYSIVKQSNYVLRIELEDWKDNKHYIEYSFYLGNHETNYTLHLVAITGNVPNAIPENKDLVFSTWDHKAKGHFNCPEGYSGGWWWHDECGENNLNGKYNKPRAKSKPERRRGLSWKSQNGRLYSIKSTKMLIHPTDSESFE

SEQ ID NO: 815 - protein, 86 aa, Homo Sapiens
MSGAPTAGAALMLCAATAVLLSAQGGPVQSKSPRFASWDEMNVLAHGLLQLGQGLREHAERTRSQLSALERRLSACGSACQGTEGS

SEQ ID NO: 816 - protein, 96 aa, Homo Sapiens
MSGAPTAGAALMLCAATAVLLSAQGGPVQSKSPRFASWDEMNVLAHGLLQLGQGLREHAERTRSQLSALERRLSACGSACQGTEGSTDLPLAPESR

SEQ ID NO: 817 - protein, 105 aa, Homo Sapiens
MSGAPTAGAALMLCAATAVLLSAQGGPVQSKSPRFASWDEMNVLAHGLLQLGQGLREHAERTRSQLSALERRLSACGSACQGTEGSTDLPLAPESRVDPEVLHSL

SEQ ID NO: 818 - protein, 368 aa, Homo Sapiens
MSGAPTAGAALMLCAATAVLLSAQGGPVQSKSPRFASWDEMNVLAHGLLQLGQGLREHAERTRSQLSALERRLSACGSACQGTEGSTDLPLAPESRVDPEVLHSLQTQLKAQNSRIQQLFHKVAQQQRHLEKQHLRIQHLQSQFGLLDHKHLDHEVAKPARRKRLPEMAQPVDPAHNVSRLHHGGWTVIQRRHDGSVDFNRPWEAYKAGFGDPHGEFWLGLEKVHSITGDRNSRLAVQLRDWDGNAELLQFSVHLGGEDTAYSLQLTAPVAGQLGATTVPPSGLSVPFSTWDQDHDLRRDKNCAKSLSGGWWFGTCSHSNLNGQYFRSIPQQRQKLKKGIFWKTWRGRYYPLQATTMLIQPMAAEAAS

SEQ ID NO: 819 - protein, 406 aa, Homo Sapiens
MSGAPTAGAALMLCAATAVLLSAQGGPVQSKSPRFASWDEMNVLAHGLLQLGQGLREHAERTRSQLSALERRLSACGSACQGTEGSTDLPLAPESRVDPEVLHSLQTQLKAQNSRIQQLFHKVAQQQRHLEKQHLRIQHLQSQFGLLDHKHLDHEVAKPARRKRLPEMAQPVDPAHNVSRLHRLPRDCQELFQVGERQSGLFEIQPQGSPPFLVNCKMTSDGGWTVIQRRHDGSVDFNRPWEAYKAGFGDPHGEFWLGLEKVHSITGDRNSRLAVQLRDWDGNAELLQFSVHLGGEDTAYSLQLTAPVAGQLGATTVPPSGLSVPFSTWDQDHDLRRDKNCAKSLSGGWWFGTCSHSNLNGQYFRSIPQQRQKLKKGIFWKTWRGRYYPLQATTMLIQPMAAEAAS

SEQ ID NO: 820 - protein, 406 aa, Homo Sapiens; identical to SEQ ID NO: 819

SEQ ID NO: 821 - protein, 128 aa, Homo Sapiens
MSGAPTAGAALMLCAATAVLLSAQGGPVQSKSPRFASWDEMNVLAHGLLQLGQGLREHAERTRSQLSALERRLSACGSFTACRHNSRLRTAGSSNSSTRWPSSSGTWRSSTCEFSICKASLASWTTST

SEQ ID NO: 822 - protein, 129 aa, Homo Sapiens
  misc_feature (1)..(1): Xaa can be any naturally occurring amino acid
XPVQSKSPRFASWDEMNVLAHGLLQLGQGLREHAERTRSQLSALERRLSACGSACQGTEGSTDLPLAPESRVDPEVLHSLQTQLKAQNSRIQQLFHKVAQQQRHLEKQHLRIQHLQSQTGLNGGLSHID

SEQ ID NO: 823 - protein, 192 aa, Homo Sapiens
MMSPSQASLLFLNVCIFICGEAVQGNCVHHSTDSSVVNIVEDGSNAKDESKSNDTVCKEDCEESCDVKTKITREEKHFMCRNLQNSIVSYTRSTKKLLRNMMDEQQASLDYLSNQVMCDMDYRGGGRTVIQKRIDGIIDFQRLWCDYLDGFGDLLGEFWLGLKKIFYIVNQKNTSFMLYVALESEDDTLAYA

SEQ ID NO: 824 - protein, 388 aa, Homo Sapiens
MMSPSQASLLFLNVCIFICGEAVQGNCVHHSTDSSVVNIVEDGSNAKDESKSNDTVCKEDCEESCDVKTKITREEKHFMCRNLQNSIVSYTRSTKKLLRNMMDEQQASLDYLSNQVNELMNRVLLLTTEVFRKQLDPFPHRPVQSHGLDCTDIKDTIGSVTKTPSGLYIIHPEGSSYPFEVMCDMDYRGGGRTVIQKRIDGIIDFQRLWCDYLDGFGDLLGEFWLGLKKIFYIVNQKNTSFMLYVALESEDDTLAYASYDNFWLEDETRFFKMHLGRYSGNAGDAFRGLKKEDNQNAMPFSTSDVDNDGCRPACLVNGQSVKSCSHLHNKTGWWFNECGLANLNGIHHFSGKLLATGIQWGTWTKNNSPVKIKSVSMKIRRMYNPYFK

SEQ ID NO: 825 - protein, 470 aa, Homo Sapiens
MGKPWLRALQLLLLLGASWARAGAPRCTYTFVLPPQKFTGAVCWSGPASTRATPEAANASELAALRMRVGRHEELLRELQRLAAADGAVAGEVRALRKESRGLSARLGQLRAQLQHEAGPGAGPGADLGAEPAAALALLGERVLNASAEAQRAAARFHQLDVKFRELAQLVTQQSSLIARLERLCPGGAGGQQQVLPPPPLVPVVPVRLVGSTSDTSRMLDPAPEPQRDQTQRQQEPMASPMPAGHPAVPTKPVGPWQDCAEARQAGHEQSGVYELRVGRHVVSVWCEQQLEGGGWTVIQRRQDGSVNFFTTWQHYKAGFGRPDGEYWLGLEPVYQLTSRGDHELLVLLEDWGGRGARAHYDGFSLEPESDHYRLRLGQYHGDAGDSLSWHNDKPFSTVDRDRDSYSGNCALYQRGGWWYHACAHSNLNGVWHHGGHYRSRYQDGVYWAEFRGGAYSLRKAAMLIRPLKL

SEQ ID NO: 826 - protein, 470 aa, Homo Sapiens; identical to SEQ ID NO: 825

SEQ ID NO: 827 - protein, 430 aa, Homo Sapiens
MGKPWLRALQLLLLLGASWARAGAPRCTYTFVLPPQKFTGAVCWSGPASTRATPEAANASELAALRMRVGRHEELLRELQRLAAADGAVAGEVRALRKESRGLSARLGQLRAQLQHEAGPGAGPGADLGAEPAAALALLGERVLNASAEAQRAAARFHQLDVKFRELAQLVTQQSSLIARLERLCPGGAGGQQQVLPPPPLVPVVPVRLVGSTSDTSRMLDPAPEPQRDQTQRQQEPMASPMPAGHPAVPTKPVGPWQDCAEARQAGHEQSGVYELRAGFGRPDGEYWLGLEPVYQLTSRGDHELLVLLEDWGGRGARAHYDGFSLEPESDHYRLRLGQYHGDAGDSLSWHNDKPFSTVDRDRDSYSGNCALYQRGGWWYHACAHSNLNGVWHHGGHYRSRYQDGVYWAEFRGGAYSLRKAAMLIRPLKL

SEQ ID NO: 828 - protein, 346 aa, Homo Sapiens
MLKKPLSAVTWLCIFIVAFVSHPAWLQKLSKHKTPAQPQLKAANCCEEVKELKAQVANLSSLLSELNKKQERDWVSVVMQVMELESNSKRMESRLTDAESKYSEMNNQIDIMQLQAAQTVTQTSADAIYDCSSLYQKNYRISGVYKLPPDDFLGSPELEVFCDMETSGGGWTIIQRRKSGLVSFYRDWKQYKQGFGSIRGDFWLGNEHIHRLSRQPTRLRVEMEDWEGNLRYAEYSHFVLGNELNSYRLFLGNYTGNVGNDALQYHNNTAFSTKDKDNDNCLDKCAQLRKGGYWYNCCTDSNLNGVYYRLGEHNKHLDGITWYGWHGSTYSLKRVEMKIRPEDFKP

SEQ ID NO: 829 - protein, 99 aa, Homo Sapiens
MEEDILQLQAEATAEVLGEVAQAQKVLRDSVQRLEVQLRSAWLGPAYREFEVLKAHADKQSHILWALTGHVQRQRREMVAQQHRLRQIQERLHTAALPA

SEQ ID NO: 830 - protein, 198 aa, Homo Sapiens
MPVPALCLLWALAMVTRPASAAPMGGPELAQHEELTLLFHGTLQLGQALNGVYRTTEGRLTKARNSLGLYGRTIELLGQEVSRGRDAAQELRASLLETQMEEDILQLQAEATAEVLGEVAQAQKVLRDSVQRLEVQLRSAWLGPAYREFEVLKAHADKQSHILWALTGHVQRQRREMVAQQHRLRQIQERLHTAALPA

SEQ ID NO: 831 - protein, 198 aa, Homo Sapiens; identical to SEQ ID NO: 830

SEQ ID NO: 832 - protein, 58 aa, Homo Sapiens
  misc_feature (1)..(1): Xaa can be any naturally occurring amino acid
XAQELRASLLETQAHADKQSHILWALTGHVQRQRREMVAQQHRLRQIQERLHTAALPA

SEQ ID NO: 833 - protein, 1897 aa, Homo Sapiens
MAQAAKQLKKIKDIEAQALQEQKEKEESNRKRRNRSRDRKKKADAATSFLRAARSGNLDKALDHLRNGVDINTCNQNGLNGLHLASKEGHVKMVVELLHKEIILETTTKKGNTALHIAALAGQDEVVRELVNYGANVNAQSQKGFTPLYMAAQENHLEVVKFLLENGANQNVATEDGFTPLAVALQQGHENVVAHLINYGTKGKVRLPALHIAARNDDTRTAAVLLQNDPNPDVLSKTGFTPLHIAAHYENLNVAQLLLNRGASVNFTPQNGITPLHIASRRGNVIMVRLLLDRGAQIETKTKDELTPLHCAARNGHVRISEILLDHGAPIQAKTKNGLSPIHMAAQGDHLDCVRLLLQYDAEIDDITLDHLTPLHVAAHCGHHRVAKVLLDKGAKPNSRALNGFTPLHIACKKNHVRVMELLLKTGASIDAVTESGLTPLHVASFMGHLPIVKNLLQRGASPNVSNVKVETPLHMAARAGHTEVAKYLLQNKAKVNAKAKDDQTPLHCAARIGHTNMVKLLLENNANPNLATTAGHTPLHIAAREGHVETVLALLEKEASQACMTKKGFTPLHVAAKYGKVRVAELLLERDAHPNAAGKNGLTPLHVAVHHNNLDIVKLLLPRGGSPHSPAWNGYTPLHIAAKQNQVEVARSLLQYGGSANAESVQGVTPLHLAAQEGHAEMVALLLSKQANGNLGNKSGLTPLHLVAQEGHVPVADVLIKHGVMVDATTRMGYTPLHVASHYGNIKLVKFLLQHQADVNAKTKLGYSPLHQAAQQGHTDIVTLLLKNGASPNEVSSDGTTPLAIAKRLGYISVTDVLKVVTDETSFVLVSDKHRMSFPETVDEILDVSEDEGTAHITIMGEELISFKAERRDSRDVDEEKELLDFVPKLDQVVESPAIPRIPCAMPETVVIRSEEQEQASKEYDEDSLIPSSPATETSDNISPVASPVHTGFLVSFMVDARGGSMRGSRHNGLRVVIPPRTCAAPTRITCRLVKPQKLSTPPPLAEEEGLASRIIALGPTGAQFLSPVIVEIPHFASHGRGDRELVVLRSENGSVWKEHRSRYGESYLDQILNGMDEELGSLEELEKKRVCRIITTDFPLYFVIMSRLCQDYDTIGPEGGSLKSKLVPLVQATFPENAVTKRVKLALQAQPVPDELVTKLLGNQATFSPIVTVEPRRRKFHRPIGLRIPLPPSWTDNPRDSGEGDTTSLRLLCSVIGGTDQAQWEDITGTTKLVYANECANFTTNVSARFWLSDCPRTAEAVNFATLLYKELTAVPYMAKFVIFAKMNDPREGRLRCYCMTDDKVDKTLEQHENFVEVARSRDIEVLEGMSLFAELSGNLVPVKKAAQQRSFHFQSFRENRLAMPVKVRDSSREPGGSLSFLRKAMKYEDTQHILCHLNITMPPCAKGSGAEDRRRTPTPLALRYSILSESTPGSLSGTEQAEMKMAVISEHLGLSWAELARELQFSVEDINRIRVENPNSLLEQSVALLNLWVIREGQNANMENLYTALQSIDRGEIVNMLEGSGRQSRNLKPDRRHTDRDYSLSPSQMNGYSSLQDELLSPASLGCALSSPLRADQYWNEVAVLDAIPLAATEHDTMLEMSDMQVWSAGLTPSLVTAEDSSLECSKAEDSDATGHEWKLEGALSEEPRGPELGSLELVEDDTVDSDATNGLIDLLEQEEGQRSEEKLPGSKRQDDATGAGQDSENEVSLVSGHQRGQARITHSPTVSQVTERSQDRLQDWDADGSIVSYLQDAAQGSWQEEVTQGPHSFQGTSTMTEGLEPGGSQEYEKVLVSVSEHTWTEQPEAESSQADRDRRQQGQEEQVQEAKNTFTQVVQGNEFQNIPGEQVTEEQFTDEQGNIVTKKIIRKVVRQIDLSSADAAQEHEEDHTSTPNP

SEQ ID NO: 834 - protein, 1880 aa, Homo Sapiens
MPYSVGFREADAATSFLRAARSGNLDKALDHLRNGVDINTCNQNGLNGLHLASKEGHVKMVVELLHKEIILETTTKKGNTALHIAALAGQDEVVRELVNYGANVNAQSQKGFTPLYMAAQENHLEVVKFLLENGANQNVATEDGFTPLAVALQQGHENVVAHLINYGTKGKVRLPALHIAARNDDTRTAAVLLQNDPNPDVLSKTGFTPLHIAAHYENLNVAQLLLNRGASVNFTPQNGITPLHIASRRGNVIMVRLLLDRGAQIETKTKDELTPLHCAARNGHVRISEILLDHGAPIQAKTKNGLSPIHMAAQGDHLDCVRLLLQYDAEIDDITLDHLTPLHVAAHCGHHRVAKVLLDKGAKPNSRALNGFTPLHIACKKNHVRVMELLLKTGASIDAVTESGLTPLHVASFMGHLPIVKNLLQRGASPNVSNVKVETPLHMAARAGHTEVAKYLLQNKAKVNAKAKDDQTPLHCAARIGHTNMVKLLLENNANPNLATTAGHTPLHIAAREGHVETVLALLEKEASQACMTKKGFTPLHVAAKYGKVRVAELLLERDAHPNAAGKNGLTPLHVAVHHNNLDIVKLLLPRGGSPHSPAWNGYTPLHIAAKQNQVEVARSLLQYGGSANAESVQGVTPLHLAAQEGHAEMVALLLSKQANGNLGNKSGLTPLHLVAQEGHVPVADVLIKHGVMVDATTRMGYTPLHVASHYGNIKLVKFLLQHQADVNAKTKLGYSPLHQAAQQGHTDIVTLLLKNGASPNEVSSDGTTPLAIAKRLGYISVTDVLKVVTDETSFVLVSDKHRMSFPETVDEILDVSEDEGEELISFKAERRDSRDVDEEKELLDFVPKLDQVVESPAIPRIPCAMPETVVIRSEEQEQASKEYDEDSLIPSSPATETSDNISPVASPVHTGFLVSFMVDARGGSMRGSRHNGLRVVIPPRTCAAPTRITCRLVKPQKLSTPPPLAEEEGLASRIIALGPTGAQFLSPVIVEIPHFASHGRGDRELVVLRSENGSVWKEHRSRYGESYLDQILNGMDEELGSLEELEKKRVCRIITTDFPLYFVIMSRLCQDYDTIGPEGGSLKSKLVPLVQATFPENAVTKRVKLALQAQPVPDELVTKLLGNQATFSPIVTVEPRRRKFHRPIGLRIPLPPSWTDNPRDSGEGDTTSLRLLCSVIGGTDQAQWEDITGTTKLVYANECANFTTNVSARFWLSDCPRTAEAVNFATLLYKELTAVPYMAKFVIFAKMNDPREGRLRCYCMTDDKVDKTLEQHENFVEVARSRDIEVLEGMSLFAELSGNLVPVKKAAQQRSFHFQSFRENRLAMPVKVRDSSREPGGSLSFLRKAMKYEDTQHILCHLNITMPPCAKGSGAEDRRRTPTPLALRYSILSESTPGSLSGTEQAEMKMAVISEHLGLSWAELARELQFSVEDINRIRVENPNSLLEQSVALLNLWVIREGQNANMENLYTALQSIDRGEIVNMLEGSGRQSRNLKPDRRHTDRDYSLSPSQMNGYSSLQDELLSPASLGCALSSPLRADQYWNEVAVLDAIPLAATEHDTMLEMSDMQVWSAGLTPSLVTAEDSSLECSKAEDSDATGHEWKLEGALSEEPRGPELGSLELVEDDTVDSDATNGLIDLLEQEEGQRSEEKLPGSKRQDDATGAGQDSENEVSLVSGHQRGQARITHSPTVSQVTERSQDRLQDWDADGSIVSYLQDAAQGSWQEEVTQGPHSFQGTSTMTEGLEPGGSQEYEKVLVSVSEHTWTEQPEAESSQADRDRRQQGQEEQVQEAKNTFTQVVQGNEFQNIPGEQVTEEQFTDEQGNIVTKKIIRKVVRQIDLSSADAAQEHEEVELRGSGLQPDLIEGRKGAQIVKRASLKRGKQ

SEQ ID NO: 835 - protein, 1881 aa, Homo Sapiens
MPYSVGFREADAATSFLRAARSGNLDKALDHLRNGVDINTCNQNGLNGLHLASKEGHVKMVVELLHKEIILETTTKKGNTALHIAALAGQDEVVRELVNYGANVNAQSQKGFTPLYMAAQENHLEVVKFLLENGANQNVATEDGFTPLAVALQQGHENVVAHLINYGTKGKVRLPALHIAARNDDTRTAAVLLQNDPNPDVLSKTGFTPLHIAAHYENLNVAQLLLNRGASVNFTPQNGITPLHIASRRGNVIMVRLLLDRGAQIETKTKDELTPLHCAARNGHVRISEILLDHGAPIQAKTKNGLSPIHMAAQGDHLDCVRLLLQYDAEIDDITLDHLTPLHVAAHCGHHRVAKVLLDKGAKPNSRALNGFTPLHIACKKNHVRVMELLLKTGASIDAVTESGLTPLHVASFMGHLPIVKNLLQRGASPNVSNVKVETPLHMAARAGHTEVAKYLLQNKAKVNAKAKDDQTPLHCAARIGHTNMVKLLLENNANPNLATTAGHTPLHIAAREGHVETVLALLEKEASQACMTKKGFTPLHVAAKYGKVRVAELLLERDAHPNAAGKNGLTPLHVAVHHNNLDIVKLLLPRGGSPHSPAWNGYTPLHIAAKQNQVEVARSLLQYGGSANAESVQGVTPLHLAAQEGHAEMVALLLSKQANGNLGNKSGLTPLHLVAQEGHVPVADVLIKHGVMVDATTRMGYTPLHVASHYGNIKLVKFLLQHQADVNAKTKLGYSPLHQAAQQGHTDIVTLLLKNGASPNEVSSDGTTPLAIAKRLGYISVTDVLKVVTDETSFVLVSDKHRMSFPETVDEILDVSEDEGEELISFKAERRDSRDVDEEKELLDFVPKLDQVVESPAIPRIPCAMPETVVIRSEEQEQASKEYDEDSLIPSSPATETSDNISPVASPVHTGFLVSFMVDARGGSMRGSRHNGLRVVIPPRTCAAPTRITCRLVKPQKLSTPPPLAEEEGLASRIIALGPTGAQFLSPVIVEIPHFASHGRGDRELVVLRSENGSVWKEHRSRYGESYLDQILNGMDEELGSLEELEKKRVCRIITTDFPLYFVIMSRLCQDYDTIGPEGGSLKSKLVPLVQATFPENAVTKRVKLALQAQPVPDELVTKLLGNQATFSPIVTVEPRRRKFHRPIGLRIPLPPSWTDNPRDSGEGDTTSLRLLCSVIGGTDQAQWEDITGTTKLVYANECANFTTNVSARFWLSDCPRTAEAVNFATLLYKELTAVPYMAKFVIFAKMNDPREGRLRCYCMTDDKVDKTLEQHENFVEVARSRDIEVLEGMSLFAELSGNLVPVKKAAQQRSFHFQSFRENRLAMPVKVRDSSREPGGSLSFLRKAMKYEDTQHILCHLNITMPPCAKGSGAEDRRRTPTPLALRYSILSESTPGSLSGTEQAEMKMAVISEHLGLSWAELARELQFSVEDINRIRVENPNSLLEQSVALLNLWVIREGQNANMENLYTALQSIDRGEIVNMLEGSGRQSRNLKPDRRHTDRDYSLSPSQMNGYSSLQDELLSPASLGCALSSPLRADQYWNEVAVLDAIPLAATEHDTMLEMSDMQVWSAGLTPSLVTAEDSSLECSKAEDSDATGHEWKLEGALSEEPRGPELGSLELVEDDTVDSDATNGLIDLLEQEEGQRSEEKLPGSKRQDDATGAGQDSENEVSLVSGHQRGQARITHSPTVSQVTERSQDRLQDWDADGSIVSYLQDAAQGSWQEEVTQGPHSFQGTSTMTEGLEPGGSQEYEKVLVSVSEHTWTEQPEAESSQADRDRRQQGQEEQVQEAKNTFTQVVQGNEFQNIPGEQVTEEQFTDEQGNIVTKKIIRKVVRQIDLSSADAAQEHEEVTVEGPLEDPSELEVDIDYFMKHSKDHTSTPNP

SEQ ID NO: 836 - protein, 109 aa, Homo Sapiens
MWTFVTQLLVTLVLLSFFLVSCQNVMHIVRGSLCFVLKHIHQELDKELGESEGLSDDEETISTRVVRRRVFLKGNEFQNIPGEQVTEEQFTDEQGNIVTKKDHTSTPNP

SEQ ID NO: 837 - protein, 131 aa, Homo Sapiens
MWTFVTQLLVTLVLLSFFLVSCQNVMHIVRGSLCFVLKHIHQELDKELGESEGLSDDEETISTRVVRRRVFLKGNEFQNIPGEQVTEEQFTDEQGNIVTKKIIRKVVRQIDLSSADAAQEHEEDHTSTPNP

SEQ ID NO: 838 - protein, 155 aa, Homo Sapiens
MWTFVTQLLVTLVLLSFFLVSCQNVMHIVRGSLCFVLKHIHQELDKELGESEGLSDDEETISTRVVRRRVFLKGNEFQNIPGEQVTEEQFTDEQGNIVTKKIIRKVVRQIDLSSADAAQEHEEVELRGSGLQPDLIEGRKGAQIVKRASLKRGKQ

SEQ ID NO: 839 - protein, 156 aa, Homo Sapiens
MWTFVTQLLVTLVLLSFFLVSCQNVMHIVRGSLCFVLKHIHQELDKELGESEGLSDDEETISTRVVRRRVFLKGNEFQNIPGEQVTEEQFTDEQGNIVTKKIIRKVVRQIDLSSADAAQEHEEVTVEGPLEDPSELEVDIDYFMKHSKDHTSTPNP

SEQ ID NO: 840 - protein, 113 aa, Homo Sapiens
MWTFVTQLLVTLVLLSFFLVSCQNVMHIVRGSLCFVLKHIHQELDKELGESEGLSDDEETISTRVVRRRVFLKGNEFQNIPGEQVTEEQFTDEQGNIVTKKVELRGSGLQPDL

SEQ ID NO: 841 - protein, 177 aa, Homo Sapiens
  misc_feature (1)..(1): Xaa can be any naturally occurring amino acid
XEDTQHILCHLNITMPPCAKGSGAEDRRRTPTPLALRYSILSESTPGSLSGTEQAEMKMAVISEHLGLSWAELARELQFSVEDINRIRVENPNSLLEQSVALLNLWVIREGQNANMENLYTALQSIDRGEIVNMLEGSGRQSRNLKPDRRHTDRDYSLSPSQMNGGRSEVRREAARF

SEQ ID NO: 842 - protein, 1040 aa, Homo Sapiens
  misc_feature (1)..(1): Xaa can be any naturally occurring amino acid
XIKHGVMVDATTRMGYTPLHVASHYGNIKLVKFLLQHQADVNAKTKLGYSPLHQAAQQGHTDIVTLLLKNGASPNEVSSDGTTPLAIAKRLGYISVTDVLKVVTDETSFVLVSDKHRMSFPETVDEILDVSEDEGTAHITIMGEELISFKAERRDSRDVDEEKELLDFVPKLDQVVESPAIPRIPCAMPETVVIRSEEQEQASKEYDEDSLIPSSPATETSDNISPVASPVHTGFLVSFMVDARGGSMRGSRHNGLRVVIPPRTCAAPTRITCRLVKPQKLSTPPPLAEEEGLASRIIALGPTGAQFLSPVIVEIPHFASHGRGDRELVVLRSENGSVWKEHRSRYGESYLDQILNGMDEELGSLEELEKKRVCRIITTDFPLYFVIMSRLCQDYDTIGPEGGSLKSKLVPLVQATFPENAVTKRVKLALQAQPVPDELVTKLLGNQATFSPIVTVEPRRRKFHRPIGLRIPLPPSWTDNPRDSGEGDTTSLRLLCSVIGGTDQAQWEDITGTTKLVYANECANFTTNVSARFWLSDCPRTAEAVNFATLLYKELTAVPYMAKFVIFAKMNDPREGRLRCYCMTDDKVDKTLEQHENFVEVARSRDIEVLEGMSLFAELSGNLVPVKKAAQQRSFHFQSFRENRLAMPVKVRDSSREPGGSLSFLRKAMKYEDTQHILCHLNITMPPCAKGSGAEDRRRTPTPLALRYSILSESTPGSLSGTEQAEMKMAVISEHLGLSWAELARELQFSVEDINRIRVENPNSLLEQSVALLNLWVIREGQNANMENLYTALQSIDRGEIVNMLEGSGRQSRNLKPDRRHTDRDYSLSPSQMNGHQRGQARITHSPTVSQVTERSQDRLQDWDADGSIVSYLQDAAQGSWQEEVTQGPHSFQGTSTMTEGLEPGGSQEYEKVLVSVSEHTWTEQPEAESSQADRDRRQQGQEEQVQEAKNTFTQVVQGNEFQNIPGEQVTEEQFTDEQGNIVTKKIIRKVVRQIDLSSADAAQEHEEVELRGSGLQPDLIEGRKGAQIVKRASLKRGKQ

SEQ ID NO: 843 - protein, 553 aa, Homo Sapiens
  misc_feature (1)..(1): Xaa can be any naturally occurring amino acid
XTSLRLLCSVIGGTDQAQWEDITGTTKLVYANECANFTTNVSARFWLSDCPRTAEAVNFATLLYKELTAVPYMAKFVIFAKMNDPREGRLRCYCMTDDKVDKTLEQHENFVEVARSRDIEVLEGMSLFAELSGNLVPVKKAAQQRSFHFQSFRENRLAMPVKVRDSSREPGGSLSFLRKAMKYEDTQHILCHLNITMPPCAKGSGAEDRRRTPTPLALRYSILSESTPGSLSGTEQAEMKMAVISEHLGLSWAELARELQFSVEDINRIRVENPNSLLEQSVALLNLWVIREGQNANMENLYTALQSIDRGEIVNMLEGSGRQSRNLKPDRRHTDRDYSLSPSQMNGHQRGQARITHSPTVSQVTERSQDRLQDWDADGSIVSYLQDAAQGSWQEEVTQGPHSFQGTSTMTEGLEPGGSQEYEKVLVSVSEHTWTEQPEAESSQADRDRRQQGQEEQVQEAKNTFTQVVQGNEFQNIPGEQVTEEQFTDEQGNIVTKKIIRKVVRQIDLSSADAAQEHEEVTVEGPLEDPSELEVDIDYFMKHSKDHTSTPNP

SEQ ID NO: 844 - protein, 133 aa, Homo Sapiens
IGRRVNTRARNHVGRVALHWAAGAGHEQAVRLLLEHEAAVDEEDAVGALTEEGNTALHLAAGRGHMAVLQRLVDIGLDLEEQNAEGLTALHSAAGGSHPDCVQLLLRAGSTVNALTQVARPSQDCGRLLAAEP

SEQ ID NO: 845 - protein, 423 aa, Homo Sapiens
MNALLLSAWFGHLRILQILVNSGAKIHCESKDGLTLLHCAAQKGHVPVLAFIMEDLEDVALDHVDKLGRTAFHRAAEHGQLDALDFLVGSGCDHNVKDKEGNTALHLAAGRGHMAVLQRLVDIGLDLEEQNAEGLTALHSAAGGSHPDCVQLLLRAGSTVNALTQKNLSCLHYAALSGSEDVSRVLIHAGGCANVVDHQGASPLHLAVRHNFPALVRLLINSDSDVNAVDNRQQTPLHLAAEHAWQDIADMLLIAGVDLNLRDKQGKTALAVAVRSNHVSLVDMIIKADRFYRWEKDHPSDPSGKSLSFKQDHRQETQQLRSVLWRLASRYLQPREWKKLAYSWEFTEAHVDAIEQQWTGTRSYQEHGHRMLLIWLHGVATAGENPSKALFEGLVAIGRRDLAENIRKKANAAPSAPRRCTAM

SEQ ID NO: 846 - protein, 399 aa, Homo Sapiens
MNALLLSAWFGHLRILQILVNSGAKIHCESKDGLTLLHCAAQKGHVPVLAFIMEDLEDVALDHVDKLGRTAFHRAAEHGQLDALDFLVGSGCDHNVKDKEGNTALHLAAGRGHMAVLQRLVDIGLDLEEQNAEGLTALHSAAGGSHPDCVQLLLRAGSTVNALTQKNLSCLHYAALSGSEDVSRVLIHAGGCANVVDHQGASPLHLAVRHNFPALVRLLINSDSDVNAVDNRQQTPLHLAAEHAWQDIADMLLIAGVDLNLRDKDHPSDPSGKSLSFKQDHRQETQQLRSVLWRLASRYLQPREWKKLAYSWEFTEAHVDAIEQQWTGTRSYQEHGHRMLLIWLHGVATAGENPSKALFEGLVAIGRRDLAGWSTMARSQLTATSASRVQMILVPQPPE

SEQ ID NO: 847 - protein, 423 aa, Homo Sapiens; identical to SEQ ID NO: 845

SEQ ID NO: 848 - protein, 181 aa, Homo Sapiens
MNALLLSAWFGHLRILQILVNSGAKIHCESKDGLTLLHCAAQKGHVPVLAFIMEDLEDVALDHVDKLGRTAFHRAAEHGQLDALDFLVGSGCDHNVKDKEGNTALHLAAGRGHMAVLQRLVDIGLDLEEQNAEGLTALHSAAGGSHPDCVQLLLRAGSTVNALTQVARPSQDCGRLLAAEP

SEQ ID NO: 849 - protein, 123 aa, Homo Sapiens
MQEELAWETDGLLPLERQLHEAARQNNVGRMQELIGRRVNTRARNHVGRVALHWAAGAGHEQAVRLLLEHEAAVDEEDAFGMNALLLSAWFGHLRILQILVNSGAKIHCESKPKKAMCLCWRS

SEQ ID NO: 850 - protein, 522 aa, Homo Sapiens
MQEELAWETDGLLPLERQLHEAARQNNVGRMQELIGRRVNTRARNHVGRVALHWAAGAGHEQAVRLLLEHEAAVDEEDAVGALTEARLCFGMNALLLSAWFGHLRILQILVNSGAKIHCESKDGLTLLHCAAQKGHVPVLAFIMEDLEDVALDHVDKLGRTAFHRAAEHGQLDALDFLVGSGCDHNVKDKEGNTALHLAAGRGHMAVLQRLVDIGLDLEEQNAEGLTALHSAAGGSHPDCVQLLLRAGSTVNALTQKNLSCLHYAALSGSEDVSRVLIHAGGCANVVDHQGASPLHLAVRHNFPALVRLLINSDSDVNAVDNRQQTPLHLAAEHAWQDIADMLLIAGVDLNLRDKQGKTALAVAVRSNHVSLVDMIIKADRFYRWEKDHPSDPSGKSLSFKQDHRQETQQLRSVLWRLASRYLQPREWKKLAYSWEFTEAHVDAIEQQWTGTRSYQEHGHRMLLIWLHGVATAGENPSKALFEGLVAIGRRDLAGWSTMARSQLTATSASRVQMILVPQPPE

SEQ ID NO: 851 - protein, 217 aa, Homo Sapiens [sequence omitted]

SEQ ID NO: 852 - protein, 300 aa, Homo Sapiens
MAAAAGDADDEPRSGHSSSEGECAVAPEPLTDAEGLFSFADFGSALGGGGAGLSGRASGGAQSPLRYLHVLWQQDAEPRDELRCKIPAGRLRRAARPHRRLGPTGKEVHALKRLRDSANANDVETVQQLLEDGADPCAADDKGRTALHFASCNGNDQIVQLLLDHGADPNQRDGLGNTPLHLAACTNHVPVITTLLRGGARVDALDRAGRTPLHLAKSKLNILQEGHAQCLEAVRLEVKQIIHMLREYLERLGQHEQRERLDDLCTRLQMTSTKEQVDEVTDLLASFTSLSLQMQSMEKR

SEQ ID NO: 853 - protein, 284 aa, Homo Sapiens
MAAAAGDADDEPRSGHSSSEGECAVAPEPLTDAEGLFSFADFGSALGGGGAGLSGRASGGAQSPLRYLHVLWQQDAEPRDELRCKIPAGRLRRAARPHRRLGPTGKEVHVQQLLEDGADPCAADDKGRTALHFASCNGNDQIVQLLLDHGADPNQRDGLGNTPLHLAACTNHVPVITTLLRGGARVDALDRAGRTPLHLAKSKLNILQEGHAQCLEAVRLEVKQIIHMLREYLERLGQHEQRERLDDLCTRLQMTSTKEQVDEVTDLLASFTSLSLQMQSMEKR

SEQ ID NO: 854 - protein, 90 aa, Homo Sapiens
MARIPVQLMTRAAQLYTLPHAMAMTRLLLLDHGADPNQRDGLGNTPLHLAACTNHVPVITTLLRGGARVDALDRAGRTPLHLAKSKLNIL

SEQ ID NO: 855 - protein, 156 aa, Homo Sapiens
MARIPVQLMTRAAQLYTLPHAMAMTRLLLLDHGADPNQRDGLGNTPLHLAACTNHVPVITTLLRGGARVDALDRAGRTPLHLAKSKLNILQEGHAQCLEAVRLEVKQIIHMLREYLERLGQHEQRERLDDLCTRLQMTSTKEQVDEVTDLLASFTS

SEQ ID NO: 856 - protein, 107 aa, Homo Sapiens
MPMMWKQCSCSWTMVLILTSEMGWGTRHCTWRPAPTTFLSSPHCYEEIIHMLREYLERLGQHEQRERLDDLCTRLQMTSTKEQVDEVTDLLASFTSLSLQMQSMEKR

SEQ ID NO: 857 - protein, 180 aa, Homo Sapiens
MPMMWKQQLLEDGADPCAADDKGRTALHFASCNGNDQIVQLLLDHGADPNQRDGLGNTPLHLAACTNHVPVITTLLRGGARVDALDRAGRTPLHLAKSKLNILQEGHAQCLEAVRLEVKQIIHMLREYLERLGQHEQRERLDDLCTRLQMTSTKEQVDEVTDLLASFTSLSLQMQSMEKR

SEQ ID NO: 858 - protein, 208 aa, Homo Sapiens
  misc_feature (1)..(1): Xaa can be any naturally occurring amino acid
XRDELRCKIPAGRLRRAARPHRRLGPTGKEVHALKRLRDSANANDVETVQQLLEDGADPCAADDKGRTALHFASCNGNDQIVQLLLDHGADPNQRDGLGNTPLHLECSPQLVPAGARVDALDRAGRTPLHLAKSKLNILQEGHAQCLEAVRLEVKQIIHMLREYLERLGQHEQRERLDDLCTRLQMTSTKEQVDEVTDLLASFTSLSL

SEQ ID NO: 859 - protein, 178 aa, Homo Sapiens
  misc_feature (1)..(1): Xaa can be any naturally occurring amino acid
XRLRRPGPRGAVAMAAAAGDADDEPRSGHSSSEGECAVAPEPLTDAEGLFSFADFGSALGGGGAGLSGRASGGAQSPLRYLHVLWQQDAEPRDELRCKIPAGRLRRAARPHRRLGPTGKEVHALKRLRDSANANDVETVQQLLEDGADPCAADDKGRTALHFASCNGNDQIAAPGPWC

SEQ ID NO: 860 - protein, 345 aa, Homo Sapiens
MTRGRAWGMRRAAAGAGGARAAGPTGGASRLHPNAGRRSGARAGAQGCGGPRVGSADSRALPAQPLACARGRSQRLVCDPKAASALPDLAPDVFVLRVRLEETGEMFRVANCRGDMTVRELKEELDLMVGIPFNLQRLQYLDEGVLMDDTTLKFHDVVPGGIISLCIWHHDGWTELVLAAVEGDPSKLSCLGLTEDSFYRTANSEHFEGEKWKHWTSQRAFVALYVASHRGHFDAVQYLLEHGASCLSRSPLGRTPLHVAAAMGRSDCIILLLQHGASIHDRDAKGETPISIAHRLNHTLSERQMVLLHRIAKSGIRDLNDLVMKNALQRVKSGFRSEKMTMTPH

SEQ ID NO: 861 - protein, 933 aa, Homo Sapiens
MRMAATAWAGLQGPPLPTLCPAVRTGLYCRDQAHAERWAMTSETSSGSHCARSRMLRRRAQEEDSTVLIDVSPPEAEKRGSYGSTAHASEPGGQQAAACRAGSPAKPRIADFVLVWEEDLKLDRQQDSAARDRTDMHRTWRETFLDNLRAAGLCVDQQDVQDGNTTVHYALLSASWAVLCYYAEDLRLKLPLQELPNQASNWSAGLLAWLGIPNVLLEVVPDVPPEYYSCRFRVNKLPRFLGSDNQDTFFTSTKRHQILFEILAKTPYGHEKKNLLGIHQLLAEGVLSAAFPLHDGPFKTPPEGPQAPRLNQRQVLFQHWARWGKWNKYQPLDHVRRYFGEKVALYFAWLGFYTGWLLPAAVVGTLVFLVGCFLVFSDIPTQELCGSKDSFEMCPLCLDCPFWLLSSACALAQAGRLFDHGGTVFFSLFMALWAVLLLEYWKRKSATLAYRWDCSDYEDTEERPRPQFAASAPMTAPNPITGEDEPYFPERSRARRMLAGSVVIVVMVAVVVMCLVSIILYRAIMAIVVSRSGNTLLAAWASRIASLTGSVVNLVFILILSKIYVSLAHVLTRWEMHRTQTKFEDAFTLKVFIFQFVNFYSSPVYIAFFKGRFVGYPGNYHTLFGVRNEECAAGGCLIELAQELLVIMVGKQVINNMQEVLIPKLKGWWQKFRLRSKKRKAGASAGASQGPWEDDYELVPCEGLFDEYLEMVLQFGFVTIFVAACPLAPLFALLNNWVEIRLDARKFVCEYRRPVAERAQDIGIWFHILAGLTHLAVISNAFLLAFSSDFLPRAYYRWTRAHDLRGFLNFTLARAPSSFAAAHNRTCRYRAFRDDDGHYSQTYWNLLAIRLAFVIVFEHVVFSVGRLLDLLVPDIPESVEIKVKREYYLAKQALAENEVLFGTNGTKDEQPEGSELSSHWTPFTVPKASQLQQ

SEQ ID NO: 862 - protein, 883 aa, Homo Sapiens
MRMAATAWAGLQGPPLPTLCPAVRTGLYCRDQAHAERWAMTSETSSGSHCARSRMLRRRAQEEDSTVLIDVSPPEAEKRGSYGSTAHASEPGGQQAAACRAGSPAKPRIDFVLVWEEDLKLDRQQDSAARDRTDMHRTWRETFLDNLRAAGLCVDQQDVQDGNTTVHYALLSASWAVLCYYAEDLRLKLPLQELPNQASNWSAGLLAWLGIPNVLLEVVPDVPPEYYSCRFRVNKLPRFLGSDNQDTFFTSTKRHQILFEILAKTPYGHEKKNLLGIHQLLAEGVLSAAFPLHDGPFKTPPEGPQAPRLNQRQVLFQHWARWGKWNKYQPLDHVRRYFGEKVALYFAWLGFYTGWLLPAAVVGTLVFLVGCFLVFSDIPTQELCGSKDSFEMCPLCLDCPFWLLSSACALAQAGRLFDHGGTVFFSLFMALWAVLLLEYWKRKSATLAYRWDCSDYEDTEERPRPQFAASAPMTAPNPITGEDEPYFPERSRARRMLAGSVVIVVMVAVVVMCLVSIILYRAIMAIVVSRSGNTLLAAWASRIASLTGSVVNLVFILILSKIYVSLAHVLTRWEMHRTQTKFEDAFTLKVFIFQFVNFYSSPVYIAFFKGRFVGYPGNYHTLFGVRNEECAAGGCLIELAQELLVIMVGKQVINNMQEVLIPKLKGWWQKFRLRSKKRKAGASAGASQGPWEDDYELVPCEGLFDEYLEMVLQFGFVTIFVAACPLAPLFALLNNWVEIRLDARKFVCEYRRPVAERAQDIGIWFHILAGLTHLAVISNAFLLAFSSDFLPRAYYRWTRAHDLRGFLNFTLARAPSSFAAAHNRTCRYRAFRDDDGHYSQTYWNLLAIRLAFVIVFEVAEAPAGSPIHGMRPRPCALPNSSTW

SEQ ID NO: 863 - protein, 179 aa, Homo Sapiens
MRMAATAWAGLQGPPLPTLCPAVRTGLYCRDQAHAERWAMTSETSSGSHCARSRMLRRRAQEEDSTVLIDVSPPEAEKRGSYGSTAHASEPGGQQAAACRAGSPAKPRIDFVLVWEEDLKLDRQQDSAARDRTDMHRTWRETFLDNLRAAGLCVDQVRGGCHGQGPRPCIHSVTHDLAA

SEQ ID NO: 864 - protein, 186 aa, Homo Sapiens
  misc_feature (1)..(1): Xaa can be any naturally occurring amino acid
XAGGAFRGLRADGGGEPGRDPLPAVLQFGFVTIFVAACPLAPLFALLNNWVEIRLDARKFVCEYRRPVAERAQDIGIWFHILAGLTHLAVISNAFLLAFSSDFLPRAYYRWTRAHDLRGFLNFTLARAPSSFAAAHNRTCRYRAFRDDDGHYSQTYWNLLAIRLAFVIVFEHVVFSVGRLLDLLVP

SEQ ID NO: 865 - protein, 680 aa, Homo Sapiens
MVPGVPGAVLTLCLWLAASSGCLAAGPGAAAARRLDESLSAGSVQRARCASRCLSLQITRISAFFQHFQNNGSLVWCQNHKQCSKCLEPCKESGDLRKHQCQSFCEPLFPKKSYECLTSCEFLKYILLVKQGDCPAPEKASGFAAACVESCEVDNECSGVKKCCSNGCGHTCQVPKTLYKGVPLKPRKELRFTELQSGQLEVKWSSKFNISIEPVIYVVQRRWNYGIHPSEDDATHWQTVAQTTDERVQLTDIRPSRWYQFRVAAVNVHGTRGFTAPSKHFRSSKDPSAPPAPANLRLANSTVNSDGSVTVTIVWDLPEEPDIPVHHYKVFWSWMVSSKSLVPTKKKRRKTTDGFQNSVILEKLQPDCDYVVELQAITYWGQTRLKSAKVSLHFTSTHATNNKEQLVKTRKGGIQTQLPFQRRRPTRPLEVGAPFYQDGQLQVKVYWKKTEDPTVNRYHVRWFPEACAHNRTTGSEASSGMTHENYIILQDLSFSCKYKVTVQPIRPKSHSKAEAVFFTTPPCSALKGKSHKPVGCLGEAGHVLSKVLAKPENLSASFIVQDVNITGHFSWKMAKANLYQPMTGFQVTWAEVTTESRQNSLPNSIISQSQILPSDHYVLTVPNLRPSTLYRLEVQVLTPGGEGPATIKTFRTPELPPSSAHRSHLKHRHPHHYKPSPERY

SEQ ID NO: 866 - protein, 564 aa, Homo Sapiens
MATAERRALGIGFQWLSLATLVLICAGQGGRREDGGPACYGGFDLYFILDKSGSVLHHWNEIYYFVEQLAHKFISPQLRMSFIVFSTRGTTLMKLTEDREQIRQGLEELQKVLPGGDTYMHEGFERASEQIYYENRQGYRTASVIIALTDGELHEDLFFYSEREANRSRDLGAIVYCVGVKDFNETQLARIADSKDHVFPVNDGFQALQGIIHSILKKSCIEILAAEPSTICAGESFQVVVRGNGFRHARNVDRVLCSFKINDSVTLNEKPFSVEDTYLLCPAPILKEVGMKAALQVSMNDGLSFISSSVIITTTHCSDGSILAIALLILFLLLALALLWWFWPLCCTVIIKEVPPPPAEESEEEDDDGLPKKKWPTVDASYYGGRGVGGIKRMEVRWGEKGSTEEGAKLEKAKNARVKMPEQEYEFPEPRNLNNNMRRPSSPRKWYSPIKGKLDALWVLLRKGYDRVSVMRPQPGDTGRCINFTRVKNNQPAKYPLNNAYHTSSPPPAPIYTPPPPAPHCPPPPPSAPTPPIPSPPSTLPPPPQAPPPNRAPPPSRPPPRPSV

SEQ ID NO: 867 - protein, 333 aa, Homo Sapiens
MATAERRALGIGFQWLSLATLVLICAGQGGRREDGGPACYGGFDLYFILDKSGSVLHHWNEIYYFVEQLAHKFISPQLRMSFIVFSTRGTTLMKLTEDREQIRQGLEELQKVLPGGDTYMHEGFERASEQIYYENRQGYRTASVIIALTDGELHEDLFFYSEREANRSRDLGAIVYCVGVKDFNETQLARIADSKDHVFPVNDGFQALQGIIHSILKKSCIEILAAEPSTICAGESFQVVVRGNGFRHARNVDRVLCSFKINDSVTLNEKPFSVEDTYLLCPAPILKEVGMKAALQVSMNDGLSFISSSVIITTTHCSLHKIASGPTTAACME

SEQ ID NO: 868 - protein, 368 aa, Homo Sapiens
MATAERRALGIGFQWLSLATLVLICAGQGGRREDGGPACYGGFDLYFILDKSGSVLHHWNEIYYFVEQLAHKFISPQLRMSFIVFSTRGTTLMKLTEDREQIRQGLEELQKVLPGGDTYMHEGFERASEQIYYENRQGYRTASVIIALTDGELHEDLFFYSEREANRSRDLGAIVYCVGVKDFNETQLARIADSKDHVFPVNDGFQALQGIIHSILKKSCIEILAAEPSTICAGESFQVVVRGNGFRHARNVDRVLCSFKINDSVTLNEKPFSVEDTYLLCPAPILKEVGMKAALQVSMNDGLSFISSSVIITTTHCSDGSILAIALLILFLLLALALLWWFWPLCCTVIIKEVPPPPAEESEENKIK

SEQ ID NO: 869 - protein, 179 aa, Homo Sapiens
  misc_feature (1)..(1): Xaa can be any naturally occurring amino acid
XDLGAIVYCVGVKDFNETQLARIADSKDHVFPVNDGFQALQGIIHSILKKSCIEILAAEPSTICAGESFQVVVRGNGFRHARNVDRVLCSFKINDSVTLNEKPFSVEDTYLLCPAPILKEVGMKAALQVSMNDGLSFISSSVIITTTHCDGLWFYIQSLETVKDHRNIRVRNSDLKYCL

SEQ ID NO: 870 - protein, 52 aa, Homo Sapiens
MQSPWKILTVAPLFLLLSLQSSASPANDDQSRPSLSNGHTCVASSAEKPQLS

SEQ ID NO: 871 - protein, 108 aa, Homo Sapiens
MQSPWKILTVAPLFLLLSLQSSASPANDDQSRPSLSNGHTCVEKLFLKTTCYLVIDKFGSDIIKLLSADMNADVVCHTLEFCKQNTGQPLCHLYPLPKETWKFTLQKA

SEQ ID NO: 872 - protein, 543 aa, Homo Sapiens
MQSPWKILTVAPLFLLLSLQSSASPANDDQSRPSLSNGHTCVEKLFLKTTCYLVIDKFGSDIIKLLSADMNADVVCHTLEFCKQNTGQPLCHLYPLPKETWKFTLQKARQIVKKSPILKYSRSGSDICSLPVLAKICQKIKLAMEQSVPFKDVDSDKYSVFPTLRGYHWRGRDCNDSDESVYPGRRPNNWDVHQDSNCNGIWGVDPKDGVPYEKKFCEGSQPRGIILLGDSAGAHFHISPEWITASQMSLNSFINLPTALTNELDWPQLSGATGFLDSTVGIKEKSIYLRLWKRNHCNHRDYQNISRNGASSRNLKKFIESLSRNKVLDYPAIVIYAMIGNDVCSGKSDPVPAMTTPEKLYSNVMQTLKHLNSHLPNGSHVILYGLPDGTFLWDNLHNRYHPLGQLNKDMTYAQLYSFLNCLQVSPCHGWMSSNKTLRTLTSERAEQLSNTLKKIAASEKFTNFNLFYMDFAFHEIIQEWQKRGGQPWQLIEPVDGFHPNEVALLLLADHFWKKVQLQWPQILGKENPFNPQIKQVFGDQGGH

SEQ ID NO: 873 - protein, 688 aa, Homo Sapiens
MQSPWKILTVAPLFLLLSLQSSASPANDDQSRPSLSNGHTCVGCVLVVSVIEQLAQVHNSTVQASMERLCSYLPEKLFLKTTCYLVIDKFGSDIIKLLSADMNADVVCHTLEFCKQNTGQPLCHLYPLPKETWKFTLQKARQIVKKSPILKYSRSGSDICSLPVLAKICQKIKLAMEQSVPFKDVDSDKYSVFPTLRGYHWRGRDCNDSDESVYPGRRPNNWDVHQDSNCNGIWGVDPKDGVPYEKKFCEGSQPRGIILLGDSAGAHFHISPEWITASQMSLNSFINLPTALTNELDWPQLSGATGFLDSTVGIKEKSIYLRLWKRNHCNHRDYQNISRNGASSRNLKKFIESLSRNKVLDYPAIVIYAMIGNDVCSGKSDPVPAMTTPEKLYSNVMQTLKHLNSHLPNGSHVILYGLPDGTFLWDNLHNRYHPLGQLNKDMTYAQLYSFLNCLQVSPCHGWMSSNKTLRTLTSERAEQLSNTLKKIAASEKFTNFNLFYMDFAFHEIIQEWQKRGGQPWQLIEPVDGFHPNERKSILLKGILMTSQTLDNQEWTQLTSWIKGNLTCDSRTREWLCCCWRIISGKRCSSSGPKSWERRIRSTPRLNRCLETKAGTEPLRSMHPWGAQGGRGLGKLIPQTLWGLPRHRPKGLFFSSIFAKCLSLNEEHIWTTVQCCVLPGSVTLPLFLK

SEQ ID NO: 874 - protein, 575 aa, Homo Sapiens
MQSPWKILTVAPLFLLLSLQSSASPANDDQSRPSLSNGHTCVGCVLVVSVIEQLAQVHNSTVQASMERLCSYLPEKLFLKTTCYLVIDKFGSDIIKLLSADMNADVVCHTLEFCKQNTGQPLCHLYPLPKETWKFTLQKARQIVKKSPILKYSRSGSDICSLPVLAKICQKIKLAMEQSVPFKDVDSDKYSVFPTLRGYHWRGRDCNDSDESVYPGRRPNNWDVHQDSNCNGIWGVDPKDGVPYEKKFCEGSQPRGIILLGDSAGAHFHISPEWITASQMSLNSFINLPTALTNELDWPQLSGATGFLDSTVGIKEKSIYLRLWKRNHCNHRDYQNISRNGASSRNLKKFIESLSRNKVLDYPAIVIYAMIGNDVCSGKSDPVPAMTTPEKLYSNVMQTLKHLNSHLPNGSHVILYGLPDGTFLWDNLHNRYHPLGQLNKDMTYAQLYSFLNCLQVSPCHGWMSSNKTLRTLTSERAEQLSNTLKKIAASEKFTNFNLFYMDFAFHEIIQEWQKRGGQPWQLIEPVDGFHPNEVALLLLADHFWKKVQLQWPQILGKENPFNPQIKQVFGDQGGH

SEQ ID NO: 875 - protein, 249 aa, Homo Sapiens
MPALGWAVAAILMLQTAMAEPSPGTLPRKAGVFSDLSNQELKAVHSFLWSKKELRLQPSSTTTMAKNTVFLIEMLLPKKYHVLRFLDKGERHPVREARAVIFFGDQEHPNVTEFAVGPLPGPCYMRALSPRPGYQSSWASRPISTAEYALLYHTLQEATKPLHQFFLNTTGFSFQDCHDRCLAFTDVAPRGVASGQRRSWLIIQRYVEGYFLHPTGLELLVDHGSTDAGHWAVEQVWYNGKFYGSPEEL

SEQ ID NO: 876 - protein, 751 aa, Homo Sapiens
MPALGWAVAAILMLQTAMAEPSPGTLPRKAGVFSDLSNQELKAVHSFLWSKKELRLQPSSTTTMAKNTVFLIEMLLPKKYHVLRFLDKGERHPVREARAVIFFGDQEHPNVTEFAVGPLPGPCYMRALSPRPGYQSSWASRPISTAEYALLYHTLQEATKPLHQFFLNTTGFSFQDCHDRCLAFTDVAPRGVASGQRRSWLIIQRYVEGYFLHPTGLELLVDHGSTDAGHWAVEQVWYNGKFYGSPEELARKYADGEVDVVVLEDPLPGGKGHDSTEEPPLFSSHKPRGDFPSPIHVSGPRLVQPHGPRFRLEGNAVLYGGWSFAFRLRSSSGLQVLNVHFGGERIAYEVSVQEAVALYGGHTPAGMQTKYLDVGWGLGSVTHELAPGIDCPETATFLDTFHYYDADDPVHYPRALCLFEMPTGVPLRRHFNSNFKGGFNFYAGLKGQVLVLRTTSTVYNYDYIWDFIFYPNGVMEAKMHATGYVHATFYTPEGLRHGTRLHTHLIGNIHTHLVHYRVDLDVAGTKNSFQTLQMKLENITNPWSPRHRVVQPTLEQTQYSWERQAAFRFKRKLPKYLLFTSPQENPWGHKRTYRLQIHSMADQVLPPGWQEEQAITWARYPLAVTKYRESELCSSSIYHQNDPWHPPVVFEQFLHNNENIENEDLVAWVTVGFLHIPHSEDIPNTATPGNSVGFLLRPFNFFPEDPSLASRDTVIVWPRDNGPNYVQRWIPEDRDCSMPPPFSYNGTYRPV

SEQ ID NO: 877 - protein, 770 aa, Homo Sapiens
MPALGWAVAAILMLQTAMAEPSPGTLPRKAGVFSDLSNQELKAVHSFLWSKKELRLQPSSTTTMAKNTVFLIEMLLPKKYHVLRFLDKGERHPVREARAVIFFGDQEHPNVTEFAVGPLPGPCYMRALSPRPGYQSSWASRPISTAEYALLYHTLQEATKPLHQFFLNTTGFSFQDCHDRCLAFTDVAPRGVASGQRRSWLIIQRYVEGYFLHPTGLELLVDHGSTDAGHWAVEQVWYNGKFYGSPEELARKYADGEVDVVVLEDPLPGGKGHDSTEEPPLFSSHKPRGDFPSPIHVSGPRLVQPHGPRFRLEGNAVLYGGWSFAFRLRSSSGLQVLNVHFGGERIAYEVSVQEAVALYGGHTPAGMQTKYLDVGWGLGSVTHELAPGIDCPETATFLDTFHYYDADDPVHYPRALCLFEMPTGVPLRRHFNSNFKGGFNFYAGLKGQVLVLRTTSTVYNYDYIWDFIFYPNGVMEAKMHATGYVHATFYTPEGLRHGTRLHTHLIGNIHTHLVHYRVDLDVAGTKNSFQTLQMKLENITNPWSPRHRVVQPTLEQTQYSWERQAAFRFKRKLPKYLLFTSPQENPWGHKRTYRLQIHSMADQVLPPGWQEEQAITWARTEGGQPRALSQAASPVPGRYPLAVTKYRESELCSSSIYHQNDPWHPPVVFEQFLHNNENIENEDLVAWVTVGFLHIPHSEDIPNTATPGNSVGFLLRPFNFFPEDPSLASRDTVIVWPRDNGPNYVQRWIPEDRDCSMPPPFSYNGTYRPV

SEQ ID NO: 878 - protein, 751 aa, Homo Sapiens; identical to SEQ ID NO: 876

SEQ ID NO: 879 - protein, 337 aa, Homo Sapiens
MPALGWAVAAILMLQTAMAEPSPGTLPRKAGVFSDLSNQELKAVHSFLWSKKELRLQPSSTTTMAKNTVFLIEMLLPKKYHVLRFLDKGERHPVREARAVIFFGDQEHPNVTEFAVGPLPGPCYMRALSPRPGYQSSWASRPISTAEYALLYHTLQEATKPLHQFFLNTTGFSFQDCHDRCLAFTDVAPRGVASGQRRSWLIIQRYVEGYFLHPTGLELLVDHGSTDAGHWAVEQVWYNGKFYGSPEELARKYADGEVDVVVLEDPLPGGKGHDSTEEPPLFSSHKPRGDFPSPIHVSGPRLVQPHGPRFRLEGNAVLYGGWSFAFRLRSSSGLQVL

SEQ ID NO: 880 - protein, 751 aa, Homo Sapiens; identical to SEQ ID NO: 876

SEQ ID NO: 881 - protein, 756 aa, Homo Sapiens
MHLKIVLAFLALSLITIFALAYVLLTSPGGSSQPPHCPSVSHRAQPWPHPGQSQLFADLSREELTAVMRFLTQRLGPGLVDAAQAQPSDNCIFSVELQLPPKAAALAHLDRGSPPPAREALAIVLFGGQPQPNVSELVVGPLPHPSYMRDVTVERHGGPLPYHRRPVLRAEFTQMWRHLKEVELPKAPIFLSSTFNYNGSTLAAVHATPRGLRSGDRATWMALYHNISGVGLFLHPVGLELLLDHRALDPAHWTVQQVFYLGHYYADLGQLEREFKSGRLEVVRVPLPPPNGASSLRSRNSPGPLPPLQFSPQGSQYSVQGNLVVSSLWSFTFGHGVFSGLRIFDVRFQGERIAYEVSVQECVSIYGADSPKTMLTRYLDSSFGLGRNSRGLVRGVDCPYQATMVDIHILVGKGAVQLLPGAVCVFEEAQGLPLRRHHNYLQNHFYGGLASSALVVRSVSSVGNYDYIWDFVLYPNGALEGRVHATGYINTAFLKGGEEGLLFGNRVGERVLGTVHTHAFHFKLDLDVAGLKNWVVAEDVVFKPVAAPWNPEHWLQRPQLTRQVLGKEDLTAFSLGSPLPRYLYLASNQTNAWGHQRGYRIQIHSPLGIHIPLESDMERALSWGRYQLVVTQRKEEESQSSSIYHQNDIWTPTVTFADFINNETLLGEDLVAWVTASFLHIPHAEDIPNTVTLGNRVGFLLRPYNFFDEDPSIFSPGSVYFEKGQDAGLCSINPVACLPDLAACVPDLPPFSYHGF

SEQ ID NO: 882 - protein, 729 aa, Homo Sapiens
MHLKIVLAFLALSLITIFALAYVLLTSPGGSSQPPHCPSVSHRAQPWPHPGQSQLFADLSREELTAVMRFLTQRLGPGLVDAAQAQPSDNCIFSVELQLPPKAAALAHLDRGSPPPAREALAIVLFGGQPQPNVSELVVGPLPHPSYMRDVTVERHGGPLPYHRRPVLRAEFTQMWRHLKEVELPKAPIFLSSTFNYNGSTLAAVHATPRGLRSGDRATWMALYHNISGVGLFLHPVGLELLLDHRALDPAHWTVQQVFYLGHYYADLGQLEREFKSGRLEVVRVPLPPPNGASSLRSRNSPGPLPPLQFSPQGSQYSVQGNLVVSSLWSFTFGHGVFSGLRIFDVRFQGERIAYEVSVQECVSIYGADSPKTMLTRYLDSSFGLGRNSRGLVRGVDCPYQATMVDIHILVGKGAVQLLPGAVCVFEEAQGLPLRRHHNYLQNHFYGGLASSALVVRSVSSVGNYDYIWDFVLYPNGALEGRVHATGYINTAFLKGGEEGLLFGNRVGERVLGTVHTHAFHFKLDLDVAGLKNWVVAEDVVFKPVAAPWNPEHWLQRPQLTRQVLGKEDLTAFSLGSPLPRYLYLASNQTNAWGHQRGYQLVVTQRKEEESQSSSIYHQNDIWTPTVTFADFINNETLLGEDLVAWVTASFLHIPHAEDIPNTVTLGNRVGFLLRPYNFFDEDPSIFSPGSVYFEKGQDAGLCSINPVACLPDLAACVPDLPPFSYHGF

SEQ ID NO: 883 - protein, 763 aa, Homo Sapiens
MNQKTILVLLILAVITIFALVCVLLVGRGGDGGEPSQLPHCPSVSPSAQPWTHPGQSQLFADLSREELTAVMRFLTQRLGPGLVDAAQARPSDNCVFSVELQLPPKAAALAHLDRGSPPPAREALAIVFFGRQPQPNVSELVVGPLPHPSYMRDVTVERHGGPLPYHRRPVLFQEYLDIDQMIFNRELPQASGLLHHCCFYKHRGRNLVTMTTAPRGLQSGDRATWFGLYYNISGAGFFLHHVGLELLVNHKALDPARWTIQKVFYQGRYYDSLAQLEAQFEAGLVNVVLIPDNGTGGSWSLKSPVPPGPAPPLQFYPQGPRFSVQGSRVASSLWTFSFGLGAFSGPRIFDVRFQGERLVYEISLQEALAIYGGNSPAAMTTRYVDGGFGMGKYTTPLTRGVDCPYLATYVDWHFLLESQAPKTIRDAFCVFEQNQGLPLRRHHSDLYSHYFGGLAETVLVVRSMSTLLNYDYVWDTVFHPSGAIEIRFYATGYISSAFLFGATGKYGNQVSEHTLGTVHTHSAHFKVDLDVAGLENWVWAEDMVFVPMAVPWSPEHQLQRLQVTRKLLEMEEQAAFLVGSATPRYLYLASNHSNKWGHPRGYRIQMLSFAGEPLPQNSSMARGFSWERYQLAVTQRKEEEPSSSSVFNQNDPWAPTVDFSDFINNETIAGKDLVAWVTAGFLHIPHAEDIPNTVTVGNGVGFFLRPYNFFDEDPSFYSADSIYFRGDQDAGACEVNPLACLPQAAACAPDLPAFSHGGFSHN

SEQ ID NO: 884 - protein, 634 aa, Homo Sapiens
MNQKTILVLLILAVITIFALVCVLLVGRGGDGGEPSQLPHCPSVSPSAQPWTHPGQSQLFADLSREELTAVMRFLTQRLGPGLVDAAQARPSDNCVFSVELQLPPKAAALAHLDRGSPPPAREALAIVFFGRQPQPNVSELVVGPLPHPSYMRDVTVERHGGPLPYHRRPVLFQEYLDIDQMIFNRELPQASGLLHHCCFYKHRGRNLVTMTTAPRGLQSGDRATWFGLYYNISGAGFFLHHVGLELLVNHKALDPARWTIQKVFYQGRYYDSLAQLEAQFEAGLVNVVLIPDNGTGGSWSLKSPVPPGPAPPLQFYPQGPRFSVQGSRVASSLWTFSFGLGAFSGPRIFDVRFQGERLVYEISLQEALAIYGGNSPAAMTTRYVDGGFGMGKYTTPLTRGVDCPYLATYVDWHFLLESQAPKTIRDAFCVFEQNQGLPLRRHHSDLYSHYFGGLAETVLVVRSMSTLLNYDYVWDTVFHPSGAIEIRFYATGYISSAFLFGATGKYGNQVSEHTLGTVHTHSAHFKVDLDVAGLENWVWAEDMVFVPMAVPWSPEHQLQRLQVTRKLLEMEEQAAFLVGSATPRYLYLASNHSNKWGHPRGYRIQMLSFAGEPLPQNSSMARGFSWERIWWPG

SEQ ID NO: 885 - protein, 112 aa, Homo Sapiens
MVFVPMAVPWSPEHQLQRLQVTRKLLEMEEQAAFLVGSATPRYLYLASNHSNKWGHPRGYRIQMLSFAGEPLPQNSSMARGFSWERYQLAVTQRKEEEPSSSSVFNQNDPWA

SEQ ID NO: 886 - protein, 152 aa, Homo Sapiens
MVFVPMAVPWSPEHQLQRLQVTRKLLEMEEQAAFLVGSATPRYLYLASNHSNKWGHPRGYRIQMLSFAGEPLPQNSSMARGFSWERYQLAVTQRKEEEPSSSSVFNQNDPWAPTVDFSDFINNETIAGKDLVAWVTAGFLHIPHAEDIPNTV

SEQ ID NO: 887 - protein, 220 aa, Homo Sapiens
MVFVPMAVPWSPEHQLQRLQVTRKLLEMEEQAAFLVGSATPRYLYLASNHSNKWGHPRGYRIQMLSFAGEPLPQNSSMARGFSWERYQLAVTQRKEEEPSSSSVFNQNDPWAPTVDFSDFINNETIAGKDLVAWVTAGFLHIPHAEDIPNTVTVGNGVGFFLRPYNFFDEDPSFYSADSIYFRGDQDAGACEVNPLACLPQAAACAPDLPAFSHGGFSHN

SEQ ID NO: 888 - protein, 220 aa, Homo Sapiens; identical to SEQ ID NO: 887

SEQ ID NO: 889 - protein, 144 aa, Homo Sapiens
  misc_feature (1)..(1): Xaa can be any naturally occurring amino acid
XYDYVWDTVFHPSGAIEIRFYATGYISSAFLFGATGKYGNQVSEHTLGTVHTHSAHFKVDLDVAGDPEAAGDGGAGRLPRGKRHPSLPVPGQQPQQQVGSPPGLPHPDAQLCWRAAAPKQLHGERLQLGEVPAGCDPAEGGGAQ

SEQ ID NO: 890 - protein, 164 aa, Homo Sapiens
MSVLTPLLLRGLTGSARRLPVPRAKIHSLPPEGKLGIMGKENGIGSRRICNHHRELWEAGKMEPNQCVGWRCGSGAAGLSYRSQVRRPGVPAPATGLEAHSLTTPKGIPLLGLLPRRGNEEGLASGRTAIGNPEAVGSAALFKDGGGGTSAAEAGAAGQRLRRC

SEQ ID NO: 891 - protein, 235 aa, Homo Sapiens
MLKCHVFRCEAPAKNIATSLHEICSKIMAERRNARCLVNGLSLDHSKLVDVPFQVEFPAPKNELVQKFQVYYLGNVPVAKPVGVDVINGALESVLSSSSREQWTPSHVSVAPATLTILHQQTEAVLGECRVRFLSFLAVGRDVHTFAFIMAAGPASFCCHMFWCEPNAASLSEAVQAACMLRYQKCLDARSQASTSCLPAPPAESVARRVGWTVRRGVQSLWGSLKPKRLGAHTP

SEQ ID NO: 892 - protein, 87 aa, Homo Sapiens
MRVQDTSGTYYWHIPTGTTQWEPPGRASPSQGSSPQEESQLTWTGFAHGEGFEDGEFWKDEPSDEAPMELGLKEPEEGTLTFPAQSL

SEQ ID NO: 893 - protein, 262 aa, Homo Sapiens
MRVQDTSGTYYWHIPTGTTQWEPPGRASPSQGSSPQEESQLTWTGFAHGEGFEDGEFWKDEPSDEAPMELGLKEPEEGTLTFPAQSLSPEPLPQEEEKLPPRNTNPGIKCFAVRSLGWVEMTEEELAPGRSSVAVNNCIRQLSYHKNNLHDPMSGGWGEGKDLLLQLEDETLKLVEPQSQALLHAQPIISIRVWGVGRDSGRDFAYVARDKLTQMLKCHVFRCEAPAKNIATSLHEICSKIMAERRNARCLVNGLSLDHSKL

SEQ ID NO: 894 - protein, 451 aa, Homo Sapiens
MRVQDTSGTYYWHIPTGTTQWEPPGRASPSQGSSPQEESQLTWTGFAHGEGFEDGEFWKDEPSDEAPMELGLKEPEEGTLTFPAQSLSPEPLPQEEEKLPPRNTNPGIKCFAVRSLGWVEMTEEELAPGRSSVAVNNCIRQLSYHKNNLHDPMSGGWGEGKDLLLQLEDETLKLVEPQSQALLHAQPIISIRVWGVGRDSGRERDFAYVARDKLTQMLKCHVFRCEAPAKNIATSLHEICSKIMAERRNARCLVNGLSLDHSKLVDVPFQVEFPAPKNELVQKFQVYYLGNVPVAKPVGVDVINGALESVLSSSSREQWTPSHVSVAPATLTILHQQTEAVLGECRVRFLSFLAVGRDVHTFAFIMAAGPASFCCHMFWCEPNAASLSEAVQAACMLRYQKCLDARSQASTSCLPAPPAESVARRVGWTVRRGVQSLWGSLKPKRLGAHTP

SEQ ID NO: 895 - protein, 451 aa, Homo Sapiens; identical to SEQ ID NO: 894

SEQ ID NO: 896 - protein, 451 aa, Homo Sapiens; identical to SEQ ID NO: 894

SEQ ID NO: 897 - protein, 451 aa, Homo Sapiens [sequence omitted]

SEQ ID NO: 898 - protein, 451 aa, Homo Sapiens [sequence omitted]

SEQ ID NO: 899 - protein, 488 aa, Homo Sapiens
MSAMFSQDFFLAIILQDSSADSFWNPNAFETDSDLPAGWMRVQDTSGTYYWHIPTGTTQWEPPGRASPSQGSSPQEESQLTWTGFAHGEGFEDGEFWKDEPSDEAPMELGLKEPEEGTLTFPAQSLSPEPLPQEEEKLPPRNTNPGIKCFAVRSLGWVEMTEEELAPGRSSVAVNNCIRQLSYHKNNLHDPMSGGWGEGKDLLLQLEDETLKLVEPQSQALLHAQPIISIRVWGVGRDSGRDFAYVARDKLTQMLKCHVFRCEAPAKNIATSLHEICSKIMAERRNARCLVNGLSLDHSKLVDVPFQVEFPAPKNELVQKFQVYYLGNVPVAKPVGVDVINGALESVLSSSSREQWTPSHVSVAPATLTILHQQTEAVLGECRVRFLSFLAVGRDVHTFAFIMAAGPASFCCHMFWCEPNAASLSEAVQAACMLRYQKCLDARSQASTSCLPAPPAESVARRVGWTVRRGVQSLWGSLKPKRLGAHTP

SEQ ID NO: 900 - protein, 490 aa, Homo Sapiens
MSAMFSQDFFLAIILQDSSADSFWNPNAFETDSDLPAGWMRVQDTSGTYYWHIPTGTTQWEPPGRASPSQGSSPQEESQLTWTGFAHGEGFEDGEFWKDEPSDEAPMELGLKEPEEGTLTFPAQSLSPEPLPQEEEKLPPRNTNPGIKCFAVRSLGWVEMTEEELAPGRSSVAVNNCIRQLSYHKNNLHDPMSGGWGEGKDLLLQLEDETLKLVEPQSQALLHAQPIISIRVWGVGRDSGRERDFAYVARDKLTQMLKCHVFRCEAPAKNIATSLHEICSKIMAERRNARCLVNGLSLDHSKLVDVPFQVEFPAPKNELVQKFQVYYLGNVPVAKPVGVDVINGALESVLSSSSREQWTPSHVSVAPATLTILHQQTEAVLGECRVRFLSFLAVGRDVHTFAFIMAAGPASFCCHMFWCEPNAASLSEAVQAACMLRYQKCLDARSQASTSCLPAPPAESVARRVGWTVRRGVQSLWGSLKPKRLGAHTP

SEQ ID NO: 901 - protein, 708 aa, Homo Sapiens
MSVPSSLSQSAINANSHGGPALSLPLPLHAAHNQLLNAKLQATAVGPKDLRSAMGEGGGPEPGPANAKWLKEGQNQLRRAATAHRDQNRNVTLTLAEEASQEPEMAPLGPKGLIHLYSELELSAHNAANRGLRGPGLIISTQEQGPDEGEEKAAGEAEEEEEDDDDEEEEEDLSSPPGLPEPLESVEAPPRPQALTDGPREHSKSASLLFGMRNSAASDEDSSWATLSQGSPSYGSPEDTDSFWNPNAFETDSDLPAGWMRVQDTSGTYYWHIPTGTTQWEPPGRASPSQGSSPQEESQLTWTGFAHGEGFEDGEFWKDEPSDEAPMELGLKEPEEGTLTFPAQSLSPEPLPQEEEKLPPRNTNPGIKCFAVRSLGWVEMTEEELAPGRSSVAVNNCIRQLSYHKNNLHDPMSGGWGEGKDLLLQLEDETLKLVEPQSQALLHAQPIISIRVWGVGRDSGRDFAYVARDKLTQMLKCHVFRCEAPAKNIATSLHEICSKIMAERRNARCLVNGLSLDHSKLVDVPFQVEFPAPKNELVQKFQVYYLGNVPVAKPVGVDVINGALESVLSSSSREQWTPSHVSVAPATLTILHQQTEAVLGECRVRFLSFLAVGRDVHTFAFIMAAGPASFCCHMFWCEPNAASLSEAVQAACMLRYQKCLDARSQASTSCLPAPPAESVARRVGWTVRRGVQSLWGSLKPKRLGAHTP

SEQ ID NO: 902 - protein, 708 aa, Homo Sapiens; identical to SEQ ID NO: 901

SEQ ID NO: 903 - protein, 710 aa, Homo Sapiens [sequence omitted]

SEQ ID NO: 904 - protein, 710 aa, Homo Sapiens
MSVPSSLSQSAINANSHGGPALSLPLPLHAAHNQLLNAKLQATAVGPKDLRSAMGEGGGPEPGPANAKWLKEGQNQLRRAATAHRDQNRNVTLTLAEEASQEPEMAPLGPKGLIHLYSELELSAHNAANRGLRGPGLIISTQEQGPDEGEEKAAGEAEEEEEDDDDEEEEEDLSSPPGLPEPLESVEAPPRPQALTDGPREHSKSASLLFGMRNSAASDEDSSWATLSQGSPSYGSPEDTDSFWNPNAFETDSDLPAGWMRVQDTSGTYYWHIPTGTTQWEPPGRASPSQGSSPQEESQLTWTGFAHGEGFEDGEFWKDEPSDEAPMELGLKEPEEGTLTFPAQSLSPEPLPQEEEKLPPRNTNPGIKCFAVRSLGWVEMTEEELAPGRSSVAVNNCIRQLSYHKNNLHDPMSGGWGEGKDLLLQLEDETLKLVEPQSQALLHAQPIISIRVWGVGRDSGRERDFAYVARDKLTQMLKCHVFRCEAPAKNIATSLHEICSKIMAERRNARCLVNGLSLDHSKLVDVPFQVEFPAPKNELVQKFQVYYLGNVPVAKPVGVDVINGALESVLSSSSREQWTPSHVSVAPATLTILHQQTEAVLGECRVRFLSFLAVGRDVHTFAFIMAAGPASFCCHMFWCEPNAASLSEAVQAACMLRYQKCLDARSQASTSCLPAPPAESVARRVGWTVRRGVQSLWGSLKPKRLGAHTP

SEQ ID NO: 905 - protein, 707 aa, Homo Sapiens
MSVPSSLSQSAINANSHGGPALSLPLPLHAAHNQLLNAKLQATAVGPKDLRSAMGEGGGPEPGPANAKWLKEGQNQLRRAATAHRDQNRNVTLTLAEEASQEPEMAPLGPKGLIHLYSELELSAHNAANRGLRGPGLIISTQEQGPDEGEEKAAGEAEEEEEDDDDEEEEEDLSSPPGLPEPLESVEAPPRPQALTDGPREHSKSASLLFGMRNSAASDEDSSWATLSQGSPSYGSPEDTDSFWNPNAFETDSDLPAGWMRVQDTSGTYYWHIPTGTTQWEPPGRASPSQGSSPQEESQLTWTGFAHGEGFEDGEFWKDEPSDEAPMELGLKEPEEGTLTFPAQSLSPEPLPQEEEKLPPRNTNPGIKCFAVRSLGWVEMTEEELAPGRSSVAVNNCIRQLSYHKNNLHDPMSGGWGEGKDLLLQLEDETLKLVEPQSQALLHAQPIISIRVWGVGRDSGRERDFAYVARDKLTQMLKCHVFRCEAPAKNIATSLHEICSKIMAERRNARCLVNGLSLDHSKLVDVPFQVEFPAPKNELVQKFQVYYLGNVPVAKPVGVDVINGALESVLSSSSREQWTPSHVSVAPATLTILHQQTEAVLGECRVRFLSFLAVGRDVHTFAFIMAAGPASFCCHMFWCEPNAASLSEAVQAACMVEQEELVQARPHPPGPSRGRRRKGLVQAWVPSPCSMGTSAVLISLIKSVCTA

SEQ ID NO: 906 - protein, 475 aa, Homo Sapiens
MTQMRDSFWNPNAFETDSDLPAGWMRVQDTSGTYYWHIPTGTTQWEPPGRASPSQGSSPQEESQLTWTGFAHGEGFEDGEFWKDEPSDEAPMELGLKEPEEGTLTFPAQSLSPEPLPQEEEKLPPRNTNPGIKCFAVRSLGWVEMTEEELAPGRSSVAVNNCIRQLSYHKNNLHDPMSGGWGEGKDLLLQLEDETLKLVEPQSQALLHAQPIISIRVWGVGRDSGRERDFAYVARDKLTQMLKCHVFRCEAPAKNIATSLHEICSKIMAERRNARCLVNGLSLDHSKLVDVPFQVEFPAPKNELVQKFQVYYLGNVPVAKPVGVDVINGALESVLSSSSREQWTPSHVSVAPATLTILHQQTEAVLGECRVRFLSFLAVGRDVHTFAFIMAAGPASFCCHMFWCEPNAASLSEAVQAACMLRYQKCLDARSQASTSCLPAPPAESVARRVGWTVRRGVQSLWGSLKPKRLGAHTP

SEQ ID NO: 907 - protein, 475 aa, Homo Sapiens [sequence omitted]

SEQ ID NO: 908 - protein, 22 aa, Homo Sapiens
MSWPRRLLLRYLFPALLLHAVK

SEQ ID NO: 909 - protein, 61 aa, Homo Sapiens
MSWPRRLLLRYLFPALLLHEPRPCLHRLSDHLSVRRAPPSHPAPKGRPDHRPARGVGEPAL

SEQ ID NO: 910 - protein, 184 aa, Homo Sapiens
MSWPRRLLLRYLFPALLLHGLGEGSALLHPDSRSHPRSLEKSAWRAFKESQCHHMLKHLHNGARITVQMPPTIEGHWVSTGCEVRSGPEFITRSYRFYHNNTFKAYQFYYGSNRCTNPTYTLIIRGKIRLRQASWIIRGGTEADYQLHNVQGHGRHRVRVQSESHEGHPHGCGHSLTAQRLQRE

SEQ ID NO: 911 - protein, 514 aa, Homo Sapiens
MSWPRRLLLRYLFPALLLHGLGEGSALLHPDSRSHPRSLEKSAWRAFKESQCHHMLKHLHNGARITVQMPPTIEGHWVSTGCEVRSGPEFITRSYRFYHNNTFKAYQFYYGSNRCTNPTYTLIIRGKIRLRQASWIIRGGTEADYQLHNVQVICHTEAVAEKLGQQVNRTCPGFLADGGPWVQDVAYDLWREENGCECTKAVNFAMHELQLIRVEKQYLHHNLDHLVEELFLGDIHTDATQRMFYRPSSYQPPLQNAKNHDHACIACRIIYRSDEHHPPILPPKADLTIGLHGEWVSQRCEVRPEVLFLTRHFIFHDNNNTWEGHYYHYSDPVCKHPTFSIYARGRYSRGVLSSRVMGGTEFVFKVNHMKVTPMDAATASLLNVFNGNECGAEGSWQVGIQQDVTHTNGCVALGIKLPHTEYEIFKMEQDARGRYLLFNGQRPSDGSSPDRPEKRATSYQMPLVQCASSSPRAEDLAEDSGSSLYGRAPGRHTWSLLLAALACLVPLLHWNIRR

SEQ ID NO: 912 - protein, 94 aa, Homo Sapiens
PEDVLPALQLPAPSAECQVEMGFHHVGQDGLQLPTSSDPPALASQSAGITGVSHRPPGRHLSNDLRTTTMPASPVGSSIGQTSTTLPSCPQRQT

SEQ ID NO: 913 - protein, 227 aa, Homo Sapiens
  misc_feature (1)..(1): Xaa can be any naturally occurring amino acid
XDVAYDLWREENGCECTKAVNFAMHELQLIRVEKQYLHHNLDHLVEELFLGDIHTDATQRMFYRPSSYQPPLQNAKCAAESSGSFQILPQDSSEKEQNGLSHWCLSRPGHQKDWALCAHAGPATAGCPSCLWPPAETGRKAGRTSSKTVHACPGEAGTSSFELFYFPNCWSIETKLKISLNAKLSFKPRASAPLETGHRVKIETLSQLVFLSFIQLCCEVQSPLANK

SEQ ID NO: 914 - protein, 223 aa, Homo Sapiens
MNKPLLWISVLTSLLEAFAHTDLSGKVFVFPRESVTDHVNLITPLEKPLQNFTLCFRAYSDLSRAYSLFSYNTQGRDNELLVYKERVGEYSLYIGRHKVTSKVIEKFPAPVHICVSWESSSGIAEFWINGTPLVKKGLRQGYFVEAQPKIVLGQEQDSYGGKFDRSQSFVGEIGDLYMWDSVLPPENILSAYQGTPLPANILDWQALNYEIRGYVIIKPLVWV

SEQ ID NO: 915 - protein, 54 aa, Homo Sapiens
MRFQQFLFAFFIFIMSLLLISGQRPVNLTMRRKLRKHNCLQRRCMPLHSRVPFP

SEQ ID NO: 916 - protein, 54 aa, Homo Sapiens; identical to SEQ ID NO: 915

SEQ ID NO: 917 - protein, 54 aa, Homo Sapiens; identical to SEQ ID NO: 915

SEQ ID NO: 918 - protein, 77 aa, Homo Sapiens
MNLRLCVQALLLLWLSLTAVCGGSLMPLPDGNGLEDGNVRHLVQPRGSRNGPGPWQGGRRKFRRQRPRLSHKGPMPF

SEQ ID NO: 919 - protein, 158 aa, Homo Sapiens
MAATGTAAAAATGRLLLLLLALAANAGTGFAVAEPQIAMFCGKLNMHVNIQTGKWEPDPTGTKSCFETKEEVLQYCQEMYPELQITNVMEANQRVSIDNWCRRDKKQCKSRFVTPFKCLVGEFVSDVLLVPEKCQFFHKERMEVCENHQHWHTVVKEV

SEQ ID NO: 920 - protein, 35 aa, Homo Sapiens
MAATGTAAAAATGRLLLLLLVGLTAPALALAGYIE

SEQ ID NO: 921 - protein, 116 aa, Homo Sapiens
MAATGTAAAAATGRLLLLLLVGLTAPALALAGYIEALAANAGTGFAVAEPQIAMFCGKLNMHVNIQTGKWEPDPTGTKSCFETKEEVLQYCQEMYPELQITNSGWRCVRITSTGTR

SEQ ID NO: 922 - protein, 763 aa, Homo Sapiens
MAATGTAAAAATGRLLLLLLVGLTAPALALAGYIEALAANAGTGFAVAEPQIAMFCGKLNMHVNIQTGKWEPDPTGTKSCFETKEEVLQYCQEMYPELQITNVMEANQRVSIDNWCRRDKKQCKSRFVTPFKCLVGEFVSDVLLVPEKCQFFHKERMEVCENHQHWHTVVKEACLTQGMTLYSYGMLLPCGVDQFHGTEYVCCPQTKIIGSVSKEEEEEDEEEEEEEDEEEDYDVYKSEFPTEADLEDFTEAAVDEDDEDEEEGEEVVEDRDYYYDTFKGDDYNEENPTEPGSDGTMSDKEITHDVKAVCSQEAMTGPCRAVMPRWYFDLSKGKCVRFIYGGCGGNRNNFESEDYCMAVCKAMIPPTPLPTNDVDVYFETSADDNEHARFQKAKEQLEIRHRNRMDRVKKEWEEAELQAKNLPKAERQTLIQHFQAMVKALEKEAASEKQQLVETHLARVEAMLNDRRRMALENYLAALQSDPPRPHRILQALRRYVRAENKDRLHTIRHYQHVLAVDPEKAAQMKSQVMTHLHVIEERRNQSLSLLYKVPYVAQEIQEEIDELLQEQRADMDQFTASISETPVDVRVSSEESEEIPPFHPFHPFPALPENEDTQPELYHPMKKGSGVGEQDGGLIGAEEKVINSKNKVDENMVIDETLDVKEMIFNAERVGGLEEERESVGPLREDFSLSSSALIGLLVIAVAIATVIVISLVMLRKRQYGTISHGIVEVDPMLTPEERHLNKMQNHGYENPTYKYLEQMQI

SEQ ID NO: 923 - protein, 751 aa, Homo Sapiens
MAATGTAAAAATGRLLLLLLVGLTAPALALAGYIEALAANAGTGFAVAEPQIAMFCGKLNMHVNIQTGKWEPDPTGTKSCFETKEEVLQYCQEMYPELQITNVMEANQRVSIDNWCRRDKKQCKSRFVTPFKCLVGEFVSDVLLVPEKCQFFHKERMEVCENHQHWHTVVKEACLTQGMTLYSYGMLLPCGVDQFHGTEYVCCPQTKIIGSVSKEEEEEDEEEEEEEDEEEDYDVYKSEFPTEADLEDFTEAAVDEDDEDEEEGEEVVEDRDYYYDTFKGDDYNEENPTEPGSDGTMSDKEITHDVKAVCSQEAMTGPCRAVMPRWYFDLSKGKCVRFIYGGCGGNRNNFESEDYCMAVCKAMIPPTPLPTNDVDVYFETSADDNEHARFQKAKEQLEIRHRNRMDRVKKEWEEAELQAKNLPKAERQTLIQHFQAMVKALEKEAASEKQQLVETHLARVEAMLNDRRRMALENYLAALQSDPPRPHRILQALRRYVRAENKDRLHTIRHYQHVLAVDPEKAAQMKSQVMTHLHVIEERRNQSLSLLYKVPYVAQEIQEEIDELLQEQRADMDQFTASISETPVDVRVSSEESEEIPPFHPFHPFPALPENEGSGVGEQDGGLIGAEEKVINSKNKVDENMVIDETLDVKEMIFNAERVGGLEEERESVGPLREDFSLSSSALIGLLVIAVAIATVIVISLVMLRKRQYGTISHGIVEVDPMLTPEERHLNKMQNHGYENPTYKYLEQMQI

SEQ ID NO: 924 - protein, 695 aa, Homo Sapiens
MAATGTAAAAATGRLLLLLLVGLTAPALALAGYIEALAANAGTGFAVAEPQIAMFCGKLNMHVNIQTGKWEPDPTGTKSCFETKEEVLQYCQEMYPELQITNVMEANQRVSIDNWCRRDKKQCKSRFVTPFKCLVGEFVSDVLLVPEKCQFFHKERMEVCENHQHWHTVVKEACLTQGMTLYSYGMLLPCGVDQFHGTEYVCCPQTKIIGSVSKEEEEEDEEEEEEEDEEEDYDVYKSEFPTEADLEDFTEAAVDEDDEDEEEGEEVVEDRDYYYDTFKGDDYNEENPTEPGSDGTMSDKEITHDVKVPPTPLPTNDVDVYFETSADDNEHARFQKAKEQLEIRHRNRMDRVKKEWEEAELQAKNLPKAERQTLIQHFQAMVKALEKEAASEKQQLVETHLARVEAMLNDRRRMALENYLAALQSDPPRPHRILQALRRYVRAENKDRLHTIRHYQHVLAVDPEKAAQMKSQVMTHLHVIEERRNQSLSLLYKVPYVAQEIQEEIDELLQEQRADMDQFTASISETPVDVRVSSEESEEIPPFHPFHPFPALPENEGSGVGEQDGGLIGAEEKVINSKNKVDENMVIDETLDVKEMIFNAERVGGLEEERESVGPLREDFSLSSSALIGLLVIAVAIATVIVISLVMLRKRQYGTISHGIVEVDPMLTPEERHLNKMQNHGYENPTYKYLEQMQI

SEQ ID NO: 925 - protein, 522 aa, Homo Sapiens
MAATGTAAAAATGRLLLLLLVGLTAPALALAGYIEALAANAGTGFAVAEPQIAMFCGKLNMHVNIQTGKWEPDPTGTKSCFETKEEVLQYCQEMYPELQITNVMEANQRVSIDNWCRRDKKQCKSRFVTPFKCLVPPTPLPTNDVDVYFETSADDNEHARFQKAKEQLEIRHRNRMDRVKKEWEEAELQAKNLPKAERQTLIQHFQAMVKALEKEAASEKQQLVETHLARVEAMLNDRRRMALENYLAALQSDPPRPHRILQALRRYVRAENKDRLHTIRHYQHVLAVDPEKAAQMKSQVMTHLHVIEERRNQSLSLLYKVPYVAQEIQEEIDELLQEQRADMDQFTASISETPVDVRVSSEESEEIPPFHPFHPFPALPENEGSGVGEQDGGLIGAEEKVINSKNKVDENMVIDETLDVKEMIFNAERVGGLEEERESVGPLREDFSLSSSALIGLLVIAVAIATVIVISLVMLRKRQYGTISHGIVEVDPMLTPEERHLNKMQNHGYENPTYKYLEQMQI

SEQ ID NO: 926 - protein, 159 aa, Homo Sapiens [sequence omitted]

SEQ ID NO: 927 - protein, 39 aa, Homo Sapiens
MAATGTAAAAATGRLLLLLLVGLTAPALALAGYIEWVNL

SEQ ID NO: 928 - protein, 761 aa, Homo Sapiens
MLRAPGELPRQAARCSLCRLGPGRGRAFFKWRCLPASVDRGNPLWALAANAGTGFAVAEPQIAMFCGKLNMHVNIQTGKWEPDPTGTKSCFETKEEVLQYCQEMYPELQITNVMEANQRVSIDNWCRRDKKQCKSRFVTPFKCLVGEFVSDVLLVPEKCQFFHKERMEVCENHQHWHTVVKEACLTQGMTLYSYGMLLPCGVDQFHGTEYVCCPQTKIIGSVSKEEEEEDEEEEEEEDEEEDYDVYKSEFPTEADLEDFTEAAVDEDDEDEEEGEEVVEDRDYYYDTFKGDDYNEENPTEPGSDGTMSDKEITHDVKAVCSQEAMTGPCRAVMPRWYFDLSKGKCVRFIYGGCGGNRNNFESEDYCMAVCKAMIPPTPLPTNDVDVYFETSADDNEHARFQKAKEQLEIRHRNRMDRVKKEWEEAELQAKNLPKAERQTLIQHFQAMVKALEKEAASEKQQLVETHLARVEAMLNDRRRMALENYLAALQSDPPRPHRILQALRRYVRAENKDRLHTIRHYQHVLAVDPEKAAQMKSQVMTHLHVIEERRNQSLSLLYKVPYVAQEIQEEIDELLQEQRADMDQFTASISETPVDVRVSSEESEEIPPFHPFHPFPALPENEGSGVGEQDGGLIGAEEKVINSKNKVDENMVIDETLDVKEMIFNAERVGGLEEERESVGPLREDFSLSSSALIGLLVIAVAIATVIVISLVMLRKRQYGTISHGIVEVDPMLTPEERHLNKMQNHGYENPTYKYLEQMQI

SEQ ID NO: 929 - protein, 267 aa, Homo Sapiens
MKAAVLTLAVLFLTGSQARHFWQQDEPPQSPWDRVKDLATVYVDVLKDSGRDYVSQFEGSALGKQLNLKLLDNWDSVTSTFSKLREQLGPVTQEFWDNLEKETEGLRQEMSKDLEEVKAKVQPYLDDFQKKWQEEMELYRQKVEPLRAELQEGARQKLHELQEKLSPLGEEMRDRARAHVDALRTHLAPYSDELRQRLAARLEALKENGGARLAEYHAKATEHLSTLSEKAKPALEDLRQGLLPVLESFKVSFLSALEEYTKKLNTQ

SEQ ID NO: 930 - protein, 267 aa, Homo Sapiens; identical to SEQ ID NO: 929

SEQ ID NO: 931 - protein, 267 aa, Homo Sapiens; identical to SEQ ID NO: 929

SEQ ID NO: 932 - protein, 267 aa, Homo Sapiens; identical to SEQ ID NO: 929

SEQ ID NO: 933 - protein, 245 aa, Homo Sapiens
MSGGARGFCMLKAPHSARPFFSSRSPTALQDESCGADLGRALPDGLKLLDNWDSVTSTFSKLREQLGPVTQEFWDNLEKETEGLRQEMSKDLEEVKAKVQPYLDDFQKKWQEEMELYRQKVEPLRAELQEGARQKLHELQEKLSPLGEEMRDRARAHVDALRTHLAPYSDELRQRLAARLEALKENGGARLAEYHAKATEHLSTLSEKAKPALEDLRQGLLPVLESFKVSFLSALEEYTKKLNTQ

SEQ ID NO: 934 - protein, 133 aa, Homo Sapiens
MCEQHPKRPGLQLWRGREPGWNGQQAALPTVTNMKLLAATVLLLTICSLEGALVRRQAKEPCVESLVSQYFQTVTDYGKDLMEKVKSPELQAEAKSYFEKSKEQLTPLIKKAGTELVNFLSYFVELGTQPATQ

SEQ ID NO: 935 - protein, 52 aa, Homo Sapiens
MEKVKSPELQAEAKSYFEKSKEQLTPLIKKAGTELVNFLSYFVELGTQPATQ

SEQ ID NO: 936 - protein, 52 aa, Homo Sapiens; identical to SEQ ID NO: 935

SEQ ID NO: 937 - protein, 66 aa, Homo Sapiens
MKLLAATVLLLTICSLEGALVRRQAKEPCVESLVSQYFQTVTDYGKDLMEKVKSPELQAEAKSYFE

SEQ ID NO: 938 - protein, 95 aa, Homo Sapiens
MKLLAATVLLLTICSLEGALVRRQAKEPCVESLVSQYFQTVTDYGKDLMEKVKSPELQAEAKSYFEKSKEQLTPLIKKAGTELVNFLSYFVELGT

SEQ ID NO: 939 - protein, 100 aa, Homo Sapiens
MKLLAATVLLLTICSLEGALVRRQAKEPCVESLVSQYFQTVTDYGKDLMEKVKSPELQAEAKSYFEKSKEQLTPLIKKAGTELVNFLSYFVELGTQPATQ

SEQ ID NO: 940 - protein, 82 aa, Homo Sapiens
MKLLAATVLLLTICSLEGALVRRQAKEPCVESLVSQYFQTVTDYGKDLMEKVKSPELQAEAKSYFENFLSYFVELGTQPATQ

SEQ ID NO: 941 - protein, 72 aa, Homo Sapiens
MKLLAATVLLLTICSLEGLATKGLKRKIIPSLKPRKPIQRSGWIPFWGGGRELGWVLAEVWQEARIHCCGPS

SEQ ID NO: 942 - protein, 27 aa, Homo Sapiens
MKLLAATVLLLTICSLEGLTLKSQRSS

SEQ ID NO: 943 - protein, 396 aa, Homo Sapiens
MFLKAVVLTLALVAVAGARAEVSADQVATVMWDYFSQLSNNAKEAVEHLQKSELTQQLNALFQDKLGEVNTYAGDLQKKLVPFATELHERLAKDSEKLKEEIGKELEELRARLLPHANEVSQKIGDNLRELQQRLEPYADQLRTQVSTQAEQLRRQLTPYAQRMERVLRENADSLQASLRPHADELKAKIDQNVEELKGRLTPYADEFKVKIDQTVEELRRSLAPYAQDTQEKLNHQLEGLTFQMKKNAEELKARISASAEELRQRLAPLAEDVRGNLRGNTEGLQKSLAELGGHLDQQVEEFRRRVEPYGENFNKALVQQMEQLRQKLGPHAGDVEGHLSFLEKDLRDKVNSFFSTFKEKESQDKTLSLPELEQQQEQQQEQQQEQVQMLAPLES

SEQ ID NO: 944 - protein, 162 aa, Homo Sapiens
MASMAAVLTWALALLSAFSATQARKGFWDYFSQTSGDKGRVEQIHQQKMAREPATLKDSLEQDLNNMNKFLEKLRPLSGSEAPRLPQDPVGMRRQLQEELEEVKARLQPYMAEAHELVGWNLEGLRQQLKPYTMDLMEQVALRVQELQEQLRVVGEDTKAQL

SEQ ID NO: 945 - protein, 366 aa, Homo Sapiens
MASMAAVLTWALALLSAFSATQARKGFWDYFSQTSGDKGRVEQIHQQKMAREPATLKDSLEQDLNNMNKFLEKLRPLSGSEAPRLPQDPVGMRRQLQEELEEVKARLQPYMAEAHELVGWNLEGLRQQLKPYTMDLMEQVALRVQELQEQLRVVGEDTKAQLLGGVDEAWALLQGLQSRVVHHTGRFKELFHPYAESLVSGIGRHVQELHRSVAPHAPASPARLSRCVQVLSRKLTLKAKALHARIQQNLDQLREELSRAFAGTGTEEGAGPDPQMLSEEVRQRLQAFRQDTYLQIAAFTRAIDQETEEVQQQLAPPPPGHSAFAPEFQQTDSGKVLSKLQARLDDLWEDITHSLHDQGHSHLGDP

SEQ ID NO: 946 - protein, 366 aa, Homo Sapiens; identical to SEQ ID NO: 945

SEQ ID NO: 947 - protein, 4563 aa, Homo Sapiens
MDPPRPALLALLALPALLLLLLAGARAEEEMLENVSLVCPKDATRFKHLRKYTYNYEAESSSGVPGTADSRSATRINCKVELEVPQLCSFILKTSQCTLKEVYGFNPEGKALLKKTKNSEEFAAAMSRYELKLAIPEGKQVFLYPEKDEPTYILNIKRGIISALLVPPETEEAKQVLFLDTVYGNCSTHFTVKTRKGNVATEISTERDLGQCDRFKPIRTGISPLALIKGMTRPLSTLISSSQSCQYTLDAKRKHVAEAICKEQHLFLPFSYKNKYGMVAQVTQTLKLEDTPKINSRFFGEGTKKMGLAFESTKSTSPPKQAEAVLKTLQELKKLTISEQNIQRANLFNKLVTELRGLSDEAVTSLLPQLIEVSSPITLQALVQCGQPQCSTHILQWLKRVHANPLLIDVVTYLVALIPEPSAQQLREIFNMARDQRSRATLYALSHAVNNYHKTNPTGTQELLDIANYLMEQIQDDCTGDEDYTYLILRVIGNMGQTMEQLTPELKSSILKCVQSTKPSLMIQKAAIQALRKMEPKDKDQEVLLQTFLDDASPGDKRLAAYLMLMRSPSQADINKIVQILPWEQNEQVKNFVASHIANILNSEELDIQDLKKLVKEALKESQLPTVMDFRKFSRNYQLYKSVSLPSLDPASAKIEGNLIFDPNNYLPKESMLKTTLTAFGFASADLIEIGLEGKGFEPTLEALFGKQGFFPDSVNKALYWVNGQVPDGVSKVLVDHFGYTKDDKHEQDMVNGIMLSVEKLIKDLKSKEVPEARAYLRILGEELGFASLHDLQLLGKLLLMGARTLQGIPQMIGEVIRKGSKNDFFLHYIFMENAFELPTGAGLQLQISSSGVIAPGAKAGVKLEVANMQAELVAKPSVSVEFVTNMGIIIPDFARSGVQMNTNFFHESGLEAHVALKAGKLKFIIPSPKRPVKLLSGGNTLHLVSTTKTEVIPPLIENRQSWSVCKQVFPGLNYCTSGAYSNASSTDSASYYPLTGDTRLELELRPTGEIEQYSVSATYELQREDRALVDTLKFVTQAEGAKQTEATMTFKYNRQSMTLSSEVQIPDFDVDLGTILRVNDESTEGKTSYRLTLDIQNKKITEVALMGHLSCDTKEERKIKGVISIPRLQAEARSEILAHWSPAKLLLQMDSSATAYGSTVSKRVAWHYDEEKIEFEWNTGTNVDTKKMTSNFPVDLSDYPKSLHMYANRLLDHRVPQTDMTFRHVGSKLIVAMSSWLQKASGSLPYTQTLQDHLNSLKEFNLQNMGLPDFHIPENLFLKSDGRVKYTLNKNSLKIEIPLPFGGKSSRDLKMLETVRTPALHFKSVGFHLPSREFQVPTFTIPKLYQLQVPLLGVLDLSTNVYSNLYNWSASYSGGNTSTDHFSLRARYHMKADSVVDLLSYNVQGSGETTYDHKNTFTLSCDGSLRHKFLDSNIKFSHVEKLGNNPVSKGLLIFDASSSWGPQMSASVHLDSKKKQHLFVKEVKIDGQFRVSSFYAKGTYGLSCQRDPNTGRLNGESNLRFNSSYLQGTNQITGRYEDGTLSLTSTSDLQSGIIKNTASLKYENYELTLKSDTNGKYKNFATSNKMDMTFSKQNALLRSEYQADYESLRFFSLLSGSLNSHGLELNADILGTDKINSGAHKATLRIGQDGISTSATTNLKCSLLVLENELNAELGLSGASMKLTTNGRFREHNAKFSLDGKAALTELSLGSAYQAMILGVDSKNIFNFKVSQEGLKLSNDMMGSYAEMKFDHTNSLNIAGLSLDFSSKLDNIYSSDKFYKQTVNLQLQPYSLVTTLNSDLKYNALDLTNNGKLRLEPLKLHVAGNLKGAYQNNEIKHIYAISSAALSASYKADTVAKVQGVEFSHRLNTDIAGLASAIDMSTNYNSDSLHFSNVFRSVMAPFTMTIDAHTNGNGKLALWGEHTGQLYSKFLLKAEPLAFTFSHDYKGSTSHHLVSRKSISAALEHKVSALLTPAEQTGTWKLKTQFNNNEYSQDLDAYNTKDKIGVELTGRTLADLTLLDSPIKVPLLLSEPINIIDALEMRDAVEKPQEFTIVAFVKYDKNQDVHSINLPFFETLQEYFERNRQTIIVVLENVQRNLKHINIDQFVRKYRAALGKLPQQANDYLNSFNWERQVSHAKEKLTALTKKYRITENDIQIALDDAKINFNEKLSQLQTYMIQFDQYIKDSYDLHDLKIAIANIIDEIIEKLKSLDEHYHIRVNLVKTIHDLHLFIENIDFNKSGSSTASWIQNVDTKYQIRIQIQEKLQQLKRHIQNIDIQHLAGKLKQHIEAIDVRVLLDQLGTTISFERINDILEHVKHFVINLIGDFEVAEKINAFRAKVHELIERYEVDQQIQVLMDKLVELAHQYKLKETIQKLSNVLQQVKIKDYFEKLVGFIDDAVKKLNELSFKTFIEDVNKFLDMLIKKLKSFDYHQFVDETNDKIREVTQRLNGEIQALELPQKAEALKLFLEETKATVAVYLESLQDTKITLIINWLQEALSSASLAHMKAKFRETLEDTRDRMYQMDIQQELQRYLSLVGQVYSTLVTYISDWWTLAAKNLTDFAEQYSIQDWAKRMKALVEQGFTVPEIKTILGTMPAFEVSLQALQKATFQTPDFIVPLTDLRIPSVQINFKDLKNIKIPSRFSTPEFTILNTFHIPSFTIDFVEMKVKIIRTIDQMLNSELQWPVPDIYLRDLKVEDIPLARITLPDFRLPEIAIPEFIIPTLNLNDFQVPDLHIPEFQLPHISHTIEVPTFGKLYSILKIQSPLFTLDANADIGNGTTSANEAGIAASITAKGESKLEVLNFDFQANAQLSNPKINPLALKESVKFSSKYLRTEHGSEMLFFGNAIEGKSNTVASLHTEKNTLELSNGVIVKINNQLTLDSNTKYFHKLNIPKLDFSSQADLRNEIKTLLKAGHIAWTSSGKGSWKWACPRFSDEGTHESQISFTIEGPLTSFGLSNKINSKHLRVNQNLVYESGSLNFSKLEIQSQVDSQHVGHSVLTAKGMALFGEGKAEFTGRHDAHLNGKVIGTLKNSLFFSAQPFEITASTNNEGNLKVRFPLRLTGKIDFLNNYALFLSPSAQQASWQVSARFNQYKYNQNFSAGNNENIMEAHVGINGEANLDFLNIPLTIPEMRLPYTIITTPPLKDFSLWEKTGLKEFLKTTKQSFDLSVKAQYKKNKHRHSITNPLAVLCEFISQSIKSFDRHFEKNRNNALDFVTKSYNETKIKFDKYKAEKSHDELPRTFQIPGYTVPVVNVEVSPFTIEMSAFGYVFPKAVSMPSFSILGSDVRVPSYTLILPSLELPVLHVPRNLKLSLPDFKELCTISHIFIPAMGNITYDFSFKSSVITLNTNAELFNQSDIVAHLLSSSSSVIDALQYKLEGTTRLTRKRGLKLATALSLSNKFVEGSHNSTVSLTTKNMEVSVATTTKAQIPILRMNFKQELNGNTKSKPTVSSSMEFKYDFNSSMLYSTAKGAVDHKLSLESLTSYFSIESSTKGDVKGSVLSREYSGTIASEANTYLNSKSTRSSVKLQGTSKIDDIWNLEVKENFAGEATLQRIYSLWEHSTKNHLQLEGLFFTNGEHTSKATLELSPWQMSALVQVHASQPSSFHDFPDLGQEVALNANTKNQKIRWKNEVRIHSGSFQSQVELSNDQEKAHLDIAGSLEGHLRFLKNIILPVYDKSLWDFLKLDVTTSIGRRQHLRVSTAFVYTKNPNGYSFSIPVKVLADKFIIPGLKLNDLNSVLVMPTFHVPFTDLQVPSCKLDFREIQIYKKLRTSSFALNLPTLPEVKFPEVDVLTKYSQPEDSLIPFFEITVPESQLTVSQFTLPKSVSDGIAALDLNAVANKIADFELPTIIVPEQTIEIPSIKFSVPAGIVIPSFQALTARFEVDSPVYNATWSASLKNKADYVETVLDSTCSSTVQFLEYELNVLGTHKIEDGTLASKTKGTFAHRDFSAEYEEDGKYEGLQEWEGKAHLNIKSPAFTDLHLRYQKDKKGISTSAASPAVGTVGMDMDEDDDFSKWNFYYSPQSSPDKKLTIFKTELRVRESDEETQIKVNWEEEAASGLLTSLKDNVPKATGVLYDYVNKYHWEHTGLTLREVSSKLRRNLQNNAEWVYQGAIRQIDDIDVRFQKAASGTTGTYQEWKDKAQNLYQELLTQEGQASFQGLKDNVFDGLVRVTQEFHMKVKHLIDSLIDFLNFPRFQFPGKPGIYTREELCTMFIREVGTVLSQVYSKVHNGSEILFSYFQDLVITLPFELRKHKLIDVISMYRELLKDLSKEAQEVFKAIQSLKTTEVLRNLQDLLQFIFQLIEDNIKQLKEMKFTYLINYIQDEINTIFSDYIPYVFKLLKENLCLNLHKFNEFIQNELQEASQELQQIHQYIMALREEYFDPSIVGWTVKYYELEEKIVSLIKNLLVALKDFHSEYIVSASNFTSQLSSQVEQFLHRNIQEYLSILTDPDGKGKEKIAELSATAQEIIKSQAIATKKIISDYHQQFRYKLQDFSDQLSDYYEKFIAESKRLIDLSIQNYHTFLIYITELLKKLQSTTVMNPYMKLAPGELTIIL

SEQ ID NO: 948 - protein, 828 aa, Homo Sapiens
MDPPRPALLALLALPALLLLLLAGARAEEEMLENVSLVCPKDATRFKHLRKYTYNYEAESSSGVPGTADSRSATRINCKVELEVPQLCSFILKTSQCTLKEVYGFNPEGKALLKKTKNSEEFAAAMSRYELKLAIPEGKQVFLYPEKDEPTYILNIKRGIISALLVPPETEEAKQVLFLDTVYGNCSTHFTVKTRKGNVATEISTERDLGQCDRFKPIRTGISPLALIKGMTRPLSTLISSSQSCQYTLDAKRKHVAEAICKEQHLFLPFSYKNKYGMVAQVTQTLKLEDTPKINSRFFGEGTKKMGLAFESTKSTSPPKQAEAVLKTLQELKKLTISEQNIQRANLFNKLVTELRGLSDEAVTSLLPQLIEVSSPITLQALVQCGQPQCSTHILQWLKRVHANPLLIDVVTYLVALIPEPSAQQLREIFNMARDQRSRATLYALSHAVNNYHKTNPTGTQELLDIANYLMEQIQDDCTGDEDYTYLILRVIGNMGQTMEQLTPELKSSILKCVQSTKPSLMIQKAAIQALRKMEPKDKDQEVLLQTFLDDASPGDKRLAAYLMLMRSPSQADINKIVQILPWEQNEQVKNFVASHIANILNSEELDIQDLKKLVKEALKESQLPTVMDFRKFSRNYQLYKSVSLPSLDPASAKIEGNLIFDPNNYLPKESMLKTTLTAFGFASADLIEIGLEGKGFEPTLEALFGKQGFFPDSVNKALYWVNGQVPDGVSKVLVDHFGYTKDDKHEQDMVNGIMLSVEKLIKDLKSKEVPEARAYLRILGEELGFASLHDLQLLGKLLLMDRPDSLTIPAAQARKDACTFFRDGGLP

SEQ ID NO: 949 - protein, 54 aa, Homo Sapiens
MRLFLSLPVLVVVLSIVLEGPAPAQGTPDVSSALDKLKEFGNTLEDKARELISR

SEQ ID NO: 950 - protein, 83 aa, Homo Sapiens
MRLFLSLPVLVVVLSIVLEGPAPAQGTPDVSSALDKLKEFGNTLEDKARELISRIKQSELSAKMREDDISPCCPGWSRTPDLK

SEQ ID NO: 951 - protein, 77 aa, Homo Sapiens
MRLFLSLPVLVVVLSIVLEGPAPAQGTPDVSSALDKLKEFGNTLEDKARELISRIKQSELSAKMREWFSETFQKVKE

SEQ ID NO: 952 - protein, 83 aa, Homo Sapiens
MRLFLSLPVLVVVLSIVLEGPAPAQGTPDVSSALDKLKEFGNTLEDKARELISRIKQSELSAKMREWFSETFQKVKEKLKIDS

SEQ ID NO: 953 - protein, 83 aa, Homo Sapiens; identical to SEQ ID NO: 952

SEQ ID NO: 954 - protein, 92 aa, Homo Sapiens
MRLFLSLPVLVVVLSIVLEGPAPAQGTPDVSSALDKLKEFGNTLEDKARELISRIKQSELSAKMRLEPFPGHGRAGGVVFRDISESEGETQD

SEQ ID NO: 955 - protein, 129 aa, Homo Sapiens
MRLFLSLPVLVVVLSIVLEGPAPAQGTPDVSSALDKLKEFGNTLEDKARELISRIKQSELSAKMRLEPFPGHGRAGVCFWVEPWQMVQDEQIEKKTSPGEADNIPLVTQLDLKGVVFRDISESEGETQD

SEQ ID NO: 956 - protein, 29 aa, Homo Sapiens
MRLFLSLPVLVVVLSIVLEGSGFQRHFRK

SEQ ID NO: 957 - protein, 39 aa, Homo Sapiens
MRLFLSLPVLVVVLSIVLEGSPRLSPAGAKSAQESTSNR

SEQ ID NO: 958 - protein, 87 aa, Homo Sapiens
MGTRLLPALFLVLLVLGFEVQGTQQPQQDEMPSPTFLTQVKESLSSYWESAKTAAQNLDLYSKSTAAMSTYTGIFTDQVLSVLKGEE

SEQ ID NO: 959 - protein, 72 aa, Homo Sapiens
MGTRLLPALFLVLLVLGFEVQGTQQPQQDEMPSPTFLTQVKESLSSYWESAKTAAQNLYEKTYLPAVDEKLR

SEQ ID NO: 960 - protein, 101 aa, Homo Sapiens
MGTRLLPALFLVLLVLGFEVQGTQQPQQDEMPSPTFLTQVKESLSSYWESAKTAAQNLYEKTYLPAVDEKLRDLYSKSTAAMSTYTGIFTDQVLSVLKGEE

SEQ ID NO: 961 - protein, 101 aa, Homo Sapiens; identical to SEQ ID NO: 960

SEQ ID NO: 962 - protein, 47 aa, Homo Sapiens
MGTRLLPALFLVLLVLGFGEGISLQLLGVSKDSRPEPVREDIPARCR

SEQ ID NO: 963 - protein, 117 aa, Homo Sapiens
MGTWGAPHRTLPCRNRGAMQPRVLLVVALLALLASARASEAEDASLLSFMQGYMKHATKTAKDALSSVQESQVAQQARGWVTDGFSSLKDYWSTVKDKFSEFWDLDPEVRPTSAVAA

SEQ ID NO: 964 - protein, 117 aa, Homo Sapiens; identical to SEQ ID NO: 963

SEQ ID NO: 965 - protein, 55 aa, Homo Sapiens
MQPRVLLVVALLALLASARASEAEDASLLSFMQGYMKHATKTAKDALSSVQESQV

SEQ ID NO: 966 - protein, 99 aa, Homo Sapiens
MQPRVLLVVALLALLASARASEAEDASLLSFMQGYMKHATKTAKDALSSVQESQVAQQARGWVTDGFSSLKDYWSTVKDKFSEFWDLDPEVRPTSAVAA

SEQ ID NO: 967 - protein, 73 aa, Homo Sapiens
MSLLRNRLQALPALCLCVLVLACIGACQPEAQEGTLSPPPKLKMSRWSLVRGRMKELLETVVNRTRDGWQWFW

SEQ ID NO: 968 - protein, 127 aa, Homo Sapiens
MSLLRNRLQALPALCLCVLVLACIGACQPEAQEGTLSPPPKLKMSRWSLVRGRMKELLETVVNRTRDGWQWFWSPSTFRGFMQTYYDDHLRDLGPLTKAWFLESKDSLLKKTHSLCPRLVCGDKDQG

SEQ ID NO: 969 - protein, 178 aa, Homo Sapiens
MSLLRNRLQALPALCLCVLVLACIGACQPEAQEGTLSPPPKLKMSRWSLVRGRMKELLETVVNRTRDGWQWFWSLDTMGTRLLPALFLVLLVLGFEVQGTQQPQQDEMPSPTFLTQVKESLSSYWESAKTAAQNLYEKTYLPAVDEKLRDLYSKSTAAMSTYTGIFTDQVLSVLKGEE

SEQ ID NO: 970 - protein, 127 aa, Homo Sapiens; identical to SEQ ID NO: 968

SEQ ID NO: 971 - protein, 215 aa, Homo Sapiens
MFKQLSCISLPSSCDYSSRSLLQPPSPKMVMLLLLLSALAGLFGAAEGQAFHLGKCPNPPVQENFDVNKYLGRWYEIEKIPTTFENGRCIQANYSLMENGKIKVLNQELRADGTVNQIEGEATPVNLTEPAKLEVKFSWFMPSAPYWILATDYENYALVYSCTCIIQLFHVDFAWILARNPNLPPETVDSLKNILTSNNIDVKKMTVTDQVNCPK

SEQ ID NO: 972 - protein, 108 aa, Homo Sapiens
MVMLLLLLSALAGLFGAAEGQAFHLGKCPNPPVQENFDVNKTESHFVTQGGVQHHHLGSLQPPPPGFKQFSCLSLPSSWDYSISEDGTKLRRSQQPLRMDAASRPTTH

SEQ ID NO: 973 - protein, 149 aa, Homo Sapiens
MVMLLLLLSALAGLFGAAEGQAFHLGKCPNPPVQENFDVNKYLGRWYEIEKIPTTFENGRCIQANYSLMENGKIKVLNQELRADGTVNQIEGEATPVNLTEPAKLEVKFSWFMPSAPYWILATDYENYALVYSCTCIIQLFHVDFAWIL

SEQ ID NO: 974 - protein, 189 aa, Homo Sapiens
MVMLLLLLSALAGLFGAAEGQAFHLGKCPNPPVQENFDVNKYLGRWYEIEKIPTTFENGRCIQANYSLMENGKIKVLNQELRADGTVNQIEGEATPVNLTEPAKLEVKFSWFMPSAPYWILATDYENYALVYSCTCIIQLFHVDFAWILARNPNLPPETVDSLKNILTSNNIDVKKMTVTDQVNCPKLS

SEQ ID NO: 975 - protein, 216 aa, Homo Sapiens
MKVLWAALLVTFLAGCQAKVEQAVETEPEPELRQQTEWQSGQRWELALGRFWDYLRWVQTLSEQVQEELLSSQVTQELRALMDETMKELKAYKSELEEQLTPVAEETRARLSKELQAAQARLGADMEDVCGRLVQYRGEVQAMLGQSTEELRVRLASHLRKLRKRLLRDADDLQKRLAVYQAGAREGAERGLSAIRERLGPLVEQGRVRAATVGSL

SEQ ID NO: 976 - protein, 219 aa, Homo Sapiens
MKVLWAALLVTFLAGCQAKVEQAVETEPEPELRQQTEWQSGQRWELALGRFWDYLRWVQTLSEQVQEELLSSQVTQELRALMDETMKELKAYKSELEEQLTPVAEETRARLSKELQAAQARLGADMEDVCGRLVQYRGEVQAMLGQSTEELRVRLASHLRKLRKRLLRDADDLQKRLAVYQAGAREGAERGLSAIRERLGPLVEQGRVRAATVGSLAGQ

SEQ ID NO: 977 - protein, 317 aa, Homo Sapiens [sequence omitted]

SEQ ID NO: 978 - protein, 269 aa, Homo Sapiens
MSSGASRKSWDPGNPWPPDWPITGRKMKVLWAALLVTFLAGCQAKVEQAVETEPEPELRQQTEWQSGQRWELALGRFWDYLRWVQTLSEQVQEELLSSQVTQELRALMDETMKELKAYKSELEEQLTPVAEETRARLSKELQAAQARLGADMEDVCGRLVQYRGEVQAMLGQSTEELRVRLASHLRKLRKRLLRDADDLQKRLAVYQAGAREGAERGLSAIRERLGPLVEQGRVRAATVGSLAGQPLQERAQAWGERLRARMEEMGSRT

SEQ ID NO: 979 - protein, 326 aa, Homo Sapiens
MTGLCGYSAPDMRGLRLIMIPVELLLCYLLLHPVDATSYGKQTNVLMHFPLSLESQTPSSDPLSCQFLHPKSLPGFSHMAPLPKFLVSLALRNALEEAGCQADVWALQLQLYRQGGVNATQVLIQHLRGLQKGRSTERNVSVEALASALQLLAREQQSTGRVGRSLPTEDCENEKEQAVHNVVQLLPGVGTFYNLGTALYYATQNCLGKARERGRDGAIDLGYDLLMTMAGMSGGPMGLAISAALKPALRSGVQQLIQYYQDQKDANISQPETTKEGLRAISDVSDLEETTTLASFISEVVSSAPYWGWAIIKSYDLDPGAGSLEI

SEQ ID NO: 980 - protein, 181 aa, Homo Sapiens
MISPVLILFSSFLCHVAIAGRTCPKPDDLPFSTVVPLKTFYEPGEEITYSCKPGYVSRGGMRKFICPLTGLWPINTLKCTPRVCPFAGILENGAVRYTTFEYPNTISFSCNTGFYLNGADSAKCTEEGKWSPELPVCAPIICPPPSIPTFATLRVYKPSAGNNSLYRDTAVFECLPQHAMF

SEQ ID NO: 981 - protein, 345 aa, Homo Sapiens
MISPVLILFSSFLCHVAIAGRTCPKPDDLPFSTVVPLKTFYEPGEEITYSCKPGYVSRGGMRKFICPLTGLWPINTLKCTPRVCPFAGILENGAVRYTTFEYPNTISFSCNTGFYLNGADSAKCTEEGKWSPELPVCAPIICPPPSIPTFATLRVYKPSAGNNSLYRDTAVFECLPQHAMFGNDTITCTTHGNWTKLPECREVKCPFPSRPDNGFVNYPAKPTLYYKDKATFGCHDGYSLDGPEEIECTKLGNWSAMPSCKASCKVPVKKATVVYQGERVKIQEKFKNGMLHGDKVSFFCKNKEKKCSYTEDAQCIDGTIEVPKCFKEHSSLAFWKTDASDVKPC

SEQ ID NO: 982 - protein, 200 aa, Homo Sapiens
MRKFICPLTGLWPINTLKCTPRVCPFAGILENGAVRYTTFEYPNTISFSCNTGFYLNGADSAKCTEEGKWSPELPVCAPIICPPPSIPTFATLRVYKPSAGNNSLYRDTAVFECLPQHAMFGNDTITCTTHGNWTKLPECREVKCPFPSRPDNGFVNYPAKPTLYYKDKATFGCHDGYSLDGPEEIECTKLGNWSAMPSC

SEQ ID NO: 983 - protein, 104 aa, Homo Sapiens
  misc_feature (1)..(1): Xaa can be any naturally occurring amino acid
XQHAMFGNDTITCTTHGNWTKLPECREVKCPFPSRPDNGFVNYPAKPTLYYKDKATFGCHDGYSLDGPEEIECTKLGNWSAMPSCKEHSSLAFWKTDASDVKPC

SEQ ID NO: 984 - protein, 160 aa, Homo Sapiens
MEGAALLRVSVLCIWMSALFLGVGVRAEEAGARVQQNVPSGTDTGDPQSKPLGDWAAGTMDPESSIFIEDAIKYFKEKVSTQNLLLLLTDNEAWNGFVAAAELPRNEADELRKALDNLARQMIMKDKNWHDKGQQYRNWFLKEFPRLKSELEDNIRRLRA

SEQ ID NO: 985 - protein, 398 aa, Homo Sapiens
MEGAALLRVSVLCIWMSALFLGVGVRAEEAGARVQQNVPSGTDTGDPQSKPLGDWAAGTMDPESSIFIEDAIKYFKEKVSTQNLLLLLTDNEAWNGFVAAAELPRNEADELRKALDNLARQMIMKDKNWHDKGQQYRNWFLKEFPRLKSELEDNIRRLRALADGVQKVHKGTTIANVVSGSLSISSGILTLVGMGLAPFTEGGSLVLLEPGMELGITAALTGITSSTMDYGKKWWTQAQAHDLVIKSLDKLKEVREFLGENISNFLSLAGNTYQLTRGIGKDIRALRRARANLQSVPHASASRPRVTEPISAESGEQVERVNEPSILEMSRGVKLTDVAPVSFFLVLDVVYLVYESKHLHEGAKSETAEELKKVAQELEEKLNILNNNYKILQADQEL

SEQ ID NO: 986 - protein, 398 aa, Homo Sapiens; identical to SEQ ID NO: 985

SEQ ID NO: 987 - protein, 398 aa, Homo Sapiens; identical to SEQ ID NO: 985

SEQ ID NO: 988 - protein, 141 aa, Homo Sapiens
MEGAALLRVSVLCIWMSALFLGVGVRAEEAGARVQQNVPSGTDTGDPQSKPLGDWAAGTMDPGPAGSRGDSGEPCTLRPACRGQRQHGGASRISAEGPAPMPRRRTPSTAHLRVPKTSRRNLLCMRAVSLLRMPLSISRKK

SEQ ID NO: 989 - protein, 141 aa, Homo Sapiens; identical to SEQ ID NO: 988

SEQ ID NO: 990 - protein, 142 aa, Homo Sapiens
MEGAALLRVSVLCIWMSALFLGVGVRAEEAGARVQQNVPSGTDTGDPQSKPLGDWAAGTMDPGPAGSRGDSGEPCTLRPACRGQRQHGGASRISAEGPAPMPRRRTPSTAHLRVPKTSRRNLLCMVVVLNAVEFETLFLNFK

SEQ ID NO: 991 - protein, 380 aa, Homo Sapiens
MEGAALLRVSVLCIWVQQNVPSGTDTGDPQSKPLGDWAAGTMDPESSIFIEDAIKYFKEKVSTQNLLLLLTDNEAWNGFVAAAELPRNEADELRKALDNLARQMIMKDKNWHDKGQQYRNWFLKEFPRLKSELEDNIRRLRALADGVQKVHKGTTIANVVSGSLSISSGILTLVGMGLAPFTEGGSLVLLEPGMELGITAALTGITSSTMDYGKKWWTQAQAHDLVIKSLDKLKEVREFLGENISNFLSLAGNTYQLTRGIGKDIRALRRARANLQSVPHASASRPRVTEPISAESGEQVERVNEPSILEMSRGVKLTDVAPVSFFLVLDVVYLVYESKHLHEGAKSETAEELKKVAQELEEKLNILNNNYKILQADQEL

SEQ ID NO: 992 - protein, 123 aa, Homo Sapiens
MEGAALLRVSVLCIWVQQNVPSGTDTGDPQSKPLGDWAAGTMDPGPAGSRGDSGEPCTLRPACRGQRQHGGASRISAEGPAPMPRRRTPSTAHLRVPKTSRRNLLCMRAVSLLRMPLSISRKK

SEQ ID NO: 993 - protein, 414 aa, Homo Sapiens
MRFKSHTVELRRPCSDMEGAALLRVSVLCIWMSALFLGVGVRAEEAGARVQQNVPSGTDTGDPQSKPLGDWAAGTMDPESSIFIEDAIKYFKEKVSTQNLLLLLTDNEAWNGFVAAAELPRNEADELRKALDNLARQMIMKDKNWHDKGQQYRNWFLKEFPRLKSELEDNIRRLRALADGVQKVHKGTTIANVVSGSLSISSGILTLVGMGLAPFTEGGSLVLLEPGMELGITAALTGITSSTMDYGKKWWTQAQAHDLVIKSLDKLKEVREFLGENISNFLSLAGNTYQLTRGIGKDIRALRRARANLQSVPHASASRPRVTEPISAESGEQVERVNEPSILEMSRGVKLTDVAPVSFFLVLDVVYLVYESKHLHEGAKSETAEELKKVAQELEEKLNILNNNYKILQADQEL

SEQ ID NO: 994 - protein, 118 aa, Homo Sapiens
MRFKSHTVELRSTLSQPLFSCSRRRPCSDMEGAALLRVSVLCIWMSALFLGVGVRAEEAGARVQQNVPSGTDTGDPQSKPLGDWAAGTMDPESSIFIEDAIKYFKEKVSTQNLLLLLT

SEQ ID NO: 995 - protein, 331 aa, Homo Sapiens
MDSEKKRFTEEATKYFRERVSPVHLQILLTNNEAWKRFVTAAELPRDEADALYEALKKLRTYAAIEDEYVQQKDEQFREWFLKEFPQVKRKIQESIEKLRALANGIEEVHRGCTISNVVSSSTGAASGIMSLAGLVLAPFTAGTSLALTAAGVGLGAASAVTGITTSIVEHSYTSSAEAEASRLTATSIDRLKVFKEVMRDITPNLLSLLNNYYEATQTIGSEIRAIRQARARARLPVTTWRISAGSGGQAERTIAGTTRAVSRGARILSATTSGIFLALDVVNLVYESKHLHEGAKSASAEELRRQAQELEENLMELTQIYQRLNPCHTH

SEQ ID NO: 996 - protein, 402 aa, Homo Sapiens
MGLGQGWGWEASCFACLIRSCCQVVTFTFPFGFQGISQSLENVSGYYADARLEVGSTQLRTAGSCSHSFKRSFLEKKRFTEEATKYFRERVSPVHLQILLTNNEAWKRFVTAAELPRDEADALYEALKKLRTYAAIEDEYVQQKDEQFREWFLKEFPQVKRKIQESIEKLRALANGIEEVHRGCTISNVVSSSTGAASGIMSLAGLVLAPFTAGTSLALTAAGVGLGAASAVTGITTSIVEHSYTSSAEAEASRLTATSIDRLKVFKEVMRDITPNLLSLLNNYYEATQTIGSEIRAIRQARARARLPVTTWRISAGSGGQAERTIAGTTRAVSRGARILSATTSGIFLALDVVNLVYESKHLHEGAKSASAEELRRQAQELEENLMELTQIYQRLNPCHTH

SEQ ID NO: 997 - protein, 97 aa, Homo Sapiens
MGLGQGWGWEASCFACLIRSCCQVVTFTFPFGFQGISQSLENVSGYYADARLEVGSTQLRTAGSCSHSFKRSFLGLRKKTNPSSQVSDWRAPWKVSQ

SEQ ID NO: 998 - protein, 82 aa, Homo Sapiens
MGLGQGWGWEASCFACLIRSCCQVVTFTFPFGFQGISQSLENVSGYYADARLEVGSTQLRTAGSCSHSFKRSFLGQKDPALV

SEQ ID NO: 999 - protein, 82 aa, Homo Sapiens; identical to SEQ ID NO: 998

SEQ ID NO: 1000 - protein, 202 aa, Homo Sapiens
MSLAGLVLAPFTAGTSLALTAAGVGLGAASAVTGITTSIVEHSYTSSAEAEASRLTATSIDRLKVFKEVMRDITPNLLSLLNNYYEATQTIGSEIRAIRQARARARLPVTTWRISAGSGGQAERTIAGTTRAVSRGARILSATTSGIFLALDVVNLVYESKHLHEGAKSASAEELRRQAQELEENLMELTQIYQRLNPCHTH

SEQ ID NO: 1001 - protein, 202 aa, Homo Sapiens; identical to SEQ ID NO: 1000

SEQ ID NO: 1002 - protein, 202 aa, Homo Sapiens; identical to SEQ ID NO: 1000

SEQ ID NO: 1003 - protein, 40 aa, Homo Sapiens
SQSLENVSGYYADARLEVGSTQLRTAGSCSHSFKRSFLGE

SEQ ID NO: 1004 - protein, 39 aa, Homo Sapiens
  misc_feature (1)..(1): Xaa can be any naturally occurring amino acid
XYADARLEVGSTQLRTAGSCSHSFKRSFLAWLPQPPRFL

SEQ ID NO: 1005 - protein, 86 aa, Homo Sapiens
  misc_feature (1)..(1): Xaa can be any naturally occurring amino acid
XYADARLEVGSTQLRTAGSCSHSFKRSFLAWWYVPVGTTTWEVEAEASLAARTYRQKQGGQRVSSTAPVNSPRQTLGHRVQDTDLE

SEQ ID NO: 1006 - protein, 33 aa, Homo Sapiens
  misc_feature (1)..(1): Xaa can be any naturally occurring amino acid
XYADARLEVGSTQLRTAGSCSHSFKRSFLEMSI

SEQ ID NO: 1007 - protein, 52 aa, Homo Sapiens
  misc_feature (1)..(1): Xaa can be any naturally occurring amino acid
XYADARLEVGSTQLRTAGSCSHSFKRSFLGLRKKTNPSSQVSDWRAPWKVSQ

SEQ ID NO: 1008 - protein, 52 aa, Homo Sapiens; identical to SEQ ID NO: 1007
  misc_feature (1)..(1): Xaa can be any naturally occurring amino acid

SEQ ID NO: 1009 - protein, 37 aa, Homo Sapiens
  misc_feature (1)..(1): Xaa can be any naturally occurring amino acid
XYADARLEVGSTQLRTAGSCSHSFKRSFLGQKDPALV

SEQ ID NO: 1010 - protein, 116 aa, Homo Sapiens
MAAGSAPMQLHLRATIRMKDGLCVPRKWIYHLTEGSTDLRTEGRPDMKTELFSSSCPGGIMLNETGQGYQRFLLYNRSPHPPEKCVEEFKSLTSCLDSKAFLLTPRNQEACELSNN

SEQ ID NO: 1011 - protein, 129 aa, Homo Sapiens
MAAGSAPMQLHLRATIRMKDGLCVPRKWIYHLTEGSTDLRTEGRPDMKTELFSSSCPGGIMLNETGQGYQRFLLYNRSPHPPEKCVEEFKSLTSCLDSKAFLLTPRNQGKGLKSHKTGLGLTKSSGVTG

SEQ ID NO: 1012 - protein, 188 aa, Homo Sapiens
MFHQIWAALLYFYGIILNSIYQCPEHSQLTTLGVDGKEFPEVHLGQWYFIAGAAPTKEELATFDPVDNIVFNMAAGSAPMQLHLRATIRMKDGLCVPRKWIYHLTEGSTDLRTEGRPDMKTELFSSSCPGGIMLNETGQGYQRFLLYNRSPHPPEKCVEEFKSLTSCLDSKAFLLTPRNQEACELSNN

SEQ ID NO: 1013 - protein, 268 aa, Homo Sapiens
MAAIRMGKLTTMPAGLIYASVSVHAAKQEESKKQLVKPEQLPIYTAPPLQSKYVEEQPGHLQMGFASIRTATGCYIGWCKGVYVFVKNGIMDTVQFGKDAYVYLKNPPRDFLPKMGVITVSGLAGLVSARKGSKFKKITYPLGLATLGATVCYPVQSVIIAKVTAKKVYATSQQIFGAVKSLWTKSSKEESLPKPKEKTKLGSSSEIEVPAKTTHVLKHSVPLPTELSSEAKTKSESTSGATQFMPDPKLMDHGQSHPEDIDMYSTRS

SEQ ID NO: 1014 - protein, 263 aa, Homo Sapiens [sequence omitted]

SEQ ID NO: 1015 - protein, 268 aa, Homo Sapiens [sequence omitted]

SEQ ID NO: 1016 - protein, 552 aa, Homo Sapiens
MAECNLVAILISSIDNPLDKNLDNGGNSCLDFRPLNSFSQPQVLLAAAVCTKAGKAIVSRQFVEMTRTRIEGLLAAFPKLMNTGKQHTFVETESVRYVYQPMEKLYMVLITTKNSNILEDLETLRLFSRVIPEYCRALEENEISEHCFDLIFAFDEIVALGYRENVNLAQIRTFTEMDSHEEKVFRAVRETQEREAKAEMRRKAKELQQARRDAERQGKKAPGFGGFGSSAVSGGSTAAMITETIIETDKPKVAPAPARPSGPSKALKLGAKGKEVDNFVDKLKSEGETIMSSSMGKRTSEATKMHAPPINMESVHMKIEEKITLTCGRDGGLQNMELHGMIMLRISDDKYGRIRLHVENEDKKGVQLQTHPNVDKKLFTAESLIGLKNPEKSFPVNSDVGVLKWRLQTTEESFIPLTINCWPSESGNGCDVNIEYELQEDNLELNDVVITIPLPSGVGAPVIGEIDGEYRHDSRRNTLEWCLPVIDAKNKSGSLEFSIAGQPNDFFPVQVSFVSKKNYCNIQVTKVTQVDGNSPVRFSTETTFLVDKYEIL

SEQ ID NO: 1017 - protein, 423 aa, Homo Sapiens
MIPEYCRALEENEISEHCFDLIFAFDEIVALGYRENVNLAQIRTFTEMDSHEEKVFRAVRETQEREAKAEMRRKAKELQQARRDAERQGKKAPGFGGFGSSAVSGGSTAAMITETIIETDKPKVAPAPARPSGPSKALKLGAKGKEVDNFVDKLKSEGETIMSSSMGKRTSEATKMHAPPINMESVHMKIEEKITLTCGRDGGLQNMELHGMIMLRISDDKYGRIRLHVENEDKKGVQLQTHPNVDKKLFTAESLIGLKNPEKSFPVNSDVGVLKWRLQTTEESFIPLTINCWPSESGNGCDVNIEYELQEDNLELNDVVITIPLPSGVGAPVIGEIDGEYRHDSRRNTLEWCLPVIDAKNKSGSLEFSIAGQPNDFFPVQVSFVSKKNYCNIQVTKVTQVDGNSPVRFSTETTFLVDKYEIL

SEQ ID NO: 1018 - protein, 83 aa, Homo Sapiens
MVLLAAAVCTKAGKAIVSRQFVEMTRTRIEGLLAAFPKLMNTGKQHTFVETESIRMSSVLFPYQFIPSSLCQVVFLSGPVLPV

SEQ ID NO: 1019 - protein, 189 aa, Homo Sapiens
MVLLAAAVCTKAGKAIVSRQFVEMTRTRIEGLLAAFPKLMNTGKQHTFVETESVRYVYQPMEKLYMVLITTKNSNILEDLETLRLFSRVIPEYCRALEENEISEHCFDLIFAFDEIVALGYRENVNLAQIRTFTEMDSHEEKVFRAVRETQEREAKAEMRRKAKELQQAQSVGITGMSHHAQLLLYFNP

SEQ ID NO: 1020 - protein, 511 aa, Homo Sapiens
MVLLAAAVCTKAGKAIVSRQFVEMTRTRIEGLLAAFPKLMNTGKQHTFVETESVRYVYQPMEKLYMVLITTKNSNILEDLETLRLFSRVIPEYCRALEENEISEHCFDLIFAFDEIVALGYRENVNLAQIRTFTEMDSHEEKVFRAVRETQEREAKAEMRRKAKELQQARRDAERQGKKAPGFGGFGSSAVSGGSTAAMITETIIETDKPKVAPAPARPSGPSKALKLGAKGKEVDNFVDKLKSEGETIMSSSMGKRTSEATKMHAPPINMESVHMKIEEKITLTCGRDGGLQNMELHGMIMLRISDDKYGRIRLHVENEDKKGVQLQTHPNVDKKLFTAESLIGLKNPEKSFPVNSDVGVLKWRLQTTEESFIPLTINCWPSESGNGCDVNIEYELQEDNLELNDVVITIPLPSGVGAPVIGEIDGEYRHDSRRNTLEWCLPVIDAKNKSGSLEFSIAGQPNDFFPVQVSFVSKKNYCNIQVTKVTQVDGNSPVRFSTETTFLVDKYEIL

SEQ ID NO: 1021 - protein, 256 aa, Homo Sapiens
MKPALCLVAMGALVMDSSPQCTKQLLSERFGRGSRTVDLELELQIELLRETKRKYESVLQLGRALTAHLYSLLQTQHALGDAFADLSQKSPELQEEFGYNAETQKLLCKNGETLLGAVNFFVSSINTLVTKTMEDTLMTVKQYEAARLEYDAYRTDLEELSLGPRDAGTRGRLESAQATFQAHRDKYEKLRGDVAIKLKFLEENKIKVMHKQLLLFHNAVSAYFAGNQKQLEQTLQQFNIKLRPPGAEKPSWLEEQ

SEQ ID NO: 1022 - protein, 374 aa, Homo Sapiens
MTDGILGKAATMEIPIHGNGEARQLPEDDGLEQDLQQVMVSGPNLNETSIVSGGYGGSGDGLIPTGKSISCARREVWVGPQRCLVYLREAGVRELDPLGSGRHPSHSTTPSGPGDEVARGIAGEKFDIVKKWGINTYKCTKQLLSERFGRGSRTVDLELELQIELLRETKRKYESVLQLGRALTAHLYSLLQTQHALGDAFADLSQKSPELQEEFGYNAETQKLLCKNGETLLGAVNFFVSSINTLVTKTMEDTLMTVKQYEAARLEYDAYRTDLEELSLGPRDAGTRGRLESAQATFQAHRDKYEKLRGDVAIKLKFLEENKIKVMHKQLLLFHNAVSAYFAGNQKQLEQTLQQFNIKLRPPGAEKPSWLEEQ

SEQ ID NO: 1023 - protein, 159 aa, Homo Sapiens
MTDGILGKAATMEIPIHGNGEARQLPEDDGLEQDLQQVMVSGPNLNETSIVSGGYGGSGDGLIPTGSGRHPSHSTTPSGPGDEVARGIAGEKFDIVKKWGINTYKCTKQLLSERFGRGSRTVDLELELQIELLRETKRKRNLATMQRHRNYYARMGKRC

SEQ ID NO: 1024 - protein, 341 aa, Homo Sapiens
MTDGILGKAATMEIPIHGNGEARQLPEDDGLEQDLQQVMVSGPNLNETSIVSGGYGGSGDGLIPTGSGRHPSHSTTPSGPGDEVARGIAGEKFDIVKKWGINTYKCTKQLLSERFGRGSRTVDLELELQIELLRETKRKYESVLQLGRALTAHLYSLLQTQHALGDAFADLSQKSPELQEEFGYNAETQKLLCKNGETLLGAVNFFVSSINTLVTKTMEDTLMTVKQYEAARLEYDAYRTDLEELSLGPRDAGTRGRLESAQATFQAHRDKYEKLRGDVAIKLKFLEENKIKVMHKQLLLFHNAVSAYFAGNQKQLEQTLQQFNIKLRPPGAEKPSWLEEQ

SEQ ID NO: 1025 - protein, 341 aa, Homo Sapiens; identical to SEQ ID NO: 1024

SEQ ID NO: 1026 - protein, 202 aa, Homo Sapiens
MTDGILGKAATMEIPIHGNGEARQLPEDDGLEQDLQQVMVSGPNLNETSIVSGGYGGSGDGLIPTGSGRHPSHSTTPSGPGDEVARGIAGEKFDIVKKWGINTYKCTKQLLSERFGRGSRTVDLELELQIELLRETKRKYESVLQLGRALTAHLYSLLQTQHALGDAFADLSQKSPELQPTGRTPSGWAQPYPQQHSPVEAA

SEQ ID NO: 1027 - protein, 303 aa, Homo Sapiens
MVSGPNLNETSIVSGGYGGSGDGLIPTGSGRHPSHSTTPSGPGDEVARGIAGEKFDIVKKWGINTYKCTKQLLSERFGRGSRTVDLELELQIELLRETKRKYESVLQLGRALTAHLYSLLQTQHALGDAFADLSQKSPELQEEFGYNAETQKLLCKNGETLLGAVNFFVSSINTLVTKTMEDTLMTVKQYEAARLEYDAYRTDLEELSLGPRDAGTRGRLESAQATFQAHRDKYEKLRGDVAIKLKFLEENKIKVMHKQLLLFHNAVSAYFAGNQKQLEQTLQQFNIKLRPPGAEKPSWLEEQ

SEQ ID NO: 1028 - protein, 535 aa, Homo Sapiens
MAWILDCLFASAFEPRPRRVSVLGGAPGHNPDRRTKMVSIHSLSELERLKLQETAYHELVARHFLSEFKPDRALPIDRPNTLDKWFLILRGQQRAVSHKTFGISLEEVLVNEFTRRKHLELTATMQVEEATGQAAGRRRGNVVRRVFGRIRRFFSRRRNEPTLPREFTRRGRRGAVSVDSLAELEDGALLLQTLQLSKISFPIGQRLLGSKRKMSLNPIAKQIPQVVEACCQFIEKHGLSAVGIFTLEYSVQRVRQLREEFDQGLDVVLDDNQNVHDVAALLKEFFRDMKDSLLPDDLYMSFLLTATLKPQDQLSALQLLVYLMPPCHSDTLERLLKALHKITENCEDSIGIDGQLVPGNRMTSTNLALVFGSALLKKGKFGKRESRKTKLGIDHYVASVNVVRAMIDNWDVLFQVPPHIQRQVAKRVWKSSPEALDFIRRRNLRKIQSARIKMEEDALLSDPVETSAEARAAVLAQSKPSDEGSSEEPAVPSGTARSHDDEEGAGNPPIPEQDRPLLRVPREKEAKTGVSYFFP

SEQ ID NO: 1029 - protein, 547 aa, Homo Sapiens
MGGCIPFLKAARALCPRIMPPLLLLSAFIFLVSVLGGAPGHNPDRRTKMVSIHSLSELERLKLQETAYHELVARHFLSEFKPDRALPIDRPNTLDKWFLILRGQQRAVSHKTFGISLEEVLVNEFTRRKHLELTATMQVEEATGQAAGRRRGNVVRRVFGRIRRFFSRRRNEPTLPREFTRRGRRGAVSVDSLAELEDGALLLQTLQLSKISFPIGQRLLGSKRKMSLNPIAKQIPQVVEACCQFIEKHGLSAVGIFTLEYSVQRVRQLREEFDQGLDVVLDDNQNVHDVAALLKEFFRDMKDSLLPDDLYMSFLLTATLKPQDQLSALQLLVYLMPPCHSDTLERLLKALHKITENCEDSIGIDGQLVPGNRMTSTNLALVFGSALLKKGKFGKRESRKTKLGIDHYVASVNVVRAMIDNWDVLFQVPPHIQRQVAKRVWKSSPEALDFIRRRNLRKIQSARIKMEEDALLSDPVETSAEARAAVLAQSKPSDEGSSEEPAVPSGTARSHDDEEGAGNPPIPEQDRPLLRVPREKEAKTGVSYFFP

SEQ ID NO: 1030 - protein, 411 aa, Homo Sapiens
MQVEEATGQAAGRRRGNVVRRVFGRIRRFFSRRRNEPTLPREFTRRGRRGAVSVDSLAELEDGALLLQTLQLSKISFPIGQRLLGSKRKMSLNPIAKQIPQVVEACCQFIEKHGLSAVGIFTLEYSVQRVRQLREEFDQGLDVVLDDNQNVHDVAALLKEFFRDMKDSLLPDDLYMSFLLTATLKPQDQLSALQLLVYLMPPCHSDTLERLLKALHKITENCEDSIGIDGQLVPGNRMTSTNLALVFGSALLKKGKFGKRESRKTKLGIDHYVASVNVVRAMIDNWDVLFQVPPHIQRQVAKRVWKSSPEALDFIRRRNLRKIQSARIKMEEDALLSDPVETSAEARAAVLAQSKPSDEGSSEEPAVPSGTARSHDDEEGAGNPPIPEQDRPLLRVPREKEAKTGVSYFFP

SEQ ID NO: 1031 - protein, 411 aa, Homo Sapiens; identical to SEQ ID NO: 1030

SEQ ID NO: 1032 - protein, 516 aa, Homo Sapiens
MSVLGGAPGHNPDRRTKMVSIHSLSELERLKLQETAYHELVARHFLSEFKPDRALPIDRPNTLDKWFLILRGQQRAVSHKTFGISLEEVLVNEFTRRKHLELTATMQVEEATGQAAGRRRGNVVRRVFGRIRRFFSRRRNEPTLPREFTRRGRRGAVSVDSLAELEDGALLLQTLQLSKISFPIGQRLLGSKRKMSLNPIAKQIPQVVEACCQFIEKHGLSAVGIFTLEYSVQRVRQLREEFDQGLDVVLDDNQNVHDVAALLKEFFRDMKDSLLPDDLYMSFLLTATLKPQDQLSALQLLVYLMPPCHSDTLERLLKALHKITENCEDSIGIDGQLVPGNRMTSTNLALVFGSALLKKGKFGKRESRKTKLGIDHYVASVNVVRAMIDNWDVLFQVPPHIQRQVAKRVWKSSPEALDFIRRRNLRKIQSARIKMEEDALLSDPVETSAEARAAVLAQSKPSDEGSSEEPAVPSGTARSHDDEEGAGNPPIPEQDRPLLRVPREKEAKTGVSYFFP

SEQ ID NO: 1033 - protein, 218 aa, Homo Sapiens
MVSIHSLSELERLKLQETAYHELVARHFLSEFKPDRALPIDRPNTLDKWFLILRGQQRAVSHKTFGISLEEVLVNEFTRRKHLELTATMQVEEATGQAAGRRRGNVVRRVFGRIRRFFSRRRNEPTLPREFTRRGRRGAVSVDSLAELEDGALLLQTLQLSKISFPIGQRLLGSKRKMSLNPIAKQIPQVVEACCQFIEKHGLSAVGIFTLEYSVQRV

SEQ ID NO: 1034 - protein, 78 aa, Homo Sapiens
GRQDGSESEAVAVALAGRLRELLRDLPPENRASLQYLLRHLRRPASSRLSSSTTAWSSRRSRRRPPGARTSHPTSELR

SEQ ID NO: 1035 - protein, 1019 aa, Homo Sapiens
MCICGTAHPVLDEGPVRCRAGPRDLLEARRPRAHECLGEALRVMHQIISKYPLLNTVETLTAAGTLIAKVKAFHYESNNDLEKQEFEKALETIAVAFSSTVSEFLMGEVDSSTLLAVPPGDSSQSMESLYGPGSEGTPPSLEDCDAGCLPAEEVDVLLQRCEGGVDAALLYAKNMAKYMKDLISYLEKRTTLEMEFAKGLQKIAHNCRQSVMQEPHMPLLSIYSLALEQDLEFGHSMVQAVGTLQTQTFMQPLTLRRLEHEKRRKEIKEAWHRAQRKLQEAESNLRKAKQGYVQRCEDHDKARFLVAKAEEEQAGSAPGAGSTATKTLDKRRRLEEEAKNKAEEAMATYRTCVADAKTQKQELEDTKVTALRQIQEVIRQSDQTIKSATISYYQMMHMQTAPLPVHFQMLCESSKLYDPGQQYASHVRQLQRDQEPDVHYDFEPHVSANAWSPVMRARKSSFNVSDVARPEAAGSPPEEGGCTEGTPAKDHRAGRGHQVHKSWPLSISDSDSGLDPGPGAGDFKKFERTSSSGTMSSTEELVDPDGGAGASAFEQADLNGMTPELPVAVPSGPFRHEGLSKAARTHRLRKLRTPAKCRECNSYVYFQGAECEECCLACHKKCLETLAIQCGHKKLQGRLQLFGQDFSHAARSAPDGVPFIVKKCVCEIERRALRTKGIYRVNGVKTRVEKLCQAFENGKELVELSQASPHDISNVLKLYLRQLPEPLISFRLYHELVGLAKDSLKAEAEAKAASRGRQDGSESEAVAVALAGRLRELLRDLPPENRASLQYLLRHLRRIVEVEQDNKMTPGNLGIVFGPTLLRPRPTEATVSLSSLVDYPHQARVIETLIVHYGLVFEEEPEETPGGQDESSNQRAEVVVQVPYLEAGEAVVYPLQEAAADGCRESRVVSNDSDSDLEEASELLSSSEASALGHLSFLEQQQSEASLEVASGSHSGSEEQLEATAREDGDGDEDGPAQQLSGFNTNQSNNVLQAPLPPMRLRGGRMTLGSCRERQPEFV

SEQ ID NO: 1036 - protein, 1136 aa, Homo Sapiens
MFSRKKRELMKTPSISKKNRAGSPSPQPSGELPRKDGADAVFPGPSLEPPAGSSGVKATGTLKRPTSLSRHASAAGFPLSGAASWTLGRSHRSPLTAASPGELPTEGAGPDVVEDISHLLADVARFAEGLEKLKECVLRDDLLEARRPRAHECLGEALRVMHQIISKYPLLNTVETLTAAGTLIAKVKAFHYESNNDLEKQEFEKALETIAVAFSSTVSEFLMGEVDSSTLLAVPPGDSSQSMESLYGPGSEGTPPSLEDCDAGCLPAEEVDVLLQRCEGGVDAALLYAKNMAKYMKDLISYLEKRTTLEMEFAKGLQKIAHNCRQSVMQEPHMPLLSIYSLALEQDLEFGHSMVQAVGTLQTQTFMQPLTLRRLEHEKRRKEIKEAWHRAQRKLQEAESNLRKAKQGYVQRCEDHDKARFLVAKAEEEQAGSAPGAGSTATKTLDKRRRLEEEAKNKAEEAMATYRTCVADAKTQKQELEDTKVTALRQIQEVIRQSDQTIKSATISYYQMMHMQTAPLPVHFQMLCESSKLYDPGQQYASHVRQLQRDQEPDVHYDFEPHVSANAWSPVMRARKSSFNVSDVARPEAAGSPPEEGGCTEGTPAKDHRAGRGHQVHKSWPLSISDSDSGLDPGPGAGDFKKFERTSSSGTMSSTEELVDPDGGAGASAFEQADLNGMTPELPVAVPSGPFRHEGLSKAARTHRLRKLRTPAKCRECNSYVYFQGAECEECCLACHKKCLETLAIQCGHKKLQGRLQLFGQDFSHAARSAPDGVPFIVKKCVCEIERRALRTKGIYRVNGVKTRVEKLCQAFENGKELVELSQASPHDISNVLKLYLRQLPEPLISFRLYHELVGLAKDSLKAEAEAKAASRGRQDGSESEAVAVALAGRLRELLRDLPPENRASLQYLLRHLRRIVEVEQDNKMTPGNLGIVFGPTLLRPRPTEATVSLSSLVDYPHQARVIETLIVHYGLVFEEEPEETPGGQDESSNQRAEVVVQVPYLEAGEAVVYPLQEAAADGCRESRVVSNDSDSDLEEASELLSSSEASALGHLSFLEQQQSEASLEVASGSHSGSEEQLEATAREDGDGDEDGPAQQLSGFNTNQSNNVLQAPLPPMRLRGGRMTLGSCRERQPEFV

SEQ ID NO: 1037 - protein, 1163 aa, Homo Sapiens
MFSRKKRELMKTPSISKKNRAGSPSPQPSGPHFISGETEAVSRPENPFNELPSDLPKELPRKDGADAVFPGPSLEPPAGSSGVKATGTLKRPTSLSRHASAAGFPLSGAASWTLGRSHRSPLTAASPGELPTEGAGPDVVEDISHLLADVARFAEGLEKLKECVLRDDLLEARRPRAHECLGEALRVMHQIISKYPLLNTVETLTAAGTLIAKVKAFHYESNNDLEKQEFEKALETIAVAFSSTVSEFLMGEVDSSTLLAVPPGDSSQSMESLYGPGSEGTPPSLEDCDAGCLPAEEVDVLLQRCEGGVDAALLYAKNMAKYMKDLISYLEKRTTLEMEFAKGLQKIAHNCRQSVMQEPHMPLLSIYSLALEQDLEFGHSMVQAVGTLQTQTFMQPLTLRRLEHEKRRKEIKEAWHRAQRKLQEAESNLRKAKQGYVQRCEDHDKARFLVAKAEEEQAGSAPGAGSTATKTLDKRRRLEEEAKNKAEEAMATYRTCVADAKTQKQELEDTKVTALRQIQEVIRQSDQTIKSATISYYQMMHMQTAPLPVHFQMLCESSKLYDPGQQYASHVRQLQRDQEPDVHYDFEPHVSANAWSPVMRARKSSFNVSDVARPEAAGSPPEEGGCTEGTPAKDHRAGRGHQVHKSWPLSISDSDSGLDPGPGAGDFKKFERTSSSGTMSSTEELVDPDGGAGASAFEQADLNGMTPELPVAVPSGPFRHEGLSKAARTHRLRKLRTPAKCRECNSYVYFQGAECEECCLACHKKCLETLAIQCGHKKLQGRLQLFGQDFSHAARSAPDGVPFIVKKCVCEIERRALRTKGIYRVNGVKTRVEKLCQAFENGKELVELSQASPHDISNVLKLYLRQLPEPLISFRLYHELVGLAKDSLKAEAEAKAASRGRQDGSESEAVAVALAGRLRELLRDLPPENRASLQYLLRHLRRIVEVEQDNKMTPGNLGIVFGPTLLRPRPTEATVSLSSLVDYPHQARVIETLIVHYGLVFEEEPEETPGGQDESSNQRAEVVVQVPYLEAGEAVVYPLQEAAADGCRESRVVSNDSDSDLEEASELLSSSEASALGHLSFLEQQQSEASLEVASGSHSGSEEQLEATAREDGDGDEDGPAQQLSGFNTNQSNNVLQAPLPPMRLRGGRMTLGSCRERQPEFV

SEQ ID NO: 1038 - protein, 60 aa, Homo Sapiens
MFSRKKRELMKTPSISKKNRAGSPSPQPSGTSLRPAARGPTSAWVRLCVSCIRSSPSTRC

SEQ ID NO: 1039 - protein, 771 aa, Homo Sapiens
MGVGRKGGAGETESHPRIGLELASWLPHPQQEAESNLRKAKQGYVQRCEDHDKARFLVAKAEEEQAGSAPGAGSTATKTLDKRRRLEEEAKNKAEEAMATYRTCVADAKTQKQELEDTKVTALRQIQEVIRQSDQTIKSATISYYQMMHMQTAPLPVHFQMLCESSKLYDPGQQYASHVRQLQRDQEPDVHYDFEPHVSANAWSPVMRARKSSFNVSDVARPEAAGSPPEEGGCTEGTPAKDHRAGRGHQVHKSWPLSISDSDSGLDPGPGAGDFKKFERTSSSGTMSSTEELVDPDGGAGASAFEQADLNGMTPELPVAVPSGPFRHEGLSKAARTHRLRKLRTPAKCRECNSYVYFQGAECEECCLACHKKCLETLAIQCGHKKLQGRLQLFGQDFSHAARSAPDGVPFIVKKCVCEIERRALRTKGIYRVNGVKTRVEKLCQAFENGKELVELSQASPHDISNVLKLYLRQLPEPLISFRLYHELVGLAKDSLKAEAEAKAASRGRQDGSESEAVAVALAGRLRELLRDLPPENRASLQYLLRHLRRIVEVEQDNKMTPGNLGIVFGPTLLRPRPTEATVSLSSLVDYPHQARVIETLIVHYGLVFEEEPEETPGGQDESSNQRAEVVVQVPYLEAGEAVVYPLQEAAADGCRESRVVSNDSDSDLEEASELLSSSEASALGHLSFLEQQQSEASLEVASGSHSGSEEQLEATAREDGDGDEDGPAQQLSGFNTNQSNNVLQAPLPPMRLRGGRMTLGSCRERQPEFV

SEQ ID NO: 1040 - protein, 1140 aa, Homo Sapiens
MLGRRLGARASYSPYRAGRQGPQQRGRDPGIQLTELPRKDGADAVFPGPSLEPPAGSSGVKATGTLKRPTSLSRHASAAGFPLSGAASWTLGRSHRSPLTAASPGELPTEGAGPDVVEDISHLLADVARFAEGLEKLKECVLRDDLLEARRPRAHECLGEALRVMHQIISKYPLLNTVETLTAAGTLIAKVKAFHYESNNDLEKQEFEKALETIAVAFSSTVSEFLMGEVDSSTLLAVPPGDSSQSMESLYGPGSEGTPPSLEDCDAGCLPAEEVDVLLQRCEGGVDAALLYAKNMAKYMKDLISYLEKRTTLEMEFAKGLQKIAHNCRQSVMQEPHMPLLSIYSLALEQDLEFGHSMVQAVGTLQTQTFMQPLTLRRLEHEKRRKEIKEAWHRAQRKLQEAESNLRKAKQGYVQRCEDHDKARFLVAKAEEEQAGSAPGAGSTATKTLDKRRRLEEEAKNKAEEAMATYRTCVADAKTQKQELEDTKVTALRQIQEVIRQSDQTIKSATISYYQMMHMQTAPLPVHFQMLCESSKLYDPGQQYASHVRQLQRDQEPDVHYDFEPHVSANAWSPVMRARKSSFNVSDVARPEAAGSPPEEGGCTEGTPAKDHRAGRGHQVHKSWPLSISDSDSGLDPGPGAGDFKKFERTSSSGTMSSTEELVDPDGGAGASAFEQADLNGMTPELPVAVPSGPFRHEGLSKAARTHRLRKLRTPAKCRECNSYVYFQGAECEECCLACHKKCLETLAIQCGHKKLQGRLQLFGQDFSHAARSAPDGVPFIVKKCVCEIERRALRTKGIYRVNGVKTRVEKLCQAFENGKELVELSQASPHDISNVLKLYLRQLPEPLISFRLYHELVGLAKDSLKAEAEAKAASRGRQDGSESEAVAVALAGRLRELLRDLPPENRASLQYLLRHLRRIVEVEQDNKMTPGNLGIVFGPTLLRPRPTEATVSLSSLVDYPHQARVIETLIVHYGLVFEEEPEETPGGQDESSNQRAEVVVQVPYLEAGEAVVYPLQEAAADGCRESRVVSNDSDSDLEEASELLSSSEASALGHLSFLEQQQSEASLEVASGSHSGSEEQLEATAREDGDGDEDGPAQQLSGFNTNQSNNVLQAPLPPMRLRGGRMTLGSCRERQPEFV

SEQ ID NO: 1041 - protein, 1152 aa, Homo Sapiens
MSRGQRVLKGLLGWVCTWTWAWRARLGARGCGLHVLCPRDLPLPPEELPRKDGADAVFPGPSLEPPAGSSGVKATGTLKRPTSLSRHASAAGFPLSGAASWTLGRSHRSPLTAASPGELPTEGAGPDVVEDISHLLADVARFAEGLEKLKECVLRDDLLEARRPRAHECLGEALRVMHQIISKYPLLNTVETLTAAGTLIAKVKAFHYESNNDLEKQEFEKALETIAVAFSSTVSEFLMGEVDSSTLLAVPPGDSSQSMESLYGPGSEGTPPSLEDCDAGCLPAEEVDVLLQRCEGGVDAALLYAKNMAKYMKDLISYLEKRTTLEMEFAKGLQKIAHNCRQSVMQEPHMPLLSIYSLALEQDLEFGHSMVQAVGTLQTQTFMQPLTLRRLEHEKRRKEIKEAWHRAQRKLQEAESNLRKAKQGYVQRCEDHDKARFLVAKAEEEQAGSAPGAGSTATKTLDKRRRLEEEAKNKAEEAMATYRTCVADAKTQKQELEDTKVTALRQIQEVIRQSDQTIKSATISYYQMMHMQTAPLPVHFQMLCESSKLYDPGQQYASHVRQLQRDQEPDVHYDFEPHVSANAWSPVMRARKSSFNVSDVARPEAAGSPPEEGGCTEGTPAKDHRAGRGHQVHKSWPLSISDSDSGLDPGPGAGDFKKFERTSSSGTMSSTEELVDPDGGAGASAFEQADLNGMTPELPVAVPSGPFRHEGLSKAARTHRLRKLRTPAKCRECNSYVYFQGAECEECCLACHKKCLETLAIQCGHKKLQGRLQLFGQDFSHAARSAPDGVPFIVKKCVCEIERRALRTKGIYRVNGVKTRVEKLCQAFENGKELVELSQASPHDISNVLKLYLRQLPEPLISFRLYHELVGLAKDSLKAEAEAKAASRGRQDGSESEAVAVALAGRLRELLRDLPPENRASLQYLLRHLRRIVEVEQDNKMTPGNLGIVFGPTLLRPRPTEATVSLSSLVDYPHQARVIETLIVHYGLVFEEEPEETPGGQDESSNQRAEVVVQVPYLEAGEAVVYPLQEAAADGCRESRVVSNDSDSDLEEASELLSSSEASALGHLSFLEQQQSEASLEVASGSHSGSEEQLEATAREDGDGDEDGPAQQLSGFNTNQSNNVLQAPLPPMRLRGGRMTLGSCRERQPEFV

SEQ ID NO: 1042 - protein, 170 aa, Homo Sapiens
MVGSTPHFGDPCAGSPGPGGRGDPDGRGDPDGQGPELPRKDGADAVFPGPSLEPPAGSSGVKATGTLKRPTSLSRHASAAGFPLSGAASWTLGRSHRSPLTAASPGELPTEGAGPDVVEDISHLLADVARFAEGLEKLKECVLRDDLLEARRPRAHECLGEALRVMHQII

SEQ ID NO: 1043 - protein, 601 aa, Homo Sapiens
LELYDLQILGTKPPMNSDTHRNFDPTATLRNQGDFTWNSMSGRSVRLRSVPIQSLSELERARLQEVAFYQLQQDCDLSCQITIPKDGQKRKKSLRKKLDSLGKEKNKDKEFIPQAFGMPLSQVIANDRAYKLKQDLQRDEQKDASDFVASLLPFGNKRQNKELSSSNSSLSSTSETPNESTSPNTPEPAPRARRRGAMSVDSITDLDDNQSRLLEALQLSLPAEAQSKKEKARDKKLSLNPIYRQVPRLVDSCCQHLEKHGLQTVGIFRVGSSKKRVRQLREEFDRGIDVSLEEEHSVHDVAALLKEFLRDMPDPLLTRELYTAFINTLLLEPEEQLGTLQLLIYLLPPCNCDTLHRLLQFLSIVARHADDNISKDGQEVTGNKMTSLNLATIFGPNLLHKQKSSDKEFSVQSSARAEESTAIIAVVQKMIENYEALFMVPPDLQNEVLISLLETDPDVVDYLLRRKASQSSSPDMLQSEVSFSVGGRHSSTDSNKASSGDISPYDNNSPVLSERSLLAMQEDAAPGGSEKLYRVPGQFMLVGHLSSSKSRESSPGPRLGKGNWSLASRRWPKQATLLLLHVAWCGALRTFSSSLPYLMFL

SEQ ID NO: 1044 - protein, 974 aa, Homo Sapiens
MSAQSLLHSVFSCSSPASSSAASAKGFSKRKLRQTRSLDPALIGGCGSDEAGAEGSARGATAGRLYSPSLPAESLGPRLASSSRGPPPRATRLPPPGPLCSSFSTPSTPQEKSPSGSFHFDYEVPLGRGGLKKSMAWDLPSVLAGPASSRSASSILCSSGGGPNGIFASPRRWLQQRKFQSPPDSRGHPYVVWKSEGDFTWNSMSGRSVRLRSVPIQSLSELERARLQEVAFYQLQQDCDLSCQITIPKDGQKRKKSLRKKLDSLGKEKNKDKEFIPQAFGMPLSQVIANDRAYKLKQDLQRDEQKDASDFVASLLPFGNKRQNKELSSSNSSLSSTSETPNESTSPNTPEPAPRARRRGAMSVDSITDLDDNQSRLLEALQLSLPAEAQSKKEKARDKKLSLNPIYRQVPRLVDSCCQHLEKHGLQTVGIFRVGSSKKRVRQLREEFDRGIDVSLEEEHSVHDVAALLKEFLRDMPDPLLTRELYTAFINTLLLEPEEQLGTLQLLIYLLPPCNCDTLHRLLQFLSIVARHADDNISKDGQEVTGNKMTSLNLATIFGPNLLHKQKSSDKEFSVQSSARAEESTAIIAVVQKMIENYEALFMVPPDLQNEVLISLLETDPDVVDYLLRRKASQSSSPDMLQSEVSFSVGGRHSSTDSNKASSGDISPYDNNSPVLSERSLLAMQEDAAPGGSEKLYRVPGQFMLVGHLSSSKSRESSPGPRLGKDLSEEPFDIWGTWHSTLKSGSKDPGMTGSSGDIFESSSLRAGPCSLSQGNLSPNWPRWQGSPAELDSDTQGARRTQAAAPATEGRAHPAVSRACSTPHVQVAGKAERPTARSEQYLTLSGAHDLSESELDVAGLQSRATPQCQRPHGSGRDDKRPPPPYPGPGKPAAAAAWIQGPPEGVETPTDQGGQAAEREQQVTQKKLSSANSLPAGEQDSPRLGDAGWLDWQRERWQIWELLSTDNPDALPETLV

SEQ ID NO: 1045 - protein, 765 aa, Homo Sapiens
MSAQSLLHSVFSCSSPASSSAASAKGFSKRKLRQTRSLDPALIGGCGSDEAGAEGSARGATAGRLYSPSLPAESLGPRLASSSRGPPPRATRLPPPGPLCSSFSTPSTPQEKSPSGSFHFDYEVPLGRGGLKKSMAWDLPSVLAGPASSRSASSILCSSGGGPNGIFASPRRWLQQRKFQSPPDSRGHPYVVWKSEGDFTWNSMSGRSVRLRSVPIQSLSELERARLQEVAFYQLQQDCDLSCQITIPKDGQKRKKSLRKKLDSLGKEKNKDKEFIPQAFGMPLSQVIANDRAYKLKQDLQRDEQKDASDFVASLLPFGNKRQNKELSSSNSSLSSTSETPNESTSPNTPEPAPRARRRGAMSVDSITDLDDNQSRLLEALQLSLPAEAQSKKEKARDKKLSLNPIYRQVPRLVDSCCQHLEKHGLQTVGIFRVGSSKKRVRQLREEFDRGIDVSLEEEHSVHDVAALLKEFLRDMPDPLLTRELYTAFINTLLLEPEEQLGTLQLLIYLLPPCNCDTLHRLLQFLSIVARHADDNISKDGQEVTGNKMTSLNLATIFGPNLLHKQKSSDKEFSVQSSARAEESTAIIAVVQKMIENYEALFMVPPDLQNEVLISLLETDPDVVDYLLRRKASQSSSPDMLQSEVSFSVGGRHSSTDSNKASSGDISPYDNNSPVLSERSLLAMQEDAAPGGSEKLYRVPGQFMLVGHLSSSKSRESSPGPRLGKGNWSLASRRWPKQATLLLLHVAWCGALRTFSSSLPYLMFL

SEQ ID NO: 1046 - protein, 690 aa, Homo Sapiens
MSAQSLLHSVFSCSSPASSSAASAKGFSKRKLRQTRSLDPALIGGCGSDEAGAEGSARGATAGRLYSPSLPAESLGPRLASSSRGPPPRATRLPPPGPLCSSFSTPSTPQEKSPSGSFHFDYEVPLGRGGLKKSMAWDLPSVLAGPASSRSASSILCSSGGGPNGIFASPRRWLQQRKFQSPPDSRGHPYVVWKSELELYDLQILGTKPPMNSDTHRNFDPTATLRNQGDFTWNSMSGRSVRLRSVPIQSLSELERARLQEVAFYQLQQDCDLSCQITIPKDGQKRKKSLRKKLDSLGKEKNKDKEFIPQAFGMPLSQVIANDRAYKLKQDLQRDEQKDASDFVASLLPFGNKRQNKELSSSNSSLSSTSETPNESTSPNTPEPAPRARRRGAMSVDSITDLDDNQSRLLEALQLSLPAEAQSKKEKARDKKLSLNPIYRQVPRLVDSCCQHLEKHGLQTVGIFRVGSSKKRVRQLREEFDRGIDVSLEEEHSVHDVAALLKEFLRDMPDPLLTRELYTAFINTLLLEPEEQLGTLQLLIYLLPPCNCDTLHRLLQFLSIVARHADDNISKDGQEVTGNKMTSLNLATIFGPNLLHKQKSSDKEFSVQSSARAEESTAIIAVVQKMIENYEALFMVPPDLQNEVLISLLETDPDVVDYLLRRKASQSSTSSVLPAAVQACPQYPASMFTP

SEQ ID NO: 1047 - protein, 771 aa, Homo Sapiens
MSGRSVRLRSVPIQSLSELERARLQEVAFYQLQQDCDLSCQITIPKDGQKRKKSLRKKLDSLGKEKNKDKEFIPQAFGMPLSQVIANDRAYKLKQDLQRDEQKDASDFVASLLPFGNKRQNKELSSSNSSLSSTSETPNESTSPNTPEPAPRARRRGAMSVDSITDLDDNQSRLLEALQLSLPAEAQSKKEKARDKKLSLNPIYRQVPRLVDSCCQHLEKHGLQTVGIFRVGSSKKRVRQLREEFDRGIDVSLEEEHSVHDVAALLKEFLRDMPDPLLTRELYTAFINTLLLEPEEQLGTLQLLIYLLPPCNCDTLHRLLQFLSIVARHADDNISKDGQEVTGNKMTSLNLATIFGPNLLHKQKSSDKEFSVQSSARAEESTAIIAVVQKMIENYEALFMVPPDLQNEVLISLLETDPDVVDYLLRRKASQSSSPDMLQSEVSFSVGGRHSSTDSNKASSGDISPYDNNSPVLSERSLLAMQEDAAPGGSEKLYRVPGQFMLVGHLSSSKSRESSPGPRLGKDLSEEPFDIWGTWHSTLKSGSKDPGMTGSSGDIFESSSLRAGPCSLSQGNLSPNWPRWQGSPAELDSDTQGARRTQAAAPATEGRAHPAVSRACSTPHVQVAGKAERPTARSEQYLTLSGAHDLSESELDVAGLQSRATPQCQRPHGSGRDDKRPPPPYPGPGKPAAAAAWIQGPPEGVETPTDQGGQAAEREQQVTQKKLSSANSLPAGEQDSPRLGDAGWLDWQRERWQIWELLSTDNPDALPETLV

SEQ ID NO: 1048 - protein, 771 aa, Homo Sapiens; identical to SEQ ID NO: 1047

SEQ ID NO: 1049 - protein, 1816 aa, Homo Sapiens
MLSVVHFLRSFFKTPEPGAHLPGEGEIEDNQLPTSPAEQVEQGWNQQTDRDDSETLSQQSESGSDTKTDPFESASDTESLSGYLPRGVFHPLRGTPVDIEAPWEYPDVSATGPPQEQHLTSVPGLHAKEELDLSPSLEDDSCKNGWRAFATVAGEQEAGHLWDCATSLERESLLAGVPRHTGCCLQRATDSSGPEPVQGVAVQDLRGLSSVSLQKSRSESYLGIPVVWPFLLWCCELGRSWPHIHNRARALVLPSRGPLDNTAPLGTRTKKESTLGPAGDTELLWSQPHSDVPCQPPLRTSCLLRTNRHHSAPETTGDKNRASPRLNCGHMRALVRAHSIAGFSPECPEDPVGQNVVKSGTHVKEGAKNERDPRIQNIPSPAPTQLSGPIPAFQSGAPHLQGPCKPGGFRLQRASQDTPSAGLLGENQLRQDSRSCLVASCLTSELVKLSAEEVPEPAECKSEQSPESRTQEPQGTQLAPRAADERETQKHLWGISVQAGNQTSNYTSKYVLSEESKSPTRAKFPRQPSSEGTQVWSGDLMGCLEVSDSSDAPETTQKSSAIDTSKAAEEAMVLDPNYREQALQGLSEFKAATVSHCGPGAEEGEQGPGGAGGRQLEPKAGGEASRGRGALIIVAVEQKGLQASRSNAGPVPETLPRDFPKERPESPLSTGETPCESPTRGKTPAGNECELPAAPIQGAGDGALQRVAQAAELGRVLVPQAASEETPSTEEPPGERLRGESRSSGSGERGPEEAPEGGAAAARGQRPRVPALEPPQPPRGLRKGAQEPGKRPTFSKVTSFRKGRPLATESPGGVPAPTTEGRRWGSSGPEGLPRENPPAAAGRDAPPLHHGDASAWPEFVPQAAGDRTAGPAGAGHTGTSGDLGSRGPSSESCNAKRLKTTEKKLRARLALAHKTFSNFIESIVLEKENTHERSPSSPKGEKEKSRLRQGSWRAFLKSKDAGSPKKPTLVSLPLGPEVLSPAETDSHCEERAEDKEGYVFSDHWAPPLASTPLSSSLVSPEHRRKSEPTIKCTATQEGGRYLPSGIFPEKSWLASPGSPRAQQAGIAHTLPSSSACCLAYENPGTPCRPTSPKPLSPRPSAQRMGLHYPGRGSAISMVSLGSYSYVDSSSGDPERPKIPKGQTSFLLSLQTLNQDEQKEESREGGQGPRGLGTVPWLRDLPGSENHMPWEEPAGEKPSCSHSQKAFHMEPAQKPCFTTDMVTWALLCISAETVRGEAPSQPRGIPHRSPVSVDDLWLEKTQRKKLQKQAHVERRLHIGAVHKDGVKCWRKTIITSPESLNLPRRSHPLSQSAPTGLNHMGWPEHTPGTAMPDGALDTAVCADEVGSEEDLYDDLHSSSHHYSHPGGGGEQLAINELISDGSVVCAEALWDHVTMDDQELGFKAGDVIEVMDATNREWWWGRVADGEGWFPASFVRLRVNQDEPADDDAPLAGNSGAEDGGAEAQSSKDQMRTNVINEILSTERDYIKHLRDICEQADFQIYSEYCNNHPNACVELSRLTKLSKYVYFFEACRLLQKMIDISLDGFLLTPVQKICKYPLQLAELLKYTHPQHRDFKDVEAALHAMKNVAQLINERKRRLENIDKIAQWQSSIEDWEGEDLLVRSSELIYSGELTRVTQPQAKSQQRMFFLFDHQLIYCKKDLLRRDVLYYKGRLDMDGLEVVDLEDGKDRDLHVSIKNAFRLHRGATGDSHLLCTRKPEQKQRWLKAFAREREQVQLDQETGFSITELQRKQAMLNASKQQVTGKPKAVGRPCYLTRQKHPALPSNRPQQQVLVLAEPRRKPSTFWHSISRLAPFRK

SEQ ID NO: 1050 - protein, 690 aa, Homo Sapiens
MPWEEPAGEKPSCSHSQKAFHMEPAQKPCFTTDMVTWALLCISAETVRGEAPSQPRGIPHRSPVSVDDLWLEKTQRKKLQKQAHVERRLHIGAVHKDGVKCWRKTIITSPESLNLPRRSHPLSQSAPTGLNHMGWPEHTPGTAMPDGALDTAVCADEVGSEEDLYDDLHSSSHHYSHPGGGGEQLAINELISDGSVVCAEALWDHVTMDDQELGFKAGDVIEVMDATNREWWWGRVADGEGWFPASFVRLRVNQDEPADDDAPLAGNSGAEDGGAEAQSSKDQMRTNVINEILSTERDYIKHLRDICEGYVRQCRKRADMFSEEQLRTIFGNIEDIYRCQKAFVKALEQRFNRERPHLSELGACFLEHQADFQIYSEYCNNHPNACVELSRLTKLSKYVYFFEACRLLQKMIDISLDGFLLTPVQKICKYPLQLAELLKYTHPQHRDFKDVEAALHAMKNVAQLINERKRRLENIDKIAQWQSSIEDWEGEDLLVRSSELIYSGELTRVTQPQAKSQQRMFFLFDHQLIYCKKDLLRRDVLYYKGRLDMDGLEVVDLEDGKDRDLHVSIKNAFRLHRGATGDSHLLCTRKPEQKQRWLKAFAREREQVQLDQETGFSITELQRKQAMLNASKQQVTGKPKAVGRPCYLTRQKHPALPSNRPQQQVLVLAEPRRKPSTFWHSISRLAPFRK

SEQ ID NO: 1051 - protein, 670 aa, Homo Sapiens
MPWEEPAGEKPSCSHSQKAFHMEPAQKPCFTTDMVTWALLCISAETVRGEAPSQPRGIPHRSPVSVDDLWLEKTQRKKLQKQAHVERRLHIGAVHKDGVKCWRKTIITSPESLNLPRRSHPLSQSAPTGLNHMGWPEHTPGTAMPDGALDTAVCADEVGSEEDLYDDLHSSSHHYSHPGGGGEQLAINELISDGSVVCAEALWDHVTMDDQELGFKAGDVIEVMDATNREWWWGRVADGEGWFPASFVRLRVNQDEPADDDAPLAGNSGAEDGGAEAQSSKDQMRTNVINEILSTERDYIKHLRDICEGYVRQCRKRADMFSEEQLRTIFGNIEDIYRCQKAFVKALEQRFNRERPHLSELGACFLEHQADFQIYSEYCNNHPNACVELSRLTKLSKYVYFFEACRLLQKMIDISLDGFLLTPVQKICKYPLQLAELLKYTHPQHRDFKDVEAALHAMKNVAQLINERKRRLENIDKIAQWQSSIEDWEGEDLLVRSSELIYSGELTRVTQPQAKSQQRMFFLFDHQLIYCKKDLLRRDVLYYKGRLDMDGLEVVDLEDGKDRDLHVSIKNAFRLHRGATGDSHLLCTRKPEQKQRWLKAFAREREQVQLDQETGFSITELQRKQAMLNASKQQVTGKPKGRRTAAPPPRLPGPYPADIIPFSEPQSQAS

SEQ ID NO: 1052 - protein, 630 aa, Homo Sapiens
MPWEEPAGEKPSCSHSQKAFHMEPAQKPCFTTDMVTWALLCISAETVRGEAPSQPRGIPHRSPVSVDDLWLEKTQRKKLQKQAHVERRLHIGAVHKDGVKCWRKTIITSPESLNLPRRSHPLSQSAPTGLNHMGWPEHTPGTAMPDGALDTAVCADEVGSEEDLYDDLHSSSHHYSHPGGGGEQLAINELISDGSVVCAEALWDHVTMDDQELGFKAGDVIEVMDATNREWWWGRVADGEGWFPASFVRLRVNQDEPADDDAPLAGNSGAEDGGAEAQSSKDQMRTNVINEILSTERDYIKHLRDICEQADFQIYSEYCNNHPNACVELSRLTKLSKYVYFFEACRLLQKMIDISLDGFLLTPVQKICKYPLQLAELLKYTHPQHRDFKDVEAALHAMKNVAQLINERKRRLENIDKIAQWQSSIEDWEGEDLLVRSSELIYSGELTRVTQPQAKSQQRMFFLFDHQLIYCKKDLLRRDVLYYKGRLDMDGLEVVDLEDGKDRDLHVSIKNAFRLHRGATGDSHLLCTRKPEQKQRWLKAFAREREQVQLDQETGFSITELQRKQAMLNASKQQVTGKPKAVGRPCYLTRQKHPALPSNRPQQQVLVLAEPRRKPSTFWHSISRLAPFRK

SEQ ID NO: 1053 - protein, 192 aa, Homo Sapiens
MPWEEPAGEKPSCSHSQKAFHMEPAQKPCFTTDMVTWALLCISAETVRGEAPSQPRGIPHRSPVSVDDLWLEKTQRKKLQKQAHVERRLHIGAVHKDGVKCWRKTIITSPESLNLPRRSHPLSQSAPTGLNHMGWPEHTPGTAVGRPCYLTRQKHPALPSNRPQQQVLVLAEPRRKPSTFWHSISRLAPFRK

SEQ ID NO: 1054 - protein, 517 aa, Homo Sapiens
MRGAVSRSWSLESLRSATAAMPDGALDTAVCADEVGSEEDLYDDLHSSSHHYSHPGGGGEQLAINELISDGSVVCAEALWDHVTMDDQELGFKAGDVIEVMDATNREWWWGRVADGEGWFPASFVRLRVNQDEPADDDAPLAGNSGAEDGGAEAQSSKDQMRTNVINEILSTERDYIKHLRDICEGYVRQCRKRADMFSEEQLRTIFGNIEDIYRCQKAFVKALEQRFNRERPHLSELGACFLEHQADFQIYSEYCNNHPNACVELSRLTKLSKYVYFFEACRLLQKMIDISLDGFLLTPVQKICKYPLQLAELLKYTHPQHRDFKDVEAALHAMKNVAQLINERKRRLENIDKIAQWQSSIEDWEGEDLLVRSSELIYSGELTRVTQPQAKSQQRMFFLFDHQLIYCKKDLLRRDVLYYKGRLDMDGLEVVDLEDGKDRDLHVSIKNAFRLHRGATGDSHLLCTRKPEQKQRWLKAFAREREQVQLDQETGFSITELQRKQAMLNASKQQVTGKPK

SEQ ID NO: 1055 - protein, 619 aa, Homo Sapiens
MRPDGQQALDAVVRSFDCHSEAALRQRNDVIYCSLPRTAQGIVQREDQLEVLVSLREVWGRRRGRDGTCTGAMPDGALDTAVCADEVGSEEDLYDDLHSSSHHYSHPGGGGEQLAINELISDGSVVCAEALWDHVTMDDQELGFKAGDVIEVMDATNREWWWGRVADGEGWFPASFVRLRVNQDEPADDDAPLAGNSGAEDGGAEAQSSKDQMRTNVINEILSTERDYIKHLRDICEGYVRQCRKRADMFSEEQLRTIFGNIEDIYRCQKAFVKALEQRFNRERPHLSELGACFLEHQADFQIYSEYCNNHPNACVELSRLTKLSKYVYFFEACRLLQKMIDISLDGFLLTPVQKICKYPLQLAELLKYTHPQHRDFKDVEAALHAMKNVAQLINERKRRLENIDKIAQWQSSIEDWEGEDLLVRSSELIYSGELTRVTQPQAKSQQRMFFLFDHQLIYCKKDLLRRDVLYYKGRLDMDGLEVVDLEDGKDRDLHVSIKNAFRLHRGATGDSHLLCTRKPEQKQRWLKAFAREREQVQLDQETGFSITELQRKQAMLNASKQQVTGKPKAVGRPCYLTRQKHPALPSNRPQQQVLVLAEPRRKPSTFWHSISRLAPFRK

SEQ ID NO: 1056 - protein, 372 aa, Homo Sapiens
PLASTPLSSSLVSPEHRRKSEPTIKCTATQEGGRYLPSGIFPEKSWLASPGSPRAQQAGIAHTLPSSSACCLAYENPGTPCRPTSPKPLSPRPSAQRMGLHYPGRGSAISMVSLGSYSYVDSSSGDPERPKIPKGQTSFLLSLQTLNQDEQKEESREGGQGPRGLGTVPWLRDLPGSENHMPWEEPAGEKPSCSHSQKAFHMEPAQKPCFTTDMVTWALLCISAETVRGEAPSQPRGIPHRSPVSVDDLWLEKTQRKKLQKQAHVERRLHIGAVHKDGVKCWRKTIITSPESLNLPRRSHPLSQSAPTGLNHMGWPEHTPGTAVGRPCYLTRQKHPALPSNRPQQQVLVLAEPRRKPSTFWHSISRLAPFRK

SEQ ID NO: 1057 - protein, 287 aa, Homo Sapiens
  misc_feature (1)..(1): Xaa can be any naturally occurring amino acid
XACVELSRLTKLSKYVYFFEACRLLQKMIDISLDGFLLTPVQKICKYPLQLAELLKYTHPQHRDFKDVEAALHAMKNVAQLINERKRRLENIDKIAQWQSSIEDWEGEDLLVRSSELIYSGELTRVTQPQAKSQQRMFFLFDHQLIYCKKDLLRRDVLYYKGRLDMDGLEVVDLEDGKDRDLHVSIKNAFRLHRGATGDSHLLCTRKPEQKQRWLKAFAREREQVQLDQETGFSITELQRKQAMLNASKQQVTGKPKGRRTAAPPPRLPGPYPADIIPFSEPQSQAS

SEQ ID NO: 1058 - protein, 695 aa, Homo Sapiens
  misc_feature (1)..(1): Xaa can be any naturally occurring amino acid
XEGGQGPRGLGTVPWLRDLPGSENHMPWEEPAGEKPSCSHSQKAFHMEPAQKPCFTTDMVTWALLCISAETVRGEAPSQPRGIPHRSPVSVDDLWLEKTQRKKLQKQAHVERRLHIGAVHKDGVKCWRKTIITSPESLNLPRRSHPLSQSAPTGLNHMGWPEHTPGTAMPDGALDTAVCADEVGSEEDLYDDLHSSSHHYSHPGGGGEQLAINELISDGSVVCAEALWDHVTMDDQELGFKAGDVIEVMDATNREWWWGRVADGEGWFPASFVRLRVNQDEPADDDAPLAGNSGAEDGGAEAQSSKDQMRTNVINEILSTERDYIKHLRDICEGYVRQCRKRADMFSEEQLRTIFGNIEDIYRCQKAFVKALEQRFNRERPHLSELGACFLEHQADFQIYSEYCNNHPNACVELSRLTKLSKYVYFFEACRLLQKMIDISLDGFLLTPVQKICKYPLQLAELLKYTHPQHRDFKDVEAALHAMKNVAQLINERKRRLENIDKIAQWQSSIEDWEGEDLLVRSSELIYSGELTRVTQPQAKSQQRMFFLFDHQLIYCKKDLLRRDVLYYKGRLDMDGLEVVDLEDGKDRDLHVSIKNAFRLHRGATGDSHLLCTRKPEQKQRWLKAFAREREQVQLDQETGFSITELQRKQAMLNASKQQVTGKPKGRRTAAPPPRLPGPYPADIIPFSEPQSQAS

SEQ ID NO: 1059 - protein, 142 aa, Homo Sapiens
  misc_feature (1)..(1): Xaa can be any naturally occurring amino acid
XKKLRARLALAHKTFSNFIESIVLEKENTHERSPSSPKGEKEKSRLRQGSWRAFLKSKDAGSPKKPTLVSLPLGPEVLSPAETDSHCEERAEDKEGYVFSDHWAPPLASTPLSSSLVSPEHRRKSEPTIKCTATQEGDAKPR

SEQ ID NO: 1060 - protein, 173 aa, Homo Sapiens
MCLLLGATGVGKTLLVKRLQEVSSRDGKGDLGEPPPTRPTVGTNLTDIVAQRKITIRELGGCMGPIWSSYYGNCRSLLFVMDASDPTQLSASCVQLLGLLSAEQLAEASVLILFNKIDLPCYMSTEEMKSLIRLPDIIACAKQNITTAEISAREGTGLAGVLAWLQATHRAND

SEQ ID NO: 1061 - protein, 93 aa, Homo Sapiens
MDASDPTQLSASCVQLLGLLSAEQLAEASVLILFNKIDLPCYMSTEEMKSLIRLPDIIACAKQNITTAEISAREGTGLAGVLAWLQATHRAND

SEQ ID NO: 1062 - protein, 93 aa, Homo Sapiens; identical to SEQ ID NO: 1061

SEQ ID NO: 1063 - protein, 93 aa, Homo Sapiens; identical to SEQ ID NO: 1061

SEQ ID NO: 1064 - protein, 111 aa, Homo Sapiens
MGPIWSSYYGNCRSLLFVMDASDPTQLSASCVQLLGLLSAEQLAEASVLILFNKIDLPCYMSTEEMKSLIRLPDIIACAKQNITTAEISAREGTGLAGVLAWLQATHRAND

SEQ ID NO: 1065 - protein, 111 aa, Homo Sapiens; identical to SEQ ID NO: 1064

SEQ ID NO: 1066 - protein, 197 aa, Homo Sapiens
MRVAGGRALSRGAELRVPGGAKHGMCLLLGATGVGKTLLVKRLQEVSSRDGKGDLGEPPPTRPTVGTNLTDIVAQRKITIRELGGCMGPIWSSYYGNCRSLLFVMDASDPTQLSASCVQLLGLLSAEQLAEASVLILFNKIDLPCYMSTEEMKSLIRLPDIIACAKQNITTAEISAREGTGLAGVLAWLQATHRAND

SEQ ID NO: 1067 - protein, 197 aa, Homo Sapiens; identical to SEQ ID NO: 1066

SEQ ID NO: 1068 - protein, 48 aa, Homo Sapiens
VGTNLTDIVAQRKITIRELGGCMGPIWSSYYGNCRSLLACAADTSMEN

SEQ ID NO: 1069 - protein, 935 aa, Homo Sapiens
MAAAKPTLTDSLSFCLAQLAAAAGEALGGEKDPATNETPLSRALLALRTRHIKAAGGIERFRARGGLRPLLALLRRAAAAGSAPSQAGPGSAPSSAASGASSPAPASGPAPSAVSSSSPTPPVRLRKTLDLALSILADCCTEGACRTEVRRLGGILPLVTILQCMKTDSIQNRTARALGNLAMEPESCGDIHCAGAVPLLVESLTACQDSQCLQSVVRALRNLADSPQHRLALAQQGAVRPLAELLATAPDAALTLALVRALLELSRGCSRACAEQLSLGGGLGPLVSLASHPKRAVREGTILILANLCAQGLIRPALGNAGGVEVLVDELRQRRDPNGASPTSQQPLVRAVCLLCREAINRARLRDAGGLDLLMGLLRDPRASAWHPRIVAALVGFLYDTGALGRLQALGLVPLLAGQLCGEAGEEEEEGREAASWDFPEERTPERAQGGSFRSLRSWLISEGYATGPDDISPDWSPEQCPPEPMEPASPAPTPTSLRAPRTQRTPGRSPAAAIEEPWGREGPALLLLSRFSQAPDPSGALVTGPALYGLLTYVTGAPGPPSPRALRILSRLTCNPACLEAFVRSYGAALLRAWLVLGVAPDDWPAPRARPTLHSRHRELGERLLQNLTVQAESPFGVGALTHLLLSGSPEDRVACALTLPFICRKPSLWRRLLLEQGGLRLLLAALTRPAPHPLFLFFAADSLSCLQDLVSPTVSPAVPQAVPMDLDSPSPCLYEPLLGPAPVPAPDLHFLLDSGLQLPAQRAASATASPFFRALLSGSFAEAQMDLVPLRGLSPGAAWPVLHHLHGCRGCGAALGPVPPPGQPLLGSEAEEALEAAGRFLLPGLEEELEEAVGRIHLGPQGGPESVGEVFRLGRPRLAAHCARWTLGSEQCPRKRGLALVGLVEAAGEEAGPLTEALLAVVMGIELGARVPA

SEQ ID NO: 1070 - protein, 935 aa, Homo Sapiens; identical to SEQ ID NO: 1069

SEQ ID NO: 1071 - protein, 725 aa, Homo Sapiens
MAAAKPTLTDSLSFCLAQLAAAAGEALGGEKDPATNETPLSRALLALRTRHIKAAGGIERFRARGGLRPLLALLRRAAAAGSAPSQAGPGSAPSSAASGASSPAPASGPAPSAVSSSSPTPPVRLRKTLDLALSILADCCTEGACRTEVRRLGGILPLVTILQCMKTDSIQNRTARALGNLAMEPESCGDIHCAGAVPLLVESLTACQDSQCLQSVVRALRNLADSPQHRLALAQQGAVRPLAELLATAPDAALTLALVRALLELSRGCSRACAEQLSLGGGLGPLVSLASHPKRAVREGTILILANLCAQGLIRPALGNAGGVEVLVDELRQRRDPNGASPTSQQPLVRAVCLLCREAINRARLRDAGGLDLLMGLLRDPRASAWHPRIVAALVGFLYDTGALGRLQALGLVPLLAGQLCGEAGEEEEEGREAASWDFPEERTPERAQGGSFRSLRSWLISEGYATGPDDISPDWSPEQCPPEPMEPASPAPTPTSLRAPRTQRTPGRSPAAAIEEPWGREGPALLLLSRFSQAPDPSGALVTGPALYGLLTYVTGAPGPPSPRALRILSRLTCNPACLEAFVRSYGAALLRAWLVLGVAPDDWPAPRARPTLHSRHRELGEFPYPPVSLPPCESPSSPMASMGPEPHLPTHLSSPARPPDNLSPEWGGEQGVPVPPWAHRQSSAVSSALALGPRYPNSRCSPAPRIWAGLCFFPGSAIGSALS

SEQ ID NO: 1072 - protein, 771 aa, Homo Sapiens
MKTDSIQNRTARALGNLAMEPESCGDIHCAGAVPLLVESLTACQDSQCLQSVVRALRNLADSPQHRLALAQQGAVRPLAELLATAPDAALTLALVRALLELSRGCSRACAEQLSLGGGLGPLVSLASHPKRAVREGTILILANLCAQGLIRPALGNAGGVEVLVDELRQRRDPNGASPTSQQPLVRAVCLLCREAINRARLRDAGGLDLLMGLLRDPRASAWHPRIVAALVGFLYDTGALGRLQALGLVPLLAGQLCGEAGEEEEEGREAASWDFPEERTPERAQGGSFRSLRSWLISEGYATGPDDISPDWSPEQCPPEPMEPASPAPTPTSLRAPRTQRTPGRSPAAAIEEPWGREGPALLLLSRFSQAPDPSGALVTGPALYGLLTYVTGAPGPPSPRALRILSRLTCNPACLEAFVRSYGAALLRAWLVLGVAPDDWPAPRARPTLHSRHRELGERLLQNLTVQAESPFGVGALTHLLLSGSPEDRVACALTLPFICRKPSLWRRLLLEQGGLRLLLAALTRPAPHPLFLFFAADSLSCLQDLVSPTVSPAVPQAVPMDLDSPSPCLYEPLLGPAPVPAPDLHFLLDSGLQLPAQRAASATASPFFRALLSGSFAEAQMDLVPLRGLSPGAAWPVLHHLHGCRGCGAALGPVPPPGQPLLGSEAEEALEAAGRFLLPGLEEELEEAVGRIHLGPQGGPESVGEVFRLGRPRLAAHCARWTLGSEQCPRKRGLALVGLVEAAGEEAGPLTEALLAVVMGIELGARVPA

SEQ ID NO: 1073 - protein, 1030 aa, Homo Sapiens
MVTLGAGVRLFTGVYPVVLNQIRATSEASAITRTTMPAPELTSTSRAEDTRDTGVQLRKRKIPQARHSRKRQRTFSFRSLGSAARSGAESEARAKMAAAKPTLTDSLSFCLAQLAAAAGEALGGEKDPATNETPLSRALLALRTRHIKAAGGIERFRARGGLRPLLALLRRAAAAGSAPSQAGPGSAPSSAASGASSPAPASGPAPSAVSSSSPTPPVRLRKTLDLALSILADCCTEGACRTEVRRLGGILPLVTILQCMKTDSIQNRTARALGNLAMEPESCGDIHCAGAVPLLVESLTACQDSQCLQSVVRALRNLADSPQHRLALAQQGAVRPLAELLATAPDAALTLALVRALLELSRGCSRACAEQLSLGGGLGPLVSLASHPKRAVREGTILILANLCAQGLIRPALGNAGGVEVLVDELRQRRDPNGASPTSQQPLVRAVCLLCREAINRARLRDAGGLDLLMGLLRDPRASAWHPRIVAALVGFLYDTGALGRLQALGLVPLLAGQLCGEAGEEEEEGREAASWDFPEERTPERAQGGSFRSLRSWLISEGYATGPDDISPDWSPEQCPPEPMEPASPAPTPTSLRAPRTQRTPGRSPAAAIEEPWGREGPALLLLSRFSQAPDPSGALVTGPALYGLLTYVTGAPGPPSPRALRILSRLTCNPACLEAFVRSYGAALLRAWLVLGVAPDDWPAPRARPTLHSRHRELGERLLQNLTVQAESPFGVGALTHLLLSGSPEDRVACALTLPFICRKPSLWRRLLLEQGGLRLLLAALTRPAPHPLFLFFAADSLSCLQDLVSPTVSPAVPQAVPMDLDSPSPCLYEPLLGPAPVPAPDLHFLLDSGLQLPAQRAASATASPFFRALLSGSFAEAQMDLVPLRGLSPGAAWPVLHHLHGCRGCGAALGPVPPPGQPLLGSEAEEALEAAGRFLLPGLEEELEEAVGRIHLGPQGGPESVGEVFRLGRPRLAAHCARWTLGSEQCPRKRGLALVGLVEAAGEEAGPLTEALLAVVMGIELGARVPA

SEQ ID NO: 1074 - protein, 10 aa, Homo Sapiens
  misc_feature (1)..(1): Xaa can be any naturally occurring amino acid
XLGKCSAPVS

SEQ ID NO: 1075 - protein, 598 aa, Homo Sapiens
  misc_feature (1)..(1): Xaa can be any naturally occurring amino acid
XTEVRRLGGILPLVTILQCMKTDSIQNRTARALGNLAMEPESCGDIHCAGAVPLLVESLTACQDSQCLQSVALGLVPLLAGQLCGEAGEEEEEGREAASWDFPEERTPERAQGGSFRSLRSWLISEGYATGPDDISPDWSPEQCPPEPMEPASPAPTPTSLRAPRTQRTPGRSPAAAIEEPWGREGPALLLLSRFSQAPDPSGALVTGPALYGLLTYVTGAPGPPSPRALRILSRLTCNPACLEAFVRSYGAALLRAWLVLGVAPDDWPAPRARPTLHSRHRELGERLLQNLTVQAESPFGVGALTHLLLSGSPEDRVACALTLPFICRKPSLWRRLLLEQGGLRLLLAALTRPAPHPLFLFFAADSLSCLQDLVSPTVSPAVPQAVPMDLDSPSPCLYEPLLGPAPVPAPDLHFLLDSGLQLPAQRAASATASPFFRALLSGSFAEAQMDLVPLRGLSPGAAWPVLHHLHGCRGCGAALGPVPPPGQPLLGSEAEEALEAAGRFLLPGLEEELEEAVGRIHLGPQGGPESVGEVFRLGRPRLAAHCARWTLGSEQCPRKRGLALVGLVEAAGEEAGPLTEALLAVVMGIELGARVPA

SEQ ID NO: 1076 - protein, 23 aa, Homo Sapiens
MADQRMDISSTISDFMSPGPTDL

SEQ ID NO: 1077 - protein, 59 aa, Homo Sapiens
MADQRMDISSTISDFMSPGPTDLLSSSLGTSGVDCNRKRKGSSTDYQESMDTDKDDPHG

SEQ ID NO: 1078 - protein, 76 aa, Homo Sapiens
MADQRMDISSTISDFMSPGPTDLLSSSLGTSGVDCNRKRKGSSTDYQESMDTDKDDPHGRLEYTEHQGRIKNAREA

SEQ ID NO: 1079 - protein, 101 aa, Homo Sapiens
MADQRMDISSTISDFMSPGPTDLLSSSLGTSGVDCNRKRKGSSTDYQESMDTDKDDPHGRLEYTEHQGRIKNAREAHSQIEKRRRDKMNSFIDELASLVPT

SEQ ID NO: 1080 - protein, 135 aa, Homo Sapiens
MADQRMDISSTISDFMSPGPTDLLSSSLGTSGVDCNRKRKGSSTDYQESMDTDKDDPHGRLEYTEHQGRIKNAREAHSQIEKRRRDKMNSFIDELASLVPTCNAMSRKLDKLTVLRMAVQHMKTLRGATNPYTEA

SEQ ID NO: 1081 - protein, 626 aa, Homo Sapiens
MADQRMDISSTISDFMSPGPTDLLSSSLGTSGVDCNRKRKGSSTDYQESMDTDKDDPHGRLEYTEHQGRIKNAREAHSQIEKRRRDKMNSFIDELASLVPTCNAMSRKLDKLTVLRMAVQHMKTLRGATNPYTEANYKPTFLSDDELKHLILRAADGFLFVVGCDRGKILFVSESVFKILNYSQNDLIGQSLFDYLHPKDIAKVKEQLSSSDTAPRERLIDAKTGLPVKTDITPGPSRLCSGARRSFFCRMKCNRPSVKVEDKDFPSTCSKKKADRKSFCTIHSTGYLKSWPPTKMGLDEDNEPDNEGCNLSCLVAIGRLHSHVVPQPVNGEIRVKSMEYVSRHAIDGKFVFVDQRATAILAYLPQELLGTSCYEYFHQDDIGHLAECHRQVLQTREKITTNCYKFKIKDGSFITLRSRWFSFMNPWTKEVEYIVSTNTVVLANVLEGGDPTFPQLTASPHSMDSMLPSGEGGPKRTHPTVPGIPGGTRAGAGKIGRMIAEEIMEIHRIRGSSPSSCGSSPLNITSTPPPDASSPGGKKILNGGTPDIPSSGLLSGQAQENPGYPYSDSSSILGENPHIGIDMIDNDQGSSSPSNDEAAMAVIMSLLEADAGLGGPVDFSDLPWPL

SEQ ID NO: 1082 - protein, 625 aa, Homo Sapiens
MADQRMDISSTISDFMSPGPTDLLSSSLGTSGVDCNRKRKGSSTDYQESMDTDKDDPHGRLEYTEHQGRIKNAREAHSQIEKRRRDKMNSFIDELASLVPTCNAMSRKLDKLTVLRMAVQHMKTLRGATNPYTEANYKPTFLSDDELKHLILRAADGFLFVVGCDRGKILFVSESVFKILNYSQNDLIGQSLFDYLHPKDIAKVKEQLSSSDTAPRERLIDAKTGLPVKTDITPGPSRLCSGARRSFFCRMKCNRPSVKVEDKDFPSTCSKKKDRKSFCTIHSTGYLKSWPPTKMGLDEDNEPDNEGCNLSCLVAIGRLHSHVVPQPVNGEIRVKSMEYVSRHAIDGKFVFVDQRATAILAYLPQELLGTSCYEYFHQDDIGHLAECHRQVLQTREKITTNCYKFKIKDGSFITLRSRWFSFMNPWTKEVEYIVSTNTVVLANVLEGGDPTFPQLTASPHSMDSMLPSGEGGPKRTHPTVPGIPGGTRAGAGKIGRMIAEEIMEIHRIRGSSPSSCGSSPLNITSTPPPDASSPGGKKILNGGTPDIPSSGLLSGQAQENPGYPYSDSSSILGENPHIGIDMIDNDQGSSSPSNDEAAMAVIMSLLEADAGLGGPVDFSDLPWPL

SEQ ID NO: 1083 - protein, 60 aa, Homo Sapiens
MADQRMDISSTISDFMSPGPTDLLSSSLGTSGVDCNRKRKGSSTDYQLEYTEHQGRIKNA

SEQ ID NO: 1084 - protein, 46 aa, Homo Sapiens
MINIESMDTDKDDPHGRLEYTEHQGRIKNAREAHSQIEKRRRDKMN

SEQ ID NO: 1085 - protein, 72 aa, Homo Sapiens
MINIESMDTDKDDPHGRLEYTEHQGRIKNAREAHSQIEKRRRDKMNSFIDELASLVPTCNAMSRKLDKLTVL

SEQ ID NO: 1086 - protein, 141 aa, Homo Sapiens
MINIESMDTDKDDPHGRLEYTEHQGRIKNAREAHSQIEKRRRDKMNSFIDELASLVPTCNAMSRKLDKLTVLRMAVQHMKTLRGATNPYTEANYKPTFLSDDELKHLILRAADGFLFVVGCDRGKILFVSESVFKILNYSQ

SEQ ID NO: 1087 - protein, 583 aa, Homo Sapiens
MINIESMDTDKDDPHGRLEYTEHQGRIKNAREAHSQIEKRRRDKMNSFIDELASLVPTCNAMSRKLDKLTVLRMAVQHMKTLRGATNPYTEANYKPTFLSDDELKHLILRAADGFLFVVGCDRGKILFVSESVFKILNYSQNDLIGQSLFDYLHPKDIAKVKEQLSSSDTAPRERLIDAKTGLPVKTDITPGPSRLCSGARRSFFCRMKCNRPSVKVEDKDFPSTCSKKKADRKSFCTIHSTGYLKSWPPTKMGLDEDNEPDNEGCNLSCLVAIGRLHSHVVPQPVNGEIRVKSMEYVSRHAIDGKFVFVDQRATAILAYLPQELLGTSCYEYFHQDDIGHLAECHRQVLQTREKITTNCYKFKIKDGSFITLRSRWFSFMNPWTKEVEYIVSTNTVVLANVLEGGDPTFPQLTASPHSMDSMLPSGEGGPKRTHPTVPGIPGGTRAGAGKIGRMIAEEIMEIHRIRGSSPSSCGSSPLNITSTPPPDASSPGGKKILNGGTPDIPSSGLLSGQAQENPGYPYSDSSSILGENPHIGIDMIDNDQGSSSPSNDEAAMAVIMSLLEADAGLGGPVDFSDLPWPL

SEQ ID NO: 1088 - protein, 582 aa, Homo Sapiens
MINIESMDTDKDDPHGRLEYTEHQGRIKNAREAHSQIEKRRRDKMNSFIDELASLVPTCNAMSRKLDKLTVLRMAVQHMKTLRGATNPYTEANYKPTFLSDDELKHLILRAADGFLFVVGCDRGKILFVSESVFKILNYSQNDLIGQSLFDYLHPKDIAKVKEQLSSSDTAPRERLIDAKTGLPVKTDITPGPSRLCSGARRSFFCRMKCNRPSVKVEDKDFPSTCSKKKDRKSFCTIHSTGYLKSWPPTKMGLDEDNEPDNEGCNLSCLVAIGRLHSHVVPQPVNGEIRVKSMEYVSRHAIDGKFVFVDQRATAILAYLPQELLGTSCYEYFHQDDIGHLAECHRQVLQTREKITTNCYKFKIKDGSFITLRSRWFSFMNPWTKEVEYIVSTNTVVLANVLEGGDPTFPQLTASPHSMDSMLPSGEGGPKRTHPTVPGIPGGTRAGAGKIGRMIAEEIMEIHRIRGSSPSSCGSSPLNITSTPPPDASSPGGKKILNGGTPDIPSSGLLSGQAQENPGYPYSDSSSILGENPHIGIDMIDNDQGSSSPSNDEAAMAVIMSLLEADAGLGGPVDFSDLPWPL

SEQ ID NO: 1089 - protein, 624 aa, Homo Sapiens
MSKEAVSLWALTVSLQPPVPLCVCREMTGSGRRKQQCVTLPFISRELCFYLLLFPPPRLEYTEHQGRIKNAREAHSQIEKRRRDKMNSFIDELASLVPTCNAMSRKLDKLTVLRMAVQHMKTLRGATNPYTEANYKPTFLSDDELKHLILRAADGFLFVVGCDRGKILFVSESVFKILNYSQNDLIGQSLFDYLHPKDIAKVKEQLSSSDTAPRERLIDAKTGLPVKTDITPGPSRLCSGARRSFFCRMKCNRPSVKVEDKDFPSTCSKKKADRKSFCTIHSTGYLKSWPPTKMGLDEDNEPDNEGCNLSCLVAIGRLHSHVVPQPVNGEIRVKSMEYVSRHAIDGKFVFVDQRATAILAYLPQELLGTSCYEYFHQDDIGHLAECHRQVLQTREKITTNCYKFKIKDGSFITLRSRWFSFMNPWTKEVEYIVSTNTVVLANVLEGGDPTFPQLTASPHSMDSMLPSGEGGPKRTHPTVPGIPGGTRAGAGKIGRMIAEEIMEIHRIRGSSPSSCGSSPLNITSTPPPDASSPGGKKILNGGTPDIPSSGLLSGQAQENPGYPYSDSSSILGENPHIGIDMIDNDQGSSSPSNDEAAMAVIMSLLEADAGLGGPVDFSDLPWPL

SEQ ID NO: 1090 - protein, 171 aa, Homo Sapiens
RATAILAYLPQELLGTSCYEYFHQDDIGHLAECHRQVLQTREKITTNCYKFKIKDGSFITLRSRWFSFMNPWTKEVEYIVSTNTVVLSRVDTGHLGQVEWCTVLSRPDSRFLIAGMFTEPTSWKAGTQPSHSSQHPPTAWTACCPLEKVAQRGPTPLFQGFQGEPGLGQEK

SEQ ID NO: 1091 - protein, 423 aa, Homo Sapiens
MGMYPGVLVPSSRGGLPLEEVTVAEVLAARGYLTGMAGKWHLGVGPEGAFLPPHQGFHRFLGIPYSHDQGPCQNLTCFPPATPCDGGCDQGLVPIPLLANLSVEAQPPWLPGLEARYMAFAHDLMADAQRQDRPFFLYYASHHTHYPQFSGQSFAERSGRGPFGDSLMELDAAVGTLMTAIGDLGLLEETLVIFTADNGPETMRMSRGGCSGLLRCGKGTTYEGGVREPALAFWPGHIAPGVTHELASSLDLLPTLAALAGAPLPNVTLDGFDLSPLLLGTGKSPRQSLFFYPSYPDEVRGVFAVRTGKYKAHFFTQGSAHSDTTADPACHASSSLTAHEPPLLYDLSKDPGENYNLLGGVAGATPEVLQALKQLQLLKAQLDAAVTFGPSQVARGEDPALQICCHPGCTPRPACCHCPDPHA

SEQ ID NO: 1092 - protein, 509 aa, Homo Sapiens
MSMGAPRSLLLALAAGLAVARPPNIVLIFADDLGYGDLGCYGHPSSTTPNLDQLAAGGLRFTDFYVPVSLCTPSRAALLTGRLPVRMGMYPGVLVPSSRGGLPLEEVTVAEVLAARGYLTGMAGKWHLGVGPEGAFLPPHQGFHRFLGIPYSHDQGPCQNLTCFPPATPCDGGCDQGLVPIPLLANLSVEAQPPWLPGLEARYMAFAHDLMADAQRQDRPFFLYYASHHTHYPQFSGQSFAERSGRGPFGDSLMELDAAVGTLMTAIGDLGLLEETLVIFTADNGPETMRMSRGGCSGLLRCGKGTTYEGGVREPALAFWPGHIAPGVTHELASSLDLLPTLAALAGAPLPNVTLDGFDLSPLLLGTGKSPRQSLFFYPSYPDEVRGVFAVRTGKYKAHFFTQGSAHSDTTADPACHASSSLTAHEPPLLYDLSKDPGENYNLLGGVAGATPEVLQALKQLQLLKAQLDAAVTFGPSQVARGEDPALQICCHPGCTPRPACCHCPDPHA

SEQ ID NO: 1093 - protein, 509 aa, Homo Sapiens; identical to SEQ ID NO: 1092

SEQ ID NO: 1094 - protein, 509 aa, Homo Sapiens; identical to SEQ ID NO: 1092

SEQ ID NO: 1095 - protein, 509 aa, Homo Sapiens; identical to SEQ ID NO: 1092

SEQ ID NO: 1096 - protein, 69 aa, Homo Sapiens
  misc_feature (1)..(1): Xaa can be any naturally occurring amino acid
XPSYPDEVRGVFAVRTGKYKAHFFTQGSAHSDTTADPACHASSSLTAHEPPLLYDLSKDPDGVSLCRPG

SEQ ID NO: 1097 - protein, 45 aa, Homo Sapiens
MGPRGAASLPRGPGPRRLLLPVVLPLLLLLLLAPPGSGAGASRPP

SEQ ID NO: 1098 - protein, 533 aa, Homo Sapiens
MGPRGAASLPRGPGPRRLLLPVVLPLLLLLLLAPPGSGAGASRPPHLVFLLADDLGWNDVGFHGSRIRTPHLDALAAGGVLLDNYYTQPLCTPSRSQLLTGRYQIRTGLQHQIIWPCQPSCVPLDEKLLPQLLKEAGYTTHMVGKWHLGMYRKECLPTRRGFDTYFGYLLGSEDYYSHERCTLIDALNVTRCALDFRDGEEVATGYKNMYSTNIFTKRAIALITNHPPEKPLFLYLALQSVHEPLQVPEEYLKPYDFIQDKNRHHYAGMVSLMDEAVGNVTAALKSSGLWNNTVFIFSTDNGGQTLAGGNNWPLRGRKWSLWEGGVRGVGFVASPLLKQKGVKNRELIHISDWLPTLVKLARGHTNGTKPLDGFDVWKTISEGSPSPRIELLHNIDPNFVDSSPCPRNSMAPAKDDSSLPEYSAFNTSVHAAIRHGNWKLLTGYPGCGYWFPPPSQYNVSEIPSSDPPTKTLWLFDIDRDPEERHDLSREYPHIVTKLLSRLQFYHKHSVPVYFPAQDPRCDPKATGVWGPWM

SEQ ID NO: 1099 - protein, 413 aa, Homo Sapiens
MGPRGAASLPRGPGPRRLLLPVVLPLLLLLLLAPPGSGAGASRPPHLVFLLADDLGWNDVGFHGSRIRTPHLDALAAGGVLLDNYYTQPLCTPSRSQLLTGRYQIRTGLQHQIIWPCQPSCVPLDEKLLPQLLKEAGYTTHMVGKWHLGMYRKECLPTRRGFDTYFGYLLGSEDYYSHERCTLIDALNVTRCALDFRDGEEVATGYKNMYSTNIFTKRAIALITNHPPEKPLFLYLALQSVHEPLQVPEEYLKPYDFIQDKNRHHYAGMVSLMDEAVGNVTAALKSSGLWNNTVFIFSTDNGGQTLAGGNNWPLRGRKWSLWEGGVRGVGFVASPLLKQKGVKNRELIHISDWLPTLVKLARGHTNGTKPLDGFDVWKTISEGSPSPRIELLHNIDPNFVDSSPYWPECSLLL

SEQ ID NO: 1100 - protein, 398 aa, Homo Sapiens
MGPRGAASLPRGPGPRRLLLPVVLPLLLLLLLAPPGSGAGASRPPHLVFLLADDLGWNDVGFHGSRIRTPHLDALAAGGVLLDNYYTQPLCTPSRSQLLTGRYQIRTGLQHQIIWPCQPSCVPLDEKLLPQLLKEAGYTTHMVGKWHLGMYRKECLPTRRGFDTYFGYLLGSEDYYSHERCTLIDALNVTRCALDFRDGEEVATGYKNMYSTNIFTKRAIALITNHPPEKPLFLYLALQSVHEPLQVPEEYLKPYDFIQDKNRHHYAGMVSLMDEAVGNVTAALKSSGLWNNTVFIFSTDNGGQTLAGGNNWPLRGRKWSLWEGGVRGVGFVASPLLKQKGVKNRELIHISDWLPTLVKLARGHTNGTKPLDGFDVWKTIRYLHPALFPPRTETPRAA

SEQ ID NO: 1101 - protein, 178 aa, Homo Sapiens
MLHLHHSCLCFRSWLPAMLAVLLSLAPSASSDISASRPNILLLMADDLGIGDIGCYGNNTMRTPNIDRLAEDGVKLTQHISAASLCTPSRAAFLTGRYPVRSGMVSSIGYRVLQWTGASGGLPTNETTFAKILKEKGYATGLIGKWHLGLNCESASDHCHHPLHHGFDHFYGMPFSLM

SEQ ID NO: 1102 - protein, 589 aa, Homo Sapiens
MLHLHHSCLCFRSWLPAMLAVLLSLAPSASSDISASRPNILLLMADDLGIGDIGCYGNNTMRTPNIDRLAEDGVKLTQHISAASLCTPSRAAFLTGRYPVRSGMVSSIGYRVLQWTGASGGLPTNETTFAKILKEKGYATGLIGKWHLGLNCESASDHCHHPLHHGFDHFYGMPFSLMGDCARWELSEKRVNLEQKLNFLFQVLALVALTLVAGKLTHLIPVSWMPVIWSALSAVLLLASSYFVGALIVHADCFLMRNHTITEQPMCFQRTTPLILQEVASFLKRNKHGPFLLFVSFLHVHIPLITMENFLGKSLHGLYGDNVEEMDWMVGRILDTLDVEGLSNSTLIYFTSDHGGSLENQLGNTQYGGWNGIYKGGKGMGGWEGGIRVPGIFRWPGVLPAGRVIGEPTSLMDVFPTVVRLAGGEVPQDRVIDGQDLLPLLLGTAQHSDHEFLMHYCERFLHAARWHQRDRGTMWKVHFVTPVFQPEGAGACYGRKVCPCFGEKVVHHDPPLLFDLSRDPSETHILTPASEPVFYQVMERVQQAVWEHQRTLSPVPLQLDRLGNIWRPWLQPCCGPFPLCWCLREDDPQ

SEQ ID NO: 1103 - protein, 614 aa, Homo Sapiens
MRPVINRCAPGSLDLMLPQAASEGIVFHSLQISLCFRSWLPAMLAVLLSLAPSASSDISASRPNILLLMADDLGIGDIGCYGNNTMRTPNIDRLAEDGVKLTQHISAASLCTPSRAAFLTGRYPVRSGMVSSIGYRVLQWTGASGGLPTNETTFAKILKEKGYATGLIGKWHLGLNCESASDHCHHPLHHGFDHFYGMPFSLMGDCARWELSEKRVNLEQKLNFLFQVLALVALTLVAGKLTHLIPVSWMPVIWSALSAVLLLASSYFVGALIVHADCFLMRNHTITEQPMCFQRTTPLILQEVASFLKRNKHGPFLLFVSFLHVHIPLITMENFLGKSLHGLYGDNVEEMDWMVGRILDTLDVEGLSNSTLIYFTSDHGGSLENQLGNTQYGGWNGIYKGGKGMGGWEGGIRVPGIFRWPGVLPAGRVIGEPTSLMDVFPTVVRLAGGEVPQDRVIDGQDLLPLLLGTAQHSDHEFLMHYCERFLHAARWHQRDRGTMWKVHFVTPVFQPEGAGACYGRKVCPCFGEKVVHHDPPLLFDLSRDPSETHILTPASEPVFYQVMERVQQAVWEHQRTLSPVPLQLDRLGNIWRPWLQPCCGPFPLCWCLREDDPQ

SEQ ID NO: 1104 - protein, 544 aa, Homo Sapiens
MSGSRERDNMLHLHHSWTPNIDRLAEDGVKLTQHISAASLCTPSRAAFLTGRYPVRSGMVSSIGYRVLQWTGASGGLPTNETTFAKILKEKGYATGLIGKWHLGLNCESASDHCHHPLHHGFDHFYGMPFSLMGDCARWELSEKRVNLEQKLNFLFQVLALVALTLVAGKLTHLIPVSWMPVIWSALSAVLLLASSYFVGALIVHADCFLMRNHTITEQPMCFQRTTPLILQEVASFLKRNKHGPFLLFVSFLHVHIPLITMENFLGKSLHGLYGDNVEEMDWMVGRILDTLDVEGLSNSTLIYFTSDHGGSLENQLGNTQYGGWNGIYKGGKGMGGWEGGIRVPGIFRWPGVLPAGRVIGEPTSLMDVFPTVVRLAGGEVPQDRVIDGQDLLPLLLGTAQHSDHEFLMHYCERFLHAARWHQRDRGTMWKVHFVTPVFQPEGAGACYGRKVCPCFGEKVVHHDPPLLFDLSRDPSETHILTPASEPVFYQVMERVQQAVWEHQRTLSPVPLQLDRLGNIWRPWLQPCCGPFPLCWCLREDDPQ

SEQ ID NO: 1105 - protein, 361 aa, Homo Sapiens
MGCTDTPGYNHPPCPACPQGDGPSRNLQRDCYTDVALPLYENLNIVEQPVNLSSLAQKYAEKATQFIQRASTSGRPFLLYVALAHMHVPLPVTQLPAAPRGRSLYGAGLWEMDSLVGQIKDKVDHTVKENTFLWFTGDNGPWAQKCELAGSVGPFTGFWQTRQGGSPAKQTTWEGGHRVPALAYWPGRVPVNVTSTALLSVLDIFPTVVALAQASLPQGRRFDGVDVSEVLFGRSQPGHRVLFHPNSGAAGEFGALQTVRLERYKAFYITGGARACDGSTGPELQHKFPLIFNLEDDTAEAVPLERGGAEYQAVLPEVRKVLADVLQDIANDNISSADYTQDPSVTPCCNPYQIACRCQAA

SEQ ID NO: 1106 - protein, 29 aa, Homo Sapiens
MGWLFLKVLLAGVSFSGFLYPLVDFCISG

SEQ ID NO: 1107 - protein, 525 aa, Homo Sapiens
MGWLFLKVLLAGVSFSGFLYPLVDFCISGKTRGQKPNFVIILADDMGWGDLGANWAETKDTANLDKMASEGMRFVDFHAAASTCSPSRASLLTGRLGLRNGVTRNFAVTSVGGLPLNETTLAEVLQQAGYVTGIIGKWHLGHHGSYHPNFRGFDYYFGIPYSHDMGCTDTPGYNHPPCPACPQGDGPSRNLQRDCYTDVALPLYENLNIVEQPVNLSSLAQKYAEKATQFIQRASTSGRPFLLYVALAHMHVPLPVTQLPAAPRGRSLYGAGLWEMDSLVGQIKDKVDHTVKENTFLWFTGDNGPWAQKCELAGSVGPFTGFWQTRQGGSPAKQTTWEGGHRVPALAYWPGRVPVNVTSTALLSVLDIFPTVVALAQASLPQGRRFDGVDVSEVLFGRSQPGHRVLFHPNSGAAGEFGALQTVRLERYKAFYITGGARACDGSTGPELQHKFPLIFNLEDDTAEAVPLERGGAEYQAVLPEVRKVLADVLQDIANDNISSADYTQDPSVTPCCNPYQIACRCQAA

SEQ ID NO: 1108 - protein, 525 aa, Homo Sapiens; identical to SEQ ID NO: 1107

SEQ ID NO: 1109 - protein, 569 aa, Homo Sapiens
MHTLTGFSLVSLLSFGYLSWDWAKPSFVADGPGEAGEQPSAAPPQPPHIIFILTDDQGYHDVGYHGSDIETPTLDRLAAKGVKLENYYIQPICTPSRSQLLTGRYQIHTGLQHSIIRPQQPNCLPLDQVTLPQKLQEAGYSTHMVGKWHLGFYRKECLPTRRGFDTFLGSLTGNVDYYTYDNCDGPGVCGFDLHEGENVAWGLSGQYSTMLYAQRASHILASHSPQRPLFLYVAFQAVHTPLQSPREYLYRYRTMGNVARRKYAAMVTCMDEAVRNITWALKRYGFYNNSVIIFSSDNGGQTFSGGSNWPLRGRKGTYWEGGVRGLGFVHSPLLKRKQRTSRALMHITDWYPTLVGLAGGTTSAADGLDGYDVWPAISEGRASPRTEILHNIDPLYNHAQHGSLEGGFGIWNTAVQAAIRVGEWKLLTGDPGYGDWIPPQTLATFPGSWWNLERMASVRQAVWLFNISADPYEREDLAGQRPDVVRTLLARLAEYNRTAIPVRYPAENPRAHPDFNGGAWGPWASDEEEEEEEGRARSFSRGRRKKKCKICKLRSFFRKLNTRLMSQRI

SEQ ID NO: 1110 - protein, 86 aa, Homo Sapiens
MVGKWHLGFYRKECLPTRRGFDTFLGSLTGNVDYYTYDNCDGPGVCGFDLHEGENVAWGLSGQYSTMLYAQRASHILASHSPQRPL

SEQ ID NO: 1111 - protein, 426 aa, Homo Sapiens
MVGKWHLGFYRKECLPTRRGFDTFLGSLTGNVDYYTYDNCDGPGVCGFDLHEGENVAWGLSGQYSTMLYAQRASHILASHSPQRPLFLYVAFQAVHTPLQSPREYLYRYRTMGNVARRKYAAMVTCMDEAVRNITWALKRYGFYNNSVIIFSSDNGGQTFSGGSNWPLRGRKGTYWEGGVRGLGFVHSPLLKRKQRTSRALMHITDWYPTLVGLAGGTTSAADGLDGYDVWPAISEGRASPRTEILHNIDPLYNHAQHGSLEGGFGIWNTAVQAAIRVGEWKLLTGDPGYGDWIPPQTLATFPGSWWNLERMASVRQAVWLFNISADPYEREDLAGQRPDVVRTLLARLAEYNRTAIPVRYPAENPRAHPDFNGGAWGPWASDEEEEEEEGRARSFSRGRRKKKCKICKLRSFFRKLNTRLMSQRI

SEQ ID NO: 1112 - protein, 153 aa, Homo Sapiens
MLLLWVSVVAALALAVLAPGAGEQRRRAAKAPNVVLVVSDSFDGRLTFHPGSQVVKLPFINFMKTRGTSFLNAYTNSPICCPSRAAMWSGLFTHLTESWNNFKGLDPNYTTWMDVMERHGYRTQKFGKLDYTSGHHSIRHSERGSTNQRSEKV

SEQ ID NO: 1113 - protein, 536 aa, Homo Sapiens
MLLLWVSVVAALALAVLAPGAGEQRRRAAKAPNVVLVVSDSFDGRLTFHPGSQVVKLPFINFMKTRGTSFLNAYTNSPICCPSRAAMWSGLFTHLTESWNNFKGLDPNYTTWMDVMERHGYRTQKFGKLDYTSGHHSISNRVEAWTRDVAFLLRQEGRPMVNLIRNRTKVRVMERDWQNTDKAVNWLRKEAINYTEPFVIYLGLNLPHPYPSPSSGENFGSSTFHTSLYWLEKVSHDAIKIPKWSPLSEMHPVDYYSSYTKNCTGRFTKKEIKNIRAFYYAMCAETDAMLGEIILALHQLDLLQKTIVIYSSDHGELAMEHRQFYKMSMYEASAHVPLLMMGPGIKAGLQVSNVVSLVDIYPTMLDIAGIPLPQNLSGYSLLPLSSETFKNEHKVKNLHPPWILSEFHGCNVNASTYMLRTNHWKYIAYSDGASILPQLFDLSSDPDELTNVAVKFPEITYSLDQKLHSIINYPKVSASVHQYNKEQFIKWKQSIGQNYSNVIANLRWHQDWQKEPRKYENAIDQWLKTHMNPRAV

SEQ ID NO: 1114 - protein, 395 aa, Homo Sapiens
MLLLWVSVVAALALAVLAPGAGEQRRRAAKAPNVVLVVSDSFDGRLTFHPGSQVVKLPFINFMKTRGTSFLNAYTNSPICCPSRAAMWSGLFTHLTESWNNFKGLDPNYTTWMDVMERHGYRTQKFGKLDYTSGHHSISNRVEAWTRDVAFLLRQEGRPMVNLIRNRTKVRVMERDWQNTDKAVNWLRKEAINYTEPFVIYLGLNLPHPYPSPSSGENFGSSTFHTSLYWLEKVSHDAIKIPKWSPLSEMHPVDYYSSYTKNCTGRFTKKEIKNIRAFYYAMCAETDAMLGEIILALHQLDLLQKTIVIYSSDHGELAMEHRQFYKMSMYEASAHVPLLMMGPGIKAGLQVSNVVSLVDIYPTMLDEKTEVEISKLLAEVHMASGILLEFLCLRT

SEQ ID NO: 1115 - protein, 46 aa, Homo Sapiens
MLLLWVSVVAALALAVLAPGAGEQRRRAAKAPNVVLVVSDSFIPDD

SEQ ID NO: 1116 - protein, 92 aa, Homo Sapiens
RAAKAPNVVLVVSDSFDGRLTFHPGSQVVKLPFINFMKTRGTSFLNAYTNSPICCPSRAVIVWKRGQEMLLSYSDKKAGPWLILSVTGLKSE

SEQ ID NO: 1117 - protein, 117 aa, Homo Sapiens
KTCSHYECAFLGGLKTENCIENLEYFQPIYVYNPGEKNQKLEDHSEKNWKLEDHGEKNQKLEDHGVKILEPTQIPGMKIPEPFPLPGIKMIQLNEKPEDKSQGNINNPTPGPVPVPG

SEQ ID NO: 1118 - protein, 107 aa, Homo Sapiens
MKTGHFEIVTMLLATMILVDIFQVKAEVLDMADNAFDDEYLKCTDRMEIKYVPQLLKEEKASHQQLDTVWENAKAKWAARKTQIFLPMNFKDNHGIALMAYISEAQE

SEQ ID NO: 1119 - protein, 129 aa, Homo Sapiens
MKTGHFEIVTMLLATMILVDIFQVKAEVLDMADNAFDDEYLKCTDRMEIKYVPQLLKEEKASHQQLDTVWENAKAKWAARKTQIFLPMNFKDNHGIALMAYISEAQEQTPFYHLFSEAVKMAGQSREDY

SEQ ID NO: 1120 - protein, 175 aa, Homo Sapiens
MKTGHFEIVTMLLATMILVDIFQVKAEVLDMADNAFDDEYLKCTDRMEIKYVPQLLKEEKASHQQLDTVWENAKAKWAARKTQIFLPMNFKDNHGIALMAYISEAQEQTPFYHLFSEAVKMAGQSREDYIYGFQFKAFHFYLTRALQLLRKPCEASSKTVVYRTSQGTSFTFGGL

SEQ ID NO: 1121 - protein, 202 aa, Homo Sapiens
MKTGHFEIVTMLLATMILVDIFQVKAEVLDMADNAFDDEYLKCTDRMEIKYVPQLLKEEKASHQQLDTVWENAKAKWAARKTQIFLPMNFKDNHGIALMAYISEAQEQTPFYHLFSEAVKMAGQSREDYIYGFQFKAFHFYLTRALQLLRKPCEASSKTVVYRTSQGTSFTFGGLNQARFGHFTLAYSAKPQAANDQLTVLS

SEQ ID NO: 1122 - protein, 389 aa, Homo Sapiens
MKTGHFEIVTMLLATMILVDIFQVKAEVLDMADNAFDDEYLKCTDRMEIKYVPQLLKEEKASHQQLDTVWENAKAKWAARKTQIFLPMNFKDNHGIALMAYISEAQEQTPFYHLFSEAVKMAGQSREDYIYGFQFKAFHFYLTRALQLLRKPCEASSKTVVYRTSQGTSFTFGGLNQARFGHFTLAYSAKPQAANDQLTVLSIYTCLGVDIENFLDKESERITLIPLNEVFQVSQEGAGNNLILQSINKTCSHYECAFLGGLKTENCIENLEYFQPIYVYNPGEKNQKLEDHSEKNWKLEDHGEKNQKLEDHGVKILEPTQIPGMKIPEPFPLPEDKSQGNINNPTPGPVPVPGPKSHPSASSGKLLLPQFGMVIILISVSAINLFVAL

SEQ ID NO: 1123 - protein, 378 aa, Homo Sapiens
MKTGHFEIVTMLLATMILVDIFQVKAEVLDMADNAFDDEYLKCTDRMEIKYVPQLLKEEKASHQQLDTVWENAKAKWAARKTQIFLPMNFKDNHGIALMAYISEAQEQTPFYHLFSEAVKMAGQSREDYIYGFQFKAFHFYLTRALQLLRKPCEASSKTVVYRTSQGTSFTFGGLNQARFGHFTLAYSAKPQAANDQLTVLSIYTCLGVDIENFLDKESERITLIPLNEVFQVSQEGAGNNLILQSINKTCSHYECAFLGGLKTENCIENLEYFQPIYVYNPGEKNQKLEDHSEKNWKLEDHGEKNQKLEDHGVKILEPTQIPEDKSQGNINNPTPGPVPVPGPKSHPSASSGKLLLPQFGMVIILISVSAINLFVAL

SEQ ID NO: 1124 - protein, 367 aa, Homo Sapiens
MKTGHFEIVTMLLATMILVDIFQVKAEVLDMADNAFDDEYLKCTDRMEIKYVPQLLKEEKASHQQLDTVWENAKAKWAARKTQIFLPMNFKDNHGIALMAYISEAQEQTPFYHLFSEAVKMAGQSREDYIYGFQFKAFHFYLTRALQLLRKPCEASSKTVVYRTSQGTSFTFGGLNQARFGHFTLAYSAKPQAANDQLTVLSIYTCLGVDIENFLDKESERITLIPLNEVFQVSQEGAGNNLILQSINKTCSHYECAFLGGLKTENCIENLEYFQPIYVYNPGEKNQKLEDHSEKNWKLEDHGEKNQKLEDHGVKILEPTQIPAPGPVPVPGPKSHPSASSGKLLLPQFGMVIILISVSAINLFVAL

SEQ ID NO: 1125 - protein, 314 aa, Homo Sapiens
MGPLINRCKKILLPTTVPPATMRIWLLGGLLPFLLLLSGLQRPTEGSEVAIKIDFDFAPGSFDDQYQGCSKQVMEKLTQGDYFTKDIEAQKNYFRMWQKAHLAWLNQGKVLPQNMTTTHAVAILFYTLNSNVHSDFTRAMASVARTPQQYERSFHFKYLHYYLTSAIQLLRKDSIMENGTLCYEVHYRTKDVHFNAYTGATIRFGQFLSTSLLKEEAQEFGNQTLFTIFTCLGAPVQYFSLKKEVLIPPYELFKVINMSYHPRGDWLQLRSTGNLSTYNCQLLKASSKKCIPDPIAIASLSFLTSVIIFSKSRV

SEQ ID NO: 1126 - protein, 41 aa, Homo Sapiens
PPATMRIWLLGGLLPFLLLLSGLQRPTEGSELPARNASLIL

SEQ ID NO: 1127 - protein, 65 aa, Homo Sapiens
PPATMRIWLLGGLLPFLLLLSGLQRPTEGSEVAIKIDFDFAPGSFDDQYQGCSKQLPARNASLIL

SEQ ID NO: 1128 - protein, 273 aa, Homo Sapiens
PPATMRIWLLGGLLPFLLLLSGLQRPTEGSEVAIKIDFDFAPGSFDDQYQGCSKQVMEKLTQGDYFTKDIEAQKNYFRMWQKAHLAWLNQGKVLPQNMTTTHAVAILFYTLNSNVHSDFTRAMASVARTPQQYERSFHFKYLHYYLTSAIQLLRKDSIMENGTLCYEVHYRTKDVHFNAYTGATIRFGQFLSTSLLKEEAQEFGNQTLFTIFTCLGAPVQYFSLKKEVLIPPYELFKVINMSYHPRGDWLQLRSTGNLSTYNCQLLKGILYLN

SEQ ID NO: 1129 - protein, 152 aa, Homo Sapiens
AVPILPLGLAPDTFDDTYVGCAEEMEEKAAPLLKEEMAHHALLRESWEAAQETWEDKRRGLTLPPGFKAQNGIAIMVYTNSSNTLYWELNQAAFSVFPKEREVLIPPHEVFLVTRFSQDGAQSLVTLWSYNQTCSHFNCAYLGGEKRRGCVS

SEQ ID NO: 1130 - protein, 239 aa, Homo Sapiens
MALAALMIALGSLGLHTWQAQAVPILPLGLAPDTFDDTYVGCAEEMEEKAAPLLKEEMAHHALLRESWEAAQETWEDKRRGLTLPPGFKAQNGIAIMVYTNSSNTLYWELNQAVRTGGGSRELYMRHFPFKALHFYLIRALQLLRGSGGCSRGPGEVVFRGVGSLRFEPKRLGDSVRLGQFASSSLDKAVAHRFGEKRRGCVSAPGVQLGSQSEGASSLPPWKTLLLAPGEFQLSGVGP

SEQ ID NO: 1131 - protein, 291 aa, Homo Sapiens
MALAALMIALGSLGLHTWQAQAVPILPLGLAPDTFDDTYVGCAEEMEEKAAPLLKEEMAHHALLRESWEAAQETWEDKRRGLTLPPGFKAQNGIAIMVYTNSSNTLYWELNQAVRTGGGSRELYMRHFPFKALHFYLIRALQLLRGSGGCSRGPGEVVFRGVGSLRFEPKRLGDSVRLGQFASSSLDKAVAHRFGNATLFSLTTCFGAPIQAFSVFPKEREVLIPPHEVFLVTRFSQDGAQSLVTLWSYNQTCSHFNCAYLGGEKRRGCVSAPGALGTGDLHMTKRHLQQP

SEQ ID NO: 1132 - protein, 291 aa, Homo Sapiens; identical to SEQ ID NO: 1131

SEQ ID NO: 1133 - protein, 264 aa, Homo Sapiens
  misc_feature (1)..(1): Xaa can be any naturally occurring amino acid
XEMEEKAAPLLKEEMAHHALLRESWEAAQETWEDKRRGLTLPPGFKAQNGIAIMVYTNSSNTLYWELNQAVRTGGGSRELYMRHFPFKALHFYLIRALQLLRGSGGCSRGPGEVVFRGVGSLRFEPKRLGDSVRLGQFASSSLDKAVAHRFGNATLFSLTTCFGAPIQAFSVFPKEREVLIPPHEVFLVTRFSQDGAQSLVTLWSYNQTCSHFNCAYLGGEKRRGCVSAPGVQLGSQSEGASSLPPWKTLLLAPGEFQLSGVGP

SEQ ID NO: 1134 - protein, 89 aa, Homo Sapiens
MELGLGGLSTLSHCPWPRQQAPLGLSAQPALWPTLAALALLSSVAEASLGSAPRSPAPREGPPPVLASPAGHLPGGRTARWCSGRARRP

SEQ ID NO: 1135 - protein, 89 aa, Homo Sapiens; identical to SEQ ID NO: 1134

SEQ ID NO: 1136 - protein, 228 aa, Homo Sapiens
MELGLGGLSTLSHCPWPRQQAPLGLSAQPALWPTLAALALLSSVAEASLGSAPRSPAPREGPPPVLASPAGHLPGGRTARWCSGRARRPPPQPSRPAPPPPAPPSALPRGGRAARAGGPGSRARAAGARGCRLRSQLVPVRALGLGHRSDELVRFRFCSGSCRRARSPHDLSLASLLGAGALRPPPGSRPVSQPCCRPTRYEAVSFMDVNSTWRTVDRLSATACGCLG

SEQ ID NO: 1137 - protein, 228 aa, Homo Sapiens; identical to SEQ ID NO: 1136

SEQ ID NO: 1138 - protein, 76 aa, Homo Sapiens
MELGLGGLSTLSHCPWPRQQAPLGLSAQPALWPTLAALALLSSVAEASLGSAPRSPAPREGPPPVLASPAGHLPGR

SEQ ID NO: 1139 - protein, 76 aa, Homo Sapiens; identical to SEQ ID NO: 1138

SEQ ID NO: 1140 - protein, 66 aa, Homo Sapiens
MELGLGGLSTLSHCPWPRQQPALWPTLAALALLSSVAEASLGSAPRSPAPREGPPPVLASPAGHLP

SEQ ID NO: 1141 - protein, 66 aa, Homo Sapiens; identical to SEQ ID NO: 1140

SEQ ID NO: 1142 - protein, 220 aa, Homo Sapiens
MELGLGGLSTLSHCPWPRQQPALWPTLAALALLSSVAEASLGSAPRSPAPREGPPPVLASPAGHLPGGRTARWCSGRARRPPPQPSRPAPPPPAPPSALPRGGRAARAGGPGSRARAAGARGCRLRSQLVPVRALGLGHRSDELVRFRFCSGSCRRARSPHDLSLASLLGAGALRPPPGSRPVSQPCCRPTRYEAVSFMDVNSTWRTVDRLSATACGCLG

SEQ ID NO: 1143 - protein, 220 aa, Homo Sapiens; identical to SEQ ID NO: 1142

SEQ ID NO: 1144 - protein, 237 aa, Homo Sapiens
MPGLISARGQPLLEVLPPQAHLGALFLPEAPLGLSAQPALWPTLAALALLSSVAEASLGSAPRSPAPREGPPPVLASPAGHLPGGRTARWCSGRARRPPPQPSRPAPPPPAPPSALPRGGRAARAGGPGSRARAAGARGCRLRSQLVPVRALGLGHRSDELVRFRFCSGSCRRARSPHDLSLASLLGAGALRPPPGSRPVSQPCCRPTRYEAVSFMDVNSTWRTVDRLSATACGCLG

SEQ ID NO: 1145 - protein, 31 aa, Homo Sapiens
GRAVDRGLQKINLSSFRTNVQRCSSMVHHKS

SEQ ID NO: 1146 - protein, 125 aa, Homo Sapiens
MLDKAPVLKVIVNSLKNMINTFVPSGKIMQVVDEKLPGLLGNFPGPFEEEMKGIAAVTDIPLGEIISFNIFYELFTICTSIVAEDKKGHLIHGRNMDFGVFLGWNINNDTWVITEQLKPLTVNLD

SEQ ID NO: 1147 - protein, 151 aa, Homo Sapiens
MLDKAPVLKVIVNSLKNMINTFVPSGKIMQVVDEKLPGLLGNFPGPFEEEMKGIAAVTDIPLGEIISFNIFYELFTICTSIVAEDKKGHLIHGRNMDFGVFLGWNINNDTWVITEQLKPLTVNLDFQRNNKTVFKASSFAGYVGMLTGFKP

SEQ ID NO: 1148 - protein, 330 aa, Homo Sapiens
MLDKAPVLKVIVNSLKNMINTFVPSGKIMQVVDEKLPGLLGNFPGPFEEEMKGIAAVTDIPLGEIISFNIFYELFTICTSIVAEDKKGHLIHGRNMDFGVFLGWNINNDTWVITEQLKPLTVNLDFQRNNKTVFKASSFAGYVGMLTGFKPGLFSLTLNERFSINGGYLGILEWILGKKDVMWIGFLTRTVLENSTSYEEAKNLLTKTKILAPAYFILGGNQSGEGCVITRDRKESLDVYELDAKQGRWYVVQTNYDRWKHPFFLDDRRTPAKMCLNRTSQENISFETMYDVLSTKPVLNKLTVYTTLIDVTKGQFETYLRDCPDPCIGW

SEQ ID NO: 1149 - protein, 330 aa, Homo Sapiens; identical to SEQ ID NO: 1148

SEQ ID NO: 1150 - protein, 110 aa, Homo Sapiens
MLDKAPVLKVIVNSLKNMINTFVPSGKIMQVVDEKLPGLLGNFPGPFEEEMKGIAAVTDIPLGKVHLEALKKKVIKFFYKFPLRCDIHTAQVLYVLDIQHRCTGLRYTAQ

SEQ ID NO: 1151 - protein, 110 aa, Homo Sapiens; identical to SEQ ID NO: 1150

SEQ ID NO: 1152 - protein, 187 aa, Homo Sapiens
MNCCIGLGEKARGSHRASYPSLSALFTEASILGFGSFAVKAQVAWKALSLSLRHPFRGTEKPRPLLPVPPPPSVPPTAWNGAVPGRGSRGGGGVACPRPSRLFFASAGVRGVALAARAMPGRSCVALVLLAAAVSCAVAQHAPPWTEDCRKSTYPPSGPTYRGAVPWYTINLDLPPYKRWHELMLDK

SEQ ID NO: 1153 - protein, 72 aa, Homo Sapiens
MNCCIGLGEKARGSHRASYPSLSALFTEASILGFGSFAVKAQVGNQQLGGPEWIRFSLTPRPLNCSLSLTPR

SEQ ID NO: 1154 - protein, 97 aa, Homo Sapiens
MNCCIGLGEKARGSHRASYPSLSALFTEASILGFGSFAVKAQVGNQQLGGPEWIRFSLTPRPLNCSLSLTPRGQRTAENQPILLQDQRTEVQFHGTP

SEQ ID NO: 1155 - protein, 74 aa, Homo Sapiens
MNCCIGLGEKARGSHRASYPSLSALFTEASILGFGSFAVKAQVGNQQLGGPEWIRFSLTPRPLNCSLSLTPRWG

SEQ ID NO: 1156 - protein, 74 aa, Homo Sapiens; identical to SEQ ID NO: 1155

SEQ ID NO: 1157 - protein, 74 aa, Homo Sapiens; identical to SEQ ID NO: 1155

SEQ ID NO: 1158 - protein, 74 aa, Homo Sapiens; identical to SEQ ID NO: 1155

SEQ ID NO: 1159 - protein, 74 aa, Homo Sapiens; identical to SEQ ID NO: 1155

SEQ ID NO: 1160 - protein, 71 aa, Homo Sapiens
MNCCIGLGEKARGSHRASYPSLSALFTEASILGFGSFAVKAQVVDRGLQKINLSSFRTNVQRCSSMVHHKS

SEQ ID NO: 1161 - protein, 58 aa, Homo Sapiens
MNCCIGLGEKARGSHRASYPSLSALFTEASILGFGSFAVKAQWTEDCRKSTYPPSGPT

SEQ ID NO: 1162 - protein, 59 aa, Homo Sapiens
MNCCIGLGEKARGSHRASYPSLSALFTEASILGFGSFAVKAQWTEDCRKSTYPPSGPTL

SEQ ID NO: 1163 - protein, 389 aa, Homo Sapiens
MNCCIGLGEKARGSHRASYPSLSALFTEASILGFGSFAVKAQWTEDCRKSTYPPSGPTVFPAVIRYRGAVPWYTINLDLPPYKRWHELMLDKAPVPGLLGNFPGPFEEEMKGIAAVTDIPLGEIISFNIFYELFTICTSIVAEDKKGHLIHGRNMDFGVFLGWNINNDTWVITEQLKPLTVNLDFQRNNKTVFKASSFAGYVGMLTGFKPGLFSLTLNERFSINGGYLGILEWILGKKDVMWIGFLTRTVLENSTSYEEAKNLLTKTKILAPAYFILGGNQSGEGCVITRDRKESLDVYELDAKQGRWYVVQTNYDRWKHPFFLDDRRTPAKMCLNRTSQENISFETMYDVLSTKPVLNKLTVYTTLIDVTKGQFETYLRDCPDPCIGW

SEQ ID NO: 1164 - protein, 411 aa, Homo Sapiens
MNCCIGLGEKARGSHRASYPSLSALFTEASILGFGSFAVKAQWTEDCRKSTYPPSGPTYRGAVPWYTINLDLPPYKRWHELMLDKAPVLKVIVNSLKNMINTFVPSGKIMQVVDEKLPGLLGNFPGPFEEEMKGIAAVTDIPLGEIISFNIFYELFTICTSIVAEDKKGHLIHGRNMDFGVFLGWNINNDTWVITEQLKPLTVNLDFQRNNKTVFKASSFAGYVGMLTGFKPGLFSLTLNERFSINGGYLGILEWILGKKDVMWIGFLTRTVLENSTSYEEAKNLLTKTKILAPAYFILGGNQSGEGCVITRDRKESLDVYELDAKQGRWYVVQTNYDRWKHPFFLDDRRTPAKMCLNRTSQENISFETMYDVLSTKPVLNKLTVYTTLIDVTKGQFETYLRDCPDPCIGW

SEQ ID NO: 1165 - protein, 341 aa, Homo Sapiens
MNCCIGLGEKARGSHRASYPSLSALFTEASILGFGSFAVKAQWTEDCRKSTYPPSGPTYRGAVPWYTINLDLPPYKRWHELMLDKAPVLKVIVNSLKNMINTFVPSGKIMQVVDEKLPGLLGNFPGPFEEEMKGIAAVTDIPLGEIISFNIFYELFTICTSIVAEDKKGHLIHGRNMDFGVFLGWNINNDTWVITEQLKPLTVNLDFQRNNKTVFKASSFAGYVGMLTGFKPGLFSLTLNERFSINGGYLGILEWILGKKDVMWIGFLTRTVLENSTSYEEAKNLLTKTKILAPAYFILGGNQSGEGCVITRDRKESLDVYEISHLKPCMMSCQQNLSSTS

SEQ ID NO: 1166 - protein, 386 aa, Homo Sapiens
MNCCIGLGEKARGSHRASYPSLSALFTEASILGFGSFAVKAQWTEDCRKSTYPPSGPTYRGAVPWYTINLDLPPYKRWHELMLDKAPVLKVIVNSLKNMINTFVPSGKIMQVVDEKLPGLLGNFPGPFEEEMKGIAAVTDIPLGHLIHGRNMDFGVFLGWNINNDTWVITEQLKPLTVNLDFQRNNKTVFKASSFAGYVGMLTGFKPGLFSLTLNERFSINGGYLGILEWILGKKDVMWIGFLTRTVLENSTSYEEAKNLLTKTKILAPAYFILGGNQSGEGCVITRDRKESLDVYELDAKQGRWYVVQTNYDRWKHPFFLDDRRTPAKMCLNRTSQENISFETMYDVLSTKPVLNKLTVYTTLIDVTKGQFETYLRDCPDPCIGW

SEQ ID NO: 1167 - protein, 191 aa, Homo Sapiens
MNCCIGLGEKARGSHRASYPSLSALFTEASILGFGSFAVKAQWTEDCRKSTYPPSGPTYRGAVPWYTINLDLPPYKRWHELMLDKAPVLKVIVNSLKNMINTFVPSGKIMQVVDEKLPGLLGNFPGPFEEEMKGIAAVTDIPLGKVHLEALKKKVIKFFYKFPLRCDIHTAQVLYVLDIQHRCTGLRYTAQ

SEQ ID NO: 1168 - protein, 140 aa, Homo Sapiens
MNCCIGLGEKARGSHRASYPSLSALFTEASILGFGSFAVKAQWTEDCRKSTYPPSGPTYRGAVPWYTINLDLPPYKRWHELMLDKAPVVIVNSLKNMINTFVPSGKIMQVVDEKLPGLLGNFPGPFEEEMKGIAAVTDIP

SEQ ID NO: 1169 - protein, 49 aa, Homo Sapiens
MPGRSCVALVLLAAAVSCAVAQHAPPRTAENQPILLQDQRTEVQFHGTP

SEQ ID NO: 1170 - protein, 81 aa, Homo Sapiens
MPGRSCVALVLLAAAVSCAVAQHAPPVSELEPRRREGRAGAGADGGAGVAARAVDRGLQKINLSSFRTNVQRCSSMVHHKS

SEQ ID NO: 1171 - protein, 75 aa, Homo Sapiens
MPGRSCVALVLLAAAVSCAVAQHAPPVSELEPRRREGRAGAGADGGAVDRGLQKINLSSFRTNVQRCSSMVHHKS

SEQ ID NO: 1172 - protein, 75 aa, Homo Sapiens; identical to SEQ ID NO: 1171

SEQ ID NO: 1173 - protein, 67 aa, Homo Sapiens
MPGRSCVALVLLAAAVSCAVAQHAPPVSELEPRRREGRAVDRGLQKINLSSFRTNVQRCSSMVHHKS

SEQ ID NO: 1174 - protein, 42 aa, Homo Sapiens
MPGRSCVALVLLAAAVSCAVAQHAPPWTEDCRKSTYPPSGPT

SEQ ID NO: 1175 - protein, 42 aa, Homo Sapiens; identical to SEQ ID NO: 1174

SEQ ID NO: 1176 - protein, 42 aa, Homo Sapiens; identical to SEQ ID NO: 1174

SEQ ID NO: 1177 - protein, 56 aa, Homo Sapiens
MPGRSCVALVLLAAAVSCAVAQHAPPWTEDCRKSTYPPSGPTLAYLATFLALLKRK

SEQ ID NO: 1178 - protein, 184 aa, Homo Sapiens
MPGRSCVALVLLAAAVSCAVAQHAPPWTEDCRKSTYPPSGPTVFPAVIRYRGAVPWYTINLDLPPYKRWHELMLDKAPVLKVIVNSLKNMINTFVPSGKIMQVVDEKLPGLLGNFPGPFEEEMKGIAAVTDIPLGEIISFNIFYELFTICTSIVAEDKKGHLIHGRNMDFGVFLGWNINNDTWV

SEQ ID NO: 1179 - protein, 62 aa, Homo Sapiens
MPGRSCVALVLLAAAVSCAVAQHAPPWTEDCRKSTYPPSGPTYRGAVPWYTINLDLPPYKRC

SEQ ID NO: 1180 - protein, 185 aa, Homo Sapiens
MPGRSCVALVLLAAAVSCAVAQHAPPWTEDCRKSTYPPSGPTYRGAVPWYTINLDLPPYKRWHELMLDKAPVLKVIVNSLKNMINTFVPSGKIMQVVDEKLPGLLGNFPGPFEEEMKGEIISFNIFYELFTICTSIVAEDKKGHLIHGRNMDFGVFLGWNINNDTWVITEQLKPLTVNLDFQRNN

SEQ ID NO: 1181 - protein, 375 aa, Homo Sapiens
MPGRSCVALVLLAAAVSCAVAQHAPPWTEDCRKSTYPPSGPTYRGAVPWYTINLDLPPYKRWHELMLDKAPVLKVIVNSLKNMINTFVPSGKIMQVVDEKLPGLLGNFPGPFEEEMKGIAAVTDIPLAEDKKGHLIHGRNMDFGVFLGWNINNDTWVITEQLKPLTVNLDFQRNNKTVFKASSFAGYVGMLTGFKPGLFSLTLNERFSINGGYLGILEWILGKKDVMWIGFLTRTVLENSTSYEEAKNLLTKTKILAPAYFILGGNQSGEGCVITRDRKESLDVYELDAKQGRWYVVQTNYDRWKHPFFLDDRRTPAKMCLNRTSQENISFETMYDVLSTKPVLNKLTVYTTLIDVTKGQFETYLRDCPDPCIGW

SEQ ID NO: 1182 - protein, 374 aa, Homo Sapiens
MPGRSCVALVLLAAAVSCAVAQHAPPWTEDCRKSTYPPSGPTYRGAVPWYTINLDLPPYKRWHELMLDKAPVLKVIVNSLKNMINTFVPSGKIMQVVDEKLPGLLGNFPGPFEEEMKGIAAVTDIPLEDKKGHLIHGRNMDFGVFLGWNINNDTWVITEQLKPLTVNLDFQRNNKTVFKASSFAGYVGMLTGFKPGLFSLTLNERFSINGGYLGILEWILGKKDVMWIGFLTRTVLENSTSYEEAKNLLTKTKILAPAYFILGGNQSGEGCVITRDRKESLDVYELDAKQGRWYVVQTNYDRWKHPFFLDDRRTPAKMCLNRTSQENISFETMYDVLSTKPVLNKLTVYTTLIDVTKGQFETYLRDCPDPCIGW

SEQ ID NO: 1183 - protein, 395 aa, Homo Sapiens
MPGRSCVALVLLAAAVSCAVAQHAPPWTEDCRKSTYPPSGPTYRGAVPWYTINLDLPPYKRWHELMLDKAPVLKVIVNSLKNMINTFVPSGKIMQVVDEKLPGLLGNFPGPFEEEMKGIAAVTDIPLGEIISFNIFYELFTICTSIVAEDKKGHLIHGRNMDFGVFLGWNINNDTWVITEQLKPLTVNLDFQRNNKTVFKASSFAGYVGMLTGFKPGLFSLTLNERFSINGGYLGILEWILGKKDVMWIGFLTRTVLENSTSYEEAKNLLTKTKILAPAYFILGGNQSGEGCVITRDRKESLDVYELDAKQGRWYVVQTNYDRWKHPFFLDDRRTPAKMCLNRTSQENISFETMYDVLSTKPVLNKLTVYTTLIDVTKGQFETYLRDCPDPCIGW

SEQ ID NO: 1184 - protein, 395 aa, Homo Sapiens; identical to SEQ ID NO: 1183

SEQ ID NO: 1185 - protein, 395 aa, Homo Sapiens; identical to SEQ ID NO: 1183

SEQ ID NO: 1186 - protein, 173 aa, Homo Sapiens
MPGRSCVALVLLAAAVSCAVAQHAPPWTEDCRKSTYPPSGPTYRGAVPWYTINLDLPPYKRWHELMLDKAPVLKVIVNSLKNMINTFVPSGKIMQVVDEKLPGLLGNFPGPFEEEMKGIAAVTDIPLGEIISFNIFYELFTICTSIVAEDKKGNCALREGGQHEALHKEKSSK

SEQ ID NO: 1187 - protein, 370 aa, Homo Sapiens
MPGRSCVALVLLAAAVSCAVAQHAPPWTEDCRKSTYPPSGPTYRGAVPWYTINLDLPPYKRWHELMLDKAPVLKVIVNSLKNMINTFVPSGKIMQVVDEKLPGLLGNFPGPFEEEMKGIAAVTDIPLGHLIHGRNMDFGVFLGWNINNDTWVITEQLKPLTVNLDFQRNNKTVFKASSFAGYVGMLTGFKPGLFSLTLNERFSINGGYLGILEWILGKKDVMWIGFLTRTVLENSTSYEEAKNLLTKTKILAPAYFILGGNQSGEGCVITRDRKESLDVYELDAKQGRWYVVQTNYDRWKHPFFLDDRRTPAKMCLNRTSQENISFETMYDVLSTKPVLNKLTVYTTLIDVTKGQFETYLRDCPDPCIGW

SEQ ID NO: 1188 - protein, 288 aa, Homo Sapiens
MPGRSCVALVLLAAAVSCAVAQHAPPWTEDCRKSTYPPSGPTYRGAVPWYTINLDLPPYKRWHELMLDKAPVLKVIVNSLKNMINTFVPSGKIMQVVDEKLPGLLGNFPGPFEEEMKGIAAVTDIPLGILEWILGKKDVMWIGFLTRTVLENSTSYEEAKNLLTKTKILAPAYFILGGNQSGEGCVITRDRKESLDVYELDAKQGRWYVVQTNYDRWKHPFFLDDRRTPAKMCLNRTSQENISFETMYDVLSTKPVLNKLTVYTTLIDVTKGQFETYLRDCPDPCIGW

SEQ ID NO: 1189 - protein, 175 aa, Homo Sapiens
MPGRSCVALVLLAAAVSCAVAQHAPPWTEDCRKSTYPPSGPTYRGAVPWYTINLDLPPYKRWHELMLDKAPVLKVIVNSLKNMINTFVPSGKIMQVVDEKLPGLLGNFPGPFEEEMKGIAAVTDIPLGKVHLEALKKKVIKFFYKFPLRCDIHTAQVLYVLDIQHRCTGLRYTAQ

SEQ ID NO: 1190 - protein, 376 aa, Homo Sapiens
MPGRSCVALVLLAAAVSCAVAQHAPPWTEDCRKSTYPPSGPTYRGAVPWYTINLDLPPYKRWHELMLDKAPVLKVIVNSLKNMINTFVPSGKIMQVVDEKLPGLLGNFPGPFEEEMKGIAAVTDIPLVAEDKKGHLIHGRNMDFGVFLGWNINNDTWVITEQLKPLTVNLDFQRNNKTVFKASSFAGYVGMLTGFKPGLFSLTLNERFSINGGYLGILEWILGKKDVMWIGFLTRTVLENSTSYEEAKNLLTKTKILAPAYFILGGNQSGEGCVITRDRKESLDVYELDAKQGRWYVVQTNYDRWKHPFFLDDRRTPAKMCLNRTSQENISFETMYDVLSTKPVLNKLTVYTTLIDVTKGQFETYLRDCPDPCIGW

SEQ ID NO: 1191 - protein, 246 aa, Homo Sapiens
MPGRSCVALVLLAAAVSCAVAQHAPPWTEDCRKSTYPPSGPTYRGAVPWYTINLDLPPYKRWHELMLDKAPVLKVIVNSLKNMINTFVPSGKIMQVVDEKLPGLLGNFPGPFEEEMKGIAAVTDIPLVNLDFQRNNKTVFKASSFAGYVGMLTGFKPGLFSLTLNERFSINGGYLGILEWILGKKDVMWIGFLTRTVLENSTSYEEAKNLLTKTKILAPAYFILGGNQSGEGCVITRDRKESLDVY

SEQ ID NO: 1192 - protein, 366 aa, Homo Sapiens
MPGRSCVALVLLAAAVSCAVAQHAPPWTEDCRKSTYPPSGPTYRGAVPWYTINLDLPPYKRWHELMLDKAPVPGLLGNFPGPFEEEMKGIAAVTDIPLGEIISFNIFYELFTICTSIVAEDKKGHLIHGRNMDFGVFLGWNINNDTWVITEQLKPLTVNLDFQRNNKTVFKASSFAGYVGMLTGFKPGLFSLTLNERFSINGGYLGILEWILGKKDVMWIGFLTRTVLENSTSYEEAKNLLTKTKILAPAYFILGGNQSGEGCVITRDRKESLDVYELDAKQGRWYVVQTNYDRWKHPFFLDDRRTPAKMCLNRTSQENISFETMYDVLSTKPVLNKLTVYTTLIDVTKGQFETYLRDCPDPCIGW

SEQ ID NO: 1193 - protein, 393 aa, Homo Sapiens
MPGRSCVALVLLAAAVSCAVAQHAPPWTEDCRKSTYPPSGPTYRGAVPWYTINLDLPPYKRWHELMLDKAPVVIVNSLKNMINTFVPSGKIMQVVDEKLPGLLGNFPGPFEEEMKGIAAVTDIPLGEIISFNIFYELFTICTSIVAEDKKGHLIHGRNMDFGVFLGWNINNDTWVITEQLKPLTVNLDFQRNNKTVFKASSFAGYVGMLTGFKPGLFSLTLNERFSINGGYLGILEWILGKKDVMWIGFLTRTVLENSTSYEEAKNLLTKTKILAPAYFILGGNQSGEGCVITRDRKESLDVYELDAKQGRWYVVQTNYDRWKHPFFLDDRRTPAKMCLNRTSQENISFETMYDVLSTKPVLNKLTVYTTLIDVTKGQFETYLRDCPDPCIGW

SEQ ID NO: 1194 - protein, 368 aa, Homo Sapiens
  misc_feature (1)..(1): Xaa can be any naturally occurring amino acid
XLAAAVSCAVAQHAPPVSELEPRRREGRAVDRGLQKINLSSFRTNLKVIVNSLKNMINTFVPSGKIMQVVDEKLPGLLGNFPGPFEEEMKGIAAVTDIPLGEIISFNIFYELFTICTSIVAEDKKGHLIHGRNMDFGVFLGWNINNDTWVITEQLKPLTVNLDFQRNNKTVFKASSFAGYVGMLTGFKPGLFSLTLNERFSINGGYLGILEWILGKKDVMWIGFLTRTVLENSTSYEEAKNLLTKTKILAPAYFILGGNQSGEGCVITRDRKESLDVYELDAKQGRWYVVQTNYDRWKHPFFLDDRRTPAKMCLNRTSQENISFETMYDVLSTKPVLNKLTVYTTLIDVTKGQFETYLRDCPDPCIGW

SEQ ID NO: 1195 - protein, 200 aa, Homo Sapiens
  misc_feature (1)..(1): Xaa can be any naturally occurring amino acid
XNNKTVFKASSFAGYVGMLTGFKPGLFSLTLNERFSINGGYLEWILGKKDVMWIGFLTRTVLENSTSYEEAKNLLTKTKILAPAYFILGGNQSGEGCVITRDRKESLDVYELDAKQGRWYVVQTNYDRWKHPFFLDDRRTPAKMCLNRTSQENISFETMYDVLSTKPVLNKLTVYTTLIDVTKGQFETYLRDCPDPCIGW

SEQ ID NO: 1196 - protein, 51 aa, Homo Sapiens
AQRYEAASTIYGPHTLSAYIQLFRNLAKAIATELHLWKSSLWMQLFMKLQL

SEQ ID NO: 1197 - protein, 144 aa, Homo Sapiens
AQRYEAASTIYGPHTLSAYIQLFRNLAKAIATGEVAEVIFVGANPKNSVQNQTHQTFLTVEKYEATSTSWQIVCNDASWETRFYWHKGLLGLSNATVEWHIPDTAQPGIYRIRYFGHNRKQDILKPAVILSFEGTSPAFEVVTI

SEQ ID NO: 1198 - protein, 780 aa, Homo Sapiens
MAKRTFSNLETFLIFLLVMMSAITVALLSLLFITSGTIENHKDLGGHFFSTTQSPPATQGSTAAQRSTATQHSTATQSSTATQTSPVPLTPESPLFQNFSGYHIGVGRADCTGQVADINLMGYGKSGQNAQGILTRLYSRAFIMAEPDGSNRTVFVSIDIGMVSQRLRLEVLNRLQSKYGSLYRRDNVILSGTHTHSGPAGYFQYTVFVIASEGFSNQTFQHMVTGILKSIDIAHTNMKPGKIFINKGNVDGVQINRSPYSYLQNPQSERARYSSNTDKEMIVLKMVDLNGDDLGLISWFAIHPVSMNNSNHLVNSDNVGYASYLLEQEKNKGYLPGQGPFVAAFASSNLGDVSPNILGPRCINTGESCDNANSTCPIGGPSMCIAKGPGQDMFDSTQIIGRAMYQRAKELYASASQEVTGPLASAHQWVDMTDVTVWLNSTHASKTCKPALGYSFAAGTIDGVGGLNFTQGKTEGDPFWDTIRDQILGKPSEEIKECHKPKPILLHTGELSKPHPWHPDIVDVQIITLGSLAITAIPGEFTTMSGRRLREAVQAEFASHGMQNMTVVISGLCNVYTHYITTYEEYQAQRYEAASTIYGPHTLSAYIQLFRNLAKAIATDTVANLSRGPEPPFFKQLIVPLIPSIVDRAPKGRTFGDVLQPAKPEYRVGEVAEVIFVGANPKNSVQNQTHQTFLTVEKYEATSTSWQIVCNDASWETRFYWHKGLLGLSNATVEWHIPDTAQPGIYRIRYFGHNRKQDILKPAVILSFEGTSPAFEVVTI

SEQ ID NO: 1199 - protein, 745 aa, Homo Sapiens
MAKRTFSNLETFLIFLLVMMSAITVALLSLLFITSGTIENHKDLGGHFFSTTQSPPATQGSTAAQRSTATQHSTATQSSTATQTSPVPLTPESPLFQNFSGYHIGVGRADCTGQVADINLMGYGKSGQNAQGILTRLYSRAFIMAEPDGSNRTVFVSIDIGMVSQRLRLEVLNRLQSKYGSLYRRDNVILSGTHTHSGPAGYFQYTVFVIASEGFSNQTFQHMVTGILKSIDIAHTNMKPGKIFINKGNVDGVQINRSPYSYLQNPQSERARYSSNTDKEMIVLKMVDLNGDDLGLISWFAIHPVSMNNSNHLVNSDNVGYASYLLEQEKNKGYLPGQGPFVAAFASSNLGDVSPNILGPRCINTGESCDNANSTCPIGGPSMCIAKGPGQDMFDSTQIIGRAMYQRAKSKTCKPALGYSFAAGTIDGVGGLNFTQGKTEGDPFWDTIRDQILGKPSEEIKECHKPKPILLHTGELSKPHPWHPDIVDVQIITLGSLAITAIPGEFTTMSGRRLREAVQAEFASHGMQNMTVVISGLCNVYTHYITTYEEYQAQRYEAASTIYGPHTLSAYIQLFRNLAKAIATDTVANLSRGPEPPFFKQLIVPLIPSIVDRAPKGRTFGDVLQPAKPEYRVGEVAEVIFVGANPKNSVQNQTHQTFLTVEKYEATSTSWQIVCNDASWETRFYWHKGLLGLSNATVEWHIPDTAQPGIYRIRYFGHNRKQDILKPAVILSFEGTSPAFEVVTI

SEQ ID NO: 1200 - protein, 622 aa, Homo Sapiens
MDSEKSSEWRSDVLNRLQSKYGSLYRRDNVILSGTHTHSGPAGYFQYTVFVIASEGFSNQTFQHMVTGILKSIDIAHTNMKPGKIFINKGNVDGVQINRSPYSYLQNPQSERARYSSNTDKEMIVLKMVDLNGDDLGLISWFAIHPVSMNNSNHLVNSDNVGYASYLLEQEKNKGYLPGQGPFVAAFASSNLGDVSPNILGPRCINTGESCDNANSTCPIGGPSMCIAKGPGQDMFDSTQIIGRAMYQRAKELYASASQEVTGPLASAHQWVDMTDVTVWLNSTHASKTCKPALGYSFAAGTIDGVGGLNFTQGKTEGDPFWDTIRDQILGKPSEEIKECHKPKPILLHTGELSKPHPWHPDIVDVQIITLGSLAITAIPGEFTTMSGRRLREAVQAEFASHGMQNMTVVISGLCNVYTHYITTYEEYQAQRYEAASTIYGPHTLSAYIQLFRNLAKAIATDTVANLSRGPEPPFFKQLIVPLIPSIVDRAPKGRTFGDVLQPAKPEYRVGEVAEVIFVGANPKNSVQNQTHQTFLTVEKYEATSTSWQIVCNDASWETRFYWHKGLLGLSNATVEWHIPDTAQPGIYRIRYFGHNRKQDILKPAVILSFEGTSPAFEVVTI

SEQ ID NO: 1201 - protein, 726 aa, Homo Sapiens
MSAITVALLSLLFITSGTIENHKDLGGHFFSTTQSPPATQGSTAAQRSTATQHSTATQSSTATQTSPVPLTPESPLFQNFSGYHIGVGRADCTGQVADINLMGYGKSGQNAQGILTRLYSRAFIMAEPDGSNRTVFVSIDIGMVSQRLRLEVLNRLQSKYGSLYRRDNVILSGTHTHSGPAGYFQYTVFVIASEGFSNQTFQHMVTGILKSIDIAHTNMKPGKIFINKGNVDGVQINRSPYSYLQNPQSERARYSSNTDKEMIVLKMVDLNGDDLGLISWFAIHPVSMNNSNHLVNSDNVGYASYLLEQEKNKGYLPGQGPFVAAFASSNLGDVSPNILGPRCINTGESCDNANSTCPIGGPSMCIAKGPGQDMFDSTQIIGRAMYQRAKSKTCKPALGYSFAAGTIDGVGGLNFTQGKTEGDPFWDTIRDQILGKPSEEIKECHKPKPILLHTGELSKPHPWHPDIVDVQIITLGSLAITAIPGEFTTMSGRRLREAVQAEFASHGMQNMTVVISGLCNVYTHYITTYEEYQAQRYEAASTIYGPHTLSAYIQLFRNLAKAIATDTVANLSRGPEPPFFKQLIVPLIPSIVDRAPKGRTFGDVLQPAKPEYRVGEVAEVIFVGANPKNSVQNQTHQTFLTVEKYEATSTSWQIVCNDASWETRFYWHKGLLGLSNATVEWHIPDTAQPGIYRIRYFGHNRKQDILKPAVILSFEGTSPAFEVVTI

SEQ ID NO: 1202 - protein, 236 aa, Homo Sapiens
MESSAKMESGGAGQQPQPQPQQPFLPPAACFFATAAAAAAAAAAAAAQSAQQQQQQQQQQQQAPQLRPAADGQPSGGGHKSAPKQVKRQRSSSPELMRCKRRLNFSGFGYSLPQQQPAAVARRNERERNRVKLVNLGFATLREHVPNGAANKKMSKVETLRSAVEYIRALQQLLDEHDAVSAAFQAGVLSPTISPNYSNDLNSMAGSPVSSYSSDEGSYDPLSPEEQELLDFTNWF

SEQ ID NO: 1203 - protein, 132 aa, Homo Sapiens
MDVTRLLLATLLVFLCFFTANSHLPPEEKLRDDRSLRSNSSVNLLDVPSVSIVALNKKSKQIGRKAAEKKRSSKKEASMKKVVRPRTPLSAPCVATRNSCKPPAPACCDPCASCQCRFFRSACSCRVLSLNC

SEQ ID NO: 1204 - protein, 132 aa, Homo Sapiens; identical to SEQ ID NO: 1203

SEQ ID NO: 1205 - protein, 243 aa, Homo Sapiens
MKEYVLLLFLALCSAKPFFSPSHIALKNMMLKDMEDTDDDDDDDDDDDDDDEDNSLFPTREPRSHFFPFDLFPMCPFGCQCYSRVVHCSDLGLTSVPTNIPFDTRMLDLQNNKIKEIKENDFKGLTSLYGLILNNNKLTKIHPKAFLTTKKLRRLYLSHNQLSEIPLNLPKSLAELRIHENKVKKIQKDTFKGMNALHVLEMSANPLDNNGIEPGAFEGVTVFHIRIAEAKLTSVPKDNLPSF

SEQ ID NO: 1206 - protein, 380 aa, Homo Sapiens
MKEYVLLLFLALCSAKPFFSPSHIALKNMMLKDMEDTDDDDDDDDDDDDDDEDNSLFPTREPRSHFFPFDLFPMCPFGCQCYSRVVHCSDLGLTSVPTNIPFDTRMLDLQNNKIKEIKENDFKGLTSLYGLILNNNKLTKIHPKAFLTTKKLRRLYLSHNQLSEIPLNLPKSLAELRIHENKVKKIQKDTFKGMNALHVLEMSANPLDNNGIEPGAFEGVTVFHIRIAEAKLTSVPKGLPPTLLELHLDYNKISTVELEDFKRYKELQRLGLGNNKITDIENGSLANIPRVREIHLENNKLKKIPSGLPELKYLQIIFLHSNSIARVGVNDFCPTVPKMKKSLYSAISLFNNPVKYWEMQPATFRCVLSRMSVQLGNFGM

SEQ ID NO: 1207 - protein, 431 aa, Homo Sapiens
MEGVGGLWPWVLGLLSLPGVILGAPLASSCAGACGTSFPDGLTPEGTQASGDKDIPAINQGLILEETPESSFLIEGDIIRPSPFRLLSATSNKWPMGGSGVVEVPFLLSSKYDEPSRQVILEALAEFERSTCIRFVTYQDQRDFISIIPMYGCFSSVGRSGGMQVVSLAPTCLQKGRGIVLHELMHVLGFWHEHTRADRDRYIRVNWNEILPGFEINFIKSQSSNMLTPYDYSSVMHYGRLAFSRRGLPTITPLWAPSVHIGQRWNLSASDITRVLKLYGCSPSGPRPRGRGSHAHSTGRSPAPASLSLQRLLEALSAESRSPDPSGSSAGGQPVPAGPGESPHGWESPALKKLSAEASARQPQTLASSPRSRPGAGAPGVAQEQSWLAGVSTKPTVPSSEAGIQPVPVQGSPALPGGCVPRNHFKGMSED

SEQ ID NO: 1208 - protein, 1844 aa, Homo Sapiens
MVGVLAMAAAAAPPPVKDCEIEPCKKRKKDDDTSTCKTITKYLSPLGKTRDRVFAPPKPSNILDYFRKTSPTNEKTQLGKECKIKSPESVPVDSNKDCTTPLEMFSNVEFKKKRKRVNLSHQLNNIKTENEAPIEISSDDSKEDYSLNNDFVESSTSVLRYKKQVEVLAENIQDTKSQPNTMTSLQNSKKVNPKQGTTKNDFKKLRKRKCRDVVDLSESLPLAEELNLLKKDGKDTKQMENTTSHANSRDNVTEAAQLNDSIITVSYEEFLKSHKENKVEEIPDSTMSICVPSETVDEIVKSGYISESENSEISQQVRFKTVTVLAQVHPIPPKKTGKIPRIFLKQKQFEMENSLSDPENEQTVQKRKSNVVIQEEELELAVLEAGSSEAVKPKCTLEERQQFMKAFRQPASDALKNGVKKSSDKQKDLNEKCLYEVGRDDNSKKIMENSGIQMVSKNGNLQLHTDKGSFLKEKNKKLKKKNKKTLDTGAIPGKNREGNTQKKETTFFLKEKQYQNRMSLRQRKTEFFKSSTLFNNESLVYEDIANDDLLKVSSLCNNNKLSRKTSIPVKDIKLTQSKAESEASLLNVSTPKSTRRSGRISSTPTTETIRGIDSDDVQDNSQLKASTQKAANLSEKHSLYTAELITVPFDSESPIRMKFTRISTPKKSKKKSNKRSEKSEATDGGFTSQIRKASNTSKNISKAKQLIEKAKALHISRSKVTEEIAIPLRRSSRHQTLPERKKLSETEDSVIIIDSSPTALKHPEKNQKKLQCLNDVLGKKLNTSTKNVPGKMKVAPLFLVRKAQKAADPVPSFDESSQDTSEKSQDCDVQCKAKRDFLMSGLPDLLKRQIAKKAAALDVYNAVSTSFQRVVHVQQKDDGCCLWHLKPPSCPLLTKFKELNTKVIDLSKCGIALGEFSTLNSKLKSGNSAAVFMRTRKEFTEEVRNLLLEEIRWSNPEFSLKKYFPLLLKKQIEHQVLSSECHSKQELEADVSHKETKRKLVEAENSKSKRKKPNEYSKNLEKTNRKSEELSKRNNSSGIKLDSSKDSGTEDMLWTEKYQPQTASELIGNELAIKKLHSWLKDWKRRAELEERQNLKGKRDEKHEDFSGGIDFKGSSDDEEESRLCNTVLITGPTGVGKTAAVYACAQELGFKIFEVNASSQRSGRQILSQLKEATQSHQVDKQGVNSQKPCFFNSYYIGKSPKKISSPKKVVTSPRKVPPPSPKSSGPKRALPPKTLANYFKVSPKPKNNEEIGMLLENNKGIKNSFEQKQITQTKSTNATNSNVKDVGAEEPSRKNATSLILFEEVDVIFDEDAGFLNAIKTFMATTKRPVILTTSDPTFSLMFDGCFEEIKFSTPSLLNVASYLQMICLTENFRTDVKDFVTLLTANTCDIRKSILYLQFWIRSGGGVLEERPLTLYRGNSRNVQLVCSEHGLDNKIYPKNTKKKRVDLPKCDSGCAETLFGLKNIFSPSEDLFSFLKHKITMKEEWHKFIQLLTEFQMRNVDFLYSNLEFILPLPVDTIPETKNFCGPSVTVDASAATKSMNCLARKHSEREQPLKKSQKKKQKKTLVILDDSDLFDTDLDFPDQSISLSSVSSSSNAEESKTGDEESKARDKGNNPETKKSIPCPPKTTAGKKCSALVSHCLNSLSEFMDNMSFLDALLTDVREQNKYGRNDFSWTNGKVTSGLCDEFSLESNDGWTSQSSGELKAAAEALSFTKCSSAISKALETLNSCKKLGRDPTNDLTFYVSQKRNNVYFSQSAANLDNAWKRISVIKSVFSSRSLLYVGNRQASIIEYLPTLRNICKTEKLKEQGKSKRRFLHYFEGIHLDIPKETVNTLAADFP

SEQ ID NO: 1209 - protein, 1224 aa, Homo Sapiens
MVGVLAMAAAAAPPPVKDCEIEPCKKRKKDDDTSTCKTITKYLSPLGKTRDRVFAPPKPSNILDYFRKTSPTNEKTQLGKECKIKSPESVPVDSNKDCTTPLEMFSNVEFKKKRKRVNLSHQLNNIKTENEAPIEISSDDSKEDYSLNNDFVESSTSVLRYKKQVEVLAENIQDTKSQPNTMTSLQNSKKVNPKQGTTKNDFKKLRKRKCRDVVDLSESLPLAEELNLLKKDGKDTKQMENTTSHANSRDNVTEAAQLNDSIITVSYEEFLKSHKENKVEEIPDSTMSICVPSETVDEIVKSGYISESENSEISQQVRFKTVTVLAQVHPIPPKKTGKIPRIFLKQKQFEMENSLSDPENEQTVQKRKSNVVIQEEELELAVLEAGSSEAVKPKCTLEERQQFMKAFRQPASDALKNGVKKSSDKQKDLNEKCLYEVGRDDNSKKIMENSGIQMVSKNGNLQLHTDKGSFLKEKNKKLKKKNKKTLDTGAIPGKNREGNTQKKETTFFLKEKQYQNRMSLRQRKTEFFKSSTLFNNESLVYEDIANDDLLKVSSLCNNNKLSRKTSIPVKDIKLTQSKAESEASLLNVSTPKSTRRSGRISSTPTTETIRGIDSDDVQDNSQLKASTQKAANLSEKHSLYTAELITVPFDSESPIRMKFTRISTPKKSKKKSNKRSEKSEATDGGFTSQIRKASNTSKNISKAKQLIEKAKALHISRSKVTEEIAIPLRRSSRHQTLPERKKLSETEDSVIIIDSSPTALKHPEKNQKKLQCLNDVLGKKLNTSTKNVPGKMKVAPLFLVRKAQKAADPVPSFDESSQDTSEKSQDCDVQCKAKRDFLMSGLPDLLKRQIAKKAAALDVYNAVSTSFQRVVHVQQKDDGCCLWHLKPPSCPLLTKFKELNTKVIDLSKCGIALGEFSTLNSKLKSGNSAAVFMRTRKEFTEEVRNLLLEEIRWSNPEFSLKKYFPLLLKKQIEHQVLSSECHSKQELEADVSHKETKRKLVEAENSKSKRKKPNEYSKNLEKTNRKSEELSKRNNSSGIKLDSSKDSGTEDMLWTEKYQPQTASELIGNELAIKKLHSWLKDWKRRAELEERQNLKGKRDEKHEDFSGGIDFKGSSDDEEESRLCNTVLITGPTGVGKTAAVYACAQELGFKIFEVNASSQRSGRQILSQLKEATQSHQVDKQGVNSQKPCFFNSYYIGKSPKKISSPKKVVTSPRKVPPPSPK

SEQ ID NO: 1210 - protein, 310 aa, Homo Sapiens
MEFPFDVDALFPERITVLDQHLRPPARRPGTTTPARVDLQQQIMTIIDELGKASAKAQNLSAPITSASRMQSNRHVVYILKDSSARPAGKGAIIGFIKVGYKKLFVLDDREAHNEVEPLCILDFYIHESVQRHGHGRELFQYMLQKERVEPHQLAIDRPSQKLLKFLNKHYNLETTVPQVNNFVIFEGFFAHQHPPARKLPPKRAEGDIKPYSSSDREFLKVAVEPPWPLNRAPRRATPPAHPPPRSSSLGNSPERGPLRPFVPEQELLRSLRLCPPHPTARLLLAADPGGSPAQRRRTSSLPRSEESRY

SEQ ID NO: 1211 - protein, 300 aa, Homo Sapiens
MEFPFDVDALFPERITVLDQHLRPPARRPGTTTPARVDLQQQIMTIIDELGKASAKAQNLSAPITSASRMQSNRHVVYILKDSSARPAGKGAIIGFIKVGYKKLFVLDDREAHNEVEPLCILDFYIHESVQRHGHGRELFQYMLQKERVEPHQLAIDRPSQKLLKFLNKHYNLETTVPQVNNFVIFEGFFAHQHPPARKLPPKRAEGDIKPYSSSDREFLKVAVEPPWPLNRAPRRATPPAHPPPRSSSLGNSPERGPLRPFVPEQELLRSLRLCPPHPTARLLLAADPGGSPAQRRRTR

SEQ ID NO: 1212 - protein, 333 aa, Homo Sapiens
MEFPFDVDALFPERITVLDQHLRPPARRPGTTTPARVDLQQQIMTIIDELGKASAKAQNLSAPITSASRMQSNRHVVYILKDSSARPAGKGAIIGFIKVGYKKLFVLDDREAHNEVEPLCILDFYIHESVQRHGHGRELFQYMLQKERVEPHQLAIDRPSQKLLKFLNKHYNLETTVPQVNNFVIFEGFFAHQHRPPAPSLRATRHSRAAAVDPTPAAPARKLPPKRAEGDIKPYSSSDREFLKVAVEPPWPLNRAPRRATPPAHPPPRSSSLGNSPERGPLRPFVPEQELLRSLRLCPPHPTARLLLAADPGGSPAQRRRTSSLPRSEESRY

SEQ ID NO: 1213 - protein, 421 aa, Homo Sapiens
MEFPFDVDALFPERITVLDQHLRPPARRPGTTTPARVDLQQQIMTIIDELGKASAKAQNLSAPITSASRMQSNRHVVYILKDSSARPAGKGAIIGFIKVGYKKLFVLDDREAHNEVEPLCILDFYIHESVQRHGHGRELFQYMLQKERVEPHQLAIDRPSQKLLKFLNKHYNLETTVPQVNNFVIFEGFFAHQHRPPAPSLRATRHSRAAAVDPTPAAPARKLPPKRAEGDIKPYSSSDREFLKVAVEPPWPLNRAPRRATPPAHPPPRSSSLGNSPERGPLRPFVPEQELLRSLRLCPPHPTARLLLAADPGGSPAQRRRTRGTPPGLVAQSCCYSRHGGVNSSSPNTGNQDSKQGEQETKNRSASEEQALSQDGSGEKPMHTAPPQAPAPPAQSWTVGGDILNARFIRNLQERRSTRPW

SEQ ID NO: 1214 - protein, 323 aa, Homo Sapiens
MEFPFDVDALFPERITVLDQHLRPPARRPGTTTPARVDLQQQIMTIIDELGKASAKAQNLSAPITSASRMQSNRHVVYILKDSSARPAGKGAIIGFIKVGYKKLFVLDDREAHNEVEPLCILDFYIHESVQRHGHGRELFQYMLQKERVEPHQLAIDRPSQKLLKFLNKHYNLETTVPQVNNFVIFEGFFAHQHRPPAPSLRATRHSRAAAVDPTPAAPARKLPPKRAEGDIKPYSSSDREFLKVAVEPPWPLNRAPRRATPPAHPPPRSSSLGNSPERGPLRPFVPEQELLRSLRLCPPHPTARLLLAADPGGSPAQRRRTR

SEQ ID NO: 1215 - protein, 409 aa, Homo Sapiens
MWLTWPFCFLTITLREEGVCHLESVDLQQQIMTIIDELGKASAKAQNLSAPITSASRMQSNRHVVYILKDSSARPAGKGAIIGFIKVGYKKLFVLDDREAHNEVEPLCILDFYIHESVQRHGHGRELFQYMLQKERVEPHQLAIDRPSQKLLKFLNKHYNLETTVPQVNNFVIFEGFFAHQHRPPAPSLRATRHSRAAAVDPTPAAPARKLPPKRAEGDIKPYSSSDREFLKVAVEPPWPLNRAPRRATPPAHPPPRSSSLGNSPERGPLRPFVPEQELLRSLRLCPPHPTARLLLAADPGGSPAQRRRTRGTPPGLVAQSCCYSRHGGVNSSSPNTGNQDSKQGEQETKNRSASEEQALSQDGSGEKPMHTAPPQAPAPPAQSWTVGGDILNARFIRNLQERRSTRPW

SEQ ID NO: 1216 - protein, 331 aa, Homo Sapiens
MAVAMVKLCERAGLPLLAAPLLRSLLPRAPQPGPAQPRSVQGQRCPARHPPGNLVCERGAGVNGVTAGAGGRLRGLHRGGRALGCSAHRPLHSARVRPPAHLAAPPGSSARGCRLTELGYALNEWLQDIRKNQLPGLLGGVGPMHSVVQLFQGFRDLLWLPIEQYRKDGRLMRGLQRGAASFGSSTASAALELSNRLVQAIQATAETVYDILSPAAPVSRSLQDKRSARRLRRGQQPADLREGVAKAYDTVREGILDTAQTICDVASRGHEQKGLTGAVGGVIRQLPPTVVKPLILATEATSSLLGGMRNQIVPDAHKDHALKWRSDSAQD

SEQ ID NO: 1217 - protein, 1938 aa, Homo Sapiens
MSRWLWPWSNCVKERVCRYLLHHYLGHFFQEHLSLDQLSLDLYKGSVALRDIHLEIWSVNEVLESMESPLELVEGFVGSIEVAVPWAALLTDHCTVRVSGLQLTLQPRRGPAPGAADSQSWASCMTTSLQLAQECLRDGLPEPSEPPQPLEGLEMFAQTIETVLRRIKVTFLDTVVRVEHSPGDGERGVAVEVRVQRLEYCDEAVRDPSQAPPVDVHQPPAFLHKLLQLAGVRLHYEELPAQEEPPEPPLQIGSCSGYMELMVKLKQNEAFPGPKLEVAGQLGSLHLLLTPRQLQQLQELLSAVSLTDHEGLADKLNKSRPLGAEDLWLIEQDLNQQLQAGAVAEPLSPDPLTNPLLNLDNTDLFFSMAGLTSSVASALSELSLSDVDLASSVRSDMASRRLSAQAHPAGKMAPNPLLDTMRPDSLLKMTLGGVTLTLLQTSAPSSGPPDLATHFFTEFDATKDGPFGSRDFHHLRPRFQRACPCSHVRLTGTAVQLSWELRTGSRGRRTTSMEVHFGQLEVLECLWPRGTSEPEYTEILTFPGTLGSQASARPCAHLRHTQILRRVPKSRPRRSVACHCHSELALDLANFQADVELGALDRLAALLRLATVPAEPPAGLLTEPLPAMEQQTVFRLSAPRATLRLRFPIADLRPEPDPWAGQAVRAEQLRLELSEPQFRSELSSGPGPPVPTHLELTCSDLHGIYEDGGKPPVPCLRVSKALDPKSTGRKYFLPQVVVTVNPQSSSTQWEVAPEKGEELELSVESPCELREPEPSPFSSKRTMYETEEMVIPGDPEEMRTFQSRTLALSRCSLEVILPSVHIFLPSKEVYESIYNRINNDLLMWEPADLLPTPDPAAQPSGFPGPSGFWHDSFKMCKSAFKLANCFDLTPDSDSDDEDAHFFSVGASGGPQAAAPEAPSLHLQSTFSTLVTVLKGRITALCETKDEGGKRLEAVHGELVLDMEHGTLFSVSQYCGQPGLGYFCLEAEKATLYHRAAVDDYPLPSHLDLPSFAPPAQLAPTIYPSEEGVTERGASGRKGQGRGPHMLSTAVRIHLDPHKNVKEFLVTLRLHKATLRHYMALPEQSWHSQLLEFLDVLDDPVLGYLPPTVITILHTHLFSCSVDYRPLYLPVRVLITAETFTLSSNIIMDTSTFLLRFILDDSALYLSDKCEVETLDLRRDYVCVLDVDLLELVIKTWKGSTEGKLSQPLFELRCSNNVVHVHSCADSCALLVNLLQYVMSTGDLHPPPRPPSPTEIAGQKLSESPASLPSCPPVETALINQRDLADALLDTERSLRELAQPSGGHLPQASPISVYLFPGERSGAPPPSPPVGGPAGSLGSCSEEKEDEREEEGDGDTLDSDEFCILDAPGLGIPPRDGEPVVTQLHPGPIVVRDGYFSRPIGSTDLLRAPAHFPVPSTRVVLREVSLVWHLYGGRDFGPHPGHRARTGLSGPRSSPSRCSGPNRPQNSWRTQGGSGRQHHVLMEIQLSKVSFQHEVYPAEPATGPAAPSQELEERPLSRQVFIVQELEVRDRLASSQINKFLYLHTSERMPRRAHSNMLTIKALHVAPTTNLGGPECCLRVSLMPLRLNVDQDALFFLKDFFTSLVAGINPVVPGETSAEARPETRAQPSSPLEGQAEGVETTGSQEAPGGGHSPSPPDQQPIYFREFRFTSEVPIWLDYHGKHVTMDQVGTFAGLLIGLAQLNCSELKLKRLCCRHGLLGVDKVLGYALNEWLQDIRKNQLPGLLGGVGPMHSVVQLFQGFRDLLWLPIEQYRKDGRLMRGLQRGAASFGSSTASAALELSNRLVQAIQATAETVYDILSPAAPVSRSLQDKRSARRLRRGQQPADLREGVAKAYDTVREGILDTAQTICDVASRGHEQKGLTGAVGGVIRQLPPTVVKPLILATEATSSLLGGMRNQIVPDAHKDHALKWRSDSAQD

SEQ ID NO: 1218 - protein, 1742 aa, Homo Sapiens
  misc_feature (1)..(1): Xaa can be any naturally occurring amino acid
XYCDEAVRDPSQAPPVDVHQPPAFLHKLLQLAGVRLHYEELPAQEEPPEPPLQIGSCSGYMELMVKLKQNEAFPGPKLEVAGQLGSLHLLLTPRQLQQLQELLSAVSLTDHEGLADKLNKSRPLGAEDLWLIEQDLNQQLQAGAVAEPLSPDPLTNPLLNLDNTDLFFSMAGLTSSVASALSELSLSDVDLASSVRSDMASRRLSAQAHPAGKMAPNPLLDTMRPDSLLKMTLGGVTLTLLQTSAPSSGPPDLATHFFTEFDATKDGPFGSRDFHHLRPRFQRACPCSHVRLTGTAVQLSWELRTGSRGRRTTSMEVHFGQLEVLECLWPRGTSEPEYTEILTFPGTLGSQASARPCAHLRHTQILRRVPKSRPRRSVACHCHSELALDLANFQADVELGALDRLAALLRLATVPAEPPAGLLTEPLPAMEQQTVFRLSAPRATLRLRFPIADLRPEPDPWAGQAVRAEQLRLELSEPQFRSELSSGPGPPVPTHLELTCSDLHGIYEDGGKPPVPCLRVSKALDPKSTGRKYFLPQVVVTVNPQSSSTQWEVAPEKGEELELSVESPCELREPEPSPFSSKRTMYETEEMVIPGDPEEMRTFQSRTLALSRCSLEVILPSVHIFLPSKEVYESIYNRINNDLLMWEPADLLPTPDPAAQPSGFPGPSGFWHDSFKMCKSAFKLANCFDLTPDSDSDDEDAHFFSVGASGGPQAAAPEAPSLHLQSTFSTLVTVLKGRITALCETKDEGGKRLEAVHGELVLDMEHGTLFSVSQYCGQPGLGYFCLEAEKATLYHRAAVDDYPLPSHLDLPSFAPPAQLAPTIYPSEEGVTERGASGRKGQGRGPHMLSTAVRIHLDPHKNVKEFLVTLRLHKATLRHYMALPEQSWHSQLLEFLDVLDDPVLGYLPPTVITILHTHLFSCSVDYRPLYLPVRVLITAETFTLSSNIIMDTSTFLLRFILDDSALYLSDKCEVETLDLRRDYVCVLDVDLLELVIKTWKGSTEGKLSQPLFELRCSNNVVHVHSCADSCALLVNLLQYVMSTGDLHPPPRPPSPTEIAGQKVQLSESPASLPSCPPVETALINQRDLADALLDTERSLRELAQPSGGHLPQASPISVYLFPGERSGAPPPSPPVGGPAGSLGSCSEEKEDEREEEGDGDTLDSDEFCILDAPGLGIPPRDGEPVVTQLHPGPIVVRDGYFSRPIGSTDLLRAPAHFPVPSTRVVLREVSLVWHLYGGRDFGPHPGHRARTGLSGPRSSPSRCSGPNRPQNSWRTQGGSGRQHHVLMEIQLSKVSFQHEVYPAEPATGPAAPSQELEERPLSRQVFIVQELEVRDRLASSQINKFLYLHTSERMPRRAHSNMLTIKALHVAPTTNLGGPECCLRVSLMPLRLNVDQDALFFLKDFFTSLVAGINPVVPGETSAEARPETRAQPSSPLEGQAEGVETTGSQEAPGGGHSPSPPDQQPIYFREFRFTSEVPIWLDYHGKHVTMDQVGTFAGLLIGLAQLNCSELKLKRLCCRHGLLGVDKVLGYALNEWLQDIRKNQLPGLLGGVGPMHSVVQLFQGFRDLLWLPIEQYRKDGRLMRGLQRGAASFGSSTASAALELSNRLVQAIQATAETVYDILSPAAPVSRSLQDKRSARRLRRGQQPADLREGVAKAYDTVREGILDTAQTICDVASRGHEQKGLTGAVGGVIRQLPPTVVKPLILATEATSSLLGGMRNQIVPDAHKDHALKWRSDSAQD

SEQ ID NO: 1219 - protein, 153 aa, Homo Sapiens
MHYPIGLLFDLLASSSALPWNITVHFKSFPEKDLLHCPSKDAIEAHFMSCMKEADALKHKSQVINEMQKKDHKQLWMGLQNDRFDQFWAINRKLMEYPAEENGFRYIPFRIYQTTTERPFIQKLFRPVAADGQLHTLGDLLKEVCPSAIDPED

SEQ ID NO: 1220 - protein, 197 aa, Homo Sapiens
MHYPIGLLFDLLASSSALPWNITVHFKSFPEKDLLHCPSKDAIEAHFMSCMKEADALKHKSQVINEMQKKDHKQLWMGLQNDRFDQFWAINRKLMEYPAEENGFRYIPFRIYQTTTERPFIQKLFRPVAADGQLHTLGDLLKEVCPSAIDPEDGEKKNQVMIHGIEPMLETPLQWLSEHLSYPDNFLHISIIPQPTD

SEQ ID NO: 1221 - protein, 159 aa, Homo Sapiens
MHYPIGLLFDLLASSSALPWNITVHFKSFPEKDLLHCPSKDAIEAHFMSCMKEADALKHKSQVINEMQKKDHKQLWMGLQNDRFDQFWAINRKLMEYPAEENGFRYIPFRIYQTTTERPFIQKLFRPVAADGQLHTLGDLLKEVCPSAIDPEEIPPGED

SEQ ID NO: 1222 - protein, 44 aa, Homo Sapiens
MTDDKDVLRDVWFGRIPTCFTLYQDEITEREAEPYYALSNWFAI

SEQ ID NO: 1223 - protein, 162 aa, Homo Sapiens
MTDDKDVLRDVWFGRIPTCFTLYQDEITEREAEPYYLLLPRVSYLTLVTDKVKKHFQKVMRQEDISEIWFEYEGTPLKWHYPIGLLFDLLASSSALPWNITVHFKSFPEKDLLHCPSKDAIEAHFMSCMKEADALKHKSQVINEMQKKDHKQLWMGLQNDND

SEQ ID NO: 1224 - protein, 275 aa, Homo Sapiens
MTDDKDVLRDVWFGRIPTCFTLYQDEITEREAEPYYLLLPRVSYLTLVTDKVKKHFQKVMRQEDISEIWFEYEGTPLKWHYPIGLLFDLLASSSALPWNITVHFKSFPEKDLLHCPSKDAIEAHFMSCMKEADALKHKSQVINEMQKKDHKQLWMGLQNDRFDQFWAINRKLMEYPAEENGFRYIPFRIYQTTTERPFIQKLFRPVAADGQLHTLGDLLKEVCPSAIDPEDGEKKNQVMIHGIEPMLETPLQWLSEHLSYPDNFLHISIIPQPTD

SEQ ID NO: 1225 - protein, 275 aa, Homo Sapiens; identical to SEQ ID NO: 1224

SEQ ID NO: 1226 - protein, 233 aa, Homo Sapiens
MTDDKDVLRDVWFGRIPTCFTLYQDEITEREAEPYYLLLPRVSYLTLVTDKVKKHFQKVMRQEDISEIWFEYEGTPLKWHYPIGLLFDLLASSSALPWNITVHFKSFPEKDLLHCPSKDAIEAHFMSCMKEADALKHKSQVINEMQKKDHKQLWMGLQNDRFDQFWAINRKLMEYPAEENGFRYIPFRIYQVTAVWVGIQRFQASEEESEDEEFLATLTGGERSGKARKQWTQ

SEQ ID NO: 1227 - protein, 91 aa, Homo Sapiens
MTDDKDVLRDVWFGRIPTCFTLYQDEITEREAEPYYTDLTSFGPSIGNSWNILQKKMDFVISPLEYIRQRLKDLSFRSCFVLWLQMDSCTH

SEQ ID NO: 1228 - protein, 823 aa, Homo Sapiens
MAASEAAAAAGSAALAAGARAVPAATTGAAAAASGPWVPPGPRLRGSRPRPAGATQQPAVPAPPAGELIQPSVSELSRAVRTNILCTVRGCGKILPNSPALNMHLVKSHRLQDGIVNPTIRKDLKTGPKFYCCPIEGCPRGPERPFSQFSLVKQHFMKMHAEKKHKCSKCSNSYGTEWDLKRHAEDCGKTFRCTCGCPYASRTALQSHIYRTGHEIPAEHRDPPSKKRKMENCAQNQKLSNKTIESLNNQPIPRPDTQELEASEIKLEPSFEDSCGSNTDKQTLTTPPRYPQKLLLPKPKVALVKLPVMQFSVMPVFVPTADSSAQPVVLGVDQGSATGAVHLMPLSVGTLILGLDSEACSLKESLPLFKIANPIAGEPISTGVQVNFGKSPSNPLQELGNTCQKNSISSINVQTDLSYASQNFIPSAQWATADSSVSSCSQTDLSFDSQVSLPISVHTQTFLPSSKVTSSIAAQTDAFMDTCFQSGGVSRETQTSGIESPTDDHVQMDQAGMCGDIFESVHSSYNVATGNIISNSLVAETVTHSLLPQNEPKTLNQDIEKSAPIINFSAQNSMLPSQNMTDNQTQTIDLLSDLENILSSNLPAQTLDHRSLLSDTNPGPDTQLPSGPAQNPGIDFDIEEFFSASNIQTQTEESELSTMTTEPVLESLDIETQTDFLLADTSAQSYGCRGNSNFLGLEMFDTQTQTDLNFFLDSSPHLPLGSILKHSSFSVSTDSSDTETQTEGVSTAKNIPALESKVQLNSTETQTMSSGFETLGSLFFTSNETQTAMDDFLLADLAWNTMESQFSSVETQTSAEPHTVSNF

SEQ ID NO: 1229 - protein, 55 aa, Homo Sapiens
MKMHAEKKHKCSKCSNSYGTEWDLKRHAEDCGKTFRCTCGCPYASRTALQSHIYR

SEQ ID NO: 1230 - protein, 667 aa, Homo Sapiens
MKMHAEKKHKCSKCSNSYGTEWDLKRHAEDCGKTFRCTCGCPYASRTALQSHIYRTGHEIPAEHRDPPSKKRKMENCAQNQKLSNKTIESLNNQPIPRPDTQELEASEIKLEPSFEDSCGSNTDKQTLTTPPRYPQKLLLPKPKVALVKLPVMQFSVMPVFVPTADSSAQPVVLGVDQGSATGAVHLMPLSVGTLILGLDSEACSLKESLPLFKIANPIAGEPISTGVQVNFGKSPSNPLQELGNTCQKNSISSINVQTDLSYASQNFIPSAQWATADSSVSSCSQTDLSFDSQVSLPISVHTQTFLPSSKVTSSIAAQTDAFMDTCFQSGGVSRETQTSGIESPTDDHVQMDQAGMCGDIFESVHSSYNVATGNIISNSLVAETVTHSLLPQNEPKTLNQDIEKSAPIINFSAQNSMLPSQNMTDNQTQTIDLLSDLENILSSNLPAQTLDHRSLLSDTNPGPDTQLPSGPAQNPGIDFDIEEFFSASNIQTQTEESELSTMTTEPVLESLDIETQTDFLLADTSAQSYGCRGNSNFLGLEMFDTQTQTDLNFFLDSSPHLPLGSILKHSSFSVSTDSSDTETQTEGVSTAKNIPALESKVQLNSTETQTMSSGFETLGSLFFTSNETQTAMDDFLLADLAWNTMESQFSSVETQTSAEPHTVSNF

SEQ ID NO: 1231 - protein, 667 aa, Homo Sapiens; identical to SEQ ID NO: 1230

SEQ ID NO: 1232 - protein, 1204 aa, Homo Sapiens
MAAAAAVGNAVPCGARPCGVRPDGQPKPGPQPRALLAAGPALIANGDELVAAVWPYRRLALLRRLTVLPFAGLLYPAWLGAAAAGCWGWGSSWVQIPEAALLVLATICLAHALTVLSGHWSVHAHCALTCTPEYDPSKATFVKVVPTPNNGSTELVALHRNEGEDGLEVLSFEFQKIKYSYDALEKKQFLPVAFPVGNAFSYYQSNRGFQEDSEIRAAEKKFGSNKAEMVVPDFSELFKERATAPFFVFQVFCVGLWCLDEYWYYSVFTLSMLVAFEASLVQQQMRNMSEIRKMGNKPHMIQVYRSRKWRPIASDEIVPGDIVSIGRSPQENLVPCDVLLLRGRCIVDEAMLTGESVPQMKEPIEDLSPDRVLDLQADSRLHVIFGGTKVVQHIPPQKATTGLKPVDSGCVAYVLRTGFNTSQGKLLRTILFGVKRVTANNLETFIFILFLLVFAIAAAAYVWIEGTKDPSRNRYKLFLECTLILTSVVPPELPIELSLAVNTSLIALAKLYMYCTEPFRIPFAGKVEVCCFDKTGTLTSDSLVVRGVAGLRDGKEVTPVSSIPVETHRALASCHSLMQLDDGTLVGDPLEKAMLTAVDWTLTKDEKVFPRSIKTQGLKIHQRFHFASALKRMSVLASYEKLGSTDLCYIAAVKGAPETLHSMFSQCPPDYHHIHTEISREGARVLALGYKELGHLTHQQAREVKREALECSLKFVGFIVVSCPLKADSKAVIREIQNASHRVVMITGDNPLTACHVAQELHFIEKAHTLILQPPSEKGRQCEWRSIDGSIVLPLARGSPKALALEYALCLTGDGLAHLQATDPQQLLRLIPHVQVFARVAPKQKEFVITSLKELGYVTLMCGDGTNDVGALKHADVGVALLANAPERVVERRRRPRDSPTLSNSGIRATSRTAKQRSGLPPSEEQPTSQRDRLSQVLRDLEDESTPIVKLGDASIAAPFTSKLSSIQCICHVIKQGRCTLVTTLQMFKILALNALILAYSQSVLYLEGVKFSDFQATLQGLLLAGCFLFISRSKPLKTLSRERPLPNIFNLYTILTVMLQFFVHFLSLVYLYREAQARSPEKQEQFVDLYKEFEPSLVNSTVYIMAMAMQMATFAINYKGPPFMESLPENKPLVWSLAVSLLAIIGLLLGSSPDFNSQFGLVDIPVEFKLVIAQVLLLDFCLALLADRVLQFFLGTPKLKVPS

SEQ ID NO: 1233 - protein, 1086 aa, Homo Sapiens
MEKWEELNSHQPGEEYDPSKATFVKVVPTPNNGSTELVALHRNEGEDGLEVLSFEFQKIKYSYDALEKKQFLPVAFPVGNAFSYYQSNRGFQEDSEIRAAEKKFGSNKAEMVVPDFSELFKERATAPFFVFQVFCVGLWCLDEYWYYSVFTLSMLVAFEASLVQQQMRNMSEIRKMGNKPHMIQVYRSRKWRPIASDEIVPGDIVSIGRSPQENLVPCDVLLLRGRCIVDEAMLTGESVPQMKEPIEDLSPDRVLDLQADSRLHVIFGGTKVVQHIPPQKATTGLKPVDSGCVAYVLRTGFNTSQGKLLRTILFGVKRVTANNLETFIFILFLLVFAIAAAAYVWIEGTKDPSRNRYKLFLECTLILTSVVPPELPIELSLAVNTSLIALAKLYMYCTEPFRIPFAGKVEVCCFDKTGTLTSDSLVVRGVAGLRDGKEVTPVSSIPVETHRALASCHSLMQLDDGTLVGDPLEKAMLTAVDWTLTKDEKVFPRSIKTQGLKIHQRFHFASALKRMSVLASYEKLGSTDLCYIAAVKGAPETLHSMFSQCPPDYHHIHTEISREGARVLALGYKELGHLTHQQAREVKREALECSLKFVGFIVVSCPLKADSKAVIREIQNASHRVVMITGDNPLTACHVAQELHFIEKAHTLILQPPSEKGRQCEWRSIDGSIVLPLARGSPKALALEYALCLTGDGLAHLQATDPQQLLRLIPHVQVFARVAPKQKEFVITSLKELGYVTLMCGDGTNDVGALKHADVGVALLANAPERVVERRRRPRDSPTLSNSGIRATSRTAKQRSGLPPSEEQPTSQRDRLSQVLRDLEDESTPIVKLGDASIAAPFTSKLSSIQCICHVIKQGRCTLVTTLQMFKILALNALILAYSQSVLYLEGVKFSDFQATLQGLLLAGCFLFISRSKPLKTLSRERPLPNIFNLYTILTVMLQFFVHFLSLVYLYREAQARSPEKQEQFVDLYKEFEPSLVNSTVYIMAMAMQMATFAINYKGPPFMESLPENKPLVWSLAVSLLAIIGLLLGSSPDFNSQFGLVDIPVEFKLVIAQVLLLDFCLALLADRVLQFFLGTPKLKVPS

SEQ ID NO: 1234 - protein, 185 aa, Homo Sapiens
  misc_feature (1)..(1): Xaa can be any naturally occurring amino acid
XASPWVPAAAFLSVTIATWATHLPGLDSQGHPLHFGAGLIMTPLLTCCACLEYDPSKATFVKVVPTPNNGSTELVALHRNEGEDGLEVLSFEFQKIKYSYDALEKKQFLPVAFPVGNAFSYYQSNRGFQEDSEIRAAEKKFGSNKAEMVVPDFSELFKERATAPFFVFQVFCVGLWCLDEYWYYS

SEQ ID NO: 1235 - protein, 256 aa, Homo Sapiens
MLSRVVLSAAATAAPSLKNAAFLGPGVLQATRTFHTGQPHLVPVPPLPEYGGKVRYGLIPEEFFQFLYPKTGVTGPYVLGTGLILYALSKEIYVISAETFTALSVLGVMVYGIKKYGPFVADFADKLNEQKLAQLEEAKQASIQHIQNAIDTEKSQQALVQKRHYLFDVQRNNIAMALEVTYRERLYRVYKEVKNRLDYHISVQNMMRRKEQEHMINWVEKHVVQSISTQQEKETIAKCIADLKLLAKKAQAQPVM

SEQ ID NO: 1236 - protein, 195 aa, Homo Sapiens
MLSRVVLSAAATAGPYVLGTGLILYALSKEIYVISAETFTALSVLGVMVYGIKKYGPFVADFADKLNEQKLAQLEEAKQASIQHIQNAIDTEKSQQALVQKRHYLFDVQRNNIAMALEVTYRERLYRVYKEVKNRLDYHISVQNMMRRKEQEHMINWVEKHVVQSISTQQEKETIAKCIADLKLLAKKAQAQPVM

SEQ ID NO: 1237 - protein, 128 aa, Homo Sapiens
AQALWRMPWLPVFLSLAAAAAAAAAEQQVPLVLWSSDRDLWAPAADTHEGHITSDLQLSTYLDPALELGPRNVLLFLQDKLSIEDFTAYGGVFGNKQDSAFSNLEHTQVRRCPIHSGPHSGPPFQGGP

SEQ ID NO: 1238 - protein, 281 aa, Homo Sapiens
MAPREVLTGNDEVIGQVLSTLKSEDVPYTAALTAVRPSRVARDVAVVAGGLGRQLLQKQPVSPVIHPPVSYNDTAPRILFWAQNFSVAYKDQWEDLTPLTFGVQELNLTGSFWNDSFARLSLTYERLFGTTVTFKFILANRLYPVSARHWFTMERLEVHSNGSVAYFNASQVTGPSIYSFHCEYVSSLSKKGSLLVARTQPSPWQMMLQDFQIQAFNVMGEQFSYASDCASFFSPGIWMGLLTSLFMLFIFTYGLHMILSLKTMDRFDDHKGPTISLTQIV

SEQ ID NO: 1239 - protein, 273 aa, Homo Sapiens
MMAAMATARVRMGPRCAQALWRMPWLPVFLSLAAAAAAAAAEQQVPLVLWSSDRDLWAPAADTHEGHITSDLQLSTYLDPALELGPRNVLLFLQDKLSIEDFTAYGGVFGNKQDSAFSNLENALDLAPSSLVLPAVDWYAVSTLTTYLQEKLGASPLHVARDVAVVAGGLGRQLLQKQPVSPVIHPPVSYNDTAPRILFWAQNFSVAYKDQWEDLTPLTFGVQELNLTGSFWNDSFARFILANRLYPVSARHWFTMERLEVHSNGSVAYFNAS

SEQ ID NO: 1240 - protein, 230 aa, Homo Sapiens
MMAAMATARVRMGPRCAQALWRMPWLPVFLSLAAAAAAAAAEQQVPLVLWSSDRDLWAPAADTHEGHITSDLQLSTYLDPALELGPRNVLLFLQDKLSIEDFTAYGGVFGNKQDSAFSNLENALDLAPSSLVLPAVDWYAVSTLTTYLQEKLGASPLHVDLATLRELKLNASLPALLLIRLPYTASSGLMAPREVLTDEVIGQVLSTLKSEDVPYTAALTAVRPSRVARD

SEQ ID NO: 1241 - protein, 470 aa, Homo Sapiens
MMAAMATARVRMGPRCAQALWRMPWLPVFLSLAAAAAAAAAEQQVPLVLWSSDRDLWAPAADTHEGHITSDLQLSTYLDPALELGPRNVLLFLQDKLSIEDFTAYGGVFGNKQDSAFSNLENALDLAPSSLVLPAVDWYAVSTLTTYLQEKLGASPLHVDLATLRELKLNASLPALLLIRLPYTASSGLMAPREVLTGNDEVIGQVLSTLKSEDVPYTAALTAVRPSRVARDVAVVAGGLGRQLLQKQPVSPVIHPPVSYNDTAPRILFWAQNFSVAYKDQWEDLTPLTFGVQELNLTGSFWNDSFARLSLTYERLFGTTVTFKFILANRLYPVSARHWFTMERLEVHSNGSVAYFNASQVTGPSIYSFHCEYVSSLSKKGSLLVARTQPSPWQMMLQDFQIQAFNVMGEQFSYASDCASFFSPGIWMGLLTSLFMLFIFTYGLHMILSLKTMDRFDDHKGPTISLTQIV

SEQ ID NO: 1242 - protein, 134 aa, Homo Sapiens
MMAAMATARVRMGPRCAQALWRMPWLPVFLSLAAAAAAAAAEQQVPLVLWSSDRDLWAPAADTHEGHITSDLQLSTYLDPALELGPRNVLLFLQDKVRPPQPTLPRSSGGSQAPSPHDTDAHSPREASVTLSQL

SEQ ID NO: 1243 - protein, 134 aa, Homo Sapiens; identical to SEQ ID NO: 1242

SEQ ID NO: 1244 - protein, 133 aa, Homo Sapiens
  misc_feature (1)..(1): Xaa can be any naturally occurring amino acid
XAAMATARVRMGPRCAQALWRMPWLPVFLSLAAAAAAAAAEQQVPLVLWSSDRDLWAPAADTHEGHITSDLQLSTYLDPALELGPRNVLLFLQDKVRPPQPTLPRSSGGSQAPSPHDTDAHSPREASVTLSQL

SEQ ID NO: 1245 - protein, 186 aa, Homo Sapiens
FHRPRATVMVMVKGVNKLALPPGSVISYPLENLSRHKHLAKDHSPDLYSLELAGLDEIGKRYGEDSEQFRDASKILVDALQKFADDMYSLYGGNAVVELVTVKSFDTSLIRKTRTILEAKQAKNPASPYNLAYKYNFEYSVVFNMVLWIMIALALAVIITSYNIWNMDPGYDSIIYRMTNQKIRMD

SEQ ID NO: 1246 - protein, 186 aa, Homo Sapiens
MAVFVVLLALVAGVLGNEFSILKSPGSVVFRNGNWPIPGERIPDVAALSMGFSVKEDLSWPGLAVGNLFHRPRATVMVMVKGVNKLALPPGSVISYPLENAVPFSLDSVANSIHSLFSEETPVVLQLAPSEERVYMVGKANSVFEDLSVTLRQLRNRLFQENSVLSSLPLNSLSRNNENALFFWAL

SEQ ID NO: 1247 - protein, 209 aa, Homo Sapiens
MAVFVVLLALVAGVLGNEFSILKSPGSVVFRNGNWPIPGERIPDVAALSMGFSVKEDLSWPGLAVGNLFHRPRATVMVMVKGVNKLALPPGSVISYPLENAVPFSLDSVANSIHSLFSEETPVVLQLAPSEERVYMVGKANSVFEDLSVTLRQLRNRLFQENSVLSSLPLNSLSRNNEVDLLFLSELQVLHDISSLGETTYLPRTQAWA

SEQ ID NO: 1248 - protein, 345 aa, Homo Sapiens
MAVFVVLLALVAGVLGNEFSILKSPGSVVFRNGNWPIPGERIPDVAALSMGFSVKEDLSWPGLAVGNLFHRPRATVMVMVKGVNKLALPPGSVISYPLENAVPFSLDSVANSIHSLFSEETPVVLQLAPSEERVYMVGKANSVFEDLSVTLRQLRNRLFQENSVLSSLPLNSLSRNNEVDLLFLSELQVLHDISSLHLAKDHSPDLYSLELAGLDEIGKRYGEDSEQFRDASKILVDALQKFADDMYSLYGGNAVVELVTVKSFDTSLIRKTRTILEAKQAKNPASPYNLAYKYNFEYSVVFNMVLWIMIALALAVIITSYNIWNMDPGYDSIIYRMTNQKIRMD

SEQ ID NO: 1249 - protein, 331 aa, Homo Sapiens
MAVFVVLLALVAGVLGNEFSILKSPGSVVFRNGNWPIPGERIPDVAALSMGFSVKEDLSWPGLAVGNLFHRPRATVMVMVKGVNKLALPPGSVISYPLENAVPFSLDSVANSIHSLFSEETPVVLQLAPSEERVYMVGKANSVFEDLSVTLRQLRNRLFQENSVLSSLPLNSLSRNNEVDLLFLSELQVLHDISSLLAGLDEIGKRYGEDSEQFRDASKILVDALQKFADDMYSLYGGNAVVELVTVKSFDTSLIRKTRTILEAKQAKNPASPYNLAYKYNFEYSVVFNMVLWIMIALALAVIITSYNIWNMDPGYDSIIYRMTNQKIRMD

SEQ ID NO: 1250 - protein, 349 aa, Homo Sapiens
MAVFVVLLALVAGVLGNEFSILKSPGSVVFRNGNWPIPGERIPDVAALSMGFSVKEDLSWPGLAVGNLFHRPRATVMVMVKGVNKLALPPGSVISYPLENAVPFSLDSVANSIHSLFSEETPVVLQLAPSEERVYMVGKANSVFEDLSVTLRQLRNRLFQENSVLSSLPLNSLSRNNEVDLLFLSELQVLHDISSLLSRHKHLAKDHSPDLYSLELAGLDEIGKRYGEDSEQFRDASKILVDALQKFADDMYSLYGGNAVVELVTVKSFDTSLIRKTRTILEAKQANPASPYNLAYKYNFEYSVVFNMVLWIMIALALAVIITSYNIWNMDPGYDSIIYRMTNQKIRMD

SEQ ID NO: 1251 - protein, 350 aa, Homo Sapiens
MAVFVVLLALVAGVLGNEFSILKSPGSVVFRNGNWPIPGERIPDVAALSMGFSVKEDLSWPGLAVGNLFHRPRATVMVMVKGVNKLALPPGSVISYPLENAVPFSLDSVANSIHSLFSEETPVVLQLAPSEERVYMVGKANSVFEDLSVTLRQLRNRLFQENSVLSSLPLNSLSRNNEVDLLFLSELQVLHDISSLLSRHKHLAKDHSPDLYSLELAGLDEIGKRYGEDSEQFRDASKILVDALQKFADDMYSLYGGNAVVELVTVKSFDTSLIRKTRTILEAKQAKNPASPYNLAYKYNFEYSVVFNMVLWIMIALALAVIITSYNIWNMDPGYDSIIYRMTNQKIRMD

SEQ ID NO: 1252 - protein, 258 aa, Homo Sapiens
MAVFVVLLALVAGVLGNEFSILKSPGSVVFRNGNWPIPGERIPDVAALSMGFSVKEDLSWPGLAVGNLFHRPRATVMVMVKGVNKLALPPGSVISYPLENAVPFSLDSVANSIHSLFSEETPVVLQLAPSEERVYMVGKANSVFEDLSVTLRQLRNRLFQENSVLSSLPLNSLSRNNEVDLLFLSELQVLHDISSLLSRHKHLAKDHSPDLYSLELAGLDEIGKRYGEDSEQFRDASKILVDALQKMTCTVFMVGMQW

SEQ ID NO: 1253 - protein, 262 aa, Homo Sapiens
MAVFVVLLALVAGVLGNEFSILKSPGSVVFRNGNWPIPGERIPDVAALSMGFSVKEDLSWPGLAVGNLFHRPRATVMVMVKGVNKLALPPGSVISYPLENAVPFSLDSVANSIHSLFSEETPVVLQLAPSEERVYMVGKANSVFEDLSVTLRQLRNRLFQENSVLSSLPLNSLSRNNEVDLLFLSELQVLHDISSLLSRHKHLAKDHSPDLYSLELAGLDEIGKRYGEDSEQFRDASKILVDALQKSLWWECSGRVSHCQVI

SEQ ID NO: 1254 - protein, 143 aa, Homo Sapiens
MAVFVVLLALVAGVLGNEFSILKSPGSVVFRNGNWPIPGERIPDVAALSMGFSVKEDLSWPGLAVGNLFHRPRATVMVMVKGVNKLALPPGSVISYPLENAVPFSLDSVANSIHSLFSEETPVVLQLAPSEESVYGREGKLSV

SEQ ID NO: 1255 - protein, 318 aa, Homo Sapiens
MAVFVVLLALVAGVLGNEFSILKSPGSVVFRNGNWPIPGERIPDVAALSMGFSVKEDLSWPGLAVGNLFHRPRATVMVMVKGVNKLALPPGSVISYPLENRVYMVGKANSVFEDLSVTLRQLRNRLFQENSVLSSLPLNSLSRNNEVDLLFLSELQVLHDISSLLSRHKHLAKDHSPDLYSLELAGLDEIGKRYGEDSEQFRDASKILVDALQKFADDMYSLYGGNAVVELVTVKSFDTSLIRKTRTILEAKQAKNPASPYNLAYKYNFEYSVVFNMVLWIMIALALAVIITSYNIWNMDPGYDSIIYRMTNQKIRMD

SEQ ID NO: 1256 - protein, 317 aa, Homo Sapiens
MAVFVVLLALVAGVLGNEFSILKSPGSVVFRNGNWPIPGERIPDVAALSMGFSVKEDLSWPGLAVGNLFHRPRATVMVMVKGVNKLALPPGSVISYPLENRVYMVGKANSVFEDLSVTLRQLRNRLFQENSVLSSLPLNSLSRNNEVDLLFLSELQVLHDISSLLSRHKHLAKDHSPDLYSLELAGLDEIGKRYGEDSEQFRDASKILVDALQKFADDMYSLYGGNAVVELVTVKSFDTSLIRKTRTILEAKQANPASPYNLAYKYNFEYSVVFNMVLWIMIALALAVIITSYNIWNMDPGYDSIIYRMTNQKIRMD

SEQ ID NO: 1257 - protein, 272 aa, Homo Sapiens
MAVFVVLLALVAGVLGNEFSILKSPGSVVFRNGNWPIPGERIPDVAALSMGFSVKEDLSWPGLAVGNLFHRPRATVMVMVKGVNKLALPPGSVISYPLENVDLLFLSELQVLHDISSLLSRHKHLAKDHSPDLYSLELAGLDEIGKRYGEDSEQFRDASKILVDALQKFADDMYSLYGGNAVVELVTVKSFDTSLIRKTRTILEAKQAKNPASPYNLAYKYNFEYSVVFNMVLWIMIALALAVIITSYNIWNMDPGYDSIIYRMTNQKIRMD

SEQ ID NO: 1258 - protein, 128 aa, Homo Sapiens
MGFSVKEDLSWPGLAVGNLFHRPRATVMVMVKGVNKLALPPGSVISYPLENAVPFSLDSVANSIHSLFSEETPVVLQLAPSEERVYMVGKANSVFEDLSVTLRQLRNRLFQENSVLSSLPLNSLSRNN

SEQ ID NO: 1259 - protein, 301 aa, Homo Sapiens
MGFSVKEDLSWPGLAVGNLFHRPRATVMVMVKGVNKLALPPGSVISYPLENAVPFSLDSVANSIHSLFSEETPVVLQLAPSEERVYMVGKANSVFEDLSVTLRQLRNRLFQENSVLSSLPLNSLSRNNEVDLLFLSELQVLHDISSLLSRHKHLAKDHSPDLYSLELAGLDEIGKRYGEDSEQFRDASKILVDALQKFADDMYSLYGGNAVVELVTVKSFDTSLIRKTRTILEAKQAKNPASPYNLAYKYNFEYSVVFNMVLWIMIALALAVIITSYNIWNMDPGYDSIIYRMTNQKIRMD

SEQ ID NO: 1260 - protein, 274 aa, Homo Sapiens
MVMVKGVNKLALPPGSVISYPLENAVPFSLDSVANSIHSLFSEETPVVLQLAPSEERVYMVGKANSVFEDLSVTLRQLRNRLFQENSVLSSLPLNSLSRNNEVDLLFLSELQVLHDISSLLSRHKHLAKDHSPDLYSLELAGLDEIGKRYGEDSEQFRDASKILVDALQKFADDMYSLYGGNAVVELVTVKSFDTSLIRKTRTILEAKQAKNPASPYNLAYKYNFEYSVVFNMVLWIMIALALAVIITSYNIWNMDPGYDSIIYRMTNQKIRMD

SEQ ID NO: 1261 - protein, 273 aa, Homo Sapiens
MVMVKGVNKLALPPGSVISYPLENAVPFSLDSVANSIHSLFSEETPVVLQLAPSEERVYMVGKANSVFEDLSVTLRQLRNRLFQENSVLSSLPLNSLSRNNEVDLLFLSELQVLHDISSLLSRHKHLAKDHSPDLYSLELAGLDEIGKRYGEDSEQFRDASKILVDALQKFADDMYSLYGGNAVVELVTVKSFDTSLIRKTRTILEAKQANPASPYNLAYKYNFEYSVVFNMVLWIMIALALAVIITSYNIWNMDPGYDSIIYRMTNQKIRMD

SEQ ID NO: 1262 - protein, 59 aa, Homo Sapiens
MVMVKGVNKLALPPGSVISYPLENFLLVLTVLQIPFTPYFLRKLLLFCSWLPVRKECIW

SEQ ID NO: 1263 - protein, 101 aa, Homo Sapiens
MVMVKGVNKLALPPGSVISYPLENRVYMVGKANSVFEDLSVTLRQLRNRLFQENSVLSSLPLNSLSRNNEVDLLFLSELQVLHDISSLGETTYLPRTQAWA

SEQ ID NO: 1264 - protein, 242 aa, Homo Sapiens
MVMVKGVNKLALPPGSVISYPLENRVYMVGKANSVFEDLSVTLRQLRNRLFQENSVLSSLPLNSLSRNNEVDLLFLSELQVLHDISSLLSRHKHLAKDHSPDLYSLELAGLDEIGKRYGEDSEQFRDASKILVDALQKFADDMYSLYGGNAVVELVTVKSFDTSLIRKTRTILEAKQAKNPASPYNLAYKYNFEYSVVFNMVLWIMIALALAVIITSYNIWNMDPGYDSIIYRMTNQKIRMD

SEQ ID NO: 1265 - protein, 196 aa, Homo Sapiens
MVMVKGVNKLALPPGSVISYPLENVDLLFLSELQVLHDISSLLSRHKHLAKDHSPDLYSLELAGLDEIGKRYGEDSEQFRDASKILVDALQKFADDMYSLYGGNAVVELVTVKSFDTSLIRKTRTILEAKQAKNPASPYNLAYKYNFEYSVVFNMVLWIMIALALAVIITSYNIWNMDPGYDSIIYRMTNQKIRMD

SEQ ID NO: 1266 - protein, 294 aa, Homo Sapiens
  misc_feature (1)..(1): Xaa can be any naturally occurring amino acid
XEFSILKSPGSVVFRNGNWPIPGERIPDVAALSMGFSVKEDLSWPGLAVGNLFHRPRATVMVMVKGVNKLALPPGSVISYPLENAVPFSLDSVANSIHSLFSEETPVVLQLAPSEERVYMVGKANSVFEDLSVTLRQLRNRLFQENSVLSSLPLNSLSRNNEVDLLFLSELQVLHDISSLLSRHKHLAKDHSPDLYSLELAGLDEIGKRYGEDSEQFRDASKILVDALQKKNPASPYNLAYKYNFEYSVVFNMVLWIMIALALAVIITSYNIWNMDPGYDSIIYRMTNQKIRMD

SEQ ID NO: 1267 - protein, 76 aa, Homo Sapiens
  misc_feature (1)..(1): Xaa can be any naturally occurring amino acid
XSLYGGNAVVELVTVKSFDTSLIRKTRTILEAKQAEKEHVYQKKKKERNKEVFMGVKSFNVCLSSELPAEEPSKSL

SEQ ID NO: 1268 - protein, 113 aa, Homo Sapiens
FLCALPRREGYEFFVGQWTGTELHFTALINIQTRGEAAASQLILYHYPELKEEKGIVLMTAEMDSTFLNVAEAQCIANQVQLFYATDRKETYGWAQLLAIHSTLIHLHQRVRK

SEQ ID NO: 1269 - protein, 174 aa, Homo Sapiens
LIRSDPAAFESRLEKRSEFRKQPVGHSRQGDFIKCVEQKTDALGKQSVNRGFTKDKTLSSIFNIEMVKEKTAEEIKQIWQQYFAAKDTVYAVIPAEKFDLIWNRAQSCPTNVAEAQCIANQVQLFYATDRKETYGLVETFNLRPNEFKYMSVIAELEQSGLGAELKCAQNQNKT

SEQ ID NO: 1270 - protein, 328 aa, Homo Sapiens
MAAVVVAAAGGAGPAVLQVAGLYRGLCAVRSRALGLGLVSPAQLRVFPVRPGSGRPEGGADSSGVGAEAELQANPFYDRYRDKIQLLRRSDPAAFESRLEKRSEFRKQPVGHSRQGDFIKCVEQKTDALGKQSVNRGFTKDKTLSSIFNIEMVKEKTAEEIKQIWQQYFAAKDTVYAVIPAEKFDLIWNRAQSCPTFLCALPRREGYEFFVGQWTGTELHFTALINIQTRGEAAASQLILYHYPELKEEKGIVLMTAEMDSTFLNVAEAQCIANQVQLFYATDRKETYGLVETFNLRPNEFKYMSVIAELEQSGLGAELKCAQNQNKT

SEQ ID NO: 1271 - protein, 351 aa, Homo Sapiens
MERARGPRAEADAPEEEEEAGAAMAAVVVAAAGGAGPAVLQVAGLYRGLCAVRSRALGLGLVSPAQLRVFPVRPGSGRPEGGADSSGVGAEAELQANPFYDRYRDKIQLLRRSDPAAFESRLEKRSEFRKQPVGHSRQGDFIKCVEQKTDALGKQSVNRGFTKDKTLSSIFNIEMVKEKTAEEIKQIWQQYFAAKDTVYAVIPAEKFDLIWNRAQSCPTFLCALPRREGYEFFVGQWTGTELHFTALINIQTRGEAAASQLILYHYPELKEEKGIVLMTAEMDSTFLNVAEAQCIANQVQLFYATDRKETYGLVETFNLRPNEFKYMSVIAELEQSGLGAELKCAQNQNKT

SEQ ID NO: 1272 - protein, 351 aa, Homo Sapiens; identical to SEQ ID NO: 1271

SEQ ID NO: 1273 - protein, 283 aa, Homo Sapiens
MERARGPRAEADAPEEEEEAGAAMAAVVVAAAGGAGPAVLQVAGLYRGLCAVRSRALGLGLVSPAQLRVFPVRPGSGRPEGGADSSGVGAEAELQANPFYDRYRDKIQLLRRSDPAAFESRLEKRSEFRKQPVGHSRQGDFIKCVEQKTDALGKQSVNRGFTKDKTLSSIFNIEMVKEKTAEEIKQIWQQYFAAKDTVYAVIPAEKFDLIWNRAQSCPTNVAEAQCIANQVQLFYATDRKETYGLVETFNLRPNEFKYMSVIAELEQSGLGAELKCAQNQNKT

SEQ ID NO: 1274 - protein, 45 aa, Homo Sapiens
MSDPAAFESRLEKRSEFRKQPVGHSRQGDFIKCVEQKDGAQNKLV

SEQ ID NO: 1275 - protein, 240 aa, Homo Sapiens
MSDPAAFESRLEKRSEFRKQPVGHSRQGDFIKCVEQKTDALGKQSVNRGFTKDKTLSSIFNIEMVKEKTAEEIKQIWQQYFAAKDTVYAVIPAEKFDLIWNRAQSCPTFLCALPRREGYEFFVGQWTGTELHFTALINIQTRGEAAASQLILYHYPELKEEKGIVLMTAEMDSTFLNVAEAQCIANQVQLFYATDRKETYGLVETFNLRPNEFKYMSVIAELEQSGLGAELKCAQNQNKT

SEQ ID NO: 1276 - protein, 177 aa, Homo Sapiens
MVKEKTAEEIKQIWQQYFAAKDTVYAVIPAEKFDLIWNRAQSCPTFLCALPRREGYEFFVGQWTGTELHFTALINIQTRGEAAASQLILYHYPELKEEKGIVLMTAEMDSTFLNVAEAQCIANQVQLFYATDRKETYGLVETFNLRPNEFKYMSVIAELEQSGLGAELKCAQNQNKT

SEQ ID NO: 1277 - protein, 183 aa, Homo Sapiens
  misc_feature (1)..(1): Xaa can be any naturally occurring amino acid
XGKQSVNRGFTKDKTLSSIFNIEMVKEKTAEEIKQAEKFDLIWNRAQSCPTFLCALPRREGYEFFVGQWTGTELHFTALINIQTRGEAAASQLILYHYPELKEEKGIVLMTAEMDSTFLNVAEAQCIANQVQLFYATDRKETYGLVETFNLRPNEFKYMSVIAELEQSGLGAELKCAQNQNKT

SEQ ID NO: 1278 - protein, 86 aa, Homo Sapiens
  misc_feature (1)..(1): Xaa can be any naturally occurring amino acid
XVRPGSGRPEGGADSSGVGAEAELQANPFYDRYRDKIQLLRRSDPAAFESRLEKRSEFRKQPVGHSRQGDFIKCVEQKDGAQNKLV

SEQ ID NO: 1279 - protein, 310 aa, Homo Sapiens
MAAAVAAAPGALGSLHAGGARLVAACSAWLCPGLRLPGSLAGRRAGPAIWAQGWVPAAGGPAPKRGYSSEMKTEDELRVRHLEEENRGIVVLGINRAYGKNSLSKNLIKMLSKAVDALKSDKKVRTIIIRSEVPGIFCAANLPVPTIAAIDGLALGGGLELALACDIRVAASSAKMGLVETKLAIIPGGGGTQRLPRAIGMSLAKELIFSARVLDGKEAKAVGLISHVLEQNQEGDAAYRKALDLAREFLPQGPVAMRVAKLAINQGMEVDLVTGLAIEEACYAQTIPTKDRLEGLLAFKEKRPPRYKGE

SEQ ID NO: 1280 - protein, 339 aa, Homo Sapiens
MAAAVAAAPGALGSLHAGGARLVAACSAWLCPGLRLPGSLAGRRAGPAIWAQGWVPAAGGPAPKRGYSSEMKTEDELRVRHLEEENRGIVVLGINRAYGKNSLSKNLIKMLSKAVDALKSDKKVRTIIIRSEVPGIFCAGADLKERAKMSSSEVGPFVSKIRAVINDIANLPVPTIAAIDGLALGGGLELALACDIRVAASSAKMGLVETKLAIIPGGGGTQRLPRAIGMSLAKELIFSARVLDGKEAKAVGLISHVLEQNQEGDAAYRKALDLAREFLPQGPVAMRVAKLAINQGMEVDLVTGLAIEEACYAQTIPTKDRLEGLLAFKEKRPPRYKGE

SEQ ID NO: 1281 - protein, 164 aa, Homo Sapiens
MPDTMLPACFLGLLAFSSACYFQNCPRGGKRAMSDLELRQCLPCGPGGKGRCFGPSICCADELGCFVGTAEALRCQEENYLPSPCQSGQKACGSGGRCAAFGVCCNDESCVTEPECREGFHRRARASDRSNATQLDGPAGALLLRLVQLAGAPEPFEPAQPDAY

SEQ ID NO: 1282 - protein, 151 aa, Homo Sapiens
MSSAMLVTCLPDPSSSFREDAPRPPVPGEEGETPPCQPGVGKGQVTKPMPVSSNTRRNEDGLGEPEGRASPDSPLTRWTKSLHSLLGDQDGAYLFRTFLEREKCVDTLDFWFACNGFRQMNLKDTKTLRVAKAIYKRYIENNSIVSKQLKP

SEQ ID NO: 1283 - protein, 192 aa, Homo Sapiens
MSSAMLVTCLPDPSSSFREDAPRPPVPGEEGETPPCQPGVGKGQVTKPMPVSSNTRRNEDGLGEPEGRASPDSPLTRWTKSLHSLLGDQDGAYLFRTFLEREKCVDTLDFWFACNGFRQMNLKDTKTLRVAKAIYKRYIENNSIVSKQLKPATKTYIRDGIKKQQIDSIMFDQAQTEIQSVMEENAYQMFLT

SEQ ID NO: 1284 - protein, 192 aa, Homo Sapiens; identical to SEQ ID NO: 1283

SEQ ID NO: 1285 - protein, 843 aa, Homo Sapiens
MSSAMLVTCLPDPSSSFREDAPRPPVPGEEGETPPCQPGVGKGQVTKPMPVSSNTRRNEDGLGEPEGRASPDSPLTRWTKSLHSLLGDQDGAYLFRTFLEREKCVDTLDFWFACNGFRQMNLKDTKTLRVAKAIYKRYIENNSIVSKQLKPATKTYIRDGIKKQQIDSIMFDQAQTEIQSVMEENAYQMFLTSDIYLEYVRSGGENTAYMSNGGLGSLKVVCGYLPTLNEEEEWTCADFKCKLSPTVVGLSSKTLRATASVRSTETVDSGYRSFKRSDPVNPYHIGSGYVFAPATSANDSEISSDALTDDSMSMTDSSVDGIPPYRVGSKKQLQREMHRSVKANGQVSLPHFPRTHRLPKEMTPVEPATFAAELISRLEKLKLELESRHSLEERLQQIREDEEREGSELTLNSREGAPTQHPLSLLPSGSYEEDPQTILDDHLSRVLKTPGCQSPGVGRYSPRSRSPDHHHHHHSQYHSLLPPGGKLPPAAASPGACPLLGGKGFVTKQTTKHVHHHYIHHHAVPKTKEEIEAEATQRVHCFCPGGSEYYCYSKCKSHSKAPETMPSEQFGGSRGSTLPKRNGKGTEPGLALPAREGGAPGGAGALQLPREEGDRSQDVWQWMLESERQSKPKPHSAQSTKKAYPLESARSSPGERASRHHLWGGNSGHPRTTPRAHLFTQDPAMPPLTPPNTLAQLEEACRRLAEVSKPPKQRCCVASQQRDRNHSATVQTGATPFSNPSLAPEDHKEPKKLAGVHALQASELVVTYFFCGEEIPYRRMLKAQSLTLGHFKEQLSKKGNYRYYFKKASDEFACGAVFEEIWEDETVLPMYEGRILGKVERID

SEQ ID NO: 1286 - protein, 778 aa, Homo Sapiens
MSSAMLVTCLPDPSSSFREDAPRPPVPGEEGETPPCQPGVGKGQVTKPMPVSSNTRRNEDGLGEPEGRASPDSPLTRWTKSLHSLLGDQDGAYLFRTFLEREKCVDTLDFWFACNGFRQMNLKDTKTLRVAKAIYKRYIENNSIVSKQLKPATKTYIRDGIKKQQIDSIMFDQAQTEIQSVMEENAYQMFLTSDIYLEYVRSGGENTAYMSNGGLGSLKVVCGYLPTLNEEEEWTCADFKCKLSPTVVGLSSKTLRATASVRSTETVDSGYRSFKRSDPVNPYHIGSGYVFAPATSANDSEISSDALTDDSMSMTDSSVDGIPPYRVGSKKQLQREMHRSVKANGQVSLPHFPRTHRLPKEMTPVEPATFAAELISRLEKLKLELESRHSLEERLQQIREDEEREGSELTLNSREGAPTQHPLSLLPSGSYEEDPQTILDDHLSRVLKTPGCQSPGVGRYSPRSRSPDHHHHHHSQYHSLLPPGGKLPPAAASPGACPLLGGKGFVTKQTTKHVHHHYIHHHAVPKTKEEIEAEATQRVHCFCPGGSEYYCYSKCKSHSKAPETMPSEQFGAQSTKKAYPLESARSSPGERASRHHLWGGNSGHPRTTPRAHLFTQDPAMPPLTPPNTLAQLEEACRRLAEVSKPPKQRCCVASQQRDRNHSATVQTGATPFSNPSLAPEDHKEPKKLAGVHALQASELVVTYFFCGEEIPYRRMLKAQSLTLGHFKEQLSKKGNYRYYFKKASDEFACGAVFEEIWEDETVLPMYEGRILGKVERID

SEQ ID NO: 1287 - protein, 271 aa, Homo Sapiens
MSSAMLVTCLPDPSSSFREDAPRPPVPGEEGETPPCQPGVGKGQVTKPMPVSSNTRRNEDGLGEPEGRASPDSPLTRWTKSLHSLLGDQDGAYLFRTFLEREKCVDTLDFWFACNGFRQMNLKDTKTLRVAKAIYKRYIENNSIVSKQLKPATKTYIRDGIKKQQIDSIMFDQAQTEIQSVMEENAYQMFLTSDIYLEYVRSGGENTAYMSNGGLGSLKVVCGYLPTLNEEEEWTCADFKCKLSPTVVGLSSKTLRATASVRSTETVDSGY

SEQ ID NO: 1288 - protein, 778 aa, Homo Sapiens; identical to SEQ ID NO: 1286

SEQ ID NO: 1289 - protein, 160 aa, Homo Sapiens
MSSAMLVTCLPDPSSSFREDAPRPPVPGEEGETPPCQPGVGKGQVTKPMPVSSNTRRNEDGLGEPEGRASPDSPLTRWTKSLHSLLGDQDGAYLFRTFLEREKCVDTLDFWFACNGFRQMNLKDTKTLRVAKDFCHDILFYLYCKLCIIKSSFKENYLVQ

SEQ ID NO: 1290 - protein, 227 aa, Homo Sapiens
MVPVLLSLLLLLGPAVPQENQDGRYSLTYIYTGLSKHVEDVPAFQALGSLNDLQFFRYNSKDRKSQPMGLWRQVEGMEDWKQDSQLQKAREDIFMETLKDIVEYYNDSNGSHVLQGRFGCEIENNRSSGAFWKYYYDGKDYIEFNKEIPAWVPFDPAAQITKQKWEAEPVYVQRAKAYLEEECPATLRKYLKYSKNILDRQGTHCFLLPSTEPRIKDDLRLGAQATS

SEQ ID NO: 1291 - protein, 298 aa, Homo Sapiens
MVRMVPVLLSLLLLLGPAVPQENQDGRYSLTYIYTGLSKHVEDVPAFQALGSLNDLQFFRYNSKDRKSQPMGLWRQVEGMEDWKQDSQLQKAREDIFMETLKDIVEYYNDSNGSHVLQGRFGCEIENNRSSGAFWKYYYDGKDYIEFNKEIPAWVPFDPAAQITKQKWEAEPVYVQRAKAYLEEECPATLRKYLKYSKNILDRQDPPSVVVTSHQAPGEKKKLKCLAYDFYPGKIDVHWTRAGEVQEPELRGDVLHNGNGTYQSWVVVAVPPQDTAPYSCHVQHSSLAQPLVVPWEAS

SEQ ID NO: 1292 - protein, 85 aa, Homo Sapiens
  misc_feature (1)..(1): Xaa can be any naturally occurring amino acid
XTYIYTGLSKHVEDVPAFQALGSLNDLQFFRYNSKDRKSQPMGLWRQQKYPGPARSSLCGGHQPPGPRRKEETEVPGLRLLPREN

SEQ ID NO: 1293 - protein, 150 aa, Homo Sapiens
MTAASCFQSQNPGVSTVVLGAYDLRRRERQSRQTFSISSMSENGYDPQQNLNDLMLLQLDREANLTSSVTILPLPLQNATVEAGTRCQVAGWGSQRSGGRLSRFPRFVNVTVTPEDQCRPNNVCTGVLTRRGGICNVSAPCGGRRGPERY

SEQ ID NO: 1294 - protein, 251 aa, Homo Sapiens
MTRLTVLALLAGLLASSRAGSSPLLDIVGGRKARPRQFPFLASIQNQGRHFCGGALIHARFVMTAASCFQSQNPGVSTVVLGAYDLRRRERQSRQTFSISSMSENGYDPQQNLNDLMLLQLDREANLTSSVTILPLPLQNATVEAGTRCQVAGWGSQRSGGRLSRFPRFVNVTVTPEDQCRPNNVCTGVLTRRGGICNGDGGTPLVCEGLAHGVASFSLGPCGRGPDFFTRVALFRDWIDGVLNNPGPGPA

SEQ ID NO: 1295 - protein, 71 aa, Homo Sapiens
GFHPSDIEVDLLKNGERIEKVEHSDLSFSKDWSFYLLYYTEFTPTEKDEYACRVNHVTLSQPKIVKWDRDM

SEQ ID NO: 1296 - protein, 51 aa, Homo Sapiens
MSRSVALAVLALLSLSGLEAIQHSGLLTSSSREWKVKFPELLCVWVSSIRH

SEQ ID NO: 1297 - protein, 101 aa, Homo Sapiens
MSRSVALAVLALLSLSGLEAIQRTPKIQVYSRHPADIEVDLLKNGERIEKVEHSDLSFSKDWSFYLLYYTEFTPTEKDEYACRVNHVTLSQPKIVKWDRDM

SEQ ID NO: 1298 - protein, 119 aa, Homo Sapiens
MSRSVALAVLALLSLSGLEAIQRTPKIQVYSRHPAENGKSNFLNCYVSGFHPSDIEVDLLKNGERIEKVEHSDLSFSKDWSFYLLYYTEFTPTEKDEYACRVNHVTLSQPKIVKWDRDM

SEQ ID NO: 1299 - protein, 119 aa, Homo Sapiens; identical to SEQ ID NO: 1298

SEQ ID NO: 1300 - protein, 119 aa, Homo Sapiens; identical to SEQ ID NO: 1298

SEQ ID NO: 1301 - protein, 57 aa, Homo Sapiens
MSRSVALAVLALLSLSGLERELKKWSIQTCLSARTGLSISCTTLNSPPLKKMSMPAV

SEQ ID NO: 1302 - protein, 41 aa, Homo Sapiens
MASALWTVLPSRMSLRSLKWSLLLLSLLSFFVMWYLSLPHY

SEQ ID NO: 1303 - protein, 46 aa, Homo Sapiens
MASALWTVLPSRMSLRSLKWSLLLLSLLSFFVMWYLSLPHYNVIER

SEQ ID NO: 1304 - protein, 54 aa, Homo Sapiens
MASALWTVLPSRMSLRSLKWSLLLLSLLSFFVMWYLSLPHYNVIERVNWMYFYE

SEQ ID NO: 1305 - protein, 91 aa, Homo Sapiens
MASALWTVLPSRMSLRSLKWSLLLLSLLSFFVMWYLSLPHYNVIERVNWMYFYEIHLDVCQLRRVIAAHGFSSKEIITFWQVMLRNTTCHY

SEQ ID NO: 1306 - protein, 58 aa, Homo Sapiens
MASALWTVLPSRMSLRSLKWSLLLLSLLSFFVMWYLSLPHYNVIERVNWMYFYEYEPI

SEQ ID NO: 1307 - protein, 65 aa, Homo Sapiens
MASALWTVLPSRMSLRSLKWSLLLLSLLSFFVMWYLSLPHYNVIERVNWMYFYEYEPIYRQDFHF

SEQ ID NO: 1308 - protein, 111 aa, Homo Sapiens
MASALWTVLPSRMSLRSLKWSLLLLSLLSFFVMWYLSLPHYNVIERVNWMYFYEYEPIYRQDFHFTLREHSNCSHQNPFLVILVTSHPSDVKARQAIRVTWGEKKSWWGYE

SEQ ID NO: 1309 - protein, 331 aa, Homo Sapiens
MASALWTVLPSRMSLRSLKWSLLLLSLLSFFVMWYLSLPHYNVIERVNWMYFYEYEPIYRQDFHFTLREHSNCSHQNPFLVILVTSHPSDVKARQAIRVTWGEKKSWWGYEVLTFFLLGQEAEKEDKMLALSLEDEHLLYGDIIRQDFLDTYNNLTLKTIMAFRWVTEFCPNAKYVMKTDTDVFINTGNLVKYLLNLNHSEKFFTGYPLIDNYSYRGFYQKTHISYQEYPFKVFPPYCSGLGYIMSRDLVPRIYEMMGHVKPIKFEDVYVGICLNLLKVNIHIPEDTNLFFLYRIHLDVCQLRRVIAAHGFSSKEIITFWQVMLRNTTCHY

SEQ ID NO: 1310 - protein, 331 aa, Homo Sapiens; identical to SEQ ID NO: 1309

SEQ ID NO: 1311 - protein, 331 aa, Homo Sapiens; identical to SEQ ID NO: 1309

SEQ ID NO: 1312 - protein, 331 aa, Homo Sapiens; identical to SEQ ID NO: 1309

SEQ ID NO: 1313 - protein, 331 aa, Homo Sapiens; identical to SEQ ID NO: 1309

SEQ ID NO: 1314 - protein, 150 aa, Homo Sapiens
MSFFLFSEFTTDLSVLIKHGIQKTTKNLSFNFIWNSTVFLAPWTRLTCWLFPLAALSRGALRLLTPSVKSCCSVAQAGVQWQDLSSLQSPSLRFKQFSCLSLPSRWDYRTFGSRASELLWMASALWTVLPSRMSLRSLKWSLLLLSLLSF

SEQ ID NO: 1315 - protein, 92 aa, Homo Sapiens
MRNWLVLLCPCVLGAALHLWLRLRSPPPACASGAGPADQLALFPQWKSTHYDVVVGVLSARNNHELRNVIRSTWMRHLLQHPTLSQRFESGN

SEQ ID NO: 1316 - protein, 500 aa, Homo Sapiens
MRNWLVLLCPCVLGAALHLWLRLRSPPPACASGAGPADQLALFPQWKSTHYDVVVGVLSARNNHELRNVIRSTWMRHLLQHPTLSQRVLVKFIIGAHGCEVPVEDREDPYSCKLLNITNPVLNQEIEAFSLSEDTSSGLPEDRVVSVSFRVLYPIVITSLGVFYDANDVGFQRNITVKLYQAEQEEALFIARFSPPSCGVQVNKLWYKPVEQFILPESFEGTIVWESQDLHGLVSRNLHKVTVNDGGGVLRVITAGEGALPHEFLEGVEGVAGGFIYTIQEGDALLHNLHSRPQRLIDHIRNLHEEDALLKEESSIYDDIVFVDVVDTYRNVPAKLLNFYRWTVETTSFNLLLKTDDDCYIDLEAVFNRIVQKNLDGPNFWWGNFRLNWAVDRTGKWQELEYPSPAYPAFACGSGYVISKDIVKWLASNSGRLKTYQGEDVSMGIWMAAIGPKRYQDSLWLCEKTCETGMLSSPQYSPWELTELWKLKERCGDPCRCQAR

SEQ ID NO: 1317 - protein, 326 aa, Homo Sapiens
MRNWLVLLCPCVLGAALHLWLRLRSPPPACASGAGPAGGVSLLLPRLECNGAVSAHPNLHLPGSRDSPASASQVAGITDQLALFPQWKSTHYDVVVGVLSARNNHELRNVIRSTWMRHLLQHPTLSQRVLVKFIIGAHGCEVPVEDREDPYSCKLLNITNPVLNQEIEAFSLSEDTSSGLPEDRVVSVSFRVLYPIVITSLGVFYDANDVGFQRNITVKLYQAEQEEALFIARFSPPSCGVQVNKLWYKPVEQFILPESFEGTIVWESQDLHGLVSRNLHKVTVNDGGGVLRVITAGEGALPHEFLEGVEGVAGGFIYTIQGKFAS

SEQ ID NO: 1318 - protein, 326 aa, Homo Sapiens
MASKVSCLYVLTVVCWASALWYLSITRPTSSYTGSKPFSHLTVARKNFTFGNIRTRPINPHSFEFLINEPNKCEKNIPFLVILISTTHKEFDARQAIRETWGDENNFKGIKIATLFLLGKNADPVLNQMVEQESQIFHDIIVEDFIDSYHNLTLKTLMGMRWVATFCSKAKYVMKTDSDIFVNMDNLIYKLLKPSTKPRRRYFTGYVINGGPIRDVRSKWYMPRDLYPDSNYPPFCSGTGYIFSADVAELIYKTSLHTRLLHLEDVYVGLCLRKLGIHPFQNSGFNHWKMAYSLCRYRRVITVHQISPEEMHRIWNDMSSKKHLRC

SEQ ID NO: 1319 - protein, 378 aa, Homo Sapiens
MQLRLFRRLLLAALLLVIVWTLFGPSGLGEELLSLSLASLLPAPASPGPPLALPRLLIPNQEACSGPGAPPFLLILVCTAPENLNQRNAIRASWGGLREARGLRVQTLFLLGEPNAQHPVWGSQGSDLASESAAQGDILQAAFQDSYRNLTLKTLSGLNWAEKHCPMARYVLKTDDDVYVNVPELVSELVLRGGRWGQWERSTEPQREAEQEGGQVLHSEEVPLLYLGRVHWRVNPSRTPGGRHRVSEEQWPHTWGPFPPYASGTGYVLSASAVQLILKVASRAPLLPLEDVFVGVSARRGGLAPTQCVKLAGATHYPLDRCCYGKFLLTSHRLDPWKMQEAWKLVGGSDGERTAPFCSWFQGVLGILRCRAIAWLQS

SEQ ID NO: 1320 - protein, 310 aa, Homo Sapiens
MAFPKMRLMYICLLVLGALCLYFSMYSLNPFKEQSFVYKKDGNFLKLPDTDCRQTPPFLVLLVTSSHKQLAERMAIRQTWGKERMVKGKQLKTFFLLGTTSSAAETKEVDQESQRHGDIIQKDFLDVYYNLTLKTMMGIEWVHRFCPQAAFVMKTDSDMFINVDYLTELLLKKNRTTRFFTGFLKLNEFPIRQPFSKWFVSKSEYPWDRYPPFCSGTGYVFSGDVASQVYNVSKSVPYIKLEDVFVGLCLERLNIRLEELHSQPTFFPGGLRFSVCLFRRIVACHFIKPRTLLDYWQALENSRGEDCPPV

SEQ ID NO: 1321 - protein, 310 aa, Homo Sapiens; identical to SEQ ID NO: 1320

SEQ ID NO: 1322 - protein, 310 aa, Homo Sapiens; identical to SEQ ID NO: 1320

SEQ ID NO: 1323 - protein, 310 aa, Homo Sapiens; identical to SEQ ID NO: 1320

SEQ ID NO: 1324 - protein, 314 aa, Homo Sapiens
MCLEMAFPKMRLMYICLLVLGALCLYFSMYSLNPFKEQSFVYKKDGNFLKLPDTDCRQTPPFLVLLVTSSHKQLAERMAIRQTWGKERMVKGKQLKTFFLLGTTSSAAETKEVDQESQRHGDIIQKDFLDVYYNLTLKTMMGIEWVHRFCPQAAFVMKTDSDMFINVDYLTELLLKKNRTTRFFTGFLKLNEFPIRQPFSKWFVSKSEYPWDRYPPFCSGTGYVFSGDVASQVYNVSKSVPYIKLEDVFVGLCLERLNIRLEELHSQPTFFPGGLRFSVCLFRRIVACHFIKPRTLLDYWQALENSRGEDCPPV

SEQ ID NO: 1325 - protein, 329 aa, Homo Sapiens
MKLLRRAWRRRAALGLGTLALCGAALLYLARCAAEPGDPRAMSGRSPPPPAPARAAAFLAVLVASAPRAAERRSVIRSTWLARRGAPGDVWARFAVGTAGLGAEERRALEREQARHGDLLLLPALRDAYENLTAKVLAMLAWLDEHVAFEFVLKADDDSFARLDALLAELRAREPARRRRLYWGFFSGRGRVKPGGRWREAAWQLCDYYLPYALGGGYVLSADLVHYLRLSRDYLRAWHSEDVSLGAWLAPVDVQREHDPRFDTEYRSRGCSNQYLVTHKQSLEDMLEKHATLAREGRLCKREVQLRLSYVYDWSAPPSQCCQRREGIP

SEQ ID NO: 1326 - protein, 223 aa, Homo Sapiens
MKLKLKNVFLAYFLVSIAGLLYALVQLAKGMDRTLPLMQRFRDSATALSSGQPCDCLPPLRAAAEQLRQKDLRISQLQAELRRPPPAPAQPPEPEALPTIYVVTPTYARLVQKAELVRLSQTLSLVPRLHWLLVEDAEGPTPLVSGLLAASGLLFTHLVVLTPKAQRLREGEPGWVHPRGVEQRNKALDWLRGRGGAVGGEKDPPPPGTQGVVYFADDDNTYS

SEQ ID NO: 1327 - protein, 335 aa, Homo Sapiens
MKLKLKNVFLAYFLVSIAGLLYALVQLGQPCDCLPPLRAAAEQLRQKDLRISQLQAELRRPPPAPAQPPEPEALPTIYVVTPTYARLVQKAELVRLSQTLSLVPRLHWLLVEDAEGPTPLVSGLLAASGLLFTHLVVLTPKAQRLREGEPGWVHPRGVEQRNKALDWLRGRGGAVGGEKDPPPPGTQGVVYFADDDNTYSRELFEEMRWTRGVSVWPVGLVGGLRFEGPQVQDGRVVGFHTAWEPSRPFPVDMAGFAVALPLLLDKPNAQFDSTAPRGHLESSLLSHLVDPKDLEPRAANCTRVLVWHTRTEKPKMKQEEQLQRQGRGSDPAIEV

SEQ ID NO: 1328 - protein, 319 aa, Homo Sapiens
MKLKLKNVFLAYFLVSIAGLLYALVQLGQPCDCLPPLRAAAEQLRQKDLRISQLQAELRRPPPAPAQPPEPEALPTIYVVTPTYARLVQKAELVRLSQTLSLVPRLHWLLVEDAEGPTPLVSGLLAASGLLFTHLVVLTPKAQRLREGEPGWVHPRGVEQRNKALDWLRGRGGAVGGEKDPPPPGTQGVVYFADDDNTYSRELFEEMRWTRGVSVWPVGLVGGLRFEGPQVQDGRVVGFHTAWEPSRPFPVDMAGFAVALPLLLDKPNAQFDSTAPRGHLESSLLSHLVDPKDLEPRAANCTRSLAVSPRLECSSAILA

SEQ ID NO: 1329 - protein, 315 aa, Homo Sapiens
MKLKLKNVFLAYFLVSIAGLLYALVQLGQPCDCLPPLRAAAEQLRQKDLRISQLQAELRRPPPAPAQPPEPEALPTIYVVTPTYARLVQKAELVRLSQTLSLVPRLHWLLVEDAEGPTPLVSGLLAASGLLFTHLVVLTPKAQRLREGEPGWVHPRGVEQRNKALDWLRGRGGAVGGEKDPPPPGTQGVVYFADDDNTYSRELFEEMRWTRGVSVWPVGLVGGLRFEGPQVQDGRVVGFHTAWEPSRPFPVDMAGFAVALPLLLDKPNAQFDSTAPRGHLESSLLSHLVDPKDLEPRAANCTRTESRCVTQAGVQ

SEQ ID NO: 1330 - protein, 38 aa, Homo Sapiens
MKLKLKNVFLAYFLVSIAGLLYALVQLVSASSTKQKAR

SEQ ID NO: 1331 - protein, 498 aa, Homo Sapiens
MRPPACWWLLAPPALLALLTCSLAFGLASEDTKKEVKQSQDLEKSGISRKNDIDLKGIVFVIQSQSNSFHAKRAEQLKKSILKQAADLTQELPSVLLLHQLAKQEGAWTILPLLPHFSVTYSRNSSWIFFCEEETRIQIPKLLETLRRYDPSKEWFLGKALHDEEATIIHHYAFSENPTVFKYPDFAAGWALSIPLVNKLTKRLKSESLKSDFTIDLKHEIALYIWDKGGGPPLTPVPEFCTNDVDFYCATTFHSFLPLCRKPVKKKDIFVAVKTCKKFHGDRIPIVKQTWESQASLIEYYSDYTENSIPTVDLGIPNTDRGHCGKTFAILERFLNRSQDKTAWLVIVDDDTLISISRLQHLLSCYDSGEPVFLGERYGYGLGTGGYSYITGGGGMVFSREAVRRLLASKCRCYSNDAPDDMVLGMCFSGLGIPVTHSPLFHQARPVDYPKDYLSHQVPISFHKHWNIDPVKVYFTWLAPSDEDKARQETQKGFREEL

SEQ ID NO: 1332 - protein, 127 aa, Homo Sapiens
MKYLRHRRPNATLILAIGAFTLLLFSLLVSPPTCKVQEQPPAIPEALAWPTPPTRPAPAPCHANTSMVTHPDFATQPQHVQNFLLYRHCRHFPLLQDVPPSKCAQPVFLLLVIKSSPSNYVRRELLR

SEQ ID NO: 1333 - protein, 250 aa, Homo Sapiens
MKYLRHRRPNATLILAIGAFTLLLFSLLVSPPTCKVQEQPPAIPEALAWPTPPTRPAPAPCHANTSMVTHPDFATQPQHVQNFLLYRHCRHFPLLQDVPPSKCAQPVFLLLVIKSSPSNYVRRELLRRTWGRERKVRGLQLRLLFLVGTASNPHEARKVNRLLELEAQTHGDILQWDFHDSFFNLTLKQVLFLQWQETRCANASFVLNGDDDVFAHTDNMVFYLQDHDPGRHLFVGQLIQNVGPIRAFWS

SEQ ID NO: 1334 - protein, 372 aa, Homo Sapiens
MKYLRHRRPNATLILAIGAFTLLLFSLLVSPPTCKVQEQPPAIPEALAWPTPPTRPAPAPCHANTSMVTHPDFATQPQHVQNFLLYRHCRHFPLLQDVPPSKCAQPVFLLLVIKSSPSNYVRRELLRRTWGRERKVRGLQLRLLFLVGTASNPHEARKVNRLLELEAQTHGDILQWDFHDSFFNLTLKQVLFLQWQETRCANASFVLNGDDDVFAHTDNMVFYLQDHDPGRHLFVGQLIQNVGPIRAFWSKYYVPEVVTQNERYPPYCGGGGFLLSRFTAAALRRAAHVLDIFPIDDVFLGMCLELEGLKPASHSGIRTSGVRAPSQRLSSFDPCFYRDLLLVHRFLPYEMLLMWDALNQPNLTCGNQTQIY

SEQ ID NO: 1335 - protein, 372 aa, Homo Sapiens; identical to SEQ ID NO: 1334

SEQ ID NO: 1336 - protein, 353 aa, Homo Sapiens
MLCRLCWLVSYSLAVLLLGCLLFLRKAAKPAGDPTAHQPFWAPPTPRHSRCPPNHTVSSASLSLPSRHRLFLTYRHCRNFSILLEPSGCSKDTFLLLAIKSQPGHVERRAAIRSTWGRVGGWARGRQLKLVFLLGVAGSAPPAQLLAYESREFDDILQWDFTEDFFNLTLKELHLQRWVVAACPQAHFMLKGDDDVFVHVPNVLEFLDGWDPAQDLLVGDVIRQALPNRNTKVKYFIPPSMYRATHYPPYAGGGGYVMSRATVRRLQAIMEDAELFPIDDVFVGMCLRRLGLSPMHHAGFKTFGIRRPLDPLDPCLYRGLLLVHRLSPLEMWTMWALVTDEGLKCAAGPIPQR

SEQ ID NO: 1337 - protein, 353 aa, Homo Sapiens; identical to SEQ ID NO: 1336

SEQ ID NO: 1338 - protein, 378 aa, Homo Sapiens
MLPPQPSAAHQGRGGRSGLLPKGPAMLCRLCWLVSYSLAVLLLGCLLFLRKAAKPAGDPTAHQPFWAPPTPRHSRCPPNHTVSSASLSLPSRHRLFLTYRHCRNFSILLEPSGCSKDTFLLLAIKSQPGHVERRAAIRSTWGRVGGWARGRQLKLVFLLGVAGSAPPAQLLAYESREFDDILQWDFTEDFFNLTLKELHLQRWVVAACPQAHFMLKGDDDVFVHVPNVLEFLDGWDPAQDLLVGDVIRQALPNRNTKVKYFIPPSMYRATHYPPYAGGGGYVMSRATVRRLQAIMEDAELFPIDDVFVGMCLRRLGLSPMHHAGFKTFGIRRPLDPLDPCLYRGLLLVHRLSPLEMWTMWALVTDEGLKCAAGPIPQR

SEQ ID NO: 1339 - protein, 55 aa, Homo Sapiens
MLPPQPSAAHQGRGGRSGLLPKGWQDPLPQPSCWPMRVGSLMTSSSGTSLRTSST

SEQ ID NO: 1340 - protein, 121 aa, Homo Sapiens
MAFPCRRSLTAKTLACLLVGVSFLALQQWFLQAPRSPREERSPQEETPEGPTDAPAADEPPSELVPGPPCVANASANATADFEQLPARIQDFLRYRHCRHFPLLWDAPAKCAGGRGVFLLL

SEQ ID NO: 1341 - protein, 384 aa, Homo Sapiens
MAFPCRRSLTAKTLACLLVGVSFLALQQWFLQAPRSPREERSPQEETPEGPTDAPAADEPPSELVPGPPCVANASANATADFEQLPARIQDFLRYRHCRHFPLLWDAPAKCAGGRGVFLLLAVKSAPEHYERRELIRRTWGQERSYGGRPVRRLFLLGTPGPEDEARAERLAELVALEAREHGDVLQWAFADTFLNLTLKHLHLLDWLAARCPHARFLLSGDDDVFVHTANVVRFLQAQPPGRHLFSGQLMEGSVPIRDSWSKYFVPPQLFPGSAYPVYCSGGGFLLSGPTARALRAAARHTPLFPIDDAYMGMCLERAGLAPSGHEGIRPFGVQLPGAQQSSFDPCMYRELLLVHRFAPYEMLLMWKALHSPALSCDRGHRVS

SEQ ID NO: 1342 - protein, 401 aa, Homo Sapiens
MSLWKKTVYRSLCLALALLVAVTVFQRSLTPGQFLQEPPPPTLEPQKAQKPNGQLVNPNNFWKNPKDVAAPTPMASQGPQAWDVTTTNCSANINLTHQPWFQVLEPQFRQFLFYRHCRYFPMLLNHPEKCRGDVYLLVVVKSVITQHDRREAIRQTWGRERQSAGGGRGAVRTLFLLGTASKQEERTHYQQLLAYEDRLYGDILQWGFLDTFFNLTLKEIHFLKWLDIYCPHVPFIFKGDDDVFVNPTNLLEFLADRQPQENLFVGDVLQHARPIRRKDNKYYIPGALYGKASYPPYAGGGGFLMAGSLARRLHHACDTLELYPIDDVFLGMCLEVLGVQPTAHEGFKTFGISRNRNSRMNKEPCFFRAMLVVHKLLPPELLAMWGLVHSNLTCSRKLQVL

SEQ ID NO: 1343 - protein, 397 aa, Homo Sapiens
MRCPKCLLCLSALLTLLGLKVYIEWTSESRLSKAYPSPRGTPPSPTPANPEPTLPANLSTRLGQTIPLPFAYWNQQQWRLGSLPSGDSTETGGCQAWGAAAATEIPDFASYPKDLRRFLLSAACRSFPQWLPGGGGSQVSSCSDTDVPYLLLAVKSEPGRFAERQAVRETWGSPAPGIRLLFLLGSPVGEAGPDLDSLVAWESRRYSDLLLWDFLDVPFNQTLKDLLLLAWLGRHCPTVSFVLRAQDDAFVHTPALLAHLRALPPASARSLYLGEVFTQAMPLRKPGGPFYVPESFFEGGYPAYASGGGYVIAGRLAPWLLRAAARVAPFPFEDVYTGLCIRALGLVPQAHPGFLTAWPADRTADHCAFRNLLLVRPLGPQASIRLWKQLQDPRLQC

SEQ ID NO: 1344 - protein, 402 aa, Homo Sapiens
MRRRLRLRRDALLTLLLGASLGLLLYAQRDGAAPTASAPRGRGRAAPRPTPGPRAFQLPDAGAAPPAYEGDTPAPPTPTGPFDFARYLRAKDQRRFPLLINQPHKCRGDGAPGGRPDLLIAVKSVAEDFERRQAVRQTWGAEGRVQGALVRRVFLLGVPRGAGSGGADEVGEGARTHWRALLRAESLAYADILLWAFDDTFFNLTLKEIHFLAWASAFCPDVRFVFKGDADVFVNVGNLLEFLAPRDPAQDLLAGDVIVHARPIRTRASKYYIPEAVYGLPAYPAYAGGGGFVLSGATLHRLAGACAQVELFPIDDVFLGMCLQRLRLTPEPHPAFRTFGIPQPSAAPHLSTFDPCFYRELVVVHGLSAADIWLMWRLLHGPHGPACAHPQPVAAGPFQWDS

SEQ ID NO: 1345 - protein, 96 aa, Homo Sapiens
MWLGRRALCALVLLLACASLGLLYASTRDAPGLRLPLAPWAPPQSPRRPELPDLAPEPRYAHIPVRIKEQVVGAEGCLCHKRAGVPGLSVEEPVPS

SEQ ID NO: 1346 - protein, 81 aa, Homo Sapiens
MWLGRRALCALVLLLACASLGLLYASTRDAPGLRLPLAPWAPPQSPRRPELPDLAPEPRYAHIPVRIKEQVVGLLAWNNCS

SEQ ID NO: 1347 - protein, 120 aa, Homo Sapiens
MWLGRRALCALVLLLACASLGLLYASTRDAPGLRLPLAPWAPPQSPRRPELPDLAPEPRYAHIPVRIKEQVVGLLAWNNCSCESSGGGLPLPFQKQVRAIDLTKAFDPAELRAASATREQ

SEQ ID NO: 1348 - protein, 231 aa, Homo Sapiens
MWLGRRALCALVLLLACASLGLLYASTRDAPGLRLPLAPWAPPQSPRRPELPDLAPEPRYAHIPVRIKEQVVGLLAWNNCSCESSGGGLPLPFQKQVRAIDLTKAFDPAELRAASATREQEFQAFLSRSQSPADQLLIAPANSPLQYPLQGVEVQPLRSILVPGEPDCLPRHLGRGRGSDWSYSHWRGSGRSHPCQPRAGPTQQATTTGHLQQPKLPDQHSRHSPVLHRGT

SEQ ID NO: 1349 - protein, 237 aa, Homo Sapiens
MWLGRRALCALVLLLACASLGLLYASTRDAPGLRLPLAPWAPPQSPRRPELPDLAPEPRYAHIPVRIKEQVVGLLAWNNCSCESSGGGLPLPFQKQVRAIDLTKAFDPAELRAASATREQEFQAFLSRSQSPADQLLIAPANSPLQYPLQGVEVQPLRSILVPGLSLQAASGQEVYQVNLTASLGTWDVAGEVTGVTLTGEGQADLTLVSPGLDQLNRQLQLVTYSSRSYQTNTADT

SEQ ID NO: 1350 - protein, 304 aa, Homo Sapiens
MWLGRRALCALVLLLACASLGLLYASTRDAPGLRLPLAPWAPPQSPRRPELPDLAPEPRYAHIPVRIKEQVVGLLAWNNCSCESSGGGLPLPFQKQVRAIDLTKAFDPAELRAASATREQEFQAFLSRSQSPADQLLIAPANSPLQYPLQGVEVQPLRSILVPGLSLQAASGQEVYQVNLTASLGTWDVAGEVTGVTLTGEGQADLTLVSPGLDQLNRQLQLVTYSSRSYQTNTADTAQYNISALVTIATKTFLRYDRLRALITSIRRFYPTVTVVIADDSDKPERVSGPYVEHYLMPFGKVCS

SEQ ID NO: 1351 - protein, 328 aa, Homo Sapiens
MWLGRRALCALVLLLACASLGLLYASTRDAPGLRLPLAPWAPPQSPRRPELPDLAPEPRYAHIPVRIKEQVVGLLAWNNCSCESSGGGLPLPFQKQVRAIDLTKAFDPAELRAASATREQEFQAFLSRSQSPADQLLIAPANSPLQYPLQGVEVQPLRSILVPGLSLQAASGQEVYQVNLTASLGTWDVAGEVTGVTLTGEGQADLTLVSPGLDQLNRQLQLVTYSSRSYQTNTADTGARPGWRDGQAGQTEKNQKGWSGQMAEGMGGIWAMARAVQPHNGCFNWTSRARGRKGAFVHLGLEQARGKPEPWVCLPFRPTVGGPRKRLV

SEQ ID NO: 1352 - protein, 328 aa, Homo Sapiens; identical to SEQ ID NO: 1351

SEQ ID NO: 1353 - protein, 533 aa, Homo Sapiens
MWLGRRALCALVLLLACASLGLLYASTRDAPGLRLPLAPWAPPQSPRRPELPDLAPEPRYAHIPVRIKEQVVGLLAWNNCSCESSGGGLPLPFQKQVRAIDLTKAFDPAELRAASATREQEFQAFLSRSQSPADQLLIAPANSPLQYPLQGVEVQPLRSILVPGLSLQAASGQEVYQVNLTASLGTWDVAGEVTGVTLTGEGQADLTLVSPGLDQLNRQLQLVTYSSRSYQTNTADTVRFSTEGHEAAFTIRIRHPPNPRLYPPGSLPQGAQYNISALVTIATKTFLRYDRLRALITSIRRFYPTVTVVIADDSDKPERVSGPYVEHYLMPFGKGWFAGRNLAVSQVTTKYVLWVDDDFVFTARTRLERLVDVLERTPLDLVGGAVREISGFATTYRQLLSVEPGAPGLGNCLRQRRGFHHELVGFPGCVVTDGVVNFFLARTDKVREVGFDPRLSRVAHLEFFLDGLGSLRVGSCSDVVVDHASKLKLPWTSRDAGAETYARYRYPGSLDESQMAKHRLLFFKHRLQCMTSQ

SEQ ID NO: 1354 - protein, 478 aa, Homo Sapiens
MWLGRRALCALVLLLACASLGLLYASTRDAPGLRLPLAPWAPPQSPRRPELPDLAPEPRYAHIPVRIKEQVVGSQSPADQLLIAPANSPLQYPLQGVEVQPLRSILVPGLSLQAASGQEVYQVNLTASLGTWDVAGEVTGVTLTGEGQADLTLVSPGLDQLNRQLQLVTYSSRSYQTNTADTVRFSTEGHEAAFTIRIRHPPNPRLYPPGSLPQGAQYNISALVTIATKTFLRYDRLRALITSIRRFYPTVTVVIADDSDKPERVSGPYVEHYLMPFGKGWFAGRNLAVSQVTTKYVLWVDDDFVFTARTRLERLVDVLERTPLDLVGGAVREISGFATTYRQLLSVEPGAPGLGNCLRQRRGFHHELVGFPGCVVTDGVVNFFLARTDKVREVGFDPRLSRVAHLEFFLDGLGSLRVGSCSDVVVDHASKLKLPWTSRDAGAETYARYRYPGSLDESQMAKHRLLFFKHRLQCMTSQ

SEQ ID NO: 1355 - protein, 151 aa, Homo Sapiens
  misc_feature (1)..(1): Xaa can be any naturally occurring amino acid
XMPFGKGWFAGRNLAVSQVTTKYVLWVDDDFVFTARTRLERLVDVLERTPLDLARLEATSLSLQVGGAVREISGFATTYRQLLSVEPGAPGLGNCLRQRRGFHHELVGFPGCVVTDGVVNFFLARTDKVREVGFDPRLSRVAHLEFFLDGL

SEQ ID NO: 1356 - protein, 127 aa, Homo Sapiens
  misc_feature (1)..(1): Xaa can be any naturally occurring amino acid
XSQSPADQLLIAPANSPLQYPLQGVEVQPLRSILVPGLSLQAASGQEVYQVNLTASLGTWDVAGEVTGVTLTGEGQADLTLVSPGLDQLNRQLQLVTYSSRSYQTNTADTGSNAMSFLPSPVLHRGT

SEQ ID NO: 1357 - protein, 637 aa, Homo Sapiens [sequence omitted]

SEQ ID NO: 1358 - protein, 998 aa, Homo Sapiens [sequence omitted]

SEQ ID NO: 1359 - protein, 53 aa, Homo Sapiens
DASSIVFLCDLHIHFPPNILDGIRKHCVEGRLAFAPVVMRLSCGSSPRDPHGS

SEQ ID NO: 1360 - protein, 26 aa, Homo Sapiens
DVERALRAARLPRDRACDSPSPGTST

SEQ ID NO: 1361 - protein, 1039 aa, Homo Sapiens
MPRLPVKKIRKQMKLLLLLLLLSCAAWLTYVHLGLVRQGRALRQRLGYGRDGEKLTSETDGRGVHAAPSTQRAEDSSESREEEQAPEGRDLDMLFPGGAGRLPLNFTHQTPPWREEYKGQVNLHVFEDWCGGAVGHLRRNLHFPLFPHTRTTVKKLAVSPKWKNYGLRIFGFIHPARDGDVQFSVASDDNSEFWLSLDESPAAAQLVAFVGKTGSEWTAPGEFTKFSSQVSKPRRLMASRRYYFELLHKQDDRGSDHVEVGWRAFLPGLKFEVISSAHISLYTDESALKMDHVAHVPQSPASHVGGRPPQEETSADMLRPDPRDTFFLTPRMESSSLENVLEPCAYAPTYVVKDFPIARYQGLQFVYLSFVYPNDYTRLTHMETDNKCFYRESPLYLERFGFYKYMKMDKEEGDEDEEDEVQRRAFLFLNPDDFLDDEDEGELLDSLEPTEAAPPRSGPQSPAPAAPAQPGATLAPPTPPRPRDGGTPRHSRALSWAARAARPLPLFLGRAPPPRPAVEQPPPKVYVTRVRPGQRASPRAPAPRAPWPPFPGVFLHPRPLPRVQLRAPPRPPRPHGRRTGGPQATQPRPPARAQATQGGREGQARTLGPAAPTVDSNLSSEARPVTSFLSLSQVSGPQLPGEGEEEEEGEDDGAPGDEAASEDSEEAAGPALGRWREDAIDWQRTFSVGAVDFELLRSDWNDLRCNVSGNLQLPEAEAVDVTAQYMERLNARHGGRFALLRIVNVEKRRDSARGSRFLLELELQERGGGRLRLSEYVFLRLPGARVGDADGESPEPAPAASVRPDGRPELCRPLRLAWRQDVMVHFIVPVKNQARWVAQFLADMAALHARTGDSRFSVVLVDFESEDMDVERALRAARLPRYQYLRRTGNFERSAGLQAGVDAVEDASSIVFLCDLHIHFPPNILDGIRKHCVEGRLAFAPVVMRLSCGSSPRDPHGYWEVNGFGLFGIYKSDFDRVGGMNTEEFRDQWGGEDWELLDRVLQAGLEVERLRLRNFYHHYHSKRGMWSVRSRKGSRTGAS

SEQ ID NO: 1362 - protein, 62 aa, Homo Sapiens
MANFHKTLILGKGKTLTNEASTKKVELDNCPSVSPYLRGQSKLIFKPDLTLEEVQEIRLLNV

SEQ ID NO: 1363 - protein, 6 aa, Homo Sapiens
MGFNLT

SEQ ID NO: 1364 - protein, 21 aa, Homo Sapiens
MGFNLTFHLSYKFRLLLLLTL

SEQ ID NO: 1365 - protein, 42 aa, Homo Sapiens
MGFNLTFHLSYKFRLLLLLTLCLTVVGWATSNYFVGAIQEIP

SEQ ID NO: 1366 - protein, 55 aa, Homo Sapiens
MGFNLTFHLSYKFRLLLLLTLCLTVVGWATSNYFVGAIQEIPKAKEFMANFHKTL

SEQ ID NO: 1367 - protein, 118 aa, Homo Sapiens
MGFNLTFHLSYKFRLLLLLTLCLTVVGWATSNYFVGAIQEIPKAKEFMANFHKTLILGKGKTLTNEASTKKVELDNCPSVSPYLRGQSKLIFKPDLTLEEVQAENPKVSRGRYRPQEC

SEQ ID NO: 1368 - protein, 136 aa, Homo Sapiens
MGFNLTFHLSYKFRLLLLLTLCLTVVGWATSNYFVGAIQEIPKAKEFMANFHKTLILGKGKTLTNEASTKKVELDNCPSVSPYLRGQSKLIFKPDLTLEEVQAENPKVSRGRYRPQECKALQRVAILVPHRNREKH

SEQ ID NO: 1369 - protein, 246 aa, Homo Sapiens
MGFNLTFHLSYKFRLLLLLTLCLTVVGWATSNYFVGAIQEIPKAKEFMANFHKTLILGKGKTLTNEASTKKVELDNCPSVSPYLRGQSKLIFKPDLTLEEVQAENPKVSRGRYRPQECKALQRVAILVPHRNREKHLMYLLEHLHPFLQRQQLDYGIYVIHQAEGKKFNRAKLLNVGYLEALKEENWDCFIFHDVDLVPENDFNLYKCEEHPKHLVVGRNSTGYRLRYSGYFGGVTALSREQFFKG

SEQ ID NO: 1370 - protein, 344 aa, Homo Sapiens
MGFNLTFHLSYKFRLLLLLTLCLTVVGWATSNYFVGAIQEIPKAKEFMANFHKTLILGKGKTLTNEASTKKVELDNCPSVSPYLRGQSKLIFKPDLTLEEVQAENPKVSRGRYRPQECKALQRVAILVPHRNREKHLMYLLEHLHPFLQRQQLDYGIYVIHQAEGKKFNRAKLLNVGYLEALKEENWDCFIFHDVDLVPENDFNLYKCEEHPKHLVVGRNSTGYRLRYSGYFGGVTALSREQFFKVNGFSNNYWGWGGEDDDLRLRVELQRMKISRPLPEVGKYTMVFHTRDKGNEVNAERMKLLHQVSRVWRTDGLSSCSYKLVSVEHNPLYINITVDFWFGA

SEQ ID NO: 1371 - protein, 344 aa, Homo Sapiens; identical to SEQ ID NO: 1370

SEQ ID NO: 1372 - protein, 344 aa, Homo Sapiens; identical to SEQ ID NO: 1370

SEQ ID NO: 1373 - protein, 301 aa, Homo Sapiens
MGFNLTFHLSYKFRLLLLLTLCLTVVGWATSNYFVGAIQEIPKAKEFMANFHKTLILGKGKTLTNEASTKKVELDNCPSVSPYLRGQSKLIFKPDLTLEEVQAENPKVSRGRYRPQECKALQRVAILVPHRNREKHLMYLLEHLHPFLQRQQLDYGIYVIHQAEGKKFNRAKLLNVGYLEALKEENWDCFIFHDVDLVPENDFNLYKCEEHPKHLVVGRNSTGYRLRYSGYFGGVTALSREQFFKVNGFSNNYWGWGGEDDDLRLRVELQRMKISRPLPEVGKYTMVFHTRDKGNEVNAER

SEQ ID NO: 1374 - protein, 25 aa, Homo Sapiens
MYLLEHLHPFLQRQQLDYGIYVIHQ

SEQ ID NO: 1375 - protein, 388 aa, Homo Sapiens
MRARRGLLRLPRRSLLAALFFFSLSSSLLYFVYVAPGIVNTYLFMMQAQGILIRDNVRTIGAQVYEQVLRSAYAKRNSSVNDSDYPLDLNHSETFLQTTTFLPEDFTYFANHTCPERLPSMKGPIDINMSEIGMDYIHELFSKDPTIKLGGHWKPSDCMPRWKVAILIPFRNRHEHLPVLFRHLLPMLQRQRLQFAFYVVEQVGTQPFNRAMLFNVGFQEAMKDLDWDCLIFHDVDHIPESDRNYYGCGQMPRHFATKLDKYMYLLPYTEFFGGVSGLTVEQFRKINGFPNAFWGWGGEDDDLWNRVQNAGYSVSRPEGDTGKYKSIPHHHRGEVQFLGRYALLRKSKERQGLDGLNNLNYFANITYDALYKNITVNLTPELAQVNEY

SEQ ID NO: 1376 - protein, 343 aa, Homo Sapiens
MSVLRRMMRVSNRSLLAFIFFFSLSSSCLYFIYVAPGIANTYLFMVQARGIMLRENVKTIGHMIRLYTNKNSTLNGTDYPEGNNSSDYLVQTTTYLPENFTYSPYLPCPEKLPYMRGFLNVNVSEVSFDEIHQLFSKDLDIEPGGHWRPKDCKPRWKTGTQPFNRAMLFNVGFKEAMKDSVWDCVIFHDVDHLPENDRNYYGCGEMPRHFAAKLDKYMYILPYKEFFGGVSGLTVEQFRKINGFPNAFWGWGGEDDDLWNRVHYAGYNVTRPEGDLGKYKSIPHHHRGEVQFLGRYKLLRYSKERQYIDGLNNLIYRPKILVDRLYTNISVNLMPELAPIEDY

SEQ ID NO: 1377 - protein, 382 aa, Homo Sapiens
MSVLRRMMRVSNRSLLAFIFFFSLSSSCLYFIYVAPGIANTYLFMVQARGIMLRENVKTIGHMIRLYTNKNSTLNGTDYPEGNNSSDYLVQTTTYLPENFTYSPYLPCPEKLPYMRGFLNVNVSEVSFDEIHQLFSKDLDIEPGGHWRPKDCKPRWKVAVLIPFRNRHEHLPIFFLHLIPMLQKQRLEFAFYVIEQTGTQPFNRAMLFNVGFKEAMKDSVWDCVIFHDVDHLPENDRNYYGCGEMPRHFAAKLDKYMYILPYKEFFGGVSGLTVEQFRKINGFPNAFWGWGGEDDDLWNRVHYAGYNVTRPEGDLGKYKSIPHHHRGEVQFLGRYKLLRYSKERQYIDGLNNLIYRPKILVDRLYTNISVNLMPELAPIEDY

SEQ ID NO: 1378 - protein, 343 aa, Homo Sapiens
MSVLRRMMRVSNRSLLAFIFFFSLSSSCLYFIYVAPGIDYPEGNNSSDYLVQTTTYLPENFTYSPYLPCPEKLPYMRGFLNVNVSEVSFDEIHQLFSKDLDIEPGGHWRPKDCKPRWKVAVLIPFRNRHEHLPIFFLHLIPMLQKQRLEFAFYVIEQTGTQPFNRAMLFNVGFKEAMKDSVWDCVIFHDVDHLPENDRNYYGCGEMPRHFAAKLDKYMYILPYKEFFGGVSGLTVEQFRKINGFPNAFWGWGGEDDDLWNRVHYAGYNVTRPEGDLGKYKSIPHHHRGEVQFLGRYKLLRYSKERQYIDGLNNLIYRPKILVDRLYTNISVNLMPELAPIEDY

SEQ ID NO: 1379 - protein, 72 aa, Homo Sapiens
MVQARGIMLRENVKTIGHMIRLYTNKNSTLNGTDYPEGNNSSDYLVQTTTYLPENFTYSPYLPCPEKLPYMR

SEQ ID NO: 1380 - protein, 415 aa, Homo Sapiens
MQMSYAIRCAFYQLLLAALMLVAMLQLLYLSLLSGLHGQEEQDQYFEFFPPSPRSVDQVKAQLRTALASGGVLDASGDYRVYRGLLKTTMDPNDVILATHASVDNLLHLSGLLERWEGPLSVSVFAATKEEAQLATVLAYALSSHCPDMRARVAMHLVCPSRYEAAVPDPREPGEFALLRSCQEVFDKLARVAQPGINYALGTNVSYPNNLLRNLAREGANYALVIDVDMVPSEGLWRGLREMLDQSNQWGGTALVVPAFEIRRARRMPMNKNELVQLYQVGEVRPFYYGLCTPCQAPTNYSRWVNLPEESLLRPAYVVPWQDPWEPFYVAGGKVPTFDERFRQYGFNRISQACELHVAGFDFEVLNEGFLVHKGFKEALKFHPQKEAENQHNKILYRQFKQELKAKYPNSPRRC

SEQ ID NO: 1381 - protein, 92 aa, Homo Sapiens
IDVTFKSTNPYGWPQIVLSVYGPDVFGNDVVRGYGAVHVPFSPGRHKRTIPMFVPESTSKLQKFTSWFMGRRPEYTDPKVVAQGEGREAQPG

SEQ ID NO: 1382 - protein, 133 aa, Homo Sapiens
LLMVNGQVESAQFPEYDDLYCKYCFVYGQDWAPTAGLEEGISQITSKSQDVRQALVWNFPIDVTFKSTNPYGWPQIVLSVYGPDVFGNDVVRGYGAVHVPFSPGRHKRTIPMFVPESTSKLQKFTRSASCSTH

SEQ ID NO: 1383 - protein, 135 aa, Homo Sapiens
MATASPSVFLLMVNGQVESAQFPEYDDLYCKYCFVYGQDWAPTAGLEEGISQITSKSQDVRQALVWNFPIDVTFKSTNPYGWPQIVLSVYGPDVFGNDVVRGYGAVHVPFSPGRHKRTIPMFVPESTSKLQKFTR

SEQ ID NO: 1384 - protein, 153 aa, Homo Sapiens
MATASPSVFLLMVNGQVESAQFPEYDDLYCKYCFVYGQDWAPTAGLEEGISQITSKSQDVRQALVWNFPIDVTFKSTNPYGWPQIVLSVYGPDVFGNDVVRGYGAVHVPFSPGRHKRTIPMFVPESTSKLQKFTSLCLVASSDLQAAPPTEDK

SEQ ID NO: 1385 - protein, 186 aa, Homo Sapiens
MATASPSVFLLMVNGQVESAQFPEYDDLYCKYCFVYGQDWAPTAGLEEGISQITSKSQDVRQALVWNFPIDVTFKSTNPYGWPQIVLSVYGPDVFGNDVVRGYGAVHVPFSPGRHKRTIPMFVPESTSKLQKFTSWFMGRRPEYTDPKVVAQGEGREAITAPRKAVFSVHGLTSPRALALVHIKGT

SEQ ID NO: 1386 - protein, 161 aa, Homo Sapiens
MATASPSVFLLMVNGQVESAQFPEYDDLYCKYCFVYGQDWAPTAGLEEGISQITSKSQDVRQALVWNFPIDVTFKSTNPYGWPQIVLSVYGPDVFGNDVVRGYGAVHVPFSPGRHKRTIPMFVPESTSKLQKFTSWFMGRRPEYTDPKVVAQGEGREAQPG

SEQ ID NO: 1387 - protein, 187 aa, Homo Sapiens
MATASPSVFLLMVNGQVESAQFPEYDDLYCKYCFVYGQDWAPTAGLEEGISQITSKSQDVRQALVWNFPIDVTFKSTNPYGWPQIVLSVYGPDVFGNDVVRGYGAVHVPFSPGRHKRTIPMFVPESTSKLQKFTSWFMGRRPEYTDPKVVAQGEGREDENAEAEIPRSTWVSLCPSPAWLMLPFCPQ

SEQ ID NO: 1388 - protein, 183 aa, Homo Sapiens
MATASPSVFLLMVNGQVESAQFPEYDDLYCKYCFVYGQDWAPTAGLEEGISQITSKSQDVRQALVWNFPIDVTFKSTNPYGWPQIVLSVYGPDVFGNDVVRGYGAVHVPFSPGRHKRTIPMFVPESTSKLQKFTSWFMGRRPEYTDPKVVAQGEGREGKAPSPLLPPSPIQVTAWEWVGPGLG

SEQ ID NO: 1389 - protein, 204 aa, Homo Sapiens
MATASPSVFLLMVNGQVESAQFPEYDDLYCKYCFVYGQDWAPTAGLEEGISQITSKSQDVRQALVWNFPIDVTFKSTNPYGWPQIVLSVYGPDVFGNDVVRGYGAVHVPFSPGRHKRTIPMFVPESTSKLQKFTSWFMGRRPEYTDPKVVAQGEGREVTRVRSQGFVTLLFNVVTKDMRKLGYDTGPSDTQGVLGPSPPQSFPQ

SEQ ID NO: 1390 - protein, 125 aa, Homo Sapiens
MATASPSVFLLMVNGQVESAQFPEYDDLYCKYCFVYGQDWAPTAGLEEGISQITSKSQDVRQALVWNFPIDVTFKSTNPYGYRAQRVWTRCVRERCGSRLWGRARALLTWPAQKDHPHVCPRIYV

SEQ ID NO: 1391 - protein, 19 aa, Homo Sapiens
MMTSTASTALCTARTGPPQ

SEQ ID NO: 1392 - protein, 106 aa, Homo Sapiens
MMTSTASTALCTARTGPPQRVWRRGSHRSHPRAKMCGKHWCGTSPLMSPLKAPTPTAGHRSCSACMDQMCSGTMWFEAMGPCTCPSHLAGTKGPSPCLSQNLRLNC

SEQ ID NO: 1393 - protein, 133 aa, Homo Sapiens
MMTSTASTALCTARTGPPQRVWRRGSHRSHPRAKMCGKHWCGTSPLMSPLKAPTPTAGHRSCSACMDQMCSGTMWFEAMGPCTCPSHLAGTKGPSPCLSQNLRLNCRSLQAGSWGGGPSTQTPRWWLRVKAGK

SEQ ID NO: 1394 - protein, 147 aa, Homo Sapiens
MMTSTASTALCTARTGPPQRVWRRGSHRSHPRAKMCGKHWCGTSPLMSPLKAPTPTAGHRSCSACMDQMCSGTMWFEAMGPCTCPSHLAGTKGPSPCLSQNLRLNCRSLQAGSWGGGPSTQTPRWWLRVKAGKPPSGLSVKDSSVSR

SEQ ID NO: 1395 - protein, 153 aa, Homo Sapiens
MMTSTASTALCTARTGPPQRVWRRGSHRSHPRAKMCGKHWCGTSPLMSPLKAPTPTAGHRSCSACMDQMCSGTMWFEAMGPCTCPSHLAGTKGPSPCLSQNLRLNCRSLQAGSWGGGPSTQTPRWWLRVKAGKVKLPPLSYPHPPYRLQPGSG

SEQ ID NO: 1396 - protein, 213 aa, Homo Sapiens
MMTSTASTALCTARTGPPQRVWRRGSHRSHPRAKMCGKHWCGTSPLMSPLKAPTPTAGHRSCSACMDQMCSGTMWFEAMGPCTCPSHLAGTKGPSPCLSQNLRLNCRSLQAGSWGGGPSTQTPRWWLRVKAGKVKLPPLSYPHPPYRLQPGSGWAQGWGECRGPARHIGASPQMFPDEGLVGAQRVCHVCLSRQPLYLPVRGLGQALLSPFYR

SEQ ID NO: 1397 - protein, 112 aa, Homo Sapiens
SNRARPRWVPPAPPDLPWRPRVLASFYSWSTGRWRAPSFQSMMTSTASTALCTARTGPPQRVWRRGSHRSHPRAKMCGKHWCGTSPLMSPLKAPTPTAAVQLAFWKFRVHQG

SEQ ID NO: 1398 - protein, 396 aa, Homo Sapiens
MGALARALLLPLLAQWLLRAAPELAPAPFTLPLRVAAATNRVVAPTPGPGTPAERHADGLALALEPALASPAGAANFLAMVDNLQGDSGRGYYLEMLIGTPPQKLQILVDTGSSNFAVAGTPHSYIDTYFDTERSSTYRSKGFDVTVKYTQGSWTGFVGEDLVTIPKGFNTSFLVNIATIFESENFFLPGIKWNGILGLAYATLAKPSSSLETFFDSLVTQANIPNVFSMQMCGAGLPVAGSGTNGGSLVLGGIEPSLYKGDIWYTPIKEEWYYQIEILKLEIGGQSLNLDCREYNADKAIVDSGTTLLRLPQKVFDAVVEAVARASLIPEFSDGFWTGSQLACWTNSETPWSYFPKISIYLRDENSSRSFRITILPQKLQVLQCLKFPGLSQQRM

SEQ ID NO: 1399 - protein, 518 aa, Homo Sapiens
MGALARALLLPLLAQWLLRAAPELAPAPFTLPLRVAAATNRVVAPTPGPGTPAERHADGLALALEPALASPAGAANFLAMVDNLQGDSGRGYYLEMLIGTPPQKLQILVDTGSSNFAVAGTPHSYIDTYFDTERSSTYRSKGFDVTVKYTQGSWTGFVGEDLVTIPKGFNTSFLVNIATIFESENFFLPGIKWNGILGLAYATLAKPSSSLETFFDSLVTQANIPNVFSMQMCGAGLPVAGSGTNGGSLVLGGIEPSLYKGDIWYTPIKEEWYYQIEILKLEIGGQSLNLDCREYNADKAIVDSGTTLLRLPQKVFDAVVEAVARASLIPEFSDGFWTGSQLACWTNSETPWSYFPKISIYLRDENSSRSFRITILPQLYIQPMMGAGLNYECYRFGISPSTNALVIGATVMEGFYVIFDRAQKRVGFAASPCAEIAGAAVSEISGPFSTEDVASNCVPAQSLSEPILWIVSYALMSVCGAILLVLIVLLLLPFRCQRRPRDPEVVNDESSLVRHRWK

SEQ ID NO: 1400 - protein, 468 aa, Homo Sapiens
MGALARALLLPLLAQWLLRAAPELAPAPFTLPLRVAAATNRVVAPTPGPGTPAERHADGLALALEPALASPAGAANFLAMVDNLQGDSGRGYYLEMLIGTPPQKLQILVDTGSSNFAVAGTPHSYIDTYFDTERSSTYRSKGFDVTVKYTQGSWTGFVGEDLVTIPKGFNTSFLVNIATIFESENFFLPGIKWNGILGLAYATLAKPSSSLETFFDSLVTQANIPNVFSMQMCGAGLPVAGSGTNGGSLVLGGIEPSLYKGDIWYTPIKEEWYYQIEILKLEIGGQSLNLDCREYNADKAIVDSGTTLLRLPQKVFDAVVEAVARASLLYIQPMMGAGLNYECYRFGISPSTNALVIGATVMEGFYVIFDRAQKRVGFAASPCAEIAGAAVSEISGPFSTEDVASNCVPAQSLSEPILWIVSYALMSVCGAILLVLIVLLLLPFRCQRRPRDPEVVNDESSLVRHRWK

SEQ ID NO: 1401 - protein, 43 aa, Homo Sapiens
MAAGAVFLALSAQLLQARLMKEESPVVSWRLEPEDGTALCFIF

SEQ ID NO: 1402 - protein, 628 aa, Homo Sapiens
MEPPDAPAQARGAPRLLLLAVLLAAHPDAQAEVRLSVPPLVEVMRGKSVILDCTPTGTHDHYMLEWFLTDRSGARPRLASAEMQGSELQVTMHDTRGRSPPYQLDSQGRLVLAEAQVGDERDYVCVVRAGAAGTAEATARLNVFAKPEATEVSPNKGTLSVMEDSAQEIATCNSRNGNPAPKITWYRNGQRLEVPVEMNPEGYMTSRTVREASGLLSLTSTLYLRLRKDDRDASFHCAAHYSLPEGRHGRLDSPTFHLTLHYPTEHVQFWVGSPSTPAGWVREGDTVQLLCRGDGSPSPEYTLFRLQDEQEEVLNVNLEGNLTLEGVTRGQSGTYGCRVEDYDAADDVQLSKTLELRVAYLDPLELSEGKVLSLPLNSSAVVNCSVHGLPTPALRWTKDSTPLGDGPMLSLSSITFDSNGTYVCEASLPTVPVLSRTQNFTLLVQGSPELKTAEIEPKADGSWREGDEVTLICSARGHPDPKLSWSQLGGSPAEPIPGRQGWVSSSLTLKVTSALSRDGISCEASNPHGNKRHVFHFGTVSPQTSQAGVAVMAVAVSVGLLLLVVAVFYCVRRKGGPCCRQRREKGAPPPGEPGLSHSGSEQPEQTGLLMGGASGGARGGSGGFGDEC

SEQ ID NO: 1403 - protein, 588 aa, Homo Sapiens
MEPPDAPAQARGAPRLLLLAVLLAAHPDAQAEVRLSVPPLVEVMRGKSVILDCTPTGTHDHYMLEWFLTDRSGARPRLASAEMQGSELQVTMHDTRGRSPPYQLDSQGRLVLAEAQVGDERDYVCVVRAGAAGTAEATARLNVFAKPEATEVSPNKGTLSVMEDSAQEIATCNSRNGNPAPKITWYRNGQRLEVPVEMNPEGYMTSRTVREASGLLSLTSTLYLRLRKDDRDASFHCAAHYSLPEGRHGRLDSPTFHLTLHYPTEHVQFWVGSPSTPAGWVREGDTVQLLCRGDGSPSPEYTLFRLQDEQEEVLNVNLEGNLTLEGVTRGQSGTYGCRVEDYDAADDVQLSKTLELRVAYLDPLELSEGKVLSLPLNSSAVVNCSVHGLPTPALRWTKDSTPLGDGPMLSLSSITFDSNGTYVCEASLPTVPVLSRTQNFTLLVQGSPELKTAEIEPKADGSWREGDEVTLICSARGHPDPKLSWSQLGGSPAEPIPGRQGWVSSSLTLKVTSALSRDGISCEASNPHGNKRHVFHFGTVSPQTSQAGVAVMAVAVSVGLLLLVVAVFYCVRRKGGPCCRQRREKGAP

SEQ ID NO: 1404 - protein, 286 aa, Homo Sapiens
MEPPDAPAQARGAPRLLLLAVLLAAHPDAQAEVRLSVPPLVEVMRGKSVILDCTPTGTHDHYMLEWFLVTMHDTRGRSPPYQLDSQGRLVLAEAQVGDERDYVCVVRAGAAGTAEATARLNVFAKPEATEVSPNKGTLSVMEDSAQEIATCNSRNGNPAPKITWYRNGQRLEVPVEMNPEGYMTSRTVREASGLLSLTSTLYLRLRKDDRDASFHCAAHYSLPEGRHGRLDSPTFHLTLHYPTEHVQFWVGSPSTPAGWVREGDTVQLLCRGDGSPSPEYTLFRLQ

SEQ ID NO: 1405 - protein, 61 aa, Homo Sapiens
  misc_feature (1)..(1): Xaa can be any naturally occurring amino acid
XGYMTSRTVREASGLLSLTSTLYLRLRKDDRDASFHCAAHYSLPEGRHGRLDSPTFHLTLH

SEQ ID NO: 1406 - protein, 145 aa, Homo Sapiens
MAQLFLPLLAALVLAQAPAALADVLEGDSSEDRAFRVRIAGDAPLQGVLGGALTIPCHVHYLRPPPSRRAVLGSPRVKWTFLSRGREAEVLVARGVRVKVNEAYRFRVALPAYPASLTDVSLALSELRPNDSGIYRCEVQHGIDD

SEQ ID NO: 1407 - protein, 196 aa, Homo Sapiens
MAQLFLPLLAALVLAQAPAALADVLEGDSSEDRAFRVRIAGDAPLQGVLGGALTIPCHVHYLRPPPSRRAVLGSPRVKWTFLSRGREAEVLVARGVRVKVNEAYRFRVALPAYPASLTDVSLALSELRPNDSGIYRCEVQHGIDDSSDAVEVKVKGIPSRPHERPVTETWMASPGSGTMVWWTRMTSMMCTVMLKT

SEQ ID NO: 1408 - protein, 213 aa, Homo Sapiens
MAQLFLPLLAALVLAQAPAALADVLEGDSSEDRAFRVRIAGDAPLQGVLGGALTIPCHVHYLRPPPSRRAVLGSPRVKWTFLSRGREAEVLVARGVRVKVNEAYRFRVALPAYPASLTDVSLALSELRPNDSGIYRCEVQHGIDDSSDAVEVKVKGVVFLYREGSARYAFSFSGAQEACARIGAHIATPEQLYAAYLGGYEQCDAGWLSDQTV

SEQ ID NO: 1409 - protein, 911 aa, Homo Sapiens
MAQLFLPLLAALVLAQAPAALADVLEGDSSEDRAFRVRIAGDAPLQGVLGGALTIPCHVHYLRPPPSRRAVLGSPRVKWTFLSRGREAEVLVARGVRVKVNEAYRFRVALPAYPASLTDVSLALSELRPNDSGIYRCEVQHGIDDSSDAVEVKVKGVVFLYREGSARYAFSFSGAQEACARIGAHIATPEQLYAAYLGGYEQCDAGWLSDQTVRYPIQTPREACYGDMDGFPGVRNYGVVDPDDLYDVYCYAEDLNGELFLGDPPEKLTLEEARAYCQERGAEIATTGQLYAAWDGGLDHCSPGWLADGSVRYPIVTPSQRCGGGLPGVKTLFLFPNQTGFPNKHSRFNVYCFRDSAQPSAIPEASNPASNPASDGLEAIVTVTETLEELQLPQEATESESRGAIYSIPIMEDGGGGSSTPEDPAEAPRTLLEFETQSMVPPTGFSEEEGKALEEEEKYEDEEEKEEEEEEEEVEDEALWAWPSELSSPGPEASLPTEPAAQEESLSQAPARAVLQPGASPLPDGESEASRPPRVHGPPTETLPTPRERNLASPSPSTLVEAREVGEATGGPELSGVPRGESEETGSSEGAPSLLPATRAPEGTRELEAPSEDNSGRTAPAGTSVQAQPVLPTDSASRGGVAVVPASGDCVPSPCHNGGTCLEEEEGVRCLCLPGYGGDLCDVGLRFCNPGWDAFQGACYKHFSTRRSWEEAETQCRMYGAHLASISTPEEQDFINNRYREYQWIGLNDRTIEGDFLWSDGVPLLYENWNPGQPDSYFLSGENCVVMVWHDQGQWSDVPCNYHLSYTCKMGLVSCGPPPELPLAQVFGRPRLRYEVDTVLRYRCREGLAQRNLPLIRCQENGRWEAPQISCVPRRPARALHPEEDPEGRQGRLLGRWKALLIPPSSPMPGP

SEQ ID NO: 1410 - protein, 671 aa, Homo Sapiens
MAQLFLPLLAALVLAQAPAALADVLEGDSSEDRAFRVRIAGDAPLQGVLGGALTIPCHVHYLRPPPSRRAVLGSPRVKWTFLSRGREAEVLVARGVRVKVNEAYRFRVALPAYPASLTDVSLALSELRPNDSGIYRCEVQHGIDDSSDAVEVKVKGVVFLYREGSARYAFSFSGAQEACARIGAHIATPEQLYAAYLGGYEQCDAGWLSDQTVRYPIQTPREACYGDMDGFPGVRNYGVVDPDDLYDVYCYAEDLNGELFLGDPPEKLTLEEARAYCQERGAEIATTGQLYAAWDGGLDHCSPGWLADGSVRYPIVTPSQRCGGGLPGVKTLFLFPNQTGFPNKHSRFNVYCFRDSAQPSAIPEASNPASNPASDGLEAIVTVTETLEELQLPQEATESESRGAIYSIPIMEDGGGGSSTPEDPAEAPRTLLEFETQSMVPPTGFSEEEGKALEEEEKYEDEEEKEEEEEEEEVEDEALWAWPSELSSPGPEASLPTEPAAQEESLSQAPARAVLQPGASPLPDGESEASRPPRVHGPPTETLPTPRERNLASPSPSTLVEAREVGEATGGPELSGVPRGESEETGSSEGAPSLLPATRAPEGTRELEAPSEDNSGRTAPAGTSVQAQPVLPTDSASRGGVAVVPASGNSAQGSTALSILLLFFPLQLWVT

SEQ ID NO: 1411 - protein, 231 aa, Homo Sapiens
MAQLFLPLLAALVLAQAPAALADVLEGDSSGIYRCEVQHGIDDSSDAVEVKVKGVVFLYREGSARYAFSFSGAQEACARIGAHIATPEQLYAAYLGGYEQCDAGWLSDQTVRYPIQTPREACYGDMDGFPGVRNYGVVDPDDLYDVYCYAEDLNGELFLGDPPEKLTLEEARAYCQERGAEIATTGQLYAAWDGGLDHCSPGWLADGSVRYPIVTPSQRCGGGLPGVKTLF

SEQ ID NO: 1412 - protein, 26 aa, Homo Sapiens
  misc_feature (1)..(1): Xaa can be any naturally occurring amino acid
XHGIDDSSDAVEVKVKGGGHSTHNLT

SEQ ID NO: 1413 - protein, 294 aa, Homo Sapiens
IATFWNKAFLTIIILLIVLFLDAVREVRKYSSVHTIEKSSTSRPDAYEHTQMKLFRSQRNLYISGFSLFFWLVLRRLVTLITQLAKELSNKGVLKTQAENTNKAAKKFMEENEKLKRILKSHGKDEECVLEAENKKLVEDQEKLKTELRKTSDALSKAQNDVMEMKMQSERLSKEYDQLLKEHSELQKQREILPHRRGESTVTTEAEIGVMEPQQRNADSHQKLEEAKNRFFPRASSSRSMALQIPIKLILDFLASRTMGINLLFQAIKFVIICYCCHSKLIQEHAGQICNGLN

SEQ ID NO: 1414 - protein, 147 aa, Homo Sapiens
MKLFRSQRNLYISGFSLFFWLVLRRLVTLITQLAKELSNKGVLKTQAENTNKAAKKFMEENEKLKRILKSHGKDEECVLEAENKKLVEDQEKLKTELRKTSDALSKAQNDVMEMKMQSERLSKEYDQLLKEHSELQDRLERGNKKRL

SEQ ID NO: 1415 - protein, 64 aa, Homo Sapiens
MTLQWAAVATFLYAEIGLILIFCLPFIPPQRWQKIFSFNVWGKIATFWNKAFLTIIILLIVLFL

SEQ ID NO: 1416 - protein, 133 aa, Homo Sapiens
MTLQWAAVATFLYAEIGLILIFCLPFIPPQRWQKIFSFNVWGKIATFWNKAFLTIIILLIVLFLDAVREVRKYSSVHTIEKSSTSRPDAYEHTQMKLFRSQRNLYISGFSLFFWLVLRRLVTLITQLAKELSN

SEQ ID NO: 1417 - protein, 171 aa, Homo Sapiens
MTLQWAAVATFLYAEIGLILIFCLPFIPPQRWQKIFSFNVWGKIATFWNKAFLTIIILLIVLFLDAVREVRKYSSVHTIEKSSTSRPDAYEHTQMKLFRSQRNLYISGFSLFFWLVLRRLVTLITQLAKELSNKGVLKTQAENTNKAAKKFMEENEKLKRFLLAKVHCRKL

SEQ ID NO: 1418 - protein, 196 aa, Homo Sapiens
MTLQWAAVATFLYAEIGLILIFCLPFIPPQRWQKIFSFNVWGKIATFWNKAFLTIIILLIVLFLDAVREVRKYSSVHTIEKSSTSRPDAYEHTQMKLFRSQRNLYISGFSLFFWLVLRRLVTLITQLAKELSNKGVLKTQAENTNKAAKKFMEENEKLKRILKSHGKDEECVLEAENKKLVEDQEKLKTELRKTSD

SEQ ID NO: 1419 - protein, 230 aa, Homo Sapiens
MTLQWAAVATFLYAEIGLILIFCLPFIPPQRWQKIFSFNVWGKIATFWNKAFLTIIILLIVLFLDAVREVRKYSSVHTIEKSSTSRPDAYEHTQMKLFRSQRNLYISGFSLFFWLVLRRLVTLITQLAKELSNKGVLKTQAENTNKAAKKFMEENEKLKRILKSHGKDEECVLEAENKKLVEDQEKLKTELRKTSDALSKAQNDVMEMKMQSERLSKEYDQLLKEHSELQ

SEQ ID NO: 1420 - protein, 241 aa, Homo Sapiens
MTLQWAAVATFLYAEIGLILIFCLPFIPPQRWQKIFSFNVWGKIATFWNKAFLTIIILLIVLFLDAVREVRKYSSVHTIEKSSTSRPDAYEHTQMKLFRSQRNLYISGFSLFFWLVLRRLVTLITQLAKELSNKGVLKTQAENTNKAAKKFMEENEKLKRILKSHGKDEECVLEAENKKLVEDQEKLKTELRKTSDALSKAQNDVMEMKMQSERLSKEYDQLLKEHSELQDRLERGNKKRL

SEQ ID NO: 1421 - protein, 241 aa, Homo Sapiens; identical to SEQ ID NO: 1420

SEQ ID NO: 1422 - protein, 348 aa, Homo Sapiens
MTLQWAAVATFLYAEIGLILIFCLPFIPPQRWQKIFSFNVWGKIATFWNKAFLTIIILLIVLFLDAVREVRKYSSVHTIEKSSTSRPDAYEHTQMKLFRSQRNLYISGFSLFFWLVLRRLVTLITQLAKELSNKGVLKTQAENTNKAAKKFMEENEKLKRILKSHGKDEECVLEAENKKLVEDQEKLKTELRKTSDALSKAQNDVMEMKMQSERLSKEYDQLLKEHSELQHSSFGEFLSKRSHKNGSIGKQTGSRKGSFRKRQQEKTVNFIKDTCNILCQNDNFVMLASRKFKFRKMHYDRFVIFLMPHIGCIVMALSKYLMMFQIYCKVCIPALKKNISMLNTIFTY

SEQ ID NO: 1423 - protein, 348 aa, Homo Sapiens; identical to SEQ ID NO: 1422

SEQ ID NO: 1424 - protein, 66 aa, Homo Sapiens
MTLQWAAVATFLYAEIGLILIFCLPFIPPQRWQKIFSFNVWGKIATFWNKAFLTIIILLIVLFLEF

SEQ ID NO: 1425 - protein, 163 aa, Homo Sapiens
  misc_feature (1)..(1): Xaa can be any naturally occurring amino acid
XDAYEHTQMKLFRSQRNLYISGFSLFFWLVLRRLVTLITQLAKELSNKGVLKTQAENTNKAAKKFMEENEKLKRILKSHGKDEECVLEAENKKLVEDQEKLKTELRKTSDALSKAQNDVMEMKMQSERLSKEYDQLLKEHSELQKSHSQPGAAAFLVKEVESF

SEQ ID NO: 1426 - protein, 868 aa, Homo Sapiens
MENVLAKALYDNVAESPDELSFRKGDIMTVLEQDTQGLDGWWLCSLHGRQGIVPGNRLKILVGMYDKKPAGPGPGPPATPAQPQPGLHAPAPPASQYTPMLPNTYQPQPDSVYLVPTPSKAQQGLYQVPGPSPQFQSPPAKQTSTFSKQTPHHPFPSPATDLYQVPPGPGGPAQDIYQVPPSAGMGHDIYQVPPSMDTRSWEGTKPPAKVVVPTRVGQGYVYEAAQPEQDEYDIPRHLLAPGPQDIYDVPPVRGLLPSQYGQEVYDTPPMAVKGPNGRDPLLEVYDVPPSVEKGLPPSNHHAVYDVPPSVSKDVPDGPLLREETYDVPPAFAKAKPFDPARTPLVLAAPPPDSPPAEDVYDVPPPAPDLYDVPPGLRRPGPGTLYDVPRERVLPPEVADGGVVDSGVYAVPPPAEREAPAEGKRLSASSTGSTRSSQSASSLEVAGPGREPLELEVAVEALARLQQGVSATVAHLLDLAGSAGATGSWRSPSEPQEPLVQDLQAAVAAVQSAVHELLEFARSAVGNAAHTSDRALHAKLSRQLQKMEDVHQTLVAHGQALDAGRGGSGATLEDLDRLVACSRAVPEDAKQLASFLHGNASLLFRRTKATAPGPEGGGTLHPNPTDKTSSIQSRPLPSPPKFTSQDSPDGQYENSEGGWMEDYDYVHLQGKEEFEKTQKELLEKGSITRQGKSQLELQQLKQFERLEQEVSRPIDHDLANWTPAQPLAPGRTGGLGPSDRQLLLFYLEQCEANLTTLTNAVDAFFTAVATNQPPKIFVAHSKFVILSAHKLVFIGDTLSRQAKAADVRSQVTHYSNLLCDLLRGIVATTKAAALQYPSPSAAQDMVERVKELGHSTQQFRRVLGQLAAA

SEQ ID NO: 1427 - protein, 888 aa, Homo Sapiens
MHCPGEAPLAAPRPTPKDPCLRNVLAKALYDNVAESPDELSFRKGDIMTVLEQDTQGLDGWWLCSLHGRQGIVPGNRLKILVGMYDKKPAGPGPGPPATPAQPQPGLHAPAPPASQYTPMLPNTYQPQPDSVYLVPTPSKAQQGLYQVPGPSPQFQSPPAKQTSTFSKQTPHHPFPSPATDLYQVPPGPGGPAQDIYQVPPSAGMGHDIYQVPPSMDTRSWEGTKPPAKVVVPTRVGQGYVYEAAQPEQDEYDIPRHLLAPGPQDIYDVPPVRGLLPSQYGQEVYDTPPMAVKGPNGRDPLLEVYDVPPSVEKGLPPSNHHAVYDVPPSVSKDVPDGPLLREETYDVPPAFAKAKPFDPARTPLVLAAPPPDSPPAEDVYDVPPPAPDLYDVPPGLRRPGPGTLYDVPRERVLPPEVADGGVVDSGVYAVPPPAEREAPAEGKRLSASSTGSTRSSQSASSLEVAGPGREPLELEVAVEALARLQQGVSATVAHLLDLAGSAGATGSWRSPSEPQEPLVQDLQAAVAAVQSAVHELLEFARSAVGNAAHTSDRALHAKLSRQLQKMEDVHQTLVAHGQALDAGRGGSGATLEDLDRLVACSRAVPEDAKQLASFLHGNASLLFRRTKATAPGPEGGGTLHPNPTDKTSSIQSRPLPSPPKFTSQDSPDGQYENSEGGWMEDYDYVHLQGKEEFEKTQKELLEKGSITRQGKSQLELQQLKQFERLEQEVSRPIDHDLANWTPAQPLAPGRTGGLGPSDRQLLLFYLEQCEANLTTLTNAVDAFFTAVATNQPPKIFVAHSKFVILSAHKLVFIGDTLSRQAKAADVRSQVTHYSNLLCDLLRGIVATTKAAALQYPSPSAAQDMVERVKELGHSTQQFRRVLGQLAAA

SEQ ID NO: 1428 - protein, 888 aa, Homo Sapiens
MLTHRPQEAEQRGRTPGPSFEWNVLAKALYDNVAESPDELSFRKGDIMTVLEQDTQGLDGWWLCSLHGRQGIVPGNRLKILVGMYDKKPAGPGPGPPATPAQPQPGLHAPAPPASQYTPMLPNTYQPQPDSVYLVPTPSKAQQGLYQVPGPSPQFQSPPAKQTSTFSKQTPHHPFPSPATDLYQVPPGPGGPAQDIYQVPPSAGMGHDIYQVPPSMDTRSWEGTKPPAKVVVPTRVGQGYVYEAAQPEQDEYDIPRHLLAPGPQDIYDVPPVRGLLPSQYGQEVYDTPPMAVKGPNGRDPLLEVYDVPPSVEKGLPPSNHHAVYDVPPSVSKDVPDGPLLREETYDVPPAFAKAKPFDPARTPLVLAAPPPDSPPAEDVYDVPPPAPDLYDVPPGLRRPGPGTLYDVPRERVLPPEVADGGVVDSGVYAVPPPAEREAPAEGKRLSASSTGSTRSSQSASSLEVAGPGREPLELEVAVEALARLQQGVSATVAHLLDLAGSAGATGSWRSPSEPQEPLVQDLQAAVAAVQSAVHELLEFARSAVGNAAHTSDRALHAKLSRQLQKMEDVHQTLVAHGQALDAGRGGSGATLEDLDRLVACSRAVPEDAKQLASFLHGNASLLFRRTKATAPGPEGGGTLHPNPTDKTSSIQSRPLPSPPKFTSQDSPDGQYENSEGGWMEDYDYVHLQGKEEFEKTQKELLEKGSITRQGKSQLELQQLKQFERLEQEVSRPIDHDLANWTPAQPLAPGRTGGLGPSDRQLLLFYLEQCEANLTTLTNAVDAFFTAVATNQPPKIFVAHSKFVILSAHKLVFIGDTLSRQAKAADVRSQVTHYSNLLCDLLRGIVATTKAAALQYPSPSAAQDMVERVKELGHSTQQFRRVLGQLAAA

SEQ ID NO: 1429 - protein, 870 aa, Homo Sapiens
MNHLNVLAKALYDNVAESPDELSFRKGDIMTVLEQDTQGLDGWWLCSLHGRQGIVPGNRLKILVGMYDKKPAGPGPGPPATPAQPQPGLHAPAPPASQYTPMLPNTYQPQPDSVYLVPTPSKAQQGLYQVPGPSPQFQSPPAKQTSTFSKQTPHHPFPSPATDLYQVPPGPGGPAQDIYQVPPSAGMGHDIYQVPPSMDTRSWEGTKPPAKVVVPTRVGQGYVYEAAQPEQDEYDIPRHLLAPGPQDIYDVPPVRGLLPSQYGQEVYDTPPMAVKGPNGRDPLLEVYDVPPSVEKGLPPSNHHAVYDVPPSVSKDVPDGPLLREETYDVPPAFAKAKPFDPARTPLVLAAPPPDSPPAEDVYDVPPPAPDLYDVPPGLRRPGPGTLYDVPRERVLPPEVADGGVVDSGVYAVPPPAEREAPAEGKRLSASSTGSTRSSQSASSLEVAGPGREPLELEVAVEALARLQQGVSATVAHLLDLAGSAGATGSWRSPSEPQEPLVQDLQAAVAAVQSAVHELLEFARSAVGNAAHTSDRALHAKLSRQLQKMEDVHQTLVAHGQALDAGRGGSGATLEDLDRLVACSRAVPEDAKQLASFLHGNASLLFRRTKATAPGPEGGGTLHPNPTDKTSSIQSRPLPSPPKFTSQDSPDGQYENSEGGWMEDYDYVHLQGKEEFEKTQKELLEKGSITRQGKSQLELQQLKQFERLEQEVSRPIDHDLANWTPAQPLAPGRTGGLGPSDRQLLLFYLEQCEANLTTLTNAVDAFFTAVATNQPPKIFVAHSKFVILSAHKLVFIGDTLSRQAKAADVRSQVTHYSNLLCDLLRGIVATTKAAALQYPSPSAAQDMVERVKELGHSTQQFRRVLGQLAAA

SEQ ID NO: 1430 - protein, 888 aa, Homo Sapiens
MNHLNVLAKALYDNVAESPDELSFRKGDIMTVLEQDTQGLDGWWLCSLHGRQGIVPGNRLKILVGMYDKKPAGPGPGPPATPAQPQPGLHAPAPPASQYTPMLPNTYQPQPDSVYLVPTPSKAQQGLYQVPGPSPQFQSPPAKQTSTFSKQTPHHPFPSPATDLYQVPPGPGGPAQDIYQVPPSAGMGHDIYQVPPSMDTRSWEGTKPPAKVVVPTRVGQGYVYEAAQPEQDEYDIPRHLLAPGPQDIYDVPPVRGLLPSQYGQEVYDTPPMAVKGPNGRDPLLEVYDVPPSVEKGLPPSNHHAVSKCQGNARARLRLWGVWVYDVPPSVSKDVPDGPLLREETYDVPPAFAKAKPFDPARTPLVLAAPPPDSPPAEDVYDVPPPAPDLYDVPPGLRRPGPGTLYDVPRERVLPPEVADGGVVDSGVYAVPPPAEREAPAEGKRLSASSTGSTRSSQSASSLEVAGPGREPLELEVAVEALARLQQGVSATVAHLLDLAGSAGATGSWRSPSEPQEPLVQDLQAAVAAVQSAVHELLEFARSAVGNAAHTSDRALHAKLSRQLQKMEDVHQTLVAHGQALDAGRGGSGATLEDLDRLVACSRAVPEDAKQLASFLHGNASLLFRRTKATAPGPEGGGTLHPNPTDKTSSIQSRPLPSPPKFTSQDSPDGQYENSEGGWMEDYDYVHLQGKEEFEKTQKELLEKGSITRQGKSQLELQQLKQFERLEQEVSRPIDHDLANWTPAQPLAPGRTGGLGPSDRQLLLFYLEQCEANLTTLTNAVDAFFTAVATNQPPKIFVAHSKFVILSAHKLVFIGDTLSRQAKAADVRSQVTHYSNLLCDLLRGIVATTKAAALQYPSPSAAQDMVERVKELGHSTQQFRRVLGQLAAA

SEQ ID NO: 1431 - protein, 916 aa, Homo Sapiens
MPAKPFLSSVLLSWKVLDFSGPGPQGTGQPCSCGHWAEGQGGPPEPAGGPNVLAKALYDNVAESPDELSFRKGDIMTVLEQDTQGLDGWWLCSLHGRQGIVPGNRLKILVGMYDKKPAGPGPGPPATPAQPQPGLHAPAPPASQYTPMLPNTYQPQPDSVYLVPTPSKAQQGLYQVPGPSPQFQSPPAKQTSTFSKQTPHHPFPSPATDLYQVPPGPGGPAQDIYQVPPSAGMGHDIYQVPPSMDTRSWEGTKPPAKVVVPTRVGQGYVYEAAQPEQDEYDIPRHLLAPGPQDIYDVPPVRGLLPSQYGQEVYDTPPMAVKGPNGRDPLLEVYDVPPSVEKGLPPSNHHAVYDVPPSVSKDVPDGPLLREETYDVPPAFAKAKPFDPARTPLVLAAPPPDSPPAEDVYDVPPPAPDLYDVPPGLRRPGPGTLYDVPRERVLPPEVADGGVVDSGVYAVPPPAEREAPAEGKRLSASSTGSTRSSQSASSLEVAGPGREPLELEVAVEALARLQQGVSATVAHLLDLAGSAGATGSWRSPSEPQEPLVQDLQAAVAAVQSAVHELLEFARSAVGNAAHTSDRALHAKLSRQLQKMEDVHQTLVAHGQALDAGRGGSGATLEDLDRLVACSRAVPEDAKQLASFLHGNASLLFRRTKATAPGPEGGGTLHPNPTDKTSSIQSRPLPSPPKFTSQDSPDGQYENSEGGWMEDYDYVHLQGKEEFEKTQKELLEKGSITRQGKSQLELQQLKQFERLEQEVSRPIDHDLANWTPAQPLAPGRTGGLGPSDRQLLLFYLEQCEANLTTLTNAVDAFFTAVATNQPPKIFVAHSKFVILSAHKLVFIGDTLSRQAKAADVRSQVTHYSNLLCDLLRGIVATTKAAALQYPSPSAAQDMVERVKELGHSTQQFRRVLGQLAAA

SEQ ID NO: 1432 - protein, 57 aa, Homo Sapiens
MPAKPFLSSVLLSWKVLDFSGPGPQGTGQPCSCGHWAEGQGGPPEPAGGPVSQGSSD

SEQ ID NO: 1433 - protein, 57 aa, Homo Sapiens; identical to SEQ ID NO: 1432

SEQ ID NO: 1434 - protein, 722 aa, Homo Sapiens
MQGKNVLAKALYDNVAESPDELSFRKGDIMTVLEQDTQGLDGWWLCSLHGRQGIVPGNRLKILVVVPTRVGQGYVYEAAQPEQDEYDIPRHLLAPGPQDIYDVPPVRGLLPSQYGQEVYDTPPMAVKGPNGRDPLLEVYDVPPSVEKGLPPSNHHAVYDVPPSVSKDVPDGPLLREETYDVPPAFAKAKPFDPARTPLVLAAPPPDSPPAEDVYDVPPPAPDLYDVPPGLRRPGPGTLYDVPRERVLPPEVADGGVVDSGVYAVPPPAEREAPAEGKRLSASSTGSTRSSQSASSLEVAGPGREPLELEVAVEALARLQQGVSATVAHLLDLAGSAGATGSWRSPSEPQEPLVQDLQAAVAAVQSAVHELLEFARSAVGNAAHTSDRALHAKLSRQLQKMEDVHQTLVAHGQALDAGRGGSGATLEDLDRLVACSRAVPEDAKQLASFLHGNASLLFRRTKATAPGPEGGGTLHPNPTDKTSSIQSRPLPSPPKFTSQDSPDGQYENSEGGWMEDYDYVHLQGKEEFEKTQKELLEKGSITRQGKSQLELQQLKQFERLEQEVSRPIDHDLANWTPAQPLAPGRTGGLGPSDRQLLLFYLEQCEANLTTLTNAVDAFFTAVATNQPPKIFVAHSKFVILSAHKLVFIGDTLSRQAKAADVRSQVTHYSNLLCDLLRGIVATTKAAALQYPSPSAAQDMVERVKELGHSTQQFRRVLGQLAAA

SEQ ID NO: 1435 - protein, 870 aa, Homo Sapiens
MSVPNVLAKALYDNVAESPDELSFRKGDIMTVLEQDTQGLDGWWLCSLHGRQGIVPGNRLKILVGMYDKKPAGPGPGPPATPAQPQPGLHAPAPPASQYTPMLPNTYQPQPDSVYLVPTPSKAQQGLYQVPGPSPQFQSPPAKQTSTFSKQTPHHPFPSPATDLYQVPPGPGGPAQDIYQVPPSAGMGHDIYQVPPSMDTRSWEGTKPPAKVVVPTRVGQGYVYEAAQPEQDEYDIPRHLLAPGPQDIYDVPPVRGLLPSQYGQEVYDTPPMAVKGPNGRDPLLEVYDVPPSVEKGLPPSNHHAVYDVPPSVSKDVPDGPLLREETYDVPPAFAKAKPFDPARTPLVLAAPPPDSPPAEDVYDVPPPAPDLYDVPPGLRRPGPGTLYDVPRERVLPPEVADGGVVDSGVYAVPPPAEREAPAEGKRLSASSTGSTRSSQSASSLEVAGPGREPLELEVAVEALARLQQGVSATVAHLLDLAGSAGATGSWRSPSEPQEPLVQDLQAAVAAVQSAVHELLEFARSAVGNAAHTSDRALHAKLSRQLQKMEDVHQTLVAHGQALDAGRGGSGATLEDLDRLVACSRAVPEDAKQLASFLHGNASLLFRRTKATAPGPEGGGTLHPNPTDKTSSIQSRPLPSPPKFTSQDSPDGQYENSEGGWMEDYDYVHLQGKEEFEKTQKELLEKGSITRQGKSQLELQQLKQFERLEQEVSRPIDHDLANWTPAQPLAPGRTGGLGPSDRQLLLFYLEQCEANLTTLTNAVDAFFTAVATNQPPKIFVAHSKFVILSAHKLVFIGDTLSRQAKAADVRSQVTHYSNLLCDLLRGIVATTKAAALQYPSPSAAQDMVERVKELGHSTQQFRRVLGQLAAA

SEQ ID NO: 1436 - protein, 50 aa, Homo Sapiens
MTVLEQDTQGLDGWWLCSLHGRQGIVPGNRLKILVGMYDKKPAGPGPGPP

SEQ ID NO: 1437 - protein, 59 aa, Homo Sapiens
MTVLEQDTQGLDGWWLCSLHGRQGIVPGNRLKILVGMYDKKPAGPGPGPPATPAQPQPG

SEQ ID NO: 1438 - protein, 80 aa, Homo Sapiens
MTVLEQDTQGLDGWWLCSLHGRQGIVPGNRLKILVGMYDKKPAGPGPGPPATPAQPQPGLHAPAPPASQYTPMLPNTYQP

SEQ ID NO: 1439 - protein, 120 aa, Homo Sapiens
MTVLEQDTQGLDGWWLCSLHGRQGIVPGNRLKILVGMYDKKPAGPGPGPPATPAQPQPGLHAPAPPASQYTPMLPNTYQPQPDSVYLVPTPSKAQQGLYQVPGPSPQFQSPPAKQTSTFS

SEQ ID NO: 1440 - protein, 128 aa, Homo Sapiens
MTVLEQDTQGLDGWWLCSLHGRQGIVPGNRLKILVGMYDKKPAGPGPGPPATPAQPQPGLHAPAPPASQYTPMLPNTYQPQPDSVYLVPTPSKAQQGLYQVPGPSPQFQSPPAKQTSTFSKQTPHHPF

SEQ ID NO: 1441 - protein, 133 aa, Homo Sapiens
MTVLEQDTQGLDGWWLCSLHGRQGIVPGNRLKILVGMYDKKPAGPGPGPPATPAQPQPGLHAPAPPASQYTPMLPNTYQPQPDSVYLVPTPSKAQQGLYQVPGPSPQFQSPPAKQTSTFSKQTPHHPFPSPAT

SEQ ID NO: 1442 - protein, 135 aa, Homo Sapiens
MTVLEQDTQGLDGWWLCSLHGRQGIVPGNRLKILVGMYDKKPAGPGPGPPATPAQPQPGLHAPAPPASQYTPMLPNTYQPQPDSVYLVPTPSKAQQGLYQVPGPSPQFQSPPAKQTSTFSKQTPHHPFPSPATDL

SEQ ID NO: 1443 - protein, 238 aa, Homo Sapiens
  misc_feature (1)..(1): Xaa can be any naturally occurring amino acid
XPQFQSPPAKQTSTFSKQTPHHPFPSPATDLYQVPPGPGGPAQDIYQVPPSAGMGHDIYQVPPSMDTRSWEGTKPPAKVVVPTRVGQGYVYEAAQPEQDEYDIPRHLLAPGPQDIYDVPPVRGLLPSQYGQEVYDVPPSVSKDVPDGPLLREETYDVPPAFAKAKPFDPARTPLVLAAPPPDSPPAEDVYDVPPPAPDLYDVPPGLRRPGPGTLYDVPRERVLPPEVADGGVVDSGVY

SEQ ID NO: 1444 - protein, 120 aa, Homo Sapiens
AVQFTGWSSSCILHFPEVLHDFHSLQTLPSLLQRIGNPNETQNNSTSWPVFKSTEQKYLTLNTESTRIMTKLRAQQCRFWTSFFPKVLEMTEPICCYCEPGTALAARAAQMKMTGSAYSQ

SEQ ID NO: 1445 - protein, 132 aa, Homo Sapiens
AVQFTGWSSSCILHFPEVLHDFHSLQTLPSLLQRIGNPNETQNNSTSWPVFKSTEQKYLTLNTESTRIMTKLRAQQCRFWTSFFPKVLEMTGNIDEAEWEWKAGFHRWNNYMMDWKNQFNDYTSKKESCVGL

SEQ ID NO: 1446 - protein, 602 aa, Homo Sapiens
MHSKVTIICIRFLFWFLLLCMLIGKSHTEDDIIIATKNGKVRGMNLTVFGGTVTAFLGIPYAQPPLGRLRFKKPQSLTKWSDIWNATKYANSCCQNIDQSFPGFHGSEMWNPNTDLSEDCLYLNVWIPAPKPKNATVLIWIYGGGFQTGTSSLHVYDGKFLARVERVIVVSMNYRVGALGFLALPGNPEAPGNMGLFDQQLALQWVQKNIAAFGGNPKSVTLFGESAGAASVSLHLLSPGSHSLFTRAILQSGSFNAPWAVTSLYEARNRTLNLAKLTGCSRENETEIIKCLRNKDPQEILLNEAFVVPYGTPLSVNFGPTVDGDFLTDMPDILLELGQFKKTQILVGVNKDEGTAFLVYGAPGFSKDNNSIITRKEFQEGLKIFFPGVSEFGKESILFHYTDWVDDQRPENYREALGDVVGDYNFICPALEFTKKFSEWGNNAFFYYFEHRSSKLPWPEWMGVMHGYEIEFVFGLPLERRDNYTKAEEILSRSIVKRWANFAKYGNPNETQNNSTSWPVFKSTEQKYLTLNTESTRIMTKLRAQQCRFWTSFFPKVLEMTGNIDEAEWEWKAGFHRWNNYMMDWKNQFNDYTSKKESCVGL

SEQ ID NO: 1447 - protein, 525 aa, Homo Sapiens
MHSKVTIICIRFLFWFLLLCMLIGKSHTEDDIIIATKNGKVRGMNLTVFGGTVTAFLGIPYAQPPLGRLRFKKPQSLTKWSDIWNATKYANSCCQNIDQSFPGFHGSEMWNPNTDLSEDCLYLNVWIPAPKPKNATVLIWIYGGGFQTGTSSLHVYDGKFLARVERVIVVSMNYRVGALGFLALPGNPEAPGNMGLFDQQLALQWVQKNIAAFGGNPKSVTLFGESAGAASVSLHLLSPGSHSLFTRAILQSGSFNAPWAVTSLYEARNRTLNLAKLTGCSRENETEIIKCLRNKDPQEILLNEAFVVPYGTPLSVNFGPTVDGDFLTDMPDILLELGQFKKTQILVGVNKDEGTAFLVYGAPGFSKDNNSIITRKEFQEGLKIFFPGVSEFGKESILFHYTDWVDDQRPENYREALGDVVGDYNFICPALEFTKKFSEWGNNAFFYYFEHRSSKLPWPEWMGVMHGYEIEFVFGLPLERRDNYTKAEEILSRSIVKRWANFAKYGCSSSTILNYVLETEPVVLI

SEQ ID NO: 1448 - protein, 562 aa, Homo Sapiens
MHSKVTIICIRFLFWFLLLCMLIGKSHTEDDIIIATKNGKVRGMNLTVFGGTVTAFLGIPYAQPPLGRLRFKKPQSLTKWSDIWNATKYANSCCQNIDQSFPGFHGSEMWNPNTDLSEDCLYLNVWIPAPKPKNATVLIWIYGGGFQTGTSSLHVYDGKFLARVERVIVVSMNYRVGALGFLALPGNPEAPGNMGLFDQQLALQWVQKNIAAFGGNPKSVTLFGESAGAASVSLHLLSPGSHSLFTRAILQSGSFNAPWAVTSLYEARNRTLNLAKLTGCSRENETEIIKCLRNKDPQEILLNEAFVVPYGTPLSVNFGPTVDGDFLTDMPDILLELGQFKKTQILVGVNKDEGTAFLVYGAPGFSKDNNSIITRKEFQEGLKIFFPGVSEFGKESILFHYTDWVDDQRPENYREALGDVVGDYNFICPALEFTKKFSEWGNNAFFYYFEHRSSKLPWPEWMGVMHGYEIEFVFGLPLERRDNYTKAEEILSRSIVKRWANFAKYGNPNETQNNSTSWPVFKSTEQKYLTLNTESTRIMTKLRAQQCRFWTSFFPKVLEMTG

SEQ ID NO: 1449 - protein, 218 aa, Homo Sapiens
MAVVAAAAGWLLRLRAAGAEGHWRRLPGAGLARGFLHPAATVEDAAQRRQVAHFTFQPDPEPREYGQTQKMNLFQSVTSALDNSLAKDPTAVIFGEDVAFGGVFRCTVGLRDKYGKDRVFNTPLCEQGIVGFGIGIAVTGATAIAEIQFADYIFPAFDQIVNEAAKYRYRSGDLFNCGSLTIRSPWGCVGHGALYHSQSPEAFFAHCPGIKIKVISLS

SEQ ID NO: 1450 - protein, 392 aa, Homo Sapiens
MAVVAAAAGWLLRLRAAGAEGHWRRLPGAGLARGFLHPAATVEDAAQRRQVAHFTFQPDPEPREYGQTQKMNLFQSVTSALDNSLAKDPTAVIFGEDVAFGGVFRCTVGLRDKYGKDRVFNTPLCEQGIVGFGIGIAVTGATAIAEIQFADYIFPAFDQIVNEAAKYRYRSGDLFNCGSLTIRSPWGCVGHGALYHSQSPEAFFAHCPGIKVVIPRSPFQAKGLLLSCIEDKNPCIFFEPKILYRAAAEEVPIEPYNIPLSQAEVIQEGSDVTLVAWGTQVHVIREVASMAKEKLGVSCEVIDLRTIIPWDVDTICKSVIKTGRLLISHEAPLTGGFASEISSTVQEECFLNLEAPISRVCGYDTPFPHIFEPFYIPDKWKCYDALRKMINY

SEQ ID NO: 1451 - protein, 392 aa, Homo Sapiens; identical to SEQ ID NO: 1450

SEQ ID NO: 1452 - protein, 329 aa, Homo Sapiens
MCGATSFLHECTRLILVTTQNAEFLQKGLQVHTCFGVYPHASVWHDCASQKKGCAVYLHVSVEFNKLIPENGFIKFHQVRRVMTILFLTMVISYFGCMKAAPMKEANIRGQGGLAYPGVRTHGTLESVNGPKAGSRGLTSLADTFEHVIEELLDEDQKVRPNEENNKDADLYTSRVMLSSQVPLEPPLLFLLEEYKNYLDAANMSMRVRRHSDPARRGELSVCDSISEWVTAADKKTAVDMSGGTVTVLEKVPVSKGQLKQYFYETKCNPMGYTKEGCRGIDKRHWNSQCRTTQSYVRALTMDSKKRIGWRFIRIDTSCVCTLTIKRGR

SEQ ID NO: 1453 - protein, 77 aa, Homo Sapiens
MCGATSFLHECTRLILVTTQNAEFLQKGLQVHTCFGVYPHASVWHDCASQKKGCAVYLHVSVEFNKLIPENGFIKGW

SEQ ID NO: 1454 - protein, 255 aa, Homo Sapiens
MFHQVRRVMTILFLTMVISYFGCMKAAPMKEANIRGQGGLAYPGVRTHGTLESVNGPKAGSRGLTSLADTFEHVIEELLDEDQKVRPNEENNKDADLYTSRVMLSSQVPLEPPLLFLLEEYKNYLDAANMSMRVRRHSDPARRGELSVCDSISEWVTAADKKTAVDMSGGTVTVLEKVPVSKGQLKQYFYETKCNPMGYTKEGCRGIDKRHWNSQCRTTQSYVRALTMDSKKRIGWRFIRIDTSCVCTLTIKRGR

SEQ ID NO: 1455 - protein, 262 aa, Homo Sapiens
MQSREEEWFHQVRRVMTILFLTMVISYFGCMKAAPMKEANIRGQGGLAYPGVRTHGTLESVNGPKAGSRGLTSLADTFEHVIEELLDEDQKVRPNEENNKDADLYTSRVMLSSQVPLEPPLLFLLEEYKNYLDAANMSMRVRRHSDPARRGELSVCDSISEWVTAADKKTAVDMSGGTVTVLEKVPVSKGQLKQYFYETKCNPMGYTKEGCRGIDKRHWNSQCRTTQSYVRALTMDSKKRIGWRFIRIDTSCVCTLTIKRGR

SEQ ID NO: 1456 - protein, 247 aa, Homo Sapiens
MTILFLTMVISYFGCMKAAPMKEANIRGQGGLAYPGVRTHGTLESVNGPKAGSRGLTSLADTFEHVIEELLDEDQKVRPNEENNKDADLYTSRVMLSSQVPLEPPLLFLLEEYKNYLDAANMSMRVRRHSDPARRGELSVCDSISEWVTAADKKTAVDMSGGTVTVLEKVPVSKGQLKQYFYETKCNPMGYTKEGCRGIDKRHWNSQCRTTQSYVRALTMDSKKRIGWRFIRIDTSCVCTLTIKRGR

SEQ ID NO: 1457 - protein, 247 aa, Homo Sapiens; identical to SEQ ID NO: 1456

SEQ ID NO: 1458 - protein, 247 aa, Homo Sapiens; identical to SEQ ID NO: 1456

SEQ ID NO: 1459 - protein, 247 aa, Homo Sapiens; identical to SEQ ID NO: 1456

SEQ ID NO: 1460 - protein, 247 aa, Homo Sapiens; identical to SEQ ID NO: 1456

SEQ ID NO: 1461 - protein, 247 aa, Homo Sapiens; identical to SEQ ID NO: 1456

SEQ ID NO: 1462 - protein, 247 aa, Homo Sapiens; identical to SEQ ID NO: 1456

SEQ ID NO: 1463 - protein, 247 aa, Homo Sapiens; identical to SEQ ID NO: 1456

SEQ ID NO: 1464 - protein, 247 aa, Homo Sapiens; identical to SEQ ID NO: 1456

SEQ ID NO: 1465 - protein, 247 aa, Homo Sapiens; identical to SEQ ID NO: 1456

SEQ ID NO: 1466 - protein, 247 aa, Homo Sapiens; identical to SEQ ID NO: 1456

SEQ ID NO: 1467 - protein, 247 aa, Homo Sapiens; identical to SEQ ID NO: 1456

SEQ ID NO: 1468 - protein, 247 aa, Homo Sapiens; identical to SEQ ID NO: 1456

SEQ ID NO: 1469 - protein, 247 aa, Homo Sapiens; identical to SEQ ID NO: 1456

SEQ ID NO: 1470 - protein, 100 aa, Homo Sapiens
MRALTLLALLALAALCIAGQAGAKPSGAESSKGAAFVSKQEGSEVVKRPRRYLYQWLGAPVPYPDPLEPRREVCELNPDCDELADHIGFQEAYRRFYGPV

SEQ ID NO: 1471 - protein, 368 aa, Homo Sapiens
MWPLWRLVSLLALSQALPFEQRGFWDFTLDDGPFMMNDEEASGADTSGVLDPDSVTPTYSAMCPFGCHCHLRVVQCSDLGLKSVPKEISPDTTLLDLQNNDISELRKDDFKGLQHLYALVLVNNKISKIHEKAFSPLRKLQKLYISKNHLVEIPPNLPSSLVELRIHDNRIRKVPKGVFSGLRNMNCIEMGGNPLENSGFEPGAFDGLKLNYLRISEAKLTGIPKDLPETLNELHLDHNKIQAIELEDLLRYSKLYRLGLGHNQIRMIENGSLSFLPTLRELHLDNNKLARVPSGLPDLKLLQVVYLHSNNITKVGVNDFCPMGFGVKRAYYNGISLFNNPVPYWEVQPATFRCVTDRLAIQFGNYKK

SEQ ID NO: 1472 - protein, 238 aa, Homo Sapiens
MWPLWRLVSLLALSQALPFEQRGFWDFTLDDGPFMMNDEEASGADTSGVLDPDSVTPTYSAMCPFGCHCHLRVVQCSDLGLKSVPKEISPDTTLLDLQNNDISELRKDDFKGLQHLYVRSWEEPAGLQQRAGVRALVLVNNKISKIHEKAFSPLRKLQKLYISKNHLVEIPPNLPSSLVELRIHDNRIRKVPKGVFSGLRNMNCIEMGGNPLENSGFEPGAFDGLKLNYLRISEAKLT

SEQ ID NO: 1473 - protein, 121 aa, Homo Sapiens
MAVKKIAIFGATGQTGLTTLAQAVQAGYEVTVLVRDSSRLPSEGPRPAHVVVGDVLQAADVDKTVAGQDAVIVLLGTRNDLSPTTVMSEGARNIVAAMKAHGVDKLSCSGTLPRCPHDCRL

SEQ ID NO: 1474 - protein, 206 aa, Homo Sapiens
MAVKKIAIFGATGQTGLTTLAQAVQAGYEVTVLVRDSSRLPSEGPRPAHVVVGDVLQAADVDKTVAGQDAVIVLLGTRNDLSPTTVMSEGARNIVAAMKAHGVDKVVACTSAFLLWDPTKVPPRLQAVTDDHIRMHKVLRESGLKYVAVMPPHIGDQPLTGAYTVTLDGRGPSRVISKHDLGHFMLRCLTTDEYDGHSTYPSHQYQ

SEQ ID NO: 1475 - protein, 163 aa, Homo Sapiens
MAVKKIAIFGATGQTGLTTLAQAVQAGYEVTVLVRDSSRLPSEGPRPAHVVVGDVLQAADVDKTVAGQDAVIVLLGTRNDLSPTTVMSEGARNIVAAMKAHGVDKVVACTSGDQPLTGAYTVTLDGRGPSRVISKHDLGHFMLRCLTTDEYDGHSTYPSHQYQ

SEQ ID NO: 1476 - protein, 154 aa, Homo Sapiens
MAVKKIAIFGATGQTGLTTLAQAVQAGYEVTVLVRDSSRLPSEGPRPAHVVVGDVLQAADVDKTVAGQDAVIVLLGTRNDLSPTTVMSEGARNIVAAMKAHGVDKVVACTSGGWWDHGGGAELGGTGEAAQGPLKGDAEAIPCYCAFTEHQLCA

SEQ ID NO: 1477 - protein, 245 aa, Homo Sapiens
MAVKKIAIFGATGQTGLTTLAQAVQAGYEVTVLVRDSSRLPSEGPRPAHVVVGDVLQAADVDKTVAGQDAVIVLLGTRNDLSTEPPLCPRPSPTPRPPAPPPPPAPPLPPLPPPPPTSDSHSLSPLRSHDSDVRGRPEHCGSHEGSWCGQAFLLWDPTKVPPRLQAVTDDHIRMHKVLRESGLKYVAVMPPHIGDQPLTGAYTVTLDGRGPSRVISKHDLGHFMLRCLTTDEYDGHSTYPSHQYQ

SEQ ID NO: 1478 - protein, 730 aa, Homo Sapiens
MPGVARLPLLLGLLLLPRPGRPLDLADYTYDLAEEDDSEPLNYKDPCKAAAFLGDIALDEEDLRAFQVQQAVDLRRHTARKSSIKAAVPGNTSTPSCQSTNGQPQRGACGRWRGRSRSRRAATSRPERVWPDGVIPFVIGGNFTGSQRAVFRQAMRHWEKHTCVTFLERTDEDSYIVFTYRPCGCCSYVGRRGGGPQAISIGKNCDKFGIVVHELGHVVGFWHEHTRPDRDRHVSIVRENIQPGQEYNFLKMEPQEVESLGETYDFDSIMHYARNTFSRGIFLDTIVPKYEVNGVKPPIGQRTRLSKGDIAQARKLYKCPACGETLQDSTGNFSSPEYPNGYSAHMHCVWRISVTPGEKIILNFTSLDLYRSRLCWYDYVEVRDGFWRKAPLRGRFCGSKLPEPIVSTDSRLWVEFRSSSNWVGKGFFAVYEAICGGDVKKDYGHIQSPNYPDDYRPSKVCIWRIQVSEGFHVGLTFQSFEIERHDSCAYDYLEVRDGHSESSTLIGRYCGYEKPDDIKSTSSRLWLKFVSDGSINKAGFAVNFFKEVDECSRPNRGGCEQRCLNTLGSYKCSCDPGYELAPDKRRCEAACGGFLTKLNGSITSPGWPKEYPPNKNCIWQLVAPTQYRISLQFDFFETEGNDVCKYDFVEVRSGLTADSKLHGKFCGSEKPEVITSQYNNMRVEFKSDNTVSKKGFKAHFFSEKRPALQPPRGRPHQLKFRVQKRNRTPQ

SEQ ID NO: 1479 - protein, 986 aa, Homo Sapiens
MPGVARLPLLLGLLLLPRPGRPLDLADYTYDLAEEDDSEPLNYKDPCKAAAFLGDIALDEEDLRAFQVQQAVDLRRHTARKSSIKAAVPGNTSTPSCQSTNGQPQRGACGRWRGRSRSRRAATSRPERVWPDGVIPFVIGGNFTGSQRAVFRQAMRHWEKHTCVTFLERTDEDSYIVFTYRPCGCCSYVGRRGGGPQAISIGKNCDKFGIVVHELGHVVGFWHEHTRPDRDRHVSIVRENIQPGQEYNFLKMEPQEVESLGETYDFDSIMHYARNTFSRGIFLDTIVPKYEVNGVKPPIGQRTRLSKGDIAQARKLYKCPACGETLQDSTGNFSSPEYPNGYSAHMHCVWRISVTPGEKIILNFTSLDLYRSRLCWYDYVEVRDGFWRKAPLRGRFCGSKLPEPIVSTDSRLWVEFRSSSNWVGKGFFAVYEAICGGDVKKDYGHIQSPNYPDDYRPSKVCIWRIQVSEGFHVGLTFQSFEIERHDSCAYDYLEVRDGHSESSTLIGRYCGYEKPDDIKSTSSRLWLKFVSDGSINKAGFAVNFFKEVDECSRPNRGGCEQRCLNTLGSYKCSCDPGYELAPDKRRCEAACGGFLTKLNGSITSPGWPKEYPPNKNCIWQLVAPTQYRISLQFDFFETEGNDVCKYDFVEVRSGLTADSKLHGKFCGSEKPEVITSQYNNMRVEFKSDNTVSKKGFKAHFFSDKDECSKDNGGCQQDCVNTFGSYECQCRSGFVLHDNKHDCKEAGCDHKVTSTSGTITSPNWPDKYPSKKECTWAISSTPGHRVKLTFMEMDIESQPECAYDHLEVFDGRDAKAPVLGRFCGSKKPEPVLATGSRMFLRFYSDNSVQRKGFQASHATECGGQVRADVKTKDLYSHAQFGDNNYPGGVDCEWVIVAEEGYGVELVFQTFEVEEETDCGYDYMELFDGYDSTAPRLGRYCGSGPPEEVYSAGDSVLVKFHSDDTITKKGFHLRYTSTKFQDTLHSRK

SEQ ID NO: 1480 - protein, 622 aa, Homo Sapiens
MPGVARLPLLLGLLLLPRPGRPLDLADYTYDLAEEDDSEPLNYKDPCKAAAFLGDIALDEEDLRAFQVQQAVDLRRHTARKSSIKAAVPGNTSTPSCQSTNGQPQRGACGRWRGRSRSRRAATSRPERVWPDGVIPFVIGGNFTGSQRAVFRQAMRHWEKHTCVTFLERTDEDSYIVFTYRPCGCCSYVGRRGGGPQAISIGKNCDKFGIVVHELGHVVGFWHEHTRPDRDRHVSIVRENIQPGQEYNFLKMEPQEVESLGETYDFDSIMHYARNTFSRGIFLDTIVPKYEVNGVKPPIGQRTRLSKGDIAQARKLYKCPACGETLQDSTGNFSSPEYPNGYSAHMHCVWRISVTPGEKIILNFTSLDLYRSRLCWYDYVEVRDGFWRKAPLRGRFCGSKLPEPIVSTDSRLWVEFRSSSNWVGKGFFAVYEAICGGDVKKDYGHIQSPNYPDDYRPSKVCIWRIQVSEGFHVGLTFQSFEIERHDSCAYDYLEVRDGHSESSTLIGRYCGYEKPDDIKSTSSRLWLKFVSDGSINKAGFAVNFFKEVDECSRPNRGGCEQRCLNTLGSYKCSCDPGYELAPDKRRCEGCYDLQVGKPLLWDRHCFRLSTHGPEMLGTALRG

SEQ ID NO: 1481 - protein, 717 aa, Homo Sapiens
MPGVARLPLLLGLLLLPRPGRPLDLADYTYDLAEEDDSEPLNYKDPCKAAAFLGDIALDEEDLRAFQVQQAVDLRRHTARKSSIKAAVPGNTSTPSCQSTNGQPQRGACGRWRGRSRSRRAATSRPERVWPDGVIPFVIGGNFTGSQRAVFRQAMRHWEKHTCVTFLERTDEDSYIVFTYRPCGCCSYVGRRGGGPQAISIGKNCDKFGIVVHELGHVVGFWHEHTRPDRDRHVSIVRENIQPGQEYNFLKMEPQEVESLGETYDFDSIMHYARNTFSRGIFLDTIVPKYEVNGVKPPIGQRTRLSKGDIAQARKLYKCPACGETLQDSTGNFSSPEYPNGYSAHMHCVWRISVTPGEKIILNFTSLDLYRSRLCWYDYVEVRDGFWRKAPLRGRFCGSKLPEPIVSTDSRLWVEFRSSSNWVGKGFFAVYEAICGGDVKKDYGHIQSPNYPDDYRPSKVCIWRIQVSEGFHVGLTFQSFEIERHDSCAYDYLEVRDGHSESSTLIGRYCGYEKPDDIKSTSSRLWLKFVSDGSINKAGFAVNFFKEVDECSRPNRGGCEQRCLNTLGSYKCSCDPGYELAPDKRRCEAACGGFLTKLNGSITSPGWPKEYPPNKNCIWQLVAPTQYRISLQFDFFETEGNDVCKYDFVEVRSGLTADSKLHGKFCGSEKPEVITSQYNNMRVEFKSDNTVSKKGFKAHFFSGGELFGLLGHPPRRP

SEQ ID NO: 1482 - protein, 730 aa, Homo Sapiens; identical to SEQ ID NO: 1478

SEQ ID NO: 1483 - protein, 302 aa, Homo Sapiens
MPGVARLPLLLGLLLLPRPGRPLDLADYTYDLAEEDDSEPLNYKDPCKAAAFLGDIALDEEDLRAFQVQQAVDLRRHTARKSSIKAAVPGNTSTPSCQSTNGQPQRGACGRWRGRSRSRRAATSRPERVWPDGVIPFVIGGNFTGSQRAVFRQAMRHWEKHTCVTFLERTDEDSYIVFTYRPCGCCSYVGRRGGGPQAISIGKNCDKFGIVVHELGHVVGFWHEHTRPDRDRHVSIVRENIQPGVLHSSLLLLSCGSRNGASFPCSLESSIHQALCWTGLFLRPSPFPRLPLAAPRTLRAGV

SEQ ID NO: 1484 - protein, 302 aa, Homo Sapiens; identical to SEQ ID NO: 1483

SEQ ID NO: 1485 - protein, 189 aa, Homo Sapiens
MPGVARLPLLLGLLLLPRPGRPLDLADYTYDLAEEDDSEPLNYKDPCKAAAFLGDIALDEEDLRAFQVQQAVDLRRHTARKSSIKAAVPGNTSTPSCQSTNGQPQRGACGRWRGRSRSRRAATSRPERVWPDGVIPFVIGGNFTGSQRAVFRQAMRHWEKHTCVTFLERTDEDSYIVFTYRPCGSGPPP

SEQ ID NO: 1486 - protein, 189 aa, Homo Sapiens; identical to SEQ ID NO: 1485

SEQ ID NO: 1487 - protein, 189 aa, Homo Sapiens; identical to SEQ ID NO: 1485

SEQ ID NO: 1488 - protein, 189 aa, Homo Sapiens; identical to SEQ ID NO: 1485

SEQ ID NO: 1489 - protein, 61 aa, Homo Sapiens
MPGVARLPLLLGLLLLPRPGRPLDLADYTYDLAEEDDSEPLNYKDPCKLPFLGTLPWTKRT

SEQ ID NO: 1490 - protein, 424 aa, Homo Sapiens
MGSLVLTLCALFCLAAYLVSGSPIMNLEQSPLEEDMSLFGDVFSEQDGVDFNTLLQSMKDEFLKTLNLSDIPTQDSAKVDPPEYMLELYNKFATDRTSMPSANIIRSFKNEDLFSQPVSFNGLRKYPLLFNVSIPHHEEVIMAELRLYTLVQRDRMIYDGVDRKITIFEVLESKGDNEGERNMLVLVSGEIYGTNSEWETFDVTDAIRRWQKSGSSTHQLEVHIESKHDEAEDASSGRLEIDTSAQNKHNPLLIVFSDDQSSDKERKEELNEMISHEQLPELDNLGLDSFSSGPGEEALLQMRSNIIYDSTARIRRNAKGNYCKRTPLYIDFKEIGWDSWIIAPPGYEAYECRGVCNYPLAEHLTPTKHAIIQALVHLKNSQKASKACCVPTKLEPISILYLDKGVVTYKFKYEGMAVSECGCR

SEQ ID NO: 1491 - protein, 392 aa, Homo Sapiens
MVLLSILRILFLCELVLFMEHRAQMAEGGQSSIALLAEAPTLPLIEELLEESPGEQPRKPRLLGHSLRYMLELYRRSADSHGHPRENRTIGATMVRLVKPLTNVARPHRGTWHIQILGFPLRPNRGLYQLVRATVVYRHHLQLTRFNLSCHVEPWVQKNPTNHFPSSEGDSSKPSLMSNAWKEMDITQLVQQRFWNNKGHRILRLRFMCQQQKDSGGLELWHGTSSLDIAFLLLYFNDTHKSIRKAKFLPRGMEEFMERESLLRRTRQADGISAEVTASSSKHSGPENNQCSLHPFQISFRQLGWDHWIIAPPFYTPNYCKGTCLRVLRDGLNSPNHAIIQNLINQLVDQSVPRPSCVPYKYVPISVLMIEANGSILYKEYEGMIAESCTCR

SEQ ID NO: 1492 - protein, 396 aa, Homo Sapiens
MVAGTRCLLALLLPQVLLGGAAGLVPELGRRKFAAASSGRPSSQPSDEVLSEFELRLLSMFGLKQRPTPSRDAVVPPYMLDLYRRHSGQPGSPAPDHRLERAASRANTVRSFHHEESLEELPETSGKTTRRFFFNLSSIPTEEFITSAELQVFREQMQDALGNNSSFHHRINIYEIIKPATANSKFPVTRLLDTRLVNQNASRWESFDVTPAVMRWTAQGHANHGFVVEVAHLEEKQGVSKRHVRISRSLHQDEHSWSQIRPLLVTFGHDGKGHPLHKREKRQAKHKQRKRLKSSCKRHPLYVDFSDVGWNDWIVAPPGYHAFYCHGECPFPLADHLNSTNHAIVQTLVNSVNSKIPKACCVPTELSAISMLYLDENEKVVLKNYQDMVVEGCGCR

SEQ ID NO: 1493 - protein, 472 aa, Homo Sapiens
MAGASRLLFLWLGCFCVSLAQGERPKPPFPELRKAVPGDRTAGGGPDSELQPQDKVSEHMLRLYDRYSTVQAARTPGSLEGGSQPWRPRLLREGNTVRSFRAAAAETLERKGLYIFNLTSLTKSENILSATLYFCIGELGNISLSCPVSGGCSHHAQRKHIQIDLSAWTLKFSRNQSQLLGHLSVDMAKSHRDIMSWLSKDITQLLRKAKENEEFLIGFNITSKGRQLPKRRLPFPEPYILVYANDAAISEPESVVSSLQGHRNFPTGTVPKWDSHIRAALSIERRKKRSTGVLLPLQNNELPGAEYQYKKDEVWEERKPYKTLQAQAPEKSKNKKKQRKGPHRKSQTLQFDEQTLKKARRKQWIEPRNCARRYLKVDFADIGWSEWIISPKSFDAYYCSGACQFPMPKSLKPSNHATIQSIVRAVGVVPGIPEPCCVPEKMSSLSILFFDENKNVVLKVYPNMTVESCACR

SEQ ID NO: 1494 - protein, 104 aa, Homo Sapiens
LIPETGKKKVAEIQGHAGGRRSGQSHELLRDFEATLLQMFGLRRRPQPSKSAVIPDYMRDLYRLQSGEEEEEQIHSTGLEYPERPASRANTVRSFHHEASLRTR

SEQ ID NO: 1495 - protein, 271 aa, Homo Sapiens
MFGLRRRPQPSKSAVIPDYMRDLYRLQSGEEEEEQIHSTGLEYPERPASRANTVRSFHHEEHLENIPGTSENSAFRFLFNLSSIPENEVISSAELRLFREQVDQGPDWERGFHRINIYEVMKPPAEVVPGHLITRLLDTRLVHHNVTRWETFDVSPAVLRWTREKQPNYGLAIEVTHLHQTRTHQGQHVRISRSLPQGSGNWAQLRPLLVTFGHDGRGHALTRRRRAKRSPKHHSQRARKKNKNCRRHSLYVDFSDVGWNDWIVAPPGYQA

SEQ ID NO: 1496 - protein, 110 aa, Homo Sapiens
MIPGNRMLMVVLLCQVLLGGASHASLIPETGKKKVAEIQGHAGGRRSGQSHELLRDFEATLLQMFGLRRRPQPSKSAVIPDYMRDLYRLQSGEEEEEQIHSTGLEYPERP

SEQ ID NO: 1497 - protein, 408 aa, Homo Sapiens
MIPGNRMLMVVLLCQVLLGGASHASLIPETGKKKVAEIQGHAGGRRSGQSHELLRDFEATLLQMFGLRRRPQPSKSAVIPDYMRDLYRLQSGEEEEEQIHSTGLEYPERPASRANTVRSFHHEEHLENIPGTSENSAFRFLFNLSSIPENEVISSAELRLFREQVDQGPDWERGFHRINIYEVMKPPAEVVPGHLITRLLDTRLVHHNVTRWETFDVSPAVLRWTREKQPNYGLAIEVTHLHQTRTHQGQHVRISRSLPQGSGNWAQLRPLLVTFGHDGRGHALTRRRRAKRSPKHHSQRARKKNKNCRRHSLYVDFSDVGWNDWIVAPPGYQAFYCHGDCPFPLADHLNSTNHAIVQTLVNSVNSSIPKACCVPTELSAISMLYLDEYDKVVLKNYQEMVVEGCGCR

SEQ ID NO: 1498 - protein, 408 aa, Homo Sapiens; identical to SEQ ID NO: 1497

SEQ ID NO: 1499 - protein, 408 aa, Homo Sapiens; identical to SEQ ID NO: 1497

SEQ ID NO: 1500 - protein, 408 aa, Homo Sapiens; identical to SEQ ID NO: 1497

SEQ ID NO: 1501 - protein, 29 aa, Homo Sapiens
NTVRSFHHEGQSLPPVCVGEGWWDWLEGQ

SEQ ID NO: 1502 - protein, 513 aa, Homo Sapiens
MPGLGRRAQWLCWWWGLLCSCCGPPPLRPPLPAAAAAAAGGQLLGDGGSPGRTEQPPPSPQSSSGFLYRRLKTQEKREMQKEILSVLGLPHRPRPLHGLQQPQPPALRQQEEQQQQQQLPRGEPPPGRLKSAPLFMLDLYNALSADNDEDGASEGERQQSWPHEAASSSQRRQPPPGAAHPLNRKSLLAPGSGSGGASPLTSAQDSAFLNDADMVMSFVNLVEYDKEFSPRQRHHKEFKFNLSQIPEGEVVTAAEFRIYKDCVMGSFKNQTFLISIYQVLQEHQHRDSDLFLLDTRVVWASEEGWLEFDITATSNLWVVTPQHNMGLQLSVVTRDGVHVHPRAAGLVGRDGPYDKQPFMVAFFKVSEVHVRTTRSASSRRRQQSRNRSTQSQDVARVSSASDYNSSELKTACRKHELYVSFQDLGWQDWIIAPKGYAANYCDGECSFPLNAHMNATNHAIVQTLVHLMNPEYVPKPCCAPTKLNAISVLYFDDNSNVILKKYRNMVVRACGCH

SEQ ID NO: 1503 - protein, 365 aa, Homo Sapiens
MHVRSLRAAAPHSFVALWAPLFLLRSALADFSLDNEVHSSFIHRRLRSQERREMQREILSILGLPHRPRPHLQGKHNSAPMFMLDLYNAMAVEEGGGPGGQGFSYPYKAVFSTQGPPLASLQDSHFLTDADMVMSFVNLVEHDKEFFHPRYHHREFRFDLSKIPEGEAVTAAEFRIYKDYIRERFDNETFRISVYQVLQEHLGRESDLFLLDSRTLWASEEGWLVFDITATSNHWVVNPRHNLGLQLSVETLDENSSSDQRQACKKHELYVSFRDLGWQDWIIAPEGYAAYYCEGECAFPLNSYMNATNHAIVQTLVHFINPETVPKPCCAPTQLNAISVLYFDDSSNVILKKYRNMVVRACGCH

SEQ ID NO: 1504 - protein, 431 aa, Homo Sapiens
MHVRSLRAAAPHSFVALWAPLFLLRSALADFSLDNEVHSSFIHRRLRSQERREMQREILSILGLPHRPRPHLQGKHNSAPMFMLDLYNAMAVEEGGGPGGQGFSYPYKAVFSTQGPPLASLQDSHFLTDADMVMSFVNLVEHDKEFFHPRYHHREFRFDLSKIPEGEAVTAAEFRIYKDYIRERFDNETFRISVYQVLQEHLGRESDLFLLDSRTLWASEEGWLVFDITATSNHWVVNPRHNLGLQLSVETLDGQSINPKLAGLIGRHGPQNKQPFMVAFFKATEVHFRSIRSTGSKQRSQNRSKTPKNQEALRMANVAENSSSDQRQACKKHELYVSFRDLGWQDWIIAPEGYAAYYCEGECAFPLNSYMNATNHAIVQTLVHFINPETVPKPCCAPTQLNAISVLYFDDSSNVILKKYRNMVVRACGCH

SEQ ID NO: 1505 - protein, 412 aa, Homo Sapiens
MHVRSLRAAAPHSFVALWAPLFLLRSALADFSLDNEVHSSFIHRRLRSQERREMQREILSILGLPHRPRPHLQGKHNSAPMFMLDLYNAMAVEEGGGPGGQGFSYPYKAVFSTQGPPLASLQDSHFLTDADMVMSFVNLVEHDKEFFHPRYHHREFRFDLSKIPEGEAVTAAEFRIYKDYIRERFDNETFRISVYQVLQEHLGRESDLFLLDSRTLWASEEGWLVFDITATSNHWVVNPRHNLGLQLSVETLDGQSINPKLAGLIGRHGPQNKQPFMVAFFKATEVHFRSIRSTGSKQRSQNRSKTPKNQEALRMANVAENSSSDQRQACKKHELYVSFRDLGWQDWIIAPEGYAAYYCEGECAFPLNSYMNATNHAIVQTLVGVTPSWGVVTWAGQAAGPPDPAASKLGPE

SEQ ID NO: 1506 - protein, 297 aa, Homo Sapiens
  misc_feature (1)..(1): Xaa can be any naturally occurring amino acid
XPPLASLQDSHFLTDADMVMSFVNLVEHDKEFFHPRYHHREFRFDLSKIPEGEAVTAAEFRIYKDYIRERFDNETFRISVYQVLQEHLGSTGTCCMPCLRASTRTNQTRVPALWKLTFQQRRGHGRESDLFLLDSRTLWASEEGWLVFDITATSNHWVVNPRHNLGLQLSVETLDGQSINPKLAGLIGRHGPQNKQPFMVAFFKATEVHFRSIRSTGSKQRSQNRSKTPKNQEALRMANVAENSSSDQRQACKKHELYVSFRDLGWQDWIIAPEGYAAYYCEGECAFPLNSYMNATN

SEQ ID NO: 1507 - protein, 402 aa, Homo Sapiens
MAARPGPLWLLGLTLCALGGGGPGLRPPPGCPQRRLGARERRDVQREILAVLGLPGRPRPRAPPAASRLPASAPLFMLDLYHAMAGDDDEDGAPAEQRLGRADLVMSFVNMVERDRALGHQEPHWKEFRFDLTQIPAGEAVTAAEFRIYKVPSIHLLNRTLHVSMFQVVQEQSNRESDLFFLDLQTLRAGDEGWLVLDVTAASDCWLLKRHKDLGLRLYVETEDGHSVDPGLAGLLGQRAPRSQQPFVVTFFRASPSPIRTPRAVRPLRRRQPKKSNELPQANRLPGIFDDVRGSHGRQVCRRHELYVSFQDLGWLDWVIAPQGYSAYYCEGECSFPLDSCMNATNHAILQSLVHLMKPNAVPKACCAPTKLSATSVLYYDSSNNVILRKHRNMVVKACGCH

SEQ ID NO: 1508 - protein, 402 aa, Homo Sapiens
MTALPGPLWLLGLALCALGGGGPGLRPPPGCPQRRLGARERRDVQREILAVLGLPGRPRPRAPPAASRLPASAPLFMLDLYHAMAGDDDEDGAPAERRLGRADLVMSFVNMVERDRALGHQEPHWKEFRFDLTQIPAGEAVTAAEFRIYKVPSIHLLNRTLHVSMFQVVQEQSNRESDLFFLDLQTLRAGDEGWLVLDVTAASDCWLLKRHKDLGLRLYVETEDGHSVDPGLAGLLGQRAPRSQQPFVVTFFRASPSPIRTPRAVRPLRRRQPKKSNELPQANRLPGIFDDVHGSHGRQVCRRHELYVSFQDLGWLDWVIAPQGYSAYYCEGECSFPLDSCMNATNHAILQSLVHLMMPDAVPKACCAPTKLSATSVLYYDSSNNVILRKHRNMVVKACGCH

SEQ ID NO: 1509 - protein, 90 aa, Homo Sapiens
MLWFSGVGALAERYCRRSPGITCCVLLLLNCSGVPMSLASSFLTGSVAKCENEGEVLQIPFITDNPCIMCVCLHEPTRWSNLTQNPGFYD

SEQ ID NO: 1510 - protein, 685 aa, Homo Sapiens
MLWFSGVGALAERYCRRSPGITCCVLLLLNCSGVPMSLASSFLTGSVAKCENEGEVLQIPFITDNPCIMCVCLNKEVTCKREKCPVLSRDCALAIKQRGACCEQCKGCTYEGNTYNSSFKWQSPAEPCVLRQCQEGVVTESGVRCVVHCKNPLEHLGMCCPTCPGCVFEGVQYQEGEEFQPEGSKCTKCSCTGGRTQCVREVCPILSCPQHLSHIPPGQCCPKCLGQRKVFDLPFGSCLFRSDVYDNGSSFLYDNCTACTCRDSTVVCKRKCSHPGGCDQGQEGCCEECLLRVPPEDIKVCKFGNKIFQDGEMWSSINCTICACVKGRTECRNKQCIPISSCPQGKILNRKGCCPICTEKPGVCTVFGDPHYNTFDGRTFNFQGTCQYVLTKDCSSPASPFQVLVKNDARRTRSFSWTKSVELVLGESRVSLQQHLTVRWNGSRIALPCRAPHFHIDLDGYLLKVTTKAGLEISWDGDSFVEVMAAPHLKGKLCGLCGNYNGHKRDDLIGGDGNFKFDVDDFAESWRVESNEFCNRPQRKPVPELCQGTVKVKLRAHRECQKLKSWEFQTCHSTVDYATFYRSCVTDMCECPVHKNCYCESFLAYTRACQREGIKVHWEPQQNCAATQCKHGAVYDTCGPGCIKTCDNWNEIGPCNKPCVAGCHCPANLVLHKGRCIKPVLCPQR

SEQ ID NO: 1511 - protein, 133 aa, Homo Sapiens
MLWFSGVGALAERYCRRSPGITCCVLLLLNCSGVPMSLASSFLTGSVAKCENEGEVLQIPFITDNPCIMCVCLNKEVTCKREKCPVLSRDCALAIKQRGACCEQCKVLVSRVLRDTVLFTLKYWRLPVFWLHL

SEQ ID NO: 1512 - protein, 161 aa, Homo Sapiens
MLWFSGVGALAERYCRRSPGITCCVLLLLNCSGVPMSLASSFLTGSVAKCENEGEVLQIPFITDNPCIMCVCLVAPMKEIPITAPSNGRARLSLVFYASARRALSQSLGCAVLFIVKTLWSIWECAAPHVQAVCLRVCSIKKGRNFSQKEANVPSVPALEA

SEQ ID NO: 1513 - protein, 987 aa, Homo Sapiens
MRCRNMFFSFKASLCGCGAATAPSLTAISCTLNCSCQSFKPGKINHRQCDQCKHGWVAHALSKLRIPPMYPTSQVEIVQSNVVFDISSLMLYGTQAIPVRLKILLDRLFSVLKQDEVLQILHALDWTLQDYIRGYVLQDASGKVLDHWSIMTSEEEVATLQQFLRFGETKSIVELMAIQEKEEQSIIIPPSTANVDIRAFIESCSHRSSSLPTPVDKGNPSSIHPFENLISNMTFMLPFQFFNPLPPALIGSLPEQYMLEQGHDQSQDPKQEVHGPFPDSSFLTSSSTPFQVEKDQCLNCPDAITKKEDSTHLSDSSSYNIVTKFERTQLSPEAKVKPERNSLGTKKGRVFCTACEKTFYDKGTLKIHYNAVHLKIKHKCTIEGCNMVFSSLRSRNRHSANPNPRLHMPMNRNNRDKDLRNSLNLASSENYKCPGFTVTSPDCRPPPSYPGSGEDSKGQPAFPNIGQNGVLFPNLKTVQPVLPFYRSPATPAEVANTPGILPSLPLLSSSIPEQLISNEMPFDALPKKKSRKSSMPIKIEKEAVEIANEKRHNLSSDEDMPLQVVSEDEQEACSPQSHRVSEEQHVQSGGLGKPFPEGERPCHRESVIESSGAISQTPEQATHNSERETEQTPALIMVPREVEDGGHEHYFTPGMEPQVPFSDYMELQQRLLAGGLFSALSNRGMAFPCLEDSKELEHVGQHALARQIEENRFQCDICKKTFKNACSVKIHHKNMHVKEMHTCTVEGCNATFPSRRSRDRHSSNLNLHQKALSQEALESSEDHFRAAYLLKDVAKEAYQDVAFTQQASQTSVIFKGTSRMGSLVYPITQVHSASLESYNSGPLSEGTILDLSTTSSMKSESSSHSSWDSDGVSEEGTVLMEDSDGNCEGSSLVPGEDEYPICVLMEKADQSLASLPSGLPITCHLCQKTYSNKGTFRAHYKTVHLRQLHKCKVPGCNTMFSSVRSRNRHSQNPNLHKSLASSPSHLQ

SEQ ID NO: 1514 - protein, 994 aa, Homo Sapiens
MRRRPPSRGGRGAARARETRRQPRHRSGRRMAEAISCTLNCSCQSFKPGKINHRQCDQCKHGWVAHALSKLRIPPMYPTSQVEIVQSNVVFDISSLMLYGTQAIPVRLKILLDRLFSVLKQDEVLQILHALDWTLQDYIRGYVLQDASGKVLDHWSIMTSEEEVATLQQFLRFGETKSIVELMAIQEKEEQSIIIPPSTANVDIRAFIESCSHRSSSLPTPVDKGNPSSIHPFENLISNMTFMLPFQFFNPLPPALIGSLPEQYMLEQGHDQSQDPKQEVHGPFPDSSFLTSSSTPFQVEKDQCLNCPDAITKKEDSTHLSDSSSYNIVTKFERTQLSPEAKVKPERNSLGTKKGRVFCTACEKTFYDKGTLKIHYNAVHLKIKHKCTIEGCNMVFSSLRSRNRHSANPNPRLHMPMNRNNRDKDLRNSLNLASSENYKCPGFTVTSPDCRPPPSYPGSGEDSKGQPAFPNIGQNGVLFPNLKTVQPVLPFYRSPATPAEVANTPGILPSLPLLSSSIPEQLISNEMPFDALPKKKSRKSSMPIKIEKEAVEIANEKRHNLSSDEDMPLQVVSEDEQEACSPQSHRVSEEQHVQSGGLGKPFPEGERPCHRESVIESSGAISQTPEQATHNSERETEQTPALIMVPREVEDGGHEHYFTPGMEPQVPFSDYMELQQRLLAGGLFSALSNRGMAFPCLEDSKELEHVGQHALARQIEENRFQCDICKKTFKNACSVKIHHKNMHVKEMHTCTVEGCNATFPSRRSRDRHSSNLNLHQKALSQEALESSEDHFRAAYLLKDVAKEAYQDVAFTQQASQTSVIFKGTSRMGSLVYPITQVHSASLESYNSGPLSEGTILDLSTTSSMKSESSSHSSWDSDGVSEEGTVLMEDSDGNCEGSSLVPGEDEYPICVLMEKADQSLASLPSGLPITCHLCQKTYSNKGTFRAHYKTVHLRQLHKCKVPGCNTMFSSVRSRNRHSQNPNLHKSLASSPSHLQ

SEQ ID NO: 1515 - protein, 22 aa, Homo Sapiens
MLRGTMTAWRGMRPEVTLACLL

SEQ ID NO: 1516 - protein, 32 aa, Homo Sapiens
MLRGTMTAWRGMRPEVTLACLLLATAGCFADL

SEQ ID NO: 1517 - protein, 85 aa, Homo Sapiens
MLRGTMTAWRGMRPEVTLACLLLATAGCFADLNEVPQVTVQPASTVQKPGGTVILGCVVEPPRMNVTWRLNGKELNGSDDALGVL

SEQ ID NO: 1518 - protein, 1115 aa, Homo Sapiens
MLRGTMTAWRGMRPEVTLACLLLATAGCFADLNEVPQVTVQPASTVQKPGGTVILGCVVEPPRMNVTWRLNGKELNGSDDALGVLITHGTLVITALNNHTVGRYQCVARMPAGAVASVPATVTLANLQDFKLDVQHVIEVDEGNTAVIACHLPESHPKAQVRYSVKQEWLEASRGNYLIMPSGNLQIVNASQEDEGMYKCAAYNPVTQEVKTSGSSDRLRVRRSTAEAARIIYPPEAQTIIVTKGQSLILECVASGIPPPRVTWAKDGSSVTGYNKTRFLLSNLLIDTTSEEDSGTYRCMADNGVGQPGAAVILYNVQVFEPPEVTMELSQLVIPWGQSAKLTCEVRGNPPPSVLWLRNAVPLISSQRLRLSRRALRVLSMGPEDEGVYQCMAENEVGSAHAVVQLRTSRPSITPRLWQDAELATGTPPVSPSKLGNPEQMLRGQPALPRPPTSVGPASPQCPGEKGQGAPAEAPIILSSPRTSKTDSYELVWRPRHEGSGRAPILYYVVKHRKQVTNSSDDWTISGIPANQHRLTLTRLDPGSLYEVEMAAYNCAGEGQTAMVTFRTGRRPKPEIMASKEQQIQRDDPGASPQSSSQPDHGRLSPPEAPDRPTISTASETSVYVTWIPRGNGGFPIQSFRVEYKKLKKVGDWILATSAIPPSRLSVEITGLEKGTSYKFRVRALNMLGESEPSAPSRPYVVSGYSGRVYERPVAGPYITFTDAVNETTIMLKWMYIPASNNNTPIHGFYIYYRPTDSDNDSDYKKDMVEGDKYWHSISHLQPETSYDIKMQCFNEGGESEFSNVMICETKARKSSGQPGRLPPPTLAPPQPPLPETIERPVGTGAMVARSSDLPYLIVGVVLGSIVLIIVTFIPFCLWRAWSKQKHTTDLGFPRSALPPSCPYTMVPLGGLPGHQASGQPYLSGISGRACANGIHMNRGCPSAAVGYPGMKPQQHCPGELQQQSDTSSLLRQTHLGNGYDPQSHQITRGPKSSPDEGSFLYTLPDDSTHQLLQPHHDCCQRQEQPAAVGQSGVRRAPDSPVLEAVWDPPFHSGPPCCLGLVPVEEVDSPDSCQVSGGDWCPQHPVGAYVGQEPGMQLSPGPLVRVSFETPPLTI

SEQ ID NO: 1519 - protein, 1114 aa, Homo Sapiens
MLRGTMTAWRGMRPEVTLACLLLATAGCFADLNEVPQVTVQPASTVQKPGGTVILGCVVEPPRMNVTWRLNGKELNGSDDALGVLITHGTLVITALNNHTVGRYQCVARMPAGAVASVPATVTLANLQDFKLDVQHVIEVDEGNTAVIACHLPESHPKAQVRYSVKQEWLEASRGNYLIMPSGNLQIVNASQEDEGMYKCAAYNPVTQEVKTSGSSDRLRVRRSTAEAARIIYPPEAQTIIVTKGQSLILECVASGIPPPRVTWAKDGSSVTGYNKTRFLLSNLLIDTTSEEDSGTYRCMADNGVGQPGAAVILYNVQVFEPPEVTMELSQLVIPWGQSAKLTCEVRGNPPPSVLWLRNAVPLISSQRLRLSRRALRVLSMGPEDEGVYQCMAENEVGSAHAVVQLRTSRPSITPRLWQDAELATGTPPVSPSKLGNPEQMLRGQPALPRPPTSVGPASPQCPGEKGQGAPAEAPIILSSPRTSKTDSYELVWRPRHEGSGRAPILYYVVKHRKVTNSSDDWTISGIPANQHRLTLTRLDPGSLYEVEMAAYNCAGEGQTAMVTFRTGRRPKPEIMASKEQQIQRDDPGASPQSSSQPDHGRLSPPEAPDRPTISTASETSVYVTWIPRGNGGFPIQSFRVEYKKLKKVGDWILATSAIPPSRLSVEITGLEKGTSYKFRVRALNMLGESEPSAPSRPYVVSGYSGRVYERPVAGPYITFTDAVNETTIMLKWMYIPASNNNTPIHGFYIYYRPTDSDNDSDYKKDMVEGDKYWHSISHLQPETSYDIKMQCFNEGGESEFSNVMICETKARKSSGQPGRLPPPTLAPPQPPLPETIERPVGTGAMVARSSDLPYLIVGVVLGSIVLIIVTFIPFCLWRAWSKQKHTTDLGFPRSALPPSCPYTMVPLGGLPGHQASGQPYLSGISGRACANGIHMNRGCPSAAVGYPGMKPQQHCPGELQQQSDTSSLLRQTHLGNGYDPQSHQITRGPKSSPDEGSFLYTLPDDSTHQLLQPHHDCCQRQEQPAAVGQSGVRRAPDSPVLEAVWDPPFHSGPPCCLGLVPVEEVDSPDSCQVSGGDWCPQHPVGAYVGQEPGMQLSPGPLVRVSFETPPLTI

SEQ ID NO: 1520 - protein, 1114 aa, Homo Sapiens; identical to SEQ ID NO: 1519

SEQ ID NO: 1521 - protein, 157 aa, Homo Sapiens
MLRGTMTAWRGMRPEVTLACLLLATAGCFADLNEVPQVTVQPASTVQKPGGTVILGCVVEPPRMNVTWRLNGKELNGSDDALGVLITHGTLVITALNNHTVGRYQCVARMPAGAVASVPATVTLASESAPLPPCHGAVPPHLSHPEAPTIHAASCYS

SEQ ID NO: 1522 - protein, 157 aa, Homo Sapiens; identical to SEQ ID NO: 1521

SEQ ID NO: 1523 - protein, 65 aa, Homo Sapiens
MTHEVLSTFIPSEGSSSKVEEVDLQDFKLDVQHVIEVDEGNTAVIACHLPESHPKAQVRYSVKQE

SEQ ID NO: 1524 - protein, 39 aa, Homo Sapiens
  misc_feature (1)..(1): Xaa can be any naturally occurring amino acid
XQQQSDTSSLLRQTHLGNGYDPQSHQITRAPMLLGPCAS

SEQ ID NO: 1525 - protein, 84 aa, Homo Sapiens
  misc_feature (1)..(1): Xaa can be any naturally occurring amino acid
XRACANGIHMNRGCPSAAVGYPGMKPQQHCPGELQQQSDTSSLLRQTHLGNGYDPQSHQITSCCSPITTAANARSSLLLWASQG

SEQ ID NO: 1526 - protein, 85 aa, Homo Sapiens
MADGGGGGGTGAVGGGGTSQASAGAATGATGASGGGGPINPASLPPGDPQLIALIVEQLKSRGLFDSFRRDCLADVDTKNTPDTF

SEQ ID NO: 1527 - protein, 129 aa, Homo Sapiens
MADGGGGGGTGAVGGGGTSQASAGAATGATGASGGGGPINPASLPPGDPQLIALIVEQLKSRGLFDSFRRDCLADVDTKPAYQNLRQKVDNFVSTHLDKQEWNPTMNKNQLRNGLRQSVVQIRQTPFES

SEQ ID NO: 1528 - protein, 185 aa, Homo Sapiens
MADGGGGGGTGAVGGGGTSQASAGAATGATGASGGGGPINPASLPPGDPQLIALIVEQLKSRGLFDSFRRDCLADVDTKPAYQNLRQKVDNFVSTHLDKQEWNPTMNKNQLRNGLRQSVVQSGMLEAGVDRIISQVVDPKLNHIFRPQIERAIHEFLAAQKKAAVPAPPPEPEGQDPPAPSQDTS

SEQ ID NO: 1529 - protein, 42 aa, Homo Sapiens
MNKNQLRNGLRQSVVQSGMLEAGVDRIISQVVDPKLNHIFRP

SEQ ID NO: 1530 - protein, 118 aa, Homo Sapiens
  misc_feature (1)..(1): Xaa can be any naturally occurring amino acid
XLALLGPAGAVAPSTRPRCLPATRSSSLSSWSSSRAGAFLTASAGTAWPTWTPRSGMLEAGVDRIISQVVDPKLNHIFRPQIERAIHEFLAAQKKAAVPAPPPEPEGQDPPAPSQDTS

SEQ ID NO: 1531 - protein, 137 aa, Homo Sapiens
MLSGRLVLGLVSMAGRVCLCQGSAGSGAIGPVEAAIRTKLEEALSPEVLELRNESGGHAVPPGSETHFRVAVVSSRFEGLSPLQRHRLVHAALAEELGGPVHALAIQARTPAQWRENSQLDTSPPCLGGNKKTLGTP

SEQ ID NO: 1532 - protein, 137 aa, Homo Sapiens; identical to SEQ ID NO: 1531

SEQ ID NO: 1533 - protein, 137 aa, Homo Sapiens; identical to SEQ ID NO: 1531

SEQ ID NO: 1534 - protein, 55 aa, Homo Sapiens
MENVCEKVTNSVSSELQPYFQTLPVMTKIDSVAGINYGLVAPPATTAETLDVQMK

SEQ ID NO: 1535 - protein, 286 aa, Homo Sapiens
MENVCEKVTNSVSSELQPYFQTLPVMTKIDSVAGINYGLVAPPATTAETLDVQMKGEFYSENHHNPPPFAPPVMEFPAAHDRMVYLGLSDYFFNTAGLVYQEAGVLKMTLRDDMIPKESKFRLTTKFFGTFLPEVAKKFPNMKIQIHVSASTPPHLSVQPTGLTFYPAVDVQAFAVLPNSSLASLFLIGMHTTGSMEVSAESNRLVGELKLDRLLLELKHSNIGPFPVELLQDIMNYIVPILVLPRVNEKLQKGFPLPTPARVQLYNVVLQPHQNFLLFGADVVYK

SEQ ID NO: 1536 - protein, 487 aa, Homo Sapiens
MRENMARGPCNAPRWASLMVLVAIGTAVTAAVNPGVVVRISQKGLDYASQQGTAALQKELKRIKIPDYSDSFKIKHLGKGHYSFYSMDIREFQLPSSQISMVPNVGLKFSISNANIKISGKWKAQKRFLKMSGNFDLSIEGMSISADLKLGSNPTSGKPTITCSSCSSHINSVHVHISKSKVGWLIQLFHKKIESALRNKMNSQVCEKVTNSVSSELQPYFQTLPVMTKIDSVAGINYGLVAPPATTAETLDVQMKGEFYSENHHNPPPFAPPVMEFPAAHDRMVYLGLSDYFFNTAGLVYQEAGVLKMTLRDDMIPKESKFRLTTKFFGTFLPEVAKKFPNMKIQIHVSASTPPHLSVQPTGLTFYPAVDVQAFAVLPNSSLASLFLIGMHTTGSMEVSAESNRLVGELKLDRLLLELKHSNIGPFPVELLQDIMNYIVPILVLPRVNEKLQKGFPLPTPARVQLYNVVLQPHQNFLLFGADVVYK

SEQ ID NO: 1537 - protein, 261 aa, Homo Sapiens
MTKIDSVAGINYGLVAPPATTAETLDVQMKGEFYSENHHNPPPFAPPVMEFPAAHDRMVYLGLSDYFFNTAGLVYQEAGVLKMTLRDDMIPKESKFRLTTKFFGTFLPEVAKKFPNMKIQIHVSASTPPHLSVQPTGLTFYPAVDVQAFAVLPNSSLASLFLIGMHTTGSMEVSAESNRLVGELKLDRLLLELKHSNIGPFPVELLQDIMNYIVPILVLPRVNEKLQKGFPLPTPARVQLYNVVLQPHQNFLLFGADVVYK

SEQ ID NO: 1538 - protein, 242 aa, Homo Sapiens
MFQTGGLIVFYGLLAQTLPLNVNPALPLSPTGLAGSLTNALSNGLLSGGLLGILENLPLLDILKPGGGTSGGLLGGLLGKVTSVIPGLNNIIDIKVTDPQLLELGLVQSPDGHRLYVTIPLGIKLQVNTPLVGASLLRLAVKLDITAEILAVRDKQERIHLVLGDCTHSPGSLQISLLDGLGPLPIQGLLDSLTGILNKVLPELVQGNVCPLVNEVLRGLDITLVHDIVNMLIHGLQFVIKV

SEQ ID NO: 1539 - protein, 256 aa, Homo Sapiens
MFQTGGLIVFYGLLAQTMAQFGGLPVPLDQTLPLNVNPALPLSPTGLAGSLTNALSNGLLSGGLLGILENLPLLDILKPGGGTSGGLLGGLLGKVTSVIPGLNNIIDIKVTDPQLLELGLVQSPDGHRLYVTIPLGIKLQVNTPLVGASLLRLAVKLDITAEILAVRDKQERIHLVLGDCTHSPGSLQISLLDGLGPLPIQGLLDSLTGILNKVLPELVQGNVCPLVNEVLRGLDITLVHDIVNMLIHGLQFVIKV

SEQ ID NO: 1540 - protein, 256 aa, Homo Sapiens; identical to SEQ ID NO: 1539

SEQ ID NO: 1541 - protein, 256 aa, Homo Sapiens; identical to SEQ ID NO: 1539

SEQ ID NO: 1542 - protein, 249 aa, Homo Sapiens
MLQLWKLVLLCGVLTGTSESLLDNLGNDLSNVVDKLEPVLHEGLETVDNTLKGILEKLKVDLGVLQKSSAWQLAKQKAQEAEKLLNNVISKLLPTNTDIFGLKISNSLILDVKAEPIDDGKGLNLSFPVTANVTVAGPIIGQIINLKASLDLLTAVTIETDPQTHQPVAVLGECASDPTSISLSLLDKHSQIINKFVNSVINTLKSTVSSLLQKEICPLIRIFIHSLDVNVIQQVVDNPQHKTQLQTLI

SEQ ID NO: 1543 - protein, 249 aa, Homo Sapiens; identical to SEQ ID NO: 1542

SEQ ID NO: 1544 - protein, 218 aa, Homo Sapiens
MMCPLWRLLIFLGLLALPLAPHKQPWPGLAQAHRDNKSTLARIIAQGLIKHNAESRIQNIHFGDRLNASAQVAPGLVGWLISGRKHQQQQESRSFDNNIVKMCAHMSIVVEFWLEKDEFGRRDLVIGKCDAEPSSVHVAILTEAIPPKMNQFLYNLKENLQKVLPHMVESQVCPLIGEILGQLDVKLLKSLIEQEAAHEPTHHETSQPSACQAGESPS

SEQ ID NO: 1545 - protein, 254 aa, Homo Sapiens
MMCPLWRLLIFLGLLALPLAPHKQPWPGLAQAHRDNKSTLARIIAQGLIKHNAESRIQNIHFGDRLNASAQVAPGLVGWLISGRKHQQQQESSINITNIQLDCGGIQISFHKEWFSANISLEFDLELRPSFDNNIVKMCAHMSIVVEFWLEKDEFGRRDLVIGKCDAEPSSVHVAILTEAIPPKMNQFLYNLKENLQKVLPHMVESQVCPLIGEILGQLDVKLLKSLIEQEAAHEPTHHETSQPSACQAGESPS

SEQ ID NO: 1546 - protein, 147 aa, Homo Sapiens
MAGPWTFTLLCGLLAATLIQATLSPTAVLILGPKVIKEKLTQELKDHNATSILQQLPLLSAMREKPAGGIPVLGSLVNTVLKHIIWLKVITANILQLQVKPSANDQELLVKIPLDMVAGFNTPLVKTIVEFHMTTEAQATIRMDTSA

SEQ ID NO: 1547 - protein, 484 aa, Homo Sapiens
MAGPWTFTLLCGLLAATLIQATLSPTAVLILGPKVIKEKLTQELKDHNATSILQQLPLLSAMREKPAGGIPVLGSLVNTVLKHIIWLKVITANILQLQVKPSANDQELLVKIPLDMVAGFNTPLVKTIVEFHMTTEAQATIRMDTSASGPTRLVLSDCATSHGSLRIQLLHKLSFLVNALAKQVMNLLVPSLPNLVKNQLCPVIEASFNGMYADLLQLVKVPISLSIDRLEFDLLYPAIKGDTIQLYLGAKLLDSQGKVTKWFNNSAASLTMPTLDNIPFSLIVSQDVVKAAVAAVLSPEEFMVLLDSVLPESAHRLKSSIGLINEKAADKLGSTQIVKILTQDTPEFFIDQGHAKVAQLIVLEVFPSSEALRPLFTLGIEASSEAQFYTKGDQLILNLNNISSDRIQLMNSGIGWFQPDVLKNIITEIIHSILLPNQNGKLRSGVPVSLVKALGFEAAESSLTKDALVLTPASLWKPSSPVSQ

SEQ ID NO: 1548 - protein, 458 aa, Homo Sapiens
MAWASRLGLLLALLLPVVGASTPGTVVRLNKAALSYVSEIGKAPLQRALQVTVPHFLDWSGEALQPTRIRILNVHVPRLHLKFIAGFGVRLLAAANFTFKVFRAPEPLELTLPVELLADTRVTQSSIRTPVVSISACSLFSGHANEFDGSNSTSHALLVLVQKHIKAVLSNKLCLSISNLVQGVNVHLGTLIGLNPVGPESQIRYSMVSVPTVTSDYISLEVNAVLFLLGKPIILPTDATPFVLPRHVGTEGSMATVGLSQQLFDSALLLLQKAGALNLDITGQLRSDDNLLNTSALGRLIPEVARQFPEPMPVVLKVRLGATPVAMLHTNNATLRLQPFVEVLATASNSAFQSLFSLDVVVNLRLQLSVSKVKLQGTTSVLGDVQLTVASSNVGFIDTDQVRTLMGTVFEKPLLDHLNALLAMGIALPGVVNLHYVAPEIFVYEGYVVISSGLFYQS

SEQ ID NO: 1549 - protein, 476 aa, Homo Sapiens
MQPVMLALWSLLLLWGLATPCQELLETVGTLARIDKDELGKAIQNSLVGEPILQNVLGSVTAVNRGLLGSGGLLGGGGLLGHGGVFGVVEELSGLKIEELTLPKVLLKLLPGFGVQLSLHTKVGMHCSGPLGGLLQLAAEVNVTSRVALAVSSRGTPILILKRCSTLLGHISLFSGLLPTPLFGVVEQMLFKVLPGLLCPVVDSVLGVVNELLGAVLGLVSLGALGSVEFSLATLPLISNQYIELDINPIVKSVAGDIIDFPKSRAPAKVPPKKDHTSQVMVPLYLFNTTFGLLQTNGALDMDITPELVPSDVPLTTTDLAALLPEALGKLPLHQQLLLFLRVREAPTVTLHNKKALVSLPANIHVLFYVPKGTPESLFELNSVMTVRAQLAPSATKLHISLSLERLSVKVASSFTHAFDGSRLEEWLSHVVGAVYAPKLNVALDVGIPLPKVLNINFSNSVLEIVENAVVLTVAS

SEQ ID NO: 1550 - protein, 614 aa, Homo Sapiens
MWMAWCVAALSVVAVCGTSHETNTVLRVTKDVLSNAISGMLQQSDALHSALREVPLGVGDIPYNDFHVRGPPPVYTNGKKLDGIYQYGHIETNDNTAQLGGKYRYGEILESEGSIRDLRNSGYRSAENAYGGHRGLGRYRAAPVGRLHRRELQPGEIPPGVATGAVGPGGLLGTGGMLAADGILAGQGGLLGGGGLLGDGGLLGGGGVLGVLGEGGILSTVQGITGLRIVELTLPRVSVRLLPGVGVYLSLYTRVAINGKSLIGFLDIAVEVNITAKVRLTMDRTGYPRLVIERCDTLLGGIKVKLLRGLLPNLVDNLVNRVLADVLPDLLCPIVDVVLGLVNDQLGLVDSLIPLGILGSVQYTFSSLPLVTGEFLELDLNTLVGEAGGGLIDYPLGWPAVSPKPMPELPPMGDNTKSQLAMSANFLGSVLTLLQKQHALDLDITNGMFEELPPLTTATLGALIPKVFQQYPESCPLIIRIQVLNPPSVMLQKDKALVKVLATAEVMVSQPKDLETTICLIDVDTEFLASFSTEGDKLMIDAKLEKTSLNLRTSNVGNFDIGLMEVLVEKIFDLAFMPAMNAVLGSGVPLPKILNIDFSNADIDVLEDLLVLSA

SEQ ID NO: 1551 - protein, 44 aa, Homo Sapiens
MWMAWCVAALSVVAVCGTSHETNTVLRVTKDVLSNGFSPISWTI

SEQ ID NO: 1552 - protein, 453 aa, Homo Sapiens
MLRILCLALCSLLTGTRADPGALLRLGMDIMNQVQSAMDESHILEKMAAEAGKKQPGMKPIKGITNLKVKDVQLPVITLNFVPGVGIFQCVSTGMTVTGKSFMGGNMEIIVALNITATNRLLRDEETGLPVFKSEGCEVILVNVKTNLPSNMLPKMVNKFLDSTLHKVLPGLMCPAIDAVLVYVNRKWTNLSDPMPVGQMGTVKYVLMSAPATTASYIQLDFSPVVQQQKGKTIKLADAGEALTFPEGYAKGSSQLLLPATFLSAELALLQKSFHVNIQDTMIGELPPQTTKTLARFIPEVAVAYPKSKPLTTQIKIKKPPKVTMKTGKSLLHLHSTLEMFAARWRSKAPMSLFLLEVHFNLKVQYSVHENQLQMATSLDRLLSLSRKSSSIGNFNERELTGFITSYLEEAYIPVVNDVLQVGLPLPDFLAMNYNLAELDIVENALMLDLKLG

SEQ ID NO: 1553 - protein, 88 aa, Homo Sapiens
MLRILCLALCSLLTGTRADPGALLRLGMDIMNREVQSAMDESHILEKMAAEAGKKQPGMKPIKGITNEQGHFEEEMRLESQISTLHAT

SEQ ID NO: 1554 - protein, 82 aa, Homo Sapiens
MCTKTIPVLWGCFLLWNLYVSSSQTIYPGIKARITQRALDYGVQAGMKMIEQMLKEKKLPDLSGSESLEFLKVDYVNYNFSK

SEQ ID NO: 1555 - protein, 507 aa, Homo Sapiens
MCTKTIPVLWGCFLLWNLYVSSSQTIYPGIKARITQRALDYGVQAGMKMIEQMLKEKKLPDLSGSESLEFLKVDYVNYNFSNIKISAFSFPNTSLAFVPGVGIKALTNHGTANISTDWGFESPLFQDTGGADLFLSGVYFTGIIILTRNDFGHPTLKLQDCYAQLSHAHVSFSGELSVLYNSFAEPMEKPILKNLNEMLCPIIASEVKALNANLSTLEVLTKIDNYTLLDYSLISSPEITENYLDLNLKGVFYPLENLTDPPFSPVPFVLPERSNSMLYIGIAEYFFKSASFAHFTAGVFNVTLSTEEISNHFVQNSQGLGNVLSRIAEIYILSQPFMVRIMATEPPIINLQPGNFTLDIPASIMMLTQPKNSTVETIVSMDFVASTSVGLVILGQRLVCSLSLNRFRLALPESNRSNIEVLRFENILSSILHFGVLPLANAKLQQGFPLSNPHKFLFVNSDIEVLEGFLLISTDLKYETSSKQQPSFHVWEGLNLISRQWRGKSAP

SEQ ID NO: 1556 - protein, 507 aa, Homo Sapiens; identical to SEQ ID NO: 1555

SEQ ID NO: 1557 - protein, 264 aa, Homo Sapiens
MEKPILKNLNEMLCPIIASEVKALNANLSTLEVLTKIDNYTLLDYSLISSPEITENYLDLNLKGVFYPLENLTDPPFSPVPFVLPERSNSMLYIGIAEYFFKSASFAHFTAGVFNVTLSTEEISNHFVQNSQGLGNVLSRVASTSVGLVILGQRLVCSLSLNRFRLALPESNRSNIEVLRFENILSSILHFGVLPLANAKLQQGFPLSNPHKFLFVNSDIEVLEGFLLISTDLKYETSSKQQPSFHVWEGLNLISRQWRGKSAP

SEQ ID NO: 1558 - protein, 64 aa, Homo Sapiens
MAVSRHLTRGRKMAHVIAACLYLVCRTEGTPHMLLDLSDLLQVNVYVLGKTFLLLARELCINAP

SEQ ID NO: 1559 - protein, 562 aa, Homo Sapiens
MAVSRHLTRGRKMAHVIAACLYLVCRTEGTPHMLLDLSDLLQVNVYVLGKTFLLLARELCINAPAIDPCLYIPRFAHLLEFGEKNHEVSMTALRLLQRMKRDWMHTGRRPSGLCGAALLVAARMHDFRRTVKEVISVVKVCESTLRKRLTEFEDTPTSQLTIDEFMKIDLEEECDPPSYTAGQRKLRMKQLEQVLSKKLEEVEGEISSYQDAIEIELENSRPKAKGGLASLAKDGSTEDTASSLCGEEDTEDEELEAAASHLNKDLYRELLGGAPGSSEAAGSPEWGGRPPALGSLLDPLPTAASLGISDSIRECISSQSSDPKDASGDGELDLSGIDDLEIDRYILNESEARVKAELWMRENAEYLREQREKEARIAKEKELGIYKEHKPKKSCKRREPIQASTAREAIEKMLEQKKISSKINYSVLRGLSSAGGGSPHREDAQPEHSASARKLSRRRTPASRSGADPVTSVGKRLRPLVSTQPAKKVATGEALLPSSPTLGAEPARPQAVLVESGPVSYHADEEADEEEPDEEDGEPCVSALQMMGSNDYGCDGDEDDGY

SEQ ID NO: 1560 - protein, 584 aa, Homo Sapiens
MAVSRHLTRGRKMAHVIAACLYLVCRTEGTPHMLLDLSDLLQVNVYVLGKTFLLLARELCINAPAIDPCLYIPRFAHLLEFGEKNHEVSMTALRLLQRMKRDWMHTGRRPSGLCGAALLVAARMHDFRRTVKEVISVVKVCESTLRKRLTEFEDTPTSQLTIDEFMKIDLEEECDPPSYTAGQRKLRMKQLEQVLSKKLEEVEGEISSYQDAIEIELENSRPKAKGGLASLAKDGSTEDTASSLCGEEDTEDEELEAAASHLNKDLYRELLGGAPGSSEAAGSPEWGGRPPALGSLLDPLPTAASLGISDSIRECISSQSSDPKDASGDGELDLSGIDDLEIDRRDLSMPRCAKAKSQPHFPVLAQYILNESEARVKAELWMRENAEYLREQREKEARIAKEKELGIYKEHKPKKSCKRREPIQASTAREAIEKMLEQKKISSKINYSVLRGLSSAGGGSPHREDAQPEHSASARKLSRRRTPASRSGADPVTSVGKRLRPLVSTQPAKKVATGEALLPSSPTLGAEPARPQAVLVESGPVSYHADEEADEEEPDEEDGEPCVSALQMMGSNDYGCDGDEDDGY

SEQ ID NO: 1561 - protein, 439 aa, Homo Sapiens
MHDFRRTVKEVISVVKVCESTLRKRLTEFEDTPTSQLTIDEFMKIDLEEECDPPSYTAGQRKLRMKQLEQVLSKKLEEVEGEISSYQDAIEIELENSRPKAKGGLASLAKDGSTEDTASSLCGEEDTEDEELEAAASHLNKDLYRELLGGAPGSSEAAGSPEWGGRPPALGSLLDPLPTAASLGISDSIRECISSQSSDPKDASGDGELDLSGIDDLEIDRYILNESEARVKAELWMRENAEYLREQREKEARIAKEKELGIYKEHKPKKSCKRREPIQASTAREAIEKMLEQKKISSKINYSVLRGLSSAGGGSPHREDAQPEHSASARKLSRRRTPASRSGADPVTSVGKRLRPLVSTQPAKKVATGEALLPSSPTLGAEPARPQAVLVESGPVSYHADEEADEEEPDEEDGEPCVSALQMMGSNDYGCDGDEDDGY

SEQ ID NO: 1562 - protein, 14 aa, Homo Sapiens
MTALRLLQRMKRDW

SEQ ID NO: 1563 - protein, 45 aa, Homo Sapiens
MTALRLLQRMKRDWMHTGRRPSGLCGAALLVAARMHDFRRTVKEV

SEQ ID NO: 1564 - protein, 134 aa, Homo Sapiens [sequence omitted]

SEQ ID NO: 1565 - protein, 184 aa, Homo Sapiens
MTALRLLQRMKRDWMHTGRRPSGLCGAALLVAARMHDFRRTVKEVISVVKVCESTLRKRLTEFEDTPTSQLTIDEFMKIDLEEECDPPSYTAGQRKLRMKQLEQVLSKKLEEVEGEISSYQDAIEIELENSPPSRREGRRRPESLPRPLRGKAPVPLVGGLSSGMAAPDVAEGASPCVLRRGWP

SEQ ID NO: 1566 - protein, 155 aa, Homo Sapiens
MTALRLLQRMKRDWMHTGRRPSGLCGAALLVAARMHDFRRTVKEVISVVKVCESTLRKRLTEFEDTPTSQLTIDEFMKIDLEEECDPPSYTAGQRKLRMKQLEQVLSKKLEEVEGEISSYQDAIEIELENSRPKAKGGLASLAKDGSTEDTASSL

SEQ ID NO: 1567 - protein, 234 aa, Homo Sapiens
MTALRLLQRMKRDWMHTGRRPSGLCGAALLVAARMHDFRRTVKEVISVVKVCESTLRKRLTEFEDTPTSQLTIDEFMKIDLEEECDPPSYTAGQRKLRMKQLEQVLSKKLEEVEGEISSYQDAIEIELENSRPKAKGGLASLAKDGSTEDTASSLCGEEDTEDEELEAAASHLNKDLYRELLGGAPGSSEAAGSPEWGGRPPALGSLLDPLPTAASLGISDSIRECISSQSSDP

SEQ ID NO: 1568 - protein, 473 aa, Homo Sapiens
MTALRLLQRMKRDWMHTGRRPSGLCGAALLVAARMHDFRRTVKEVISVVKVCESTLRKRLTEFEDTPTSQLTIDEFMKIDLEEECDPPSYTAGQRKLRMKQLEQVLSKKLEEVEGEISSYQDAIEIELENSRPKAKGGLASLAKDGSTEDTASSLCGEEDTEDEELEAAASHLNKDLYRELLGGAPGSSEAAGSPEWGGRPPALGSLLDPLPTAASLGISDSIRECISSQSSDPKDASGDGELDLSGIDDLEIDRYILNESEARVKAELWMRENAEYLREQREKEARIAKEKELGIYKEHKPKKSCKRREPIQASTAREAIEKMLEQKKISSKINYSVLRGLSSAGGGSPHREDAQPEHSASARKLSRRRTPASRSGADPVTSVGKRLRPLVSTQPAKKVATGEALLPSSPTLGAEPARPQAVLVESGPVSYHADEEADEEEPDEEDGEPCVSALQMMGSNDYGCDGDEDDGY

SEQ ID NO: 1569 - protein, 161 aa, Homo Sapiens
MTALRLLQRMKRDWMHTGRRPSGLCGAALLVAARMHDFRRTVKEVISVVKVCESTLRKRLTEFEDTPTSQLTIDEFMKIDLEEECDPPSYTAGQRKLRMKQLEQVLSKKLEEVEGEISSYQDAIEIELENSRPKAPHRGGRADGGPRASPGLFVGRPQYHS

SEQ ID NO: 1570 - protein, 208 aa, Homo Sapiens
MTGRVCRGCGGTDIELDAARGDAVCTACGSVLEDNIIVSEVQFVESSGGGSSAVGQFVSLDGAGKTPTLGGGFHVNLGKESRAQTLQNGRRHIHHLGNQLQLNQHCLDTAFNFFKMAVSRHLTRGRKMAHVIAACLYLVCRTEGTPHMLLDLSDLLQVDSLRPASFPTWGCDLGVVTRVVTGVYPRCLHASQWPVCAACPVRKFWSVG

SEQ ID NO: 1571 - protein, 677 aa, Homo Sapiens
MTGRVCRGCGGTDIELDAARGDAVCTACGSVLEDNIIVSEVQFVESSGGGSSAVGQFVSLDGAGKTPTLGGGFHVNLGKESRAQTLQNGRRHIHHLGNQLQLNQHCLDTAFNFFKMAVSRHLTRGRKMAHVIAACLYLVCRTEGTPHMLLDLSDLLQVNVYVLGKTFLLLARELCINAPAIDPCLYIPRFAHLLEFGEKNHEVSMTALRLLQRMKRDWMHTGRRPSGLCGAALLVAARMHDFRRTVKEVISVVKVCESTLRKRLTEFEDTPTSQLTIDEFMKIDLEEECDPPSYTAGQRKLRMKQLEQVLSKKLEEVEGEISSYQDAIEIELENSRPKAKGGLASLAKDGSTEDTASSLCGEEDTEDEELEAAASHLNKDLYRELLGGAPGSSEAAGSPEWGGRPPALGSLLDPLPTAASLGISDSIRECISSQSSDPKDASGDGELDLSGIDDLEIDRYILNESEARVKAELWMRENAEYLREQREKEARIAKEKELGIYKEHKPKKSCKRREPIQASTAREAIEKMLEQKKISSKINYSVLRGLSSAGGGSPHREDAQPEHSASARKLSRRRTPASRSGADPVTSVGKRLRPLVSTQPAKKVATGEALLPSSPTLGAEPARPQAVLVESGPVSYHADEEADEEEPDEEDGEPCVSALQMMGSNDYGCDGDEDDGY

SEQ ID NO: 1572 - protein, 650 aa, Homo Sapiens
MTGRVCRGCGGTDIELDAARGDAVCTACGSVLEDNIIVSEVQFVESSGGGSSAVGQFVSLDGRRHIHHLGNQLQLNQHCLDTAFNFFKMAVSRHLTRGRKMAHVIAACLYLVCRTEGTPHMLLDLSDLLQVNVYVLGKTFLLLARELCINAPAIDPCLYIPRFAHLLEFGEKNHEVSMTALRLLQRMKRDWMHTGRRPSGLCGAALLVAARMHDFRRTVKEVISVVKVCESTLRKRLTEFEDTPTSQLTIDEFMKIDLEEECDPPSYTAGQRKLRMKQLEQVLSKKLEEVEGEISSYQDAIEIELENSRPKAKGGLASLAKDGSTEDTASSLCGEEDTEDEELEAAASHLNKDLYRELLGGAPGSSEAAGSPEWGGRPPALGSLLDPLPTAASLGISDSIRECISSQSSDPKDASGDGELDLSGIDDLEIDRYILNESEARVKAELWMRENAEYLREQREKEARIAKEKELGIYKEHKPKKSCKRREPIQASTAREAIEKMLEQKKISSKINYSVLRGLSSAGGGSPHREDAQPEHSASARKLSRRRTPASRSGADPVTSVGKRLRPLVSTQPAKKVATGEALLPSSPTLGAEPARPQAVLVESGPVSYHADEEADEEEPDEEDGEPCVSALQMMGSNDYGCDGDEDDGY

SEQ ID NO: 1573 - protein, 185 aa, Homo Sapiens
  misc_feature (1)..(1): Xaa can be any naturally occurring amino acid
XGQFVSLDGAGKTPTLGGGFHVNLGKESRAQTLQNDPCLYIPRFAHLLEFGEKNHEVSMTALRLLQRMKRDWMHTGRRPSGLCGAALLVAARMHDFRRTVKEVISVVKVCESTLRKRLTEFEDTPTSQLTIDEFMKIDLEEECDPPSYTAGQRKLRMKQLEQVLSKKLEEVEGEISSYQDAIEIE

SEQ ID NO: 1574 - protein, 761 aa, Homo Sapiens
MNWRFVELLYFLFIWGRISVQPSHQEPAGTDQHVSKEFDWLISDRGPFHHSRSYLSFVERHRQGFTTRYKIYREFARWKVRNTAIERRDLVRHPVPLMPEFQRSIRLLGRRPTTQQFIDTIIKKYGTHLLISATLGGEEALTMYMDKSRLDRKSGNATQSVEALHQLASSYFVDRDGTMRRLHEIQISTGAIKVTETRTGPLGCNSYDNLDSVSSVLLQSTESKLHLQGLQIIFPQYLQEKFVQSALSYIMCNGEGEYLCQNSQCRCQCAEEFPQCNCPITDIQIMEYTLANMAKSWAEAYKDLENSDEFKSFMKRLPSNHFLTIGSIHQHWGNDWDLQNRYKLLQSATEAQRQKIQRTARKLFGLSVRCRHNPNHQLPRERTIQQWLARVQSLLYCNENGFWGTFLESQRSCVCHGSTTLCQRPIPCVIGGNNSCAMCSLANISLCGSCNKGYKLYRGRCEPQNVDSERSEQFISFETDLDFQDLELKYLLQKMDSRLYVHTTFISNEIRLDTFFDPRWRKRMSLTLKSNKNRMDFIHMVIGMSMRICQMRNSSLDPMFFVYVNPFSGSHSEGWNMPFGEFGYPRWEKIRLQNSQCYNWTLLLGNRWKTFFETVHIYLRSRTRLPTLLRNETGQGPVDLSDPSKRQFYIKISDVQVFGYSLRFNADLLRSAVQQVNQSYTQGGQFYSSSSVMLLLLDIRDRINRLAPPVAPGKPQLDLFSCMLKHRLKLTNSEIIRVNHALDLYNTEILKQSDQMTAKLC

SEQ ID NO: 1575 - protein, 320 aa, Homo Sapiens
MNWRFVELLYFLFIWGRISVQPSHQEPAGTDQHVSKEFDWLISDRGPFHHSRSYLSFVERHRQGFTTRYKIYREFARWKVRNTAIERRDLVRHPVPLMPEFQRSIRLLGRRPTTQQFIDTIIKKYGTHLLISATLGGEEALTMYMDKSRLDRKSGNATQSVEALHQLASSYFVDRDGTMRRLHEIQISTGAIKVTETRTGPLGCNSYDNLDSVSSVLLQSTESKLHLQGLQIIFPQYLQEKFVQSALSYIMCNGEGEYLCQNSQCRCQCAEEFPQCNCPITDIQIMEYTLANMAKSWAEAYKDLENSGRESHSVPLHEWP

SEQ ID NO: 1576 - protein, 783 aa, Homo Sapiens
MRWQCGTRFRGLRPAVAPWTALLALGLPGWVLAVSATAAAVVPEQHASVAGQHPLDWLLTDRGPFHRAQEYADFMERYRQGFTTRYRIYREFARWKVNNLALERKDFFSLPLPLAPEFIRNIRLLGRRPNLQQVTENLIKKYGTHFLLSATLGGEESLTIFVDKQKLGRKTETTGGASIIGGSGNSTAVSLETLHQLAASYFIDRESTLRRLHHIQIATGAIKVTETRTGPLGCSNYDNLDSVSSVLVQSPENKVQLLGLQVLLPEYLRERFVAAALSYITCSSEGELVCKENDCWCKCSPTFPECNCPDADIQAMEDSLLQIQDSWATHNRQFEESEEFQALLKRLPDDRFLNSTAISQFWAMDTSLQHRYQQLGAGLKVLFKKTHRILRRLFNLCKRCHRQPRFRLPKERSLSYWWNRIQSLLYCGESTFPGTFLEQSHSCTCPYDQSSCQGPIPCALGEGPACAHCAPDNSTRCGSCNPGYVLAQGLCRPEVAESLENFLGLETDLQDLELKYLLQKQDSRIEVHSIFISNDMRLGSWFDPSWRKRMLLTLKSNKYKPGLVHVMLALSLQICLTKNSTLEPVMAIYVNPFGGSHSESWFMPVNEGSFPDWERTNVDAAAQCQNWTITLGNRWKTFFETVHVYLRSRIKSLDDSSNETIYYEPLEMTDPSKNLGYMKINTLQVFGYSLPFDPDAIRDLILQLDYPYTQGSQDSALLQLIELRDRVNQLSPPGKVRLDLFSCLLRHRLKLANNEVGRIQSSLRAFNSKLPNPVEYETGKLCS

SEQ ID NO: 1577 - protein, 28 aa, Homo Sapiens
MIWRSRAGAELFSLMALWEWIALSLHCW

SEQ ID NO: 1578 - protein, 158 aa, Homo Sapiens
MIWRSRAGAELFSLMALWEWIALSLHCWVLAVAAVSDQHATSPFDWLLSDKGPFHRSQEYTDFVDRSRQGFSTRYKIYREFGRWKVNNLAVERRNFLGSPLPLAPEFFRNIRLLGRRPTLQQITENLIKKYGTHFLLSATLGGEESLTIFVDKRKLSK

SEQ ID NO: 1579 - protein, 766 aa, Homo Sapiens
MIWRSRAGAELFSLMALWEWIALSLHCWVLAVAAVSDQHATSPFDWLLSDKGPFHRSQEYTDFVDRSRQGFSTRYKIYREFGRWKVNNLAVERRNFLGSPLPLAPEFFRNIRLLGRRPTLQQITENLIKKYGTHFLLSATLGGEESLTIFVDKRKLSKRAEGSDSTTNSSSVTLETLHQLAASYFIDRDSTLRRLHHIQIASTAIKVTETRTGPLGCSNYDNLDSVSSVLVQSPENKIQLQGLQVLLPDYLQERFVQAALSYIACNSEGEFICKENDCWCHCGPKFPECNCPSMDIQAMEENLLRITETWKAYNSDFEESDEFKLFMKRLPMNYFLNTSTIMHLWTMDSNFQRRYEQLENSMKQLFLKAQKIVHKLFSLSKRCHKQPLISLPRQRTSTYWLTRIQSFLYCNENGLLGSFSEETHSCTCPNDQVVCTAFLPCTVGDASACLTCAPDNRTRCGTCNTGYMLSQGLCKPEVAESTDHYIGFETDLQDLEMKYLLQKTDRRIEVHAIFISNDMRLNSWFDPSWRKRMLLTLKSNKYKSSLVHMILGLSLQICLTKNSTLEPVLAVYVNPFGGSHSESWFMPVNENSFPDWERTKLDLPLQCYNWTLTLGNKWKTFFETVHIYLRSRIKSNGPNGNESIYYEPLEFIDPSRNLGYMKINNIQVFGYSMHFDPEAIRDLILQLDYPYTQGSQDSALLQLLEIRDRVNKLSPPGQRRLDLFSCLLRHRLKLSTSEVVRIQSALQAFNAKLPNTMDYDTTKLCS

SEQ ID NO: 1580 - protein, 385 aa, Homo Sapiens
MAAALFVLLGFALLGTHGASGAAGFVQAPLSQQRWVGGSVELHCEAVGSPVPEIQWWFEGQGPNDTCSQLWDGARLDRVHIHATYHQHAASTISIDTLVEEDTGTYECRASNDPDRNHLTRAPRVKWVRAQAVVLVLEPGTVFTTVEDLGSKILLTCSLNDSATEVTGHRWLKGGVVLKEDALPGQKTEFKVDSDDQWGEYSCVFLPEPMGTANIQLHGPPRVKAVKSSEHINEGETAMLVCKSESVPPVTDWAWYKITDSEDKALMNGSESRFFVSSSQGRSELHIENLNMEADPGQYRCNGTSSKGSDQAIITLRVRSHLAALWPFLGIVAEVLVLVTIIFIYEKRRKPEDVLDDDDAGSAPLKSSGQHQNDKGKNVRQRNSS

SEQ ID NO: 1581 - protein, 55 aa, Homo Sapiens
MAAALFVLLGFALLGTHGASGAAGTVFTTVEDLGSKILLTCSLNDSATEQRAAPE

SEQ ID NO: 1582 - protein, 132 aa, Homo Sapiens
MAAALFVLLGFALLGTHGASGAAGTVFTTVEDLGSKILLTCSLNDSATEVTGHRWLKGGVVLKEDALPGQKTEFKAPTRPSSRSACAATWPPSGPSWASWLRCWCWSPSSSSTRSAGSPRTSWMMTTPALHP

SEQ ID NO: 1583 - protein, 269 aa, Homo Sapiens
MAAALFVLLGFALLGTHGASGAAGTVFTTVEDLGSKILLTCSLNDSATEVTGHRWLKGGVVLKEDALPGQKTEFKVDSDDQWGEYSCVFLPEPMGTANIQLHGPPRVKAVKSSEHINEGETAMLVCKSESVPPVTDWAWYKITDSEDKALMNGSESRFFVSSSQGRSELHIENLNMEADPGQYRCNGTSSKGSDQAIITLRVRSHLAALWPFLGIVAEVLVLVTIIFIYEKRRKPEDVLDDDDAGSAPLKSSGQHQNDKGKNVRQRNSS

SEQ ID NO: 1584 - protein, 161 aa, Homo Sapiens [sequence omitted]

SEQ ID NO: 1585 - protein, 189 aa, Homo Sapiens
MAAALFVLLGFALLGTHGASGAGPPRVKAVKSSEHINEGETAMLVCKSESVPPVTDWAWYKITDSEDKALMNGSESRFFVSSSQGRSELHIENLNMEADPGQYRCNGTSSKGSDQAIITLRVRSHLAALWPFLGIVAEVLVLVTIIFIYEKRRKPEDVLDDDDAGSAPLKSSGQHQNDKGKNVRQRNSS

SEQ ID NO: 1586 - protein, 221 aa, Homo Sapiens
MAAALFVLLGFALLGTHGASGAVFTTVEDLGSKILLTCSLNDSATEVTGHRWLKGGVVLKEDALPGQKTEFKVDSDDQWGEYSCVFLPEPMGTANIQLHGPPRVKAVKSSEHINEGETAMLVCKSESVPPVTDWAWYKITDSEDKALMNGSESRFFVSSSQGRSELHIENLNMEADPGQYRCNGTSSKGSDQAIITLRVRSHLAALWPFLGIVAEVLVLVT

SEQ ID NO: 1587 - protein, 52 aa, Homo Sapiens
MGTANIQLHGPPRVKAVKSSEHINEGETAMLVCKSESVPPVTDWAWYKITDS

SEQ ID NO: 1588 - protein, 84 aa, Homo Sapiens
MGTANIQLHGPPRVKAVKSSEHINEGETAMLVCKSESVPPVTDWAWYKITDSEDKALMNGSESRFFVSSSQGRSELHIENLNME

SEQ ID NO: 1589 - protein, 176 aa, Homo Sapiens
MGTANIQLHGPPRVKAVKSSEHINEGETAMLVCKSESVPPVTDWAWYKITDSEDKALMNGSESRFFVSSSQGRSELHIENLNMEADPGQYRCNGTSSKGSDQAIITLRVRSHLAALWPFLGIVAEVLVLVTIIFIYEKRRKPEDVLDDDDAGSAPLKSSGQHQNDKGKNVRQRNSS

SEQ ID NO: 1590 - protein, 205 aa, Homo Sapiens
MKQSDASPQERVDSDDQWGEYSCVFLPEPMGTANIQLHGPPRVKAVKSSEHINEGETAMLVCKSESVPPVTDWAWYKITDSEDKALMNGSESRFFVSSSQGRSELHIENLNMEADPGQYRCNGTSSKGSDQAIITLRVRSHLAALWPFLGIVAEVLVLVTIIFIYEKRRKPEDVLDDDDAGSAPLKSSGQHQNDKGKNVRQRNSS

SEQ ID NO: 1591 - protein, 132 aa, Homo Sapiens
MGSLMLLFVETTRNSSACIFPVILNELSSTVETITHFPEVTDGECVFPFHYKNGTYYDCIKSKARHKWCSLNKTYEGYWKFCSAEDFANCVFPFWYRRLIYWECTDDGEAFGKKWCSLTKNFNKDRIWKYCE

SEQ ID NO: 1592 - protein, 155 aa, Homo Sapiens
GLDYQSCPTSEDCENNPVDSFWKRASIQYSKDSSGVIHVMLNGSEPTGAYPIKGFFADYEIPNLQKEKITRIEIWVMHEIGGPNVESCGEGSMKVLEKRLKDMGFQYSCINDYRPVKLLQCVDHSTHPDCALKSPKRLCGTLGVRPRAEPYNRRF

SEQ ID NO: 1593 - protein, 318 aa, Homo Sapiens
MAAQGCAASRLLQLLLQLLLLLLLLAAGGARARWRGEGTSAHLRDIFLGRCAEYRALLSPEQRNKNCTAIWEAFKVALDKDPCSVLPSDYDLFINLSRHSIPRDKSLFWENSHLLVNSFADNTRRFMPLSDVLYGRVADFLSWCRQKNDSGLDYQSCPTSEDCENNPVDSFWKRASIQYSKDSSGVIHVMLNGSEPTGAYPIKGFFADYEIPNLQKEKITRIEIWVMHEIGGPNVESCGEGSMKVLEKRLKDMGFQYSCINDYRPVKLLQCVDHSTHPDCALKSAAAATQRKAPSLYTEQRAGLIIPLFLVLASRTQL

SEQ ID NO: 1594 - protein, 333 aa, Homo Sapiens
MAAQGCAASRLLQLLLQLLLLLLLLAAGGARARWRGEGTSAHLRDIFLGRCAEYRALLSPEQRQIRNSREPPVLHTTQNKNCTAIWEAFKVALDKDPCSVLPSDYDLFINLSRHSIPRDKSLFWENSHLLVNSFADNTRRFMPLSDVLYGRVADFLSWCRQKNDSGLDYQSCPTSEDCENNPVDSFWKRASIQYSKDSSGVIHVMLNGSEPTGAYPIKGFFADYEIPNLQKEKITRIEIWVMHEIGGPNVESCGEGSMKVLEKRLKDMGFQYSCINDYRPVKLLQCVDHSTHPDCALKSAAAATQRKAPSLYTEQRAGLIIPLFLVLASRTQL

SEQ ID NO: 1595 - protein, 97 aa, Homo Sapiens
  misc_feature (1)..(1): Xaa can be any naturally occurring amino acid
XSEPTGAYPIKGFFADYEIPNLQKEKITRIEIWVMHEIGGPNVESCGEGSMKVLEKRLKDMGFQYSCINDYRPVKLLQCVDHSTHPDCALKSKLWEP

SEQ ID NO: 1596 - protein, 186 aa, Homo Sapiens
  misc_feature (1)..(1): Xaa can be any naturally occurring amino acid
XSLFWENSHLLVNSFADNTRRFMPLSDVLYGRVADFLSWCRQKNDSGLDYQSCPTSEDCENNPVDSFWKRASIQYSKDSSGVIHVMLNGSEPTGAYPIKGFFADYEIPNLQKEKITRIEIWVMHEIGGPNVESCGEGSMKVLEKRLKDMGFQYSCINDYRPVKLLQCVDHSTHPDCALKSDGVSPC

SEQ ID NO: 1597 - protein, 478 aa, Homo Sapiens
MPRRGYSKPGSWGSFWAMLTLVGLVTHAAQRADVGGEAAGTSINHSQAVLQRLQELLRQGNASDVVLRVQAAGTDEVRVFHAHRLLLGLHSELFLELLSNQSEAVLQEPQDCAAVFDKFIRYLYCGELTVLLTQAIPLHRLATKYGVSSLQRGVADYMRAHLAGGAGPAVGWYHYAVGTGDEALRESCLQFLAWNLSAVAASTEWGAVSPELLWQLLQRSDLVLQDELELFHALEAWLGRARPPPAVAERALRAIRYPMIPPAQLFQLQARSAALARHGPAVADLLLQAYQFHAASPLHYAKFFDVNGSAFLPRNYLAPAWGAPWVINNPARDDRSTSFQTQLGPSGHDAGRRVTWNVLFSPRWLPVSLRPVYADAAGTALPAARPEDGRPRLVVTPASSGGDAAGVSFQKTVLVGARQQGRLLVRHAYSFHQSSEEAGDFLAHADLQRRNSEYLVENALHLHLIVKPVYHTLIRTPK

SEQ ID NO: 1598 - protein, 179 aa, Homo Sapiens
MAHAHIQGGRRAKSRFVVCIMSGARSKLALFLCGCYVVALGAHTGEESVADHHEAEYYVAAVYEHPSILSLNPLALISRQEALELMNQNLDIYEQQVMTAAQKDVQIIVFPEDGIHGFNFTRTSIYPFLDFMPSPQVVRWNPCLEPHRFNDTEVIPAFFLSRLRVHRGDLSQGPEAVTC

SEQ ID NO: 1599 - protein, 543 aa, Homo Sapiens
MAHAHIQGGRRAKSRFVVCIMSGARSKLALFLCGCYVVALGAHTGEESVADHHEAEYYVAAVYEHPSILSLNPLALISRQEALELMNQNLDIYEQQVMTAAQKDVQIIVFPEDGIHGFNFTRTSIYPFLDFMPSPQVVRWNPCLEPHRFNDTEVLQRLSCMAIRGDMFLVANLGTKEPCHSSDPRCPKDGRYQFNTNVVFSNNGTLVDRYRKHNLYFEAAFDVPLKVDLITFDTPFAGRFGIFTCFDILFFDPAIRVLRDYKVKHVVYPTAWMNQLPLLAAIEIQKAFAVAFGINVLAANVHHPVLGMTGSGIHTPLESFWYHDMENPKSHLIIAQVAKNPVGLIGAENATGETDPSHSKFLKILSGDPYCEKDAQEVHCDEATKWNVNAPPTFHSEMMYDNFTLVPVWGKEGYLHVCSNGLCCYLLYERPTLSKELYALGVFDGLHTVHGTYYIQVCALVRCGGLGFDTCGQEITEATGIFEFHLWGNFSTSYIFPLFLTSGMTLEVPDQLGWENDHYFLRKSRLSSGLVTAALYGRLYERD

SEQ ID NO: 1600 - protein, 545 aa, Homo Sapiens
MARKETQLIIKMNHLARFVVCIMSGARSKLALFLCGCYVVALGAHTGEESVADHHEAEYYVAAVYEHPSILSLNPLALISRQEALELMNQNLDIYEQQVMTAAQKDVQIIVFPEDGIHGFNFTRTSIYPFLDFMPSPQVVRWNPCLEPHRFNDTEVLQRLSCMAIRGDMFLVANLGTKEPCHSSDPRCPKDGRYQFNTNVVFSNNGTLVDRYRKHNLYFEAAFDVPLKVDLITFDTPFAGRFGIFTCFDILFFDPAIRVLRDYKVKHVVYPTAWMNQLPLLAAIEIQKAFAVAFGINVLAANVHHPVLGMTGSGIHTPLESFWYHDMENPKSHLIIAQVAKNPVGLIGAENATGETDPSHSKFLKILSGDPYCEKDAQEVHCDEATKWNVNAPPTFHSEMMYDNFTLVPVWGKEGYLHVCSNGLCCYLLYERPTLSKELYALGVFDGLHTVHGTYYIQVCALVRCGGLGFDTCGQEITEATGIFEFHLWGNFSTSYIFPLFLTSGMTLEVPDQLGWENDHYFLRKSRLSSGLVTAALYGRLYERD

SEQ ID NO: 1601 - protein, 545 aa, Homo Sapiens
MPEGGGTSRRLLPMQSRFVVCIMSGARSKLALFLCGCYVVALGAHTGEESVADHHEAEYYVAAVYEHPSILSLNPLALISRQEALELMNQNLDIYEQQVMTAAQKDVQIIVFPEDGIHGFNFTRTSIYPFLDFMPSPQVVRWNPCLEPHRFNDTEVLQRLSCMAIRGDMFLVANLGTKEPCHSSDPRCPKDGRYQFNTNVVFSNNGTLVDRYRKHNLYFEAAFDVPLKVDLITFDTPFAGRFGIFTCFDILFFDPAIRVLRDYKVKHVVYPTAWMNQLPLLAAIEIQKAFAVAFGINVLAANVHHPVLGMTGSGIHTPLESFWYHDMENPKSHLIIAQVAKNPVGLIGAENATGETDPSHSKFLKILSGDPYCEKDAQEVHCDEATKWNVNAPPTFHSEMMYDNFTLVPVWGKEGYLHVCSNGLCCYLLYERPTLSKELYALGVFDGLHTVHGTYYIQVCALVRCGGLGFDTCGQEITEATGIFEFHLWGNFSTSYIFPLFLTSGMTLEVPDQLGWENDHYFLRKSRLSSGLVTAALYGRLYERD

SEQ ID NO: 1602 - protein, 159 aa, Homo Sapiens
MSGARSKLALFLCGCYVVALGAHTGEESVADHHEAEYYVAAVYEHPSILSLNPLALISRQEALELMNQNLDIYEQQVMTAAQKDVQIIVFPEDGIHGFNFTRTSIYPFLDFMPSPQVVRWNPCLEPHRFNDTEVIPAFFLSRLRVHRGDLSQGPEAVTC

SEQ ID NO: 1603 - protein, 251 aa, Homo Sapiens
MSGARSKLALFLCGCYVVALGAHTGEESVADHHEAEYYVAAVYEHPSILSLNPLALISRQEALELMNQNLDIYEQQVMTAAQKDVQIIVFPEDGIHGFNFTRTSIYPFLDFMPSPQVVRWNPCLEPHRFNDTEVLQRLSCMAIRGDMFLVANLGTKEPCHSSDPRCPKDGRYQFNTNVVFSNNGTLVDRYRKHNLYFEAAFDVPLKVDLITFDTPFAGRFGIFTCFDILFFDPAIRVLRDYKVKHVVYPTA

SEQ ID NO: 1604 - protein, 523 aa, Homo Sapiens
MSGARSKLALFLCGCYVVALGAHTGEESVADHHEAEYYVAAVYEHPSILSLNPLALISRQEALELMNQNLDIYEQQVMTAAQKDVQIIVFPEDGIHGFNFTRTSIYPFLDFMPSPQVVRWNPCLEPHRFNDTEVLQRLSCMAIRGDMFLVANLGTKEPCHSSDPRCPKDGRYQFNTNVVFSNNGTLVDRYRKHNLYFEAAFDVPLKVDLITFDTPFAGRFGIFTCFDILFFDPAIRVLRDYKVKHVVYPTAWMNQLPLLAAIEIQKAFAVAFGINVLAANVHHPVLGMTGSGIHTPLESFWYHDMENPKSHLIIAQVAKNPVGLIGAENATGETDPSHSKFLKILSGDPYCEKDAQEVHCDEATKWNVNAPPTFHSEMMYDNFTLVPVWGKEGYLHVCSNGLCCYLLYERPTLSKELYALGVFDGLHTVHGTYYIQVCALVRCGGLGFDTCGQEITEATGIFEFHLWGNFSTSYIFPLFLTSGMTLEVPDQLGWENDHYFLRKSRLSSGLVTAALYGRLYERD

SEQ ID NO: 1605 - protein, 523 aa, Homo Sapiens; identical to SEQ ID NO: 1604

SEQ ID NO: 1606 - protein, 523 aa, Homo Sapiens; identical to SEQ ID NO: 1604

SEQ ID NO: 1607 - protein, 523 aa, Homo Sapiens; identical to SEQ ID NO: 1604

SEQ ID NO: 1608 - protein, 56 aa, Homo Sapiens
FIIFMAVSICCIKKLQREKKILSGEKKVEQEEKEIAQQLQEELRWRRTFLHAGECL

SEQ ID NO: 1609 - protein, 96 aa, Homo Sapiens
MEPAAALHFSLPASLLLLLLLLLLSLCALVSAQFTVVGPANPILAMVGENTTLRCHLSPEKNAEDMEVRWFRSQFSPAVFVYKGGRERTEEQMEEY

SEQ ID NO: 1610 - protein, 256 aa, Homo Sapiens
MEPAAALHFSLPASLLLLLLLLLLSLCALVSAQFTVVGPANPILAMVGENTTLRCHLSPEKNAEDMEVRWFRSQFSPAVFVYKGGRERTEEQMEEYRGRITFVSKDINRGSVALVIHNVTAQENGIYRCYFQEGRSYDEAILRLVVAESFMPSASPWMVALAVILTASPWMVSMTVILAVFIIFMAVSICCIKKLQREKKILSGEKKVEQEEKEIAQQLQEELRWRRTFLHAGYELPGIRGPSWKRPLHGEPPSAF

SEQ ID NO: 1611 - protein, 239 aa, Homo Sapiens
MEPAAALHFSLPASLLLLLLLLLLSLCALVSAQFTVVGPANPILAMVGENTTLRCHLSPEKNAEDMEVRWFRSQFSPAVFVYKGGRERTEEQMEEYRGRITFVSKDINRGSVALVIHNVTAQENGIYRCYFQEGRSYDEAILRLVVAGLGSKPLIEIKAQEDGSIWLECISGGWYPEPLTVWRDPYGEVVPALKEVSIADADGLFMVTTAVIIRDKYVRNVSCSVNNTLLGQEKETVIF

SEQ ID NO: 1612 - protein, 523 aa, Homo Sapiens
MEPAAALHFSLPASLLLLLLLLLLSLCALVSAQFTVVGPANPILAMVGENTTLRCHLSPEKNAEDMEVRWFRSQFSPAVFVYKGGRERTEEQMEEYRGRITFVSKDINRGSVALVIHNVTAQENGIYRCYFQEGRSYDEAILRLVVAGLGSKPLIEIKAQEDGSIWLECISGGWYPEPLTVWRDPYGEVVPALKEVSIADADGLFMVTTAVIIRDKYVRNVSCSVNNTLLGQEKETVIFIPESFMPSASPWMVALAVILTASPWMVSMTVILAVFIIFMAVSICCIKKLQREKKILSGEKKVEQEEKEIAQQLQEELRWRRTFLHAADVVLDPDTAHPELFLSEDRRSVRRGPYRQRVPDNPERFDSQPCVLGWESFASGKHYWEVEVENVMVWTVGVCRHSVERKGEVLLIPQNGFWTLEMFGNQYRALSSPERILPLKESLCRVGVFLDYEAGDVSFYNMRDRSHIYTCPRSAFTVPVRPFFRLGSDDSPIFICPALTGASGVMVPEEGLKLHRVGTHQSL

SEQ ID NO: 1613 - protein, 336 aa, Homo Sapiens
MEPAAALHFSLPASLLLLLLLLLLSLCALVSAQFTVVGPANPILAMVGENTTLRCHLSPEKNAEDMEVRWFRSQFSPAVFVYKGGRERTEEQMEEYRGRITFVSKDINRGSVALVIHNVTAQENGIYRCYFQEGRSYDEAILRLVVAGLGSKPLIEIKAQEDGSIWLECISGGWYPEPLTVWRDPYGEVVPALKEVSIADADGLFMVTTAVIIRDKYVRNVSCSVNNTLLGQEKETVIFIPESFMPSASPWMVALAVILTASPWMVSMTVILAVFIIFMAVSICCIKKLQREKKILSGEKKVEQEEKEIAQQLQEELRWRRTFLHADVNLTGLRNT

SEQ ID NO: 1614 - protein, 523 aa, Homo Sapiens; identical to SEQ ID NO: 1612

SEQ ID NO: 1615 - protein, 313 aa, Homo Sapiens
MEPAAALHFSLPASLLLLLLLLLLSLCALVSESFMPSASPWMVALAVILTASPWMVSMTVILAVFIIFMAVSICCIKKLQREKKILSGEKKVEQEEKEIAQQLQEELRWRRTFLHAADVVLDPDTAHPELFLSEDRRSVRRGPYRQRVPDNPERFDSQPCVLGWESFASGKHYWEVEVENVMVWTVGVCRHSVERKGEVLLIPQNGFWTLEMFGNQYRALSSPERILPLKESLCRVGVFLDYEAGDVSFYNMRDRSHIYTCPRSAFTVPVRPFFRLGSDDSPIFICPALTGASGVMVPEEGLKLHRVGTHQSL

SEQ ID NO: 1616 - protein, 110 aa, Homo Sapiens
MEPAAALHFSLPASLLLLLLLLLLSLCALVSGLGSKPLIEIKAQEDGSIWLECISGGWYPEPLTVWRDPYGEVVPALKEVSIADADGLFMVTTAVIIRDKYVRNVSCSVN

SEQ ID NO: 1617 - protein, 184 aa, Homo Sapiens
MEPAAALHFSLPASLLLLLLLLLLSLCALVSGLGSKPLIEIKAQEDGSIWLECISGGWYPEPLTVWRDPYGEVVPALKEVSIADADGLFMVTTAVIIRDKYVRNVSCSVNNTLLGQEKETVIFIPESFMPSASPWMVALAVILTASPWMVSMTVILAVFIIFMAVSICCIKKLQREKKILSGEK

SEQ ID NO: 1618 - protein, 407 aa, Homo Sapiens
MEPAAALHFSLPASLLLLLLLLLLSLCALVSGLGSKPLIEIKAQEDGSIWLECISGGWYPEPLTVWRDPYGEVVPALKEVSIADADGLFMVTTAVIIRDKYVRNVSCSVNNTLLGQEKETVIFIPESFMPSASPWMVALAVILTASPWMVSMTVILAVFIIFMAVSICCIKKLQREKKILSGEKKVEQEEKEIAQQLQEELRWRRTFLHAADVVLDPDTAHPELFLSEDRRSVRRGPYRQRVPDNPERFDSQPCVLGWESFASGKHYWEVEVENVMVWTVGVCRHSVERKGEVLLIPQNGFWTLEMFGNQYRALSSPERILPLKESLCRVGVFLDYEAGDVSFYNMRDRSHIYTCPRSAFTVPVRPFFRLGSDDSPIFICPALTGASGVMVPEEGLKLHRVGTHQSL

SEQ ID NO: 1619 - protein, 39 aa, Homo Sapiens
MEPAAALHFSLPASLLLLLLLLLLSLCALVSVLPRSVCV

SEQ ID NO: 1620 - protein, 80 aa, Homo Sapiens
MVTTAVIIRDKYVRNVSCSVNNTLLGQEKETVIFIPESFMPSASPWMVALAVILTASPWMVSMTVILAVFIIFMAVSICC

SEQ ID NO: 1621 - protein, 237 aa, Homo Sapiens
MVTTAVIIRDKYVRNVSCSVNNTLLGQEKETVIFIPESFMPSASPWMVALAVILTASPWMVSMTVILAVFIIFMAVSICCIKKLQREKKILSGEKKVEQEEKEIAQQLQEELRWRRTFLHAADVVLDPDTAHPELFLSEDRRSVRRGPYRQRVPDNPERFDSQPCVLGWESFASGKHYWEVEVENVMVWTVGVCRHSVERKGEVLLIPQNGFWTLEMFGNQYRALSSPERILPLKES

SEQ ID NO: 1622 - protein, 43 aa, Homo Sapiens
MKMASFLAFLLLNFRVCLLLLQLLMPHSAQFSVLGPSGPILAM

SEQ ID NO: 1623 - protein, 92 aa, Homo Sapiens
MKMASFLAFLLLNFRVCLLLLQLLMPHSAQFSVLGPSGPILAMVGEDADLPCHLFPTMSAETMELKWVSSSLRQVVNVYADGKEVEDRQSAP

SEQ ID NO: 1624 - protein, 119 aa, Homo Sapiens
MKMASFLAFLLLNFRVCLLLLQLLMPHSAQFSVLGPSGPILAMVGEDADLPCHLFPTMSAETMELKWVSSSLRQVVNVYADGKEVEDRQSAPYRGRTSILRDGITAGKAALRIHNVTAS

SEQ ID NO: 1625 - protein, 513 aa, Homo Sapiens
MKMASFLAFLLLNFRVCLLLLQLLMPHSAQFSVLGPSGPILAMVGEDADLPCHLFPTMSAETMELKWVSSSLRQVVNVYADGKEVEDRQSAPYRGRTSILRDGITAGKAALRIHNVTASDSGKYLCYFQDGDFYEKALVELKVAALGSDLHVDVKGYKDGGIHLECRSTGWYPQPQIQWSNNKGENIPTVEAPVVADGVGLYAVAASVIMRGSSGEGVSCTIRSSLLGLEKTASISIADPFFRSAQRWIAALAGTLPVLLLLLGGAGYFLWQQQEEKKTQFRKKKREQELREMAWSTMKQEQSTRVKLLEELRWRSIQYASRGERHSAYNEWKKALFKPADVILDPKTANPILLVSEDQRSVQRAKEPQDLPDNPERFNWHYCVLGCESFISGRHYWEVEVGDRKEWHIGVCSKNVQRKGWVKMTPENGFWTMGLTDGNKYRTLTEPRTNLKLPKPPKKVGVFLDYETGDISFYNAVDGSHIHTFLDVSFSEALYPVFRILTLEPTALTICPA

SEQ ID NO: 1626 - protein, 352 aa, Homo Sapiens
MKMASFLAFLLLNFRVCLLLLQLLMPHSAQFSVLGPSGPILAMVGEDADLPCHLFPTMSAETMELKWVSSSLRQVVNVYADGKEVEDRQSAPYRGRTSILRDGITAGKAALRIHNVTASDSGKYLCYFQDGDFYEKALVELKVAALGSDLHVDVKGYKDGGIHLECRSTGWYPQPQIQWSNNKGENIPTVEAPVVADGVGLYAVAASVIMRGSSGEGVSCTIRSSLLGLEKTASISIADPFFRSAQRWIAALAGTLPVLLLLLGGAGYFLWQQQEEKKTQFRKKKREQELREMAWSTMKQEQSTRVKLLEELRWRSIQYASRGERHSAYNEWKKALFKPGEEMLQMRLHFVK

SEQ ID NO: 1627 - protein, 378 aa, Homo Sapiens
MKMASFLAFLLLNFRVCLLLLQLLMPHSAQFSVLGPSGPILAMVGEDADLPCHLFPTMSAETMELKWVSSSLRQVVNVYADGKEVEDRQSAPYRGRTSILRDGITAGKAALRIHNVTASDSGKYLCYFQDGDFYEKALVELKVAALGSDLHVDVKGYKDGGIHLECRSTGWYPQPQIQWSNNKGENIPTVEAPVVADGVGLYAVAASVIMRGSSGEGVSCTIRSSLLGLEKTASISIADPFFRSAQRWIAALAGTLPVLLLLLGGAGYFLWQQQEEKKTQFRKKKREQELREMAWSTMKQEQSTRVKLLEELRWRSIQYASRGERHSAYNEWKKALFKPGPPIGQTQQQTRGQGSPVALSQESAQRTDSWGPEEGGES

SEQ ID NO: 1628 - protein, 461 aa, Homo Sapiens
MKMASFLAFLLLNFRVCLLLLQLLMPHSAQFSVLGPSGPILAMVGEDADLPCHLFPTMSAETMELKWVSSSLRQVVNVYADGKEVEDRQSAPYRGRTSILRDGITAGKAALRIHNVTASDSGKYLCYFQDGDFYEKALVELKVADGVGLYAVAASVIMRGSSGEGVSCTIRSSLLGLEKTASISIADPFFRSAQRWIAALAGTLPVLLLLLGGAGYFLWQQQEEKKTQFRKKKREQELREMAWSTMKQEQSTRVKLLEELRWRSIQYASRGERHSAYNEWKKALFKPADVILDPKTANPILLVSEDQRSVQRAKEPQDLPDNPERFNWHYCVLGCESFISGRHYWEVEVGDRKEWHIGVCSKNVQRKGWVKMTPENGFWTMGLTDGNKYRTLTEPRTNLKLPKPPKKVGVFLDYETGDISFYNAVDGSHIHTFLDVSFSEALYPVFRILTLEPTALTICPA

SEQ ID NO: 1629 - protein, 311 aa, Homo Sapiens
MGIPRAQFSVLGPSGPILAMVGEDADLPCHLFPTMSAETMELKWVSSSLRQVVNVYADGKEVEDRQSAPYRGRTSILRDGITAGKAALRIHNVTASDSGKYLCYFQDGDFYEKALVELKVAALGSNLHVEVKGYEDGGIHLECRSTGWYPQPQIQWSNAKGENIPAVEAPVVADGVGLYEVAASVIMRGGSGEGVSCIIRNSLLGLEKTASISIADPFFRSAQPWIAALAGTLPILLLLLAGASYFLWRQQKEITALSSEIESEQEMKEMGYAATEREISLRESLQEELKRKKIQYLTRGEESSSDTNKSA

SEQ ID NO: 1630 - protein, 334 aa, Homo Sapiens
MKMASSLAFLLLNFHVSLLLVQLLTPCSAQFSVLGPSGPILAMVGEDADLPCHLFPTMSAETMELKWVSSSLRQVVNVYADGKEVEDRQSAPYRGRTSILRDGITAGKAALRIHNVTASDSGKYLCYFQDGDFYEKALVELKVAALGSNLHVEVKGYEDGGIHLECRSTGWYPQPQIQWSNAKGENIPAVEAPVVADGVGLYEVAASVIMRGGSGEGVSCIIRNSLLGLEKTASISIADPFFRSAQPWIAALAGTLPILLLLLAGASYFLWRQQKEITALSSEIESEQEMKEMGYAATEREISLRESLQEELKRKKIQYLTRGEESSSDTNKSA

SEQ ID NO: 1631 - protein, 334 aa, Homo Sapiens; identical to SEQ ID NO: 1630

SEQ ID NO: 1632 - protein, 334 aa, Homo Sapiens; identical to SEQ ID NO: 1630

SEQ ID NO: 1633 - protein, 334 aa, Homo Sapiens; identical to SEQ ID NO: 1630

SEQ ID NO: 1634 - protein, 160 aa, Homo Sapiens
MKMASSLAFLLLNFHVSLLLVQLLTPCSAQFSVLGPSGPILAMVGEDADLPCHLFPTMSAETMELKWVSSSLRQVVNVYADGKEVEDRQSAPYRGRTSILRDGITAGKAALRIHNVTASDSGKYLCYFQDGDFYEKALVELKVADPFFRSAQPWIAALAG

SEQ ID NO: 1635 - protein, 43 aa, Homo Sapiens
MKMASSLAFLLLNFHVSLLLVQLLTPCSGLCSPLGSLYLAFPV

SEQ ID NO: 1636 - protein, 115 aa, Homo Sapiens
MVGEDADLPCHLFPTMSAETMELKWVSSSLRQVVNVYADGKEVEDRQSAPYRGRTSILRDGITAGKAALRIHNVTASDSGKYLCYFQDGDFYEKALVELKVAALGSNLHVEVKGY

SEQ ID NO: 1637 - protein, 196 aa, Homo Sapiens
MVGEDADLPCHLFPTMSAETMELKWVSSSLRQVVNVYADGKEVEDRQSAPYRGRTSILRDGITAGKAALRIHNVTASDSGKYLCYFQDGDFYEKALVELKVAALGSNLHVEVKGYEDGGIHLECRSTGWYPQPQIQWSNAKGENIPAVEAPVVADGVGLYEVAASVIMRGGSGEGVSCIIRNSLLGLEKTASISIA

SEQ ID NO: 1638 - protein, 292 aa, Homo Sapiens
MVGEDADLPCHLFPTMSAETMELKWVSSSLRQVVNVYADGKEVEDRQSAPYRGRTSILRDGITAGKAALRIHNVTASDSGKYLCYFQDGDFYEKALVELKVAALGSNLHVEVKGYEDGGIHLECRSTGWYPQPQIQWSNAKGENIPAVEAPVVADGVGLYEVAASVIMRGGSGEGVSCIIRNSLLGLEKTASISIADPFFRSAQPWIAALAGTLPILLLLLAGASYFLWRQQKEITALSSEIESEQEMKEMGYAATEREISLRESLQEELKRKKIQYLTRGEESSSDTNKSA

SEQ ID NO: 1639 - protein, 115 aa, Homo Sapiens
RGGSGEGVSCIIRNSLLGLEKTASISIADPFFRSAQPWIAALAGTLPILLLLLAGASYFLWRQQKEITALSSEIESEQEMKEMGYAATEREISLRESLQEELKRKKIQYLTREWL

SEQ ID NO: 1640 - protein, 138 aa, Homo Sapiens
MKMASSLAFLLLNFHVSLFLVQLLTPCSAQFSVLGPSGPILAMVGEDADLPCHLFPTMSAETMELRWVSSSLRQVVNVYADGKEVEDRQSAPYRGRTSILRDGITAGKAALRIHNVTASDSGKYLCYFQDGDFYEKAL

SEQ ID NO: 1641 - protein, 238 aa, Homo Sapiens
MKMASSLAFLLLNFHVSLFLVQLLTPCSAQFSVLGPSGPILAMVGEDADLPCHLFPTMSAETMELRWVSSSLRQVVNVYADGKEVEDRQSAPYRGRTSILRDGITAGKAALRIHNVTASDSGKYLCYFQDGDFYEKALVELKVAALGSDLHIEVKGYEDGGIHLECRSTGWYPQPQIKWSDTKGENIPAVEAPVVADGVGLYAVAASVIMRGSSGGGVSCIIRNSLLGLEKTASISIA

SEQ ID NO: 1642 - protein, 584 aa, Homo Sapiens
MKMASSLAFLLLNFHVSLFLVQLLTPCSAQFSVLGPSGPILAMVGEDADLPCHLFPTMSAETMELRWVSSSLRQVVNVYADGKEVEDRQSAPYRGRTSILRDGITAGKAALRIHNVTASDSGKYLCYFQDGDFYEKALVELKVAALGSDLHIEVKGYEDGGIHLECRSTGWYPQPQIKWSDTKGENIPAVEAPVVADGVGLYAVAASVIMRGSSGGGVSCIIRNSLLGLEKTASISIADPFFRSAQPWIAALAGTLPISLLLLAGASYFLWRQQKEKIALSRETEREREMKEMGYAATEQEISLREKLQEELKWRKIQYMARGEKSLAYHEWKMALFKPADVILDPDTANAILLVSEDQRSVQRAEEPRDLPDNPERFEWRYCVLGCENFTSGRHYWEVEVGDRKEWHIGVCSKNVERKKGWVKMTPENGYWTMGLTDGNKYRALTEPRTNLKLPEPPRKVGIFLDYETGEISFYNATDGSHIYTFPHASFSEPLYPVFRILTLEPTALTICPIPKEVESSPDPDLVPDHSLETPLTPGLANESGEPQAEVTSLLLPAHPGAEVSPSATTNQNHKLQARTEALY

SEQ ID NO: 1643 - protein, 127 aa, Homo Sapiens
MKMASSLAFLLLNFHVSLFLVQLLTPCSDADLPCHLFPTMSAETMELRWVSSSLRQVVNVYADGKEVEDRQSAPYRGRTSILRDGITAGKAALRIHNVTASDSGKYLCYFQDGDFYEKALVELKVAA

SEQ ID NO: 1644 - protein, 100 aa, Homo Sapiens
MVGEDADLPCHLFPTMSAETMELRWVSSSLRQVVNVYADGKEVEDRQSAPYRGRTSILRDGITAGKAALRIHNVTASDSGKYLCYFQDGDFYEKALVELK

SEQ ID NO: 1645 - protein, 140 aa, Homo Sapiens
MVGEDADLPCHLFPTMSAETMELRWVSSSLRQVVNVYADGKEVEDRQSAPYRGRTSILRDGITAGKAALRIHNVTASDSGKYLCYFQDGDFYEKALVELKVAALGSDLHIEVKGYEDGGIHLECRSTGWYPQPQIKWSDT

SEQ ID NO: 1646 - protein, 250 aa, Homo Sapiens
MVGEDADLPCHLFPTMSAETMELRWVSSSLRQVVNVYADGKEVEDRQSAPYRGRTSILRDGITAGKAALRIHNVTASDSGKYLCYFQDGDFYEKALVELKVAALGSDLHIEVKGYEDGGIHLECRSTGWYPQPQIKWSDTKGENIPAVEAPVVADGVGLYAVAASVIMRGSSGGGVSCIIRNSLLGLEKTASISIADPFFRSAQPWIAALAGTLPISLLLLAGASYFLWRQQKEKIALSRETEREREMKE

SEQ ID NO: 1647 - protein, 535 aa, Homo Sapiens
MVGEDADLPCHLFPTMSAETMELRWVSSSLRQVVNVYADGKEVEDRQSAPYRGRTSILRDGITAGKAALRIHNVTASDSGKYLCYFQDGDFYEKALVELKVAALGSDLHIEVKGYEDGGIHLECRSTGWYPQPQIKWSDTKGENIPAVEAPVVADGVGLYAVAASVIMRGSSGGGVSCIIRNSLLGLEKTASISIADPFFRSAQPWIAALAGTLPISLLLLAGASYFLWRQQKEKIALSRETEREREMKEMGYAATEQEISLREWRKIQYMARGEKSLAYHEWKMALFKPADVILDPDTANAILLVSEDQRSVQRAEEPRDLPDNPERFEWRYCVLGCENFTSGRHYWEVEVGDRKEWHIGVCSKNVERKKGWVKMTPENGYWTMGLTDGNKYRALTEPRTNLKLPEPPRKVGIFLDYETGEISFYNATDGSHIYTFPHASFSEPLYPVFRILTLEPTALTICPIPKEVESSPDPDLVPDHSLETPLTPGLANESGEPQAEVTSLLLPAHPGAEVSPSATTNQNHKLQARTEALY

SEQ ID NO: 1648 - protein, 210 aa, Homo Sapiens
MVGEDADLPCHLFPTMSAETMELRWVSSSLRQVVNVYADGKEVEDRQSAPYRGRTSILRDGITAGKAALRIHNVTASDSGKYLCYFQDGDFYEKALVELKVAEWRKIQYMARGEKSLAYHEWKMALFKPADVILDPDTANAILLVSEDQRSVQRAEEPRDLPDNPERFEWRYCVLGCENFTSGRHYWEVEVGDRKEWHIGVCSKNVERKK

SEQ ID NO: 1649 - protein, 270 aa, Homo Sapiens
MWLLVSVILISRISSVGGEAMFCDFPKINHGILYDEEKYKPFSQVPTGEVFYYSCEYNFVSPSKSFWTRITCAEEGWSPTPKCLRLCFFPFVENGHSESSGQTHLEGDTVQIICNTGYRLQNNENNISCVERGWSTPPKCRSTISAEKCGPPPPIDNGDITSFLLSVYAPGSSVEYQCQNLYQLEGNNQITCRNGQWSEPPKCLDPCVISQEIMEKYNIKLKWTNQQKLYSRTGDIVEFVCKSGYHPTKSHSFRAMCQNGKLVYPSCEEK

SEQ ID NO: 1650 - protein, 81 aa, Homo Sapiens
MRLLVLSSLLCILLLCFSIFSTEGKRRPAKAWSGRRTRLCCHRVPSPNSTNLKGHHVRLCKPCKLEPEPRLWVVPGALPQV

SEQ ID NO: 1651 - protein, 121 aa, Homo Sapiens
MAASQCLCCSKFLFQRQNLACFLTNPHCGSLVNADGHGEVWTDWNNMSKFFQYGWRCTTNENTYSNRTLMGNWNQERYDLRNIVQPKPLPSQDLSESLTGSQDINLNWILPDTNAQKSQLT

SEQ ID NO: 1652 - protein, 150 aa, Homo Sapiens
MAASQCLCCSKFLFQRQNLACFLTNPHCGSLVNADGHGEVWTDWNNMSKFFQYGWRCTTNENTYSNRTLMGNWNQERYDLRNIVQPKPLPSQFGHYFETTYDTSYNNKMPLSTHRFKREPHWFPGHQPELDPPRYKCTEKSTYMNSYSKP

SEQ ID NO: 1653 - protein, 142 aa, Homo Sapiens
MEQPSKDFCDSHKKSSKSSTYSASSYSSSGKRQNLACFLTNPHCGSLVNADGHGEVWTDWNNMSKFFQYGWRCTTNENTYSNRTLMGNWNQERYDLRNIVQPKPLPSQFGHYFETTYDTSYNNKMPLSTHRFKREPHWFPGH

SEQ ID NO: 1654 - protein, 104 aa, Homo Sapiens
MSKFFQYGWRCTTNENTYSNRTLMGNWNQERYDLRNIVQPKPLPSQFGHYFETTYDTSYNNKMPLSTHRFKREPHWFPGHQPELDPPRYKCTEKSTYMNSYSKP

SEQ ID NO: 1655 - protein, 190 aa, Homo Sapiens
MVIWVILSLLGELGKPGLLTSLKNMEQPSKDFCDSHKKSSKSSTYSASSYSSSGKRQNLACFLTNPHCGSLVNADGHGEVWTDWNNMSKFFQYGWRCTTNENTYSNRTLMGNWNQERYDLRNIVQPKPLPSQFGHYFETTYDTSYNNKMPLSTHRFKREPHWFPGHQPELDPPRYKCTEKSTYMNSYSKP

SEQ ID NO: 1656 - protein, 25 aa, Homo Sapiens
MWTALVLIWIFSLSLSESHAASNDP

SEQ ID NO: 1657 - protein, 114 aa, Homo Sapiens
MWTALVLIWIFSLSLSESHAASNDPRNFVPNKMWKGLVKRNASVETVDNKTSEDVTMAAASPVTLTKGTSAAHLNSMEVTTEDTSRTDAYESYKKKDYTQVDYLINGMYADSEM

SEQ ID NO: 1658 - protein, 449 aa, Homo Sapiens
MWTALVLIWIFSLSLSESHAASNDPRNFVPNKMWKGLVKRNASVETVDNKTSEDVTMAAASPVTLTKGTSAAHLNSMEVTTEDTSRTDVSEPATSGGAADGVTSIAPTAVASSTTAASITTAASSMTVASSAPTTAASSTTVASIAPTTAASSMTAASSTPMTLALPAPTSTSTGRTPSTTATGHPSLSTALAQVPKSSALPRTATLATLATRAQTVATTANTSSPMSTRPSPSKHMPSDTAASPVPPMRPQAQGPISQVSVDQPVVNTTNKSTPMPSNTTPEPAPTPTVVTTTKAQAREPTASPVPVPHTSPIPEMEAMSPTTQPSPMPYTQRAAGPGTSQAPEQVETEATPGTDSTGPTPRSSGGTKMPATDSCQPSTQGQYMVVTTEPLTQAVVDKTLLLVVLLLGVTLFITVLVLFALQAYESYKKKDYTQVDYLINGMYADSEM

SEQ ID NO: 1659 - protein, 145 aa, Homo Sapiens
MLTRLVLSAHLSSTTSPPWTHAAISWELDNVLMPSPRIWPQVTPTGRSASVRSEGNTSSLWNFSAGQDVHAIVTRTCESVLSSAVYTHGCGCVRSATNITCQSSGQQRQAARQEEENSICKAHDSREGRLGYPLSAHQPGSGGPN

SEQ ID NO: 1660 - protein, 145 aa, Homo Sapiens; identical to SEQ ID NO: 1659

SEQ ID NO: 1661 - protein, 98 aa, Homo Sapiens
MVLAMLGALHPRAGLSLFLHLILAVALLRSQPLRSQRSVPEAFSAPLELSQPLSGLVDDYGILPKHPRPRGPRPLLSRAQQRKRDGPDLAEYYYDAHL

SEQ ID NO: 1662 - protein, 376 aa, Homo Sapiens
MGHQFLRGLLTLLLPPPPLYTRHRMLGPESVPPPKRSRSKLMAPPRIGTHNGTFHCDEALACALLRLLPEYRDAEIVRTRDPEKLASCDIVVDVGGEYDPRRHRYDHHQRSFTETMSSLSPGKPWQTKLSSAGLIYLHFGHKLLAQLLGTSEEDSMVGTLYDKMYENFVEEVDAVDNGISQWAEGEPRYALTTTLSARVARLNPTWNHPDQDTEAGFKRAMDLVQEEFLQRLDFYQHSWLPARALVEEALAQRFQVDPSGEIVELAKGACPWKEHLYHLESGLSPPVAIFFVIYTDQAGQWRIQCVPKEPHSFQSRLPLPEPWRGLRDEALDQVSGIPGCIFVHASGFTGGHHTREGALSMARATLAQRSYLPQIS

SEQ ID NO: 1663 - protein, 301 aa, Homo Sapiens
MLGPESVPPPKRSRSKLMAPPRIGTHNGTFHCDEALACALLRLLPEYRDAEIVRTRDPEKLASCDIVVDVGGEYDPRRHRYDHHQRSFTETMSSLSPGKPWQTKLSSAGLIYLHFGHKLLAQLLGTSEEDSMVGTLYDKAGFKRAMDLVQEEFLQRLDFYQHSWLPARALVEEALAQRFQVDPSGEIVELAKGACPWKEHLYHLESGLSPPVAIFFVIYTDQAGQWRIQCVPKEPHSFQSRLPLPEPWRGLRDEALDQVSGIPGCIFVHASGFTGGHHTREGALSMARATLAQRSYLPQIS

SEQ ID NO: 1664 - protein, 213 aa, Homo Sapiens
MYENFVEEVDAVDNGISQWAEGEPRYALTTTLSARVARLNPTWNHPDQDTEAGFKRAMDLVQEEFLQRLDFYQHSWLPARALVEEALAQRFQVDPSGEIVELAKGACPWKEHLYHLESGLSPPVAIFFVIYTDQAGQWRIQCVPKEPHSFQSRLPLPEPWRGLRDEALDQVSGIPGCIFVHASGFTGGHHTREGALSMARATLAQRSYLPQIS

SEQ ID NO: 1665 - protein, 130 aa, Homo Sapiens
  misc_feature (1)..(1): Xaa can be any naturally occurring amino acid
XMVGTLYDKVDPSGEIVELAKGACPWKEHLYHLESGLSPPVAIFFVIYTDQAGQWRIQCVPKEPHSFQSRLPLPEPWRGLRDEALDQVSGIPGCIFVHASGFTGGHHTREGALSMARATLAQRSYLPQIS

SEQ ID NO: 1666 - protein, 46 aa, Homo Sapiens
MAVEDHFELCLAKCRTSSQSVQHENTYRDPIAKYCYGESPPELFPA

SEQ ID NO: 1667 - protein, 47 aa, Homo Sapiens
MVNLAAMVWRRLLRKRWVLALVFGLSLVYFLSSTFKQATFARGRICW

SEQ ID NO: 1668 - protein, 205 aa, Homo Sapiens
MVNLAAMVWRRLLRKRWVLALVFGLSLVYFLSSTFKQEERAVRDRNLLQVHDHNQPIPWKVQFNLGNSSRPSNQCRNSIQGKHLITDELGYVCERKDLLVNGCCNVNVPSTKQYCCDGCWPNGCCSAYEYCVSCCLQPNKQLLLERFLNRAAVAFQNLFMAVEDHFELCLAKCRTSSQSVQHENTYRDPIAKYCYGESPPELFPA

SEQ ID NO: 1669 - protein, 43 aa, Homo Sapiens
  misc_feature (1)..(1): Xaa can be any naturally occurring amino acid
XFGLSLVYFLSSTFKQSVQHENTYRDPIAKYCYGESPPELFPA

SEQ ID NO: 1670 - protein, 53 aa, Homo Sapiens
MPAGVPMSTYLKMFAASLLAMCAGAEVVHRYYRPDLMRNRLRRVKLISQSHIA

SEQ ID NO: 1671 - protein, 53 aa, Homo Sapiens; identical to SEQ ID NO: 1670

SEQ ID NO: 1672 - protein, 59 aa, Homo Sapiens
MPAGVPMSTYLKMFAASLLAMCAGAEVVHRYYRPDLQNWITSLSVGELEGLGRVEQRRP

SEQ ID NO: 1673 - protein, 59 aa, Homo Sapiens; identical to SEQ ID NO: 1672

SEQ ID NO: 1674 - protein, 71 aa, Homo Sapiens
MPAGVPMSTYLKMFAASLLAMCAGAEVVHRYYRPDLTIPEIPPKRGELKTELLGLKERKHKPQVSQQEELK

SEQ ID NO: 1675 - protein, 71 aa, Homo Sapiens; identical to SEQ ID NO: 1674

SEQ ID NO: 1676 - protein, 71 aa, Homo Sapiens; identical to SEQ ID NO: 1674

SEQ ID NO: 1677 - protein, 71 aa, Homo Sapiens; identical to SEQ ID NO: 1674

SEQ ID NO: 1678 - protein, 37 aa, Homo Sapiens
MPAGVPMSTYLKMFAASLLAMCAGAEVVHRYYRPDLV

SEQ ID NO: 1679 - protein, 46 aa, Homo Sapiens
MPAGVPMSTYLKMFAASLLAMCAGAEVVHRYYRPDLVSAGGLLFYF

SEQ ID NO: 1680 - protein, 135 aa, Homo Sapiens [sequence omitted]

SEQ ID NO: 1681 - protein, 135 aa, Homo Sapiens
MFQNLQGTFEKEIGKIIPFTIAFKRAEAVEPDGCVQSWRCCLPCDLGQASRFIHTTVCSAIRWRSCKGERNFAERHILPAELEEQSNHAGMGPILPAMPSVDGNHFQHPAGDCHPYGILCLQAHSASVTARQVLQ

SEQ ID NO: 1682 - protein, 107 aa, Homo Sapiens
MLERENESHGSKSCSRARIGTEVACRACLPPHCAMPPIDAFLCLPFSFALVSGKLYQWKEPVISSVHSKVKRTAEVKEEIVEKEMKKLVHSVFNMADYTFPLQVNTW

SEQ ID NO: 1683 - protein, 49 aa, Homo Sapiens
MLRPALPWLYLGLCSLLVGEAEAPSPVDPLERSRPYAVLRGQNLDQTLH

SEQ ID NO: 1684 - protein, 76 aa, Homo Sapiens
MLRPALPWLYLGLCSLLVGEAEAPSPVDPLERSRPYAVLRGQNLESLSPRLECNGAISARCNLRVWGSSDSPASAP

SEQ ID NO: 1685 - protein, 76 aa, Homo Sapiens; identical to SEQ ID NO: 1684

SEQ ID NO: 1686 - protein, 61 aa, Homo Sapiens
MLRPALPWLYLGLCSLLVGEAEAPSPVDPLERSRPYAVLRGQNLETTGERICLQLFAQHLT

SEQ ID NO: 1687 - protein, 72 aa, Homo Sapiens
MLRPALPWLYLGLCSLLVGEAEAPSPVDPLERSRPYAVLRGQNLVLMGTIFSILLVTVILMAFCVYKPIRRR

SEQ ID NO: 1688 - protein, 126 aa, Homo Sapiens
MRLPGCTLAASEAAPLLNPLVDDYVASEGAVQRVLVPAYAKQLSPATQLAIQRATPETGPENGTKLPPPRPEDMLNAAAALDSALEESGPGSTGELRHSLGLTVSPCRTRGSGQKNSRRKRDLVLS

SEQ ID NO: 1689 - protein, 358 aa, Homo Sapiens
MRLPGCTLAASEAAPLLNPLVDDYVASEGAVQRVLVPAYAKQLSPATQLAIQRATPETGPENGTKLPPPRPEDMLNAAAALDSALEESGPGSTGELRHSLGLTVSPCRTRGSGQKNSRRKRDLVLSKLVHNVHNHITNDKRFNGSESIKSSWNISVVKFLLEKLKQELVTSPHNYTDKELKGACVAYFLTKRREYRNSLNPFKGLKEKEEKKLRSRRYRLFANRSSIMRHFGPEDQRLWNDVTEELMSDEEDSLNEPGVWVARPPRFRAQRLTELCYHLDANSKHGTKANRVYGPPSDRLPSAEAQLLPPELYNPNFQEEEDEGGDENAPGSPSFDQPHKTCCPDLNSFIEIKVEKDE

SEQ ID NO: 1690 - protein, 9 aa, Homo Sapiens
MSFSATILF

SEQ ID NO: 1691 - protein, 9 aa, Homo Sapiens
MSFSATILF

SEQ ID NO: 1692 - protein, 11 aa, Homo Sapiens
MSFSATILFSP

SEQ ID NO: 1693 - protein, 50 aa, Homo Sapiens
MSFSATILFSPPSGSEARCCCCACKSETNGGNTGSQGGNPPPSTPITVTG

SEQ ID NO: 1694 - protein, 79 aa, Homo Sapiens
MSFSATILFSPPSGSEARCCCCACKSETNGGNTGSQGGNPPPSTPITVTGHGLAVQSSEQLLHVIYQRVDKAVGLAEAA

SEQ ID NO: 1695 - protein, 83 aa, Homo Sapiens
MSFSATILFSPPSGSEARCCCCACKSETNGGNTGSQGGNPPPSTPITVTGHGLAVQSSEQLLHVIYQRVDKAVGLAEAALGLA

SEQ ID NO: 1696 - protein, 106 aa, Homo Sapiens
MSFSATILFSPPSGSEARCCCCACKSETNGGNTGSQGGNPPPSTPITVTGHGLAVQSSEQLLHVIYQRVDKAVGLAEAALGLARANNELLKRLQEEVGDLRQGKVS

SEQ ID NO: 1697 - protein, 136 aa, Homo Sapiens
MSFSATILFSPPSGSEARCCCCACKSETNGGNTGSQGGNPPPSTPITVTGHGLAVQSSEQLLHVIYQRVDKAVGLAEAALGLARANNELLKRLQEEVGDLRQGKVSIPDEDGESRAHSSPPEEPGPLKESPGEAFK

SEQ ID NO: 1698 - protein, 199 aa, Homo Sapiens
MSFSATILFSPPSGSEARCCCCACKSETNGGNTGSQGGNPPPSTPITVTGHGLAVQSSEQLLHVIYQRVDKAVGLAEAALGLARANNELLKRLQEEVGDLRQGKVSIPDEDGESRAHSSPPEEPGPLKESPGEAFKALSAVEEECDSVGSGVQVVIEELRQLGAASVGPGPLGFPATQRDMRLPGCTLAASEAAPLLNP

SEQ ID NO: 1699 - protein, 209 aa, Homo Sapiens
MSFSATILFSPPSGSEARCCCCACKSETNGGNTGSQGGNPPPSTPITVTGHGLAVQSSEQLLHVIYQRVDKAVGLAEAALGLARANNELLKRLQEEVGDLRQGKVSIPDEDGESRAHSSPPEEPGPLKESPGEAFKALSAVEEECDSVGSGVQVVIEELRQLGAASVGPGPLGFPATQRDMRLPGCTLAASEAAPLLNPLVDDYVASEG

SEQ ID NO: 1700 - protein, 498 aa, Homo Sapiens
MSFSATILFSPPSGSEARCCCCACKSETNGGNTGSQGGNPPPSTPITVTGHGLAVQSSEQLLHVIYQRVDKAVGLAEAALGLARANNELLKRLQEEVGDLRQGKVSIPDEDGESRAHSSPPEEPGPLKESPGEAFKALSAVEEECDSVGSGVQVVIEELRQLGAASVGPGPLGFPATQRDMRLPGCTLAASEAAPLLNPLVDDYVASEGAVQRVLVPAYAKQLSPATQLAIQRATPETGPENGTKLPPPRPEDMLNAAAALDSALEESGPGSTGELRHSLGLTVSPCRTRGSGQKNSRRKRDLVLSKLVHNVHNHITNDKRFNGSESIKSSWNISVVKFLLEKLKQELVTSPHNYTDKELKGACVAYFLTKRREYRNSLNPFKGLKEKEEKKLRSRRYRLFANRSSIMRHFGPEDQRLWNDVTEELMSDEEDSLNEPDRLPSAEAQLLPPELYNPNFQEEEDEGGDENAPGSPSFDQPHKTCCPDLNSFIEIKVEKDE

SEQ ID NO: 1701 - protein, 538 aa, Homo Sapiens
MSFSATILFSPPSGSEARCCCCACKSETNGGNTGSQGGNPPPSTPITVTGHGLAVQSSEQLLHVIYQRVDKAVGLAEAALGLARANNELLKRLQEEVGDLRQGKVSIPDEDGESRAHSSPPEEPGPLKESPGEAFKALSAVEEECDSVGSGVQVVIEELRQLGAASVGPGPLGFPATQRDMRLPGCTLAASEAAPLLNPLVDDYVASEGAVQRVLVPAYAKQLSPATQLAIQRATPETGPENGTKLPPPRPEDMLNAAAALDSALEESGPGSTGELRHSLGLTVSPCRTRGSGQKNSRRKRDLVLSKLVHNVHNHITNDKRFNGSESIKSSWNISVVKFLLEKLKQELVTSPHNYTDKELKGACVAYFLTKRREYRNSLNPFKGLKEKEEKKLRSRRYRLFANRSSIMRHFGPEDQRLWNDVTEELMSDEEDSLNEPGVWVARPPRFRAQRLTELCYHLDANSKHGTKANRVYGPPSDRLPSAEAQLLPPELYNPNFQEEEDEGGDENAPGSPSFDQPHKTCCPDLNSFIEIKVEKDE

SEQ ID NO: 1702 - protein, 538 aa, Homo Sapiens; identical to SEQ ID NO: 1701

SEQ ID NO: 1703 - protein, 538 aa, Homo Sapiens; identical to SEQ ID NO: 1701

SEQ ID NO: 1704 - protein, 402 aa, Homo Sapiens
MASLGLLLLLLLTALPPLWSSSLPGLDTAESKATIADLILSALERATVFLEQRLPEINLDGMVGVRVLEEQLKSVREKWAQEPLLQPLSLRVGMLGEKLEAAIQRSLHYLKLSDPKYLREFQLTLQPGFWKLPHAWIHTDASLVYPTFGPQDSFSEERSDVCLVQLLGTGTDSSEPCGLSDLCRSLMTKPGCSGYCLSHQLLFFLWARMRGCTQGPLQQSQDYINLFCANMMDLNRRAEAIGYAYPTRDIFMENIMFCGMGGFSDFYKLRWLEAILSWQKQQEGCFGEPDAEDEELSKAIQYQQHFSRRVKRREKQFPDSRSVAQAGVQWRNLGSLQPLPPGFKQFSCLILPSSWDYRSVPPYLANFYIFLVETGFHHVAHAGLELLISRDPPTSGSQSVGL

SEQ ID NO: 1705 - protein, 361 aa, Homo Sapiens
MASLGLLLLLLLTALPPLWSSSLPGLDTAESKATIADLILSALERATVFLEQRLPEINLDGMVGVRVLEEQLKSVREKWAQEPLLQPLSLRVGMLGEKLEAAIQRSLHYLKLSDPKYLREFQLTLQPGFWKLPHAWIHTDASLVYPTFGPQDSFSEERSDVCLVQLLGTGTDSSEPCGLSDLCRSLMTKPGCSGYCLSHQLLFFLWARMRGCTQGPLQQSQDYINLFCANMMDLNRRAEAIGYAYPTRDIFMENIMFCGMGGFSDFYKLRWLEAILSWQKQQEGCFGEPDAEDEELSKAIQYQQHFSRRVKRREKQFPDGCSSHNTATAVAALGGFLYILAEYPPANREPHPSTPPPPSSR

SEQ ID NO: 1706 - protein, 434 aa, Homo Sapiens
MASLGLLLLLLLTALPPLWSSSLPGLDTAESKATIADLILSALERATVFLEQRLPEINLDGMVGVRVLEEQLKSVREKWAQEPLLQPLSLRVGMLGEKLEAAIQRSLHYLKLSDPKYLREFQLTLQPGFWKLPHAWIHTDASLVYPTFGPQDSFSEERSDVCLVQLLGTGTDSSEPCGLSDLCRSLMTKPGCSGYCLSHQLLFFLWARMRGCTQGPLQQSQDYINLFCANMMDLNRRAEAIGYAYPTRDIFMENNVTGHPVFYLPLCDSFLPPKAAPVTELYTDGPVMFCGMGGFSDFYKLRWLEAILSWQKQQEGCFGEPDAEDEELSKAIQYQQHFSRRVKRREKQFPDSRSVAQAGVQWRNLGSLQPLPPGFKQFSCLILPSSWDYRSVPPYLANFYIFLVETGFHHVAHAGLELLISRDPPTSGSQSVGL

SEQ ID NO: 1707 - protein, 182 aa, Homo Sapiens
MEALVCAFSELHIREDAVSQAQGRPGHPDAPPNIYEGGLGSPQPQCPSAQGSKPKNFRLRHLRGLGLYLESHPPPTGQCESHWLGRLMAGGCLPQPEGTAWALDLPQGTLGPRNSLCSALLEARLPRDSLGSSASSSSMDPDKGALPQPSPSRLRPKRSWGTWEEAMCPLCKRTRSGALERP

SEQ ID NO: 1708 - protein, 191 aa, Homo Sapiens
  misc_feature (1)..(1): Xaa can be any naturally occurring amino acid
XEQGPAAPKSWLLLPTTLALHGSLDAVSQAQGRPGHPDAPPNIYEGGLGSPQPQCPSAQGSKPKNFRLRHLRGLGLYLESHPPPTGQCESHWLGRLMAGGCLPQPEGTAWALDLPQGTLGPRNSLCSALLEARLPRDSLGSSASSSSMDPDKGALPQPSPSRLRPKRSWGTWEEAMCPLCKRTRSGALERP

SEQ ID NO: 1709 - protein, 90 aa, Homo Sapiens
MKTLPVLVLSLTLLTVFSETSPILTEKQAKQLLRSRRQDRPSKPGFPDEPMREYMHHLLALEHRAEEQFLEHWLNPHCKPHCDRNRIHPV

SEQ ID NO: 1710 - protein, 275 aa, Homo Sapiens
MDGDEKELESSEEGGSAEERRLEPPSSSHYCLYSYRGSRLAQQRGDSEDGSPSGTNAETPSGDDFSLSLADTNLPSEVEPELRSFIAKRLSRGAVFEGLGNVASVELKIPGYRVGCYYCLFQNEKLLPETVTIDSERNPSEYVVCFLGGSEKGLELFRLELDKYIQGLKNNMNCEARGLESHIKSYLSSWFEDVVCPIQRVVLLFQEKLTFLLHAALSYTPVEVKESDEKTKRDINRFLSVASLQGLIHEGTMTSLCMAMTEEQHKSVVIDCSSS

SEQ ID NO: 1711 - protein, 75 aa, Homo Sapiens
MLPSLQESMDGDEKELESSEEGGSAEERRLEPPSSSHYCLYSYRGSRLAQQRGDSEDGSPSGTNAETPSGDDFRY

SEQ ID NO: 1712 - protein, 396 aa, Homo Sapiens
MLPSLQESMDGDEKELESSEEGGSAEERRLEPPSSSHYCLYSYRGSRLAQQRGDSEDGSPSGTNAETPSGDDFSLSLADTNLPSEVEPELRSFIAKRLSRGAVFEGLGNVASVELKIPGYRVGCYYCLFQNEKLLPETVTIDSERNPSEYVVCFLGGSEKGLELFRLELDKYIQGLKNNMNCEARGLESHIKSYLSSWFEDVVCPIQRVVLLFQEKLTFLLHAALSYTPVEVKESDEKTKRDINRFLSVASLQGLIHEGTMTSLCMAMTEEQHKSVVIDCSSSQPQFCNAGSNRFCEDWMQAFLNGAKGGNPFLFRQVLENFKLKAIQDTNNLKRFIRQAEMNHYALFKCYMFLKNCGSGDILLKIVKVEHEEMPEAKNVIAVLEEFMKEALDQSF

SEQ ID NO: 1713 - protein, 396 aa, Homo Sapiens [sequence omitted]

SEQ ID NO: 1714 - protein, 38 aa, Homo Sapiens
MNCEARGLESHIKSYLSSWFEDVVCPIQRVVLLFQEKL

SEQ ID NO: 1715 - protein, 88 aa, Homo Sapiens
MNCEARGLESHIKSYLSSWFEDVVCPIQRVVLLFQEKLTFLLHAALSYTPVEVKESDEKTKRDINRFLSVASLQGLIHEGTMTSLCMA

SEQ ID NO: 1716 - protein, 132 aa, Homo Sapiens
MNCEARGLESHIKSYLSSWFEDVVCPIQRVVLLFQEKLTFLLHAALSYTPVEVKESDEKTKRDINRFLSVASLQGLIHEGTMTSLCMAMTEEQHKSVVIDCSSSQPQFCNAGSNRFCEDWMQAFLNGAKGGN

SEQ ID NO: 1717 - protein, 48 aa, Homo Sapiens
  misc_feature (1)..(1): Xaa can be any naturally occurring amino acid
XAMTEEQHKSVVIDCSSSQPQFCNAGHTRHKQFEEIYPTGRNESLCFV

SEQ ID NO: 1718 - protein, 97 aa, Homo Sapiens
  misc_feature (1)..(1): Xaa can be any naturally occurring amino acid
XLLFQEKLTFLLHAALSYTPVEVKESDEKTKRDINRFLSVASLQGLIHEGTMTSLCMAMTEEQHKSVVIDCSSSQPQFCNAEILDPPPLLFTLSHPS

SEQ ID NO: 1719 - protein, 189 aa, Homo Sapiens
LIALTSLTAASSFSKAREEEITPVVSIAYKVLEVFPKGRWVLITCCAPQPPPPITYSLCGTKNIKVAKKVVKTHEPASFNLNVTLKSSPDLLTYFCWASSTSGAHVDSARLQMHWELWSKPVSELRANFTLQDRGAGPRVEMICQASSGSPPITNSLIGKDGQVHLQQRPCHRQPANFSFLPSQTSDWF

SEQ ID NO: 1720 - protein, 265 aa, Homo Sapiens
MGLPGLFCLAVLAASSFSKAREEEITPVVSIAYKVLEVFPKGRWVLITCCAPQPPPPITYSLCGTKNIKVAKKVVKTHEPASFNLNVTLKSSPDLLTYFCWASSTSGAHVDSARLQMHWELWSKPVSELRANFTLQDRGAGPRVEMICQASSGSPPITNSLIGKDGQVHLQQRPCHRQPANFSFLPSQTSDWFWCQAANNANVQHSALTVVPPGGDQKMEDWQGPLESPILALPLYRSTRRLSEEEFGGFRIGNGEVRGRKAAAM

SEQ ID NO: 1721 - protein, 151 aa, Homo Sapiens
  misc_feature (1)..(1): Xaa can be any naturally occurring amino acid
XQPPPPITYSLCGTKNIKVAKKVVKTHEPASFNLNVTLKSSPDLLTYFCWASSTSGAHVDSARLQMHWELWSRQRGRPQGGDDLPGVLGQPTYHQQPDREGWAGPPAAETMPQAACQLLLPAEPDIGLVLVPGCKQRQCPAQRPHSGAPRW

SEQ ID NO: 1722 - protein, 35 aa, Homo Sapiens
ESMIPITRSLQKALHHLSRLRDLVDDTNGERSPKM

SEQ ID NO: 1723 - protein, 372 aa, Homo Sapiens
MAKSKTKHRLCSQESSVSALLASCTLSGSNSSNSDGSFHYKDKLYRSASQALQAYIDDFDLGQIYPGASTGKINIDEDFTNMSQFCNYIYKPNNAFENLDHKKHSNFISCRRHTVNDIDSMSLTTDDLLRLPADGSFSYTYVGPSHRTSKKNKKCRGRLGSLDIEKNPHFQGPYTSMGKDNFVTPVIRSNINGKQCGDKIELLILKAKRNLEQCTEELPKSMKKDDSPCSLDKLEADRSWENIPVTFKSPVPVNSDDSPQQTSRAKSAKGVLEDFLNNDNQSCTLSGGKHHGPVEALKQMLFNLQAVQERFNQNKTTDPKEEIKQVSEDDFSKLQLKESMIPITRSLQKALHHLSRLRDLVDDTNGERSPKM

SEQ ID NO: 1724 - protein, 533 aa, Homo Sapiens
MAKSKTKHRLCSQESSVSALLASCTLSGSNSSNSDGSFHYKDKLYRSASQALQAYIDDFDLGQIYPGASTGKINIDEDFTNMSQFCNYIYKPNNAFENLDHKKHSNFISCRRHTVNDIDSMSLTTDDLLRLPADGSFSYTYVGPSHRTSKKNKKCRGRLGSLDIEKNPHFQGPYTSMGKDNFVTPVIRSNINGKQCGRLKNPKLMNRTNNCISESSLSFPKKSSFKDSSEHSLEKNYPRWLTSQKSDLNVSGITSIPDFKYPVWLHNQDLLPDANSQRVYQIFKDDQCSPRHSHQAQGTSRLINKLDCFEYAFEPSNFSNSLSDDKELVNEYKCDFEHSQCQCENPLLPGQSTKPFSGDKIELLILKAKRNLEQCTEELPKSMKKDDSPCSLDKLEADRSWENIPVTFKSPVPVNSDDSPQQTSRAKSAKGVLEDFLNNDNQSCTLSGGKHHGPVEALKQMLFNLQAVQERFNQNKTTDPKEEIKQVSEDDFSKLQLKESMIPITRSLQKALHHLSRLRDLVDDTNGERSPKM

SEQ ID NO: 1725 - protein, 533 aa, Homo Sapiens; identical to SEQ ID NO: 1724

SEQ ID NO: 1726 - protein, 151 aa, Homo Sapiens
MKKDDSPCSLDKLEADRSWENIPVTFKSPVPVNSDDSPQQTSRAKSAKGVLEDFLNNDNQSCTLSGGKHHGPVEALKQMLFNLQAVQERFNQNKTTDPKEEIKQVSEDDFSKLQLKESMIPITRSLQKALHHLSRLRDLVDDTNGERSPKM

SEQ ID NO: 1727 - protein, 142 aa, Homo Sapiens
MFVDNRIQKSMLLDLNKEIMNELGVTVVGDIIAILKHAKVVHRQDMCKAATESVPCSPSPLAGEIRRGTSAASRMITNSLNHDSPPSTPPRRPDTSTSKISVTVSNKMAAKSAKATAALARREEESLAVPAKRRRVTAEMEG

SEQ ID NO: 1728 - protein, 355 aa, Homo Sapiens
MFVDNRIQKSMLLDLNKEIMNELGVTVVGDIIAILKHAKVVHRQDMCKAATESVPCSPSPLAGEIRRGTSAASRMITNSLNHDSPPSTPPRRPDTSTSKISVTVSNKMAAKSAKATAALARREEESLAVPAKRRRVTAEMEGKYVINMPKGTTPRTRKILEQQQAAKGLHRTSVFDRLGAETKADTTTGSKPTGVFSRLGATPETDEDLAWDSDNDSSSSVLQYAGVLKKLGRGPAKASPQPALTVKAKATSSATTAAAPTLRRLALSSRSGLERKPESLSKVSIIKRLGAAALVPEAQDSQVTSTKSKSSAEVKVTIKRTLVGPRGSSSSEGLGAQMDHAGTVSVFKRLGRRTF

SEQ ID NO: 1729 - protein, 422 aa, Homo Sapiens
MVMAALSLVAACWGRAAADESVQLPAAPGSSVRARETMVSVTMATSEWIQFFKEAGIPPGPAVNYAVMFVDNRIQKSMLLDLNKEIMNELGVTVVGDIIAILKHAKVVHRQDMCKAATESVPCSPSPLAGEIRRGTSAASRMITNSLNHDSPPSTPPRRPDTSTSKISVTVSNKMAAKSAKATAALARREEESLAVPAKRRRVTAEMEGKYVINMPKGTTPRTRKILEQQQAAKGLHRTSVFDRLGAETKADTTTGSKPTGVFSRLGATPETDEDLAWDSDNDSSSSVLQYAGVLKKLGRGPAKASPQPALTVKAKATSSATTAAAPTLRRLALSSRSGLERKPESLSKVSIIKRLGAAALVPEAQDSQVTSTKSKSSAEVKVTIKRTLVGPRGSSSSEGLGAQMDHAGTVSVFKRLGRRTF

SEQ ID NO: 1730 - protein, 141 aa, Homo Sapiens
MVMAALSLVAACWGRAAADESVQLPAAPGSSVRARETMVSVTMATSEWIQFFKEAGIPPGPAVNYAVMFVDNRIQKSMLLDLNKEIMNELGVTVVGDIIAILKHAKVVHRQGLTPSPRLECSSTISAHCNLCLPGHVQSCH

SEQ ID NO: 1731 - protein, 146 aa, Homo Sapiens
MVSVTMATSEWIQFFKEAGIPPGPAVNYAVMFVDNRIQKSMLLDLNKEIMNELGVTVVGDIIAILKHAKVVHRQDMCKAATESVPCSPSPLAGEIRRGTSAASRMITNSLNHDSPPSTPPRRPDTSTSKISVTVSNKMAAKSAKAT

SEQ ID NO: 1732 - protein, 168 aa, Homo Sapiens
  misc_feature (1)..(1): Xaa can be any naturally occurring amino acid
XEMEGKYVINMPKGTTPRTRKILEQQQAAKGLHRTSVFDRLGAETKADTTTGSKPTGVFSRLGATPETDEDLAWDSDNDSSSSVLQYAGVLKKLGRGPAKASPQPALTVKAKATSSATTAAAPTLRRLALSSRSGLERKPESLSKVSIIKRLGAAALVPEAQDSQASA

SEQ ID NO: 1733 - protein, 146 aa, Homo Sapiens
  misc_feature (1)..(1): Xaa can be any naturally occurring amino acid
XGSSVRARETMVSVTMATSEWIQFFKEAGIPPGPAVNYAVMFVDNRIQKSMLLDLNKEIMNELGVTVVGDIIAILKHAKVVHRQDMCKAATESVPCSPSPLAGEIRRGTSDGVSLCCPGWSTVARPWLSATSASRVQAVLLPQPPE

SEQ ID NO: 1734 - protein, 133 aa, Homo Sapiens
  misc_feature (1)..(1): Xaa can be any naturally occurring amino acid
XTDEDLAWDSDNDSSSSVLQYAGVLKKLGRGPAKASPQPALTVKAKATSSATTAAAPTLRRLALSSRSGLERKPESLSKVSIIKRLGAAALVPEAQDSQVTSTKSPTVRCVLPDPPVPPASQRPPRRRWRRAC

SEQ ID NO: 1735 - protein, 110 aa, Homo Sapiens
MRSECVLGAASDSGQEAPRDTWFLQGWKASRRFLIKGSVAGGAVYLVYDQELLGPSDKSQAALQKAGEVVPPAMYQFSQYVCQQTGLQIPQLPAPPKIYFPIRDSWNAGI

SEQ ID NO: 1736 - protein, 140 aa, Homo Sapiens
MRSECVLGAASDSGQEAPRDTWFLQGWKASRRFLIKGSVAGGAVYLVYDQELLGPSDKSQAALQKAGEVVPPAMYQFSQYVCQQTGLQIPQLPAPPKIYFPIRDSWNAGIMTVMSALSVAPSKAREYSKEGWEYVKARTK

SEQ ID NO: 1737 - protein, 88 aa, Homo Sapiens
MVARVWSLMRFLIKGSVAGGAVYLVYDQELLGPSDKSQAALQKAGEVVPPAMYQFSQYVCQQTGLQIPQLPAPPKIYFPIRDSWNAGI

SEQ ID NO: 1738 - protein, 118 aa, Homo Sapiens
MVARVWSLMRFLIKGSVAGGAVYLVYDQELLGPSDKSQAALQKAGEVVPPAMYQFSQYVCQQTGLQIPQLPAPPKIYFPIRDSWNAGIMTVMSALSVAPSKAREYSKEGWEYVKARTK

SEQ ID NO: 1739 - protein, 100 aa, Homo Sapiens
MASKSWLNFLTFLCGSAIGFLLCSQLFSILLGEKVDTQPNVLHNDPHARHSDDNGQNHLEGQMNFNADSSQHKDENTDIAENLYQKVRILCWVMTGPQNL

SEQ ID NO: 1740 - protein, 131 aa, Homo Sapiens
MASKSWLNFLTFLCGSAIGFLLCSQLFSILLGEKVDTQPNVLHNDPHARHSDDNGQNHLEGQMNFNADSSQHKDENTDIAENLYQKVRILCWVMTGPQNLEKKAKHVKATWAQRCNKVLFMSSEENKDFPA

SEQ ID NO: 1741 - protein, 363 aa, Homo Sapiens
MASKSWLNFLTFLCGSAIGFLLCSQLFSILLGEKVDTQPNVLHNDPHARHSDDNGQNHLEGQMNFNADSSQHKDENTDIAENLYQKVRILCWVMTGPQNLEKKAKHVKATWAQRCNKVLFMSSEENKDFPAVGLKTKEGRDQLYWKTIKAFQYVHEHYLEDADWFLKADDDTYVILDNLRWLLSKYDPEEPIYFGRRFKPYVKQGYMSGGAGYVLSKEALKRFVDAFKTDKCTHSSSIEDLALGRCMEIMNVEAGDSRDTIGKETFHPFVPEHHLIKGYLPRTFWYWNYNYYPPVEGPGCCSDLAVSFHYVDSTTMYELEYLVYHLRPYGYLYRYQPTLPERILKEISQANKNEDTKVKLGNP

SEQ ID NO: 1742 - protein, 309 aa, Homo Sapiens
MASKSWLNFLTFLCGSAIGFLLCSQLFSILLGEKVDTQPNVLHNDPHARHSDDNGQNHLEGQMNFNADSSQHKDENTDIAENLYQKVRILCWVMTGPQNLEKKAKHVKATWAQRCNKVLFMSSEENKDFPAVGLKTKEGRDQLYWKTIKAFQYVHEHYLEDADWFLKADDDTYVILDNLRWLLSKYDPEEPIYFGRRFKPYVKQGYMSGGAGYVLSKEALKRFVDAFKTDKCTHSSSIEDLALGRCMEIMNVEAGDSRDTIGKETFHPFVPEHHLIKGYLPRTFWYWNYNYYPPVEVSLEILLLCQYLD

SEQ ID NO: 1743 - protein, 363 aa, Homo Sapiens; identical to SEQ ID NO: 1741

SEQ ID NO: 1744 - protein, 823 aa, Homo Sapiens
MWGSPALAWAVWLACVQPTVFPWSLSFRSDTDKPSSAAEVLTEASSCWTDTVECFSDYMTLWIPRSHVEGLRRWLARTLHLPGTWRSPDHLDSSLAKCGYFLHLASDGDFLFRVQYSACFVQKEKANYRLEIRIFQKGVMGLERSDRYIMKCPMLRSRLGQESVHCGPMFIQVSRPLPLWRDNRQTPWLLSLRGELVASLEDASLMGLYVDMNATTVTVQSPRQGLLQRWEVLNTSAELLPLWLVSGHHAYSLEAACPPVSFQPESEVLVHIPKQRLGLVKRGSYIEETLSLRFLRVHQSNIFMVTENKDFVVVSIPAAGVLQVQRCQEVGGTPGTQAFYRVDLSLEFAEMAAPVLWTVESFFQCVGSGTESPASTAALRTTPSPPSPGPETPPAGVPPAASSQVWAAGPAAQEWLSRDLLHRPSDALAKKGLGPFLQTAKPARRGQTSASILPRVVQAQRGPQPPPGEAGIPGHPTPPATLPSEPVEGVQASPWRPRPVLPTHPALTLPVSSDASSPSPPAPRPERPESLLVSGPSVTLTEGLGTVRPEQDPAKSPGSPLLLRGLSSGDVAAPEPIMGEPGQASEEFQPLARPWRATLAAEELVSHRSPGEPQETCSGTEVERPRQTGPGLPREGARGHMDLSSSEPSQDIEGPGLSILPARDATFSTPSVRQPDPSAWLSSGPELTGMPRVRLAAPLAVLPMEPLPPEPVRPAALLTPEASSVGGPDQARYLESAPGWPVGQEEWGVAHTSSPPSTQTLSLWAPTGVLLPSLVELEYPFQAGRGASLQQELTEPTLALSAESHRPPELQDSVEGLSERPSR

SEQ ID NO: 1745 - protein, 658 aa, Homo Sapiens
  misc_feature (1)..(1): Xaa can be any naturally occurring amino acid
XIMKCPMLRSRLGQESVHCGPMFIQVSRPLPLWRDNRQTPWLLSLRGELVASLEDASLMGLYVDMNATTVTVQSPRQGLLQRWEVSGGQQALPGVSFQPESEVLVHIPKQRLGLVKRGSYIEETLSLRFLRVHQSNIFMVTENKDFVVVSIPAAGVLQVQRCQEVGGTPGTQAFYRVDLSLEFAEMAAPVLWTVESFFQCVGSGTESPASTAALRTTPSPPSPGPETPPAGVPPAASSQVWAAGPAAQEWLSRDLLHRPSDALAKKGLGPFLQTAKPARRGQTSASILPRVVQAQRGPQPPPGEAGIPGHPTPPATLPSEPVEGVQASPWRPRPVLPTHPALTLPVSSDASSPSPPAPRPERPESLLVSGPSVTLTEGLGTVRPEQDPAKSPGSPLLLRGLSSGDVAAPEPIMGEPGQASEEFQPLARPWRATLAAEELVSHRSPGEPQETCSGTEVERPRQTGPGLPREGARGHMDLSSSEPSQDIEGPGLSILPARDATFSTPSVRQPDPSAWLSSGPELTGMPRVRLAAPLAVLPMEPLPPEPVRPAALLTPEASSVGGPDQARYLESAPGWPVGQEEWGVAHTSSPPSTQTLSLWAPTGVLLPSLVELEYPFQAGRGASLQQELTEPTLALSAESHRPPELQDSVEGLSERPSR

SEQ ID NO: 1746 - protein, 69 aa, Homo Sapiens
  misc_feature (1)..(1): Xaa can be any naturally occurring amino acid
XPSTQTLSLWAPTGVLLPSLVELEYPFQAGRGASLQQELTEPTLALSAESHRPPELQDSVEGLSERPSR

SEQ ID NO: 1747 - protein, 775 aa, Homo Sapiens
  misc_feature (1)..(1): Xaa can be any naturally occurring amino acid
XSLSFRSDTDKPSSAAEVLTEASSCWTDTVECFSDYMTLWIPRSHVEGLRRWLARTLHLPGTWRSPDHLDSSLAKCGYFLHLASDGDFLFRVQYSACFVQKEKANYRLEIRIFQKGVMGLERSDRYIMKCPMLRSRLGQESVHCGPMFIQVSRPLPLWRDNRQTPWLLSLRGELVASLEDASLMGLYVDMNATTVTVQSPRQGLLQRWEVLNTSAELLPLWLVSGHHAYSLEAACPPVSFQPESEVLVHIPKQRLGLVKRGSYIEETLSLRFLRVHQSNIFMVTENKDFVVVSIPAAGVLQVQRCQEVGGTPGTQAFYRVDLSLEFAEMAAPVLWTVESFFQCVGSGTESPASTAALRTTPSPPSPGPETPPAGVPPAASSQKGLGPFLQTAKPARRGQTSASILPRVVQAQRGPQPPPGEAGIPGHPTPPATLPSEPVEGVQASPWRPRPVLPTHPALTLPVSSDASSPSPPAPRPERPESLLVSGPSVTLTEGLGTVRPEQDPAKSPGSPLLLRGLSSGDVAAPEPIMGEPGQASEEFQPLARPWRATLAAEELVSHRSPGEPQETCSGTEVERPRQTGPGLPREGARGHMDLSSSEPSQDIEGPGLSILPARDATFSTPSVRQPDPSAWLSSGPELTGMPRVRLAAPLAVLPMEPLPPEPVRPAALLTPEASSVGGPDQARYLESAPGWPVGQEEWGVAHTSSPPSTQTLSLWAPTGVLLPSLVELEYPFQAGRGASLQQELTEPTLALSAESHRPPELQDSVEGLSERPSR

SEQ ID NO: 1748 - protein, 15 aa, Homo Sapiens
MALRHLALLAGLLVG

SEQ ID NO: 1749 - protein, 57 aa, Homo Sapiens
MALRHLALLAGLLVGVASKSMENTAQLPECCVDVVGVNASCPGASLCGPGCYRRWNA

SEQ ID NO: 1750 - protein, 86 aa, Homo Sapiens
MALRHLALLAGLLVGVASKSMENTAQLPECCVDVVGVNASCPGASLCGPGCYRRWNADGSASCVRCGNGTLPAYNGSECRSFAGPG

SEQ ID NO: 1751 - protein, 103 aa, Homo Sapiens
MALRHLALLAGLLVGVASKSMENTAQLPECCVDVVGVNASCPGASLCGPGCYRRWNADGSASCVRCGNGTLPAYNGSECRSFAGPGAPFPMNRSSGTPGRPHP

SEQ ID NO: 1752 - protein, 224 aa, Homo Sapiens [sequence omitted]

SEQ ID NO: 1753 - protein, 189 aa, Homo Sapiens
MALRHLALLAGLLVGVASKSMENTAQLPECCVDVVGVNASCPGASLCGPGCYRRWNADGSASCVRCGNGTLPAYNGSECRSFAGPGAPFPMNRSSGTPGRPHPGAPRVAASLFLGTFFISSGLILSVAGFFYLKRSSKLPRACYRRNKAPALQPGEAAAMIPPPQSSDVGSAGKEDPPRQGRPPIPAPP

SEQ ID NO: 1754 - protein, 344 aa, Homo Sapiens
MALRHLALLAGLLVGVASKSMENTAQLPECCVDVVGVNASCPGASLCGPGCYRRWNADGSASCVRCGNGTLPAYNGSECRSFAGPGAPFPMNRSSGTPGRPHPGAPRVAASLFLGTFFISSGLILSVAGFFYLKRSSKLPRACYRRNKAPALQPGEAAAMIPPPQSSGNSSCRIPLWGFPSLGQSQGALWVCPQTGLPGSGSRPPLPGSPGDPPTRQGQGRIWLVPPALDLSWIWPAPPARPPLIPVTSMLFPVPETWGLQERRTHHDRADPQYLLLLEVQLHPRTDAAGLRQALLSSHRFSGAGSGGPKSQPVRKPRYVRRERPLDRATDPAAFPGEARISNV

SEQ ID NO: 1755 - protein, 198 aa, Homo Sapiens
MALRHLALLAGLLVGVASKSMENTAQLPECCVDVVGVNASCPGASLCGPGCYRRWNADGSASCVRCGNGTLPAYNGSECRSFAGPGAPFPMNRSSGTPGRPHPGAPRVAASLFLGTFFISSGLILSVAGFFYLKRSSKLPRACYRRNKAPALQPGEAAAMIPPPQSSVRKPRYVRRERPLDRATDPAAFPGEARISNV

SEQ ID NO: 1756 - protein, 198 aa, Homo Sapiens; identical to SEQ ID NO: 1755

SEQ ID NO: 1757 - protein, 98 aa, Homo Sapiens
MALRHLALLAGLLVGVASKSMENTDTDVPAPEVLTRSTAGVRGACASQRGALRCLLGERLLRNGWVRRGPHGEASWPAMGAPLPAVTAQRAAHRYRGV

SEQ ID NO: 1758 - protein, 64 aa, Homo Sapiens
MALRHLALLAGLLVGVASKSMENTDTDVPAPEVLTRSTAGVRGACASQRGALRCLLGPAARVLC

SEQ ID NO: 1759 - protein, 111 aa, Homo Sapiens
MALRHLALLAGLLVGVASKSMENTDTDVPAPEVLTRSTAGVRGACASQRGALRCLLGPAARVLCGCGGRQRQLPRRKSVWSRLLQALERGRERQLRPLWERNPPSLQRLRV

SEQ ID NO: 1760 - protein, 380 aa, Homo Sapiens
MALRHLALLAGLLVGVASKSMENTVTRNSTAVINTQAEGTLSPPGLSSLPVVREWALTHTAQLPECCVDVVGVNASCPGASLCGPGCYRRWNADGSASCVRCGNGTLPAYNGSECRSFAGPGAPFPMNRSSGTPGRPHPGAPRVAASLFLGTFFISSGLILSVAGFFYLKRSSKLPRACYRRNKAPALQPGEAAAMIPPPQSSGNSSCRIPLWGFPSLGQSQGALWVCPQTGLPGSGSRPPLPGSPGDPPTRQGQGRIWLVPPALDLSWIWPAPPARPPLIPVTSMLFPVPETWGLQERRTHHDRADPQYLLLLEVQLHPRTDAAGLRQALLSSHRFSGAGSGGPKSQPVRKPRYVRRERPLDRATDPAAFPGEARISNV

SEQ ID NO: 1761 - protein, 289 aa, Homo Sapiens
MARKIMQDKEKIREKYGPEWARLPPAQQDEIIDRCLVGPRAPAPRDPGDSEELTRFPGLRGPTGQKVVRFGDEDLTWQDEHSAPFSWETKSQMEFSISALSIQEPSNGTAASEPRPLSKASQGSQALKSSQGSRSSSLDALGPTRKEEEASFWKINAERSRGEGPEAEFQSLTPSQIKSMEKGEKVLPPCYRQEPAPKDREAKVERPSTLRQEQRPLPNVSTERERPQPVQAFSSALHEAAPSQLEGKLPSPDVRQDDGEDTLFSEPKFAQVSSSNVVLKTGFDFLDNW

SEQ ID NO: 1762 - protein, 327 aa, Homo Sapiens
MASMAAAIAASRSAVMSGNRPLDDRERKRFTYFSSLSPMARKIMQDKEKIREKYGPEWARLPPAQQDEIIDRCLVGPRAPAPRDPGDSEELTRFPGLRGPTGQKVVRFGDEDLTWQDEHSAPFSWETKSQMEFSISALSIQEPSNGTAASEPRPLSKASQGSQALKSSQGSRSSSLDALGPTRKEEEASFWKINAERSRGEGPEAEFQSLTPSQIKSMEKGEKVLPPCYRQEPAPKDREAKVERPSTLRQEQRPLPNVSTERERPQPVQAFSSALHEAAPSQLEGKLPSPDVRQDDGEDTLFSEPKFAQVSSSNVVLKTGFDFLDNW

SEQ ID NO: 1763 - protein, 197 aa, Homo Sapiens
MEFSISALSIQEPSNGTAASEPRPLSKASQGSQALKSSQGSRSSSLDALGPTRKEEEASFWKINAERSRGEGPEAEFQSLTPSQIKSMEKGEKVLPPCYRQEPAPKDREAKVERPSTLRQEQRPLPNVSTERERPQPVQAFSSALHEAAPSQLEGKLPSPDVRQDDGEDTLFSEPKFAQVSSSNVVLKTGFDFLDNW

SEQ ID NO: 1764 - protein, 110 aa, Homo Sapiens
MEKGEKVLPPCYRQEPAPKDREAKVERPSTLRQEQRPLPNVSTERERPQPVQAFSSALHEAAPSQLEGKLPSPDVRQDDGEDTLFSEPKFAQVSSSNVVLKTGFDFLDNW

SEQ ID NO: 1765 - protein, 160 aa, Homo Sapiens
MQDKEKIREKYGPEWARLPPAQQDEIIDRCLVGPRAPAPRDPGDSEELTRFPGLRGPTGQKVVRFGDEDLTWQDEHSAPFSWETKSQMEFSISALSIQEPSNGTAASEPRPLSKASQGSQALKSSQGSRSSSLDALGPTRKEEEASFWKINAERSRGEGP

SEQ ID NO: 1766 - protein, 131 aa, Homo Sapiens
MDVLFVAIFAVPLILGQEYEDEERLGEDEYYQVVYYYTVTPSYDDFSADFTIDYSIFESEDRLNRLDKDITEAIETTISLETARADHPKPVTVKPVTTEPSPDLNDAVSSLRSPIPLLLSCAFVQVGMYFM

SEQ ID NO: 1767 - protein, 131 aa, Homo Sapiens; identical to SEQ ID NO: 1766

SEQ ID NO: 1768 - protein, 121 aa, Homo Sapiens
MDVLFVAIFAVPLILGQEYEDEERLGEDEYYQVVYYYTVTPSYDDFSADFTIDYSIFESEDRLNRLDKDITEAIETTISLETARADHPKPVTVKPVTTEPVEEGCYDSLDGSLARGNWKIK

SEQ ID NO: 1769 - protein, 341 aa, Homo Sapiens
MVPAAGALLWVLLLNLGPRAAGAQGLTQTPTEMQRVSLRFGGPMTRSYRSTARTGLPRKTRIILEDENDAMADADRLAGPAAAELLAATVSTGFSRSSAINEEDGSSEEGVVINAGKDSTSRELPSATPNTAGSSSTRFIANSQEPEIRLTSSLPRSPGRSTEDLPGSQATLSQWSTPGSTPSRWPSPSPTAMPSPEDLRLVLMPWGPWHCHCKSGTMSRSRSGKLHGLSGRLRVGALSQLRTEHKPCTYQQCPCNRLREECPLDTSLCTDTNCASQSTTSTRTTTTPFPTIHLRSSPSLPPASPCPALAFWKRVRIGLEDIWNSLSSVFTEMQPIDRNQR

SEQ ID NO: 1770 - protein, 221 aa, Homo Sapiens
MEGPRGWLVLCVLAISLASMVTEDLCRAPDGKKGEAGRPGRRGRPGLKGEQGEPGAPGIRTGIQGLKGDQGEPGPSGNPGKVGYPGPSGPLGARGIPGIKGTKGSPGNIKDQPRPAFSAIRRNPPMGGNVVIFDTVITNQEEPYQNHSGRFVCTVPGYYYFTFQVLSQWEICLSIVSSSRGQVRRSLGFCDTTNKGLFQVVSGGMVLQLQQGDQVWVEKDP

SEQ ID NO: 1771 - protein, 245 aa, Homo Sapiens
MEGPRGWLVLCVLAISLASMVTEDLCRAPDGKKGEAGRPGRRGRPGLKGEQGEPGAPGIRTGIQGLKGDQGEPGPSGNPGKVGYPGPSGPLGARGIPGIKGTKGSPGNIKDQPRPAFSAIRRNPPMGGNVVIFDTVITNQEEPYQNHSGRFVCTVPGYYYFTFQVLSQWEICLSIVSSSRGQVRRSLGFCDTTNKGLFQVVSGGMVLQLQQGDQVWVEKDPKKGHIYQGSEADSVFSGFLIFPSA

SEQ ID NO: 1772 - protein, 245 aa, Homo Sapiens; identical to SEQ ID NO: 1771

SEQ ID NO: 1773 - protein, 153 aa, Homo Sapiens
MKIPWGSIPVLMLLLLLGLIDISQAQLSCTGPPAIPGIPGIPGTPGPDGQPGTPGIKGEKGLPGLAGDHGEFGEKGDPGIPGNPGKVGPKGPMGPKGGPGAPGAPGPKGESGDYKATQKIAFSATRTINVPLRRDQTIRFDHVITNMNNNYEP

SEQ ID NO: 1774 - protein, 229 aa, Homo Sapiens
MKIPWGSIPVLMLLLLLGLIDISQAQLSCTGPPAIPGIPGIPGTPGPDGQPGTPGIKGEKGLPGLAGDHGEFGEKGDPGIPGNPGKVGPKGPMGPKGGPGAPGAPGPKGESGDYKATQKIAFSATRTINVPLRRDQTIRFDHVITNMNNNYEPRSGKFTCKVPGLYYFTYHASSRGNLCVNLMRGRERAQKVVTFCDYAYNTFQVTTGGMVLKLEQGENVFLQATDKNS

SEQ ID NO: 1775 - protein, 251 aa, Homo Sapiens
MKIPWGSIPVLMLLLLLGLIDISQAQLSCTGPPAIPGIPGIPGTPGPDGQPGTPGIKGEKGLPGLAGDHGEFGEKGDPGIPGNPGKVGPKGPMGPKGGPGAPGAPGPKGESGDYKATQKIAFSATRTINVPLRRDQTIRFDHVITNMNNNYEPRSGKFTCKVPGLYYFTYHASSRGNLCVNLMRGRERAQKVVTFCDYAYNTFQVTTGGMVLKLEQGENVFLQATDKNSLLGMEGANSIFSGFLLFPDMEA

SEQ ID NO: 1776 - protein, 253 aa, Homo Sapiens
MMMKIPWGSIPVLMLLLLLGLIDISQAQLSCTGPPAIPGIPGIPGTPGPDGQPGTPGIKGEKGLPGLAGDHGEFGEKGDPGIPGNPGKVGPKGPMGPKGGPGAPGAPGPKGESGDYKATQKIAFSATRTINVPLRRDQTIRFDHVITNMNNNYEPRSGKFTCKVPGLYYFTYHASSRGNLCVNLMRGRERAQKVVTFCDYAYNTFQVTTGGMVLKLEQGENVFLQATDKNSLLGMEGANSIFSGFLLFPDMEA

SEQ ID NO: 1777 - protein, 245 aa, Homo Sapiens
MDVGPSSLPHLGLKLLLLLLLLPLRGQANTGCYGIPGMPGLPGAPGKDGYDGLPGPKGEPGIPAIPGIRGPKGQKGEPGLPGHPGKNGPMGPPGMPGVPGPMGIPGEPGEEGRYKQKFQSVFTVTRQTHQPPAPNSLIRFNAVLTNPQGDYDTSTGKFTCKVPGLYYFVYHASHTANLCVLLYRSGVKVVTFCGHTSKTNQVNSGGVLLRLQVGEEVWLAVNDYYDMVGIQGSDSVFSGFLLFPD

SEQ ID NO: 1778 - protein, 245 aa, Homo Sapiens; identical to SEQ ID NO: 1777

SEQ ID NO: 1779 - protein, 245 aa, Homo Sapiens; identical to SEQ ID NO: 1777

SEQ ID NO: 1780 - protein, 258 aa, Homo Sapiens
MLLVLVVLIPVLVSSGGPEGHYEMLGTCRMVCDPYPARGPGAGARTDGGDALSEQSGAPPPSTLVQGPQGKPGRTGKPGPPGPPGDPGPPGPVGPPGEKGEPGKPGPPGLPGAGGSGAISTATYTTVPRVAFYAGLKNPHEGYEVLKFDDVVTNLGNNYDAASGKFTCNIPGTYFFTYHVLMRGGDGTSMWADLCKNGQVRASAIAQDADQNYDYASNSVILHLDAGDEVFIKLDGGKAHGGNSNKYSTFSGFIIYSD

SEQ ID NO: 1781 - protein, 287 aa, Homo Sapiens
MALGLLIAVPLLLQAAPRGAAHYEMMGTCRMICDPYTAAPGGEPPGAKAQPPGPSTAALEVMQDLSANPPPPFIQGPKGDPGRPGKPGPRGPPGEPGPPGPRGPPGEKGDSGRPGLPGLQLTAGTASGVGVVGGGAGVGGDSEGEVTSALSATFSGPKIAFYVGLKSPHEGYEVLKFDDVVTNLGNHYDPTTGKFSCQVRGIYFFTYHILMRGGDGTSMWADLCKNGQVRASAIAQDADQNYDYASNSVVLHLDSGDEVYVKLDGGKAHGGNNNKYSTFSGFLLYPD

SEQ ID NO: 1782 - protein, 255 aa, Homo Sapiens
MVLLLVILIPVLVSSAGTSAHYEMLGTCRMVCDPYGGTKAPSTAATPDRGLMQSLPTFIQGPKGEAGRPGKAGPRGPPGEPGPPGPMGPPGEKGEPGRQGLPGPPGAPGLNAAGAISAATYSTVPKIAFYAGLKRQHEGYEVLKFDDVVTNLGNHYDPTTGKFTCSIPGIYFFTYHVLMRGGDGTSMWADLCKNNQVRASAIAQDADQNYDYASNSVVLHLEPGDEVYIKLDGGKAHGGNNNKYSTFSGFIIYAD

SEQ ID NO: 1783 - protein, 213 aa, Homo Sapiens
MVLLLVILIPVLVSSAGTSAHYEMLGTCRMVCDPYGGTKAPSTAATPDRGLMQSLPTFIQGPPGAPGLNAAGAISAATYSTVPKIAFYAGLKRQHEGYEVLKFDDVVTNLGNHYDPTTGKFTCSIPGIYFFTYHVLMRGGDGTSMWADLCKNNQVRASAIAQDADQNYDYASNSVVLHLEPGDEVYIKLDGGKAHGGNNNKYSTFSGFIIYAD

SEQ ID NO: 1784 - protein, 238 aa, Homo Sapiens
MVLLLLVAIPLLVHSSRGPAHYEMLGRCRMVCDPHGPRGPGPDGAPASVPPFPPGAKGEVGRRGKAGLRGPPGPPGPRGPPGEPGRPGPPGPPGPGPGGVAPAAGYVPRIAFYAGLRRPHEGYEVLRFDDVVTNVGNAYEAASGKFTCPMPGVYFFAYHVLMRGGDGTSMWADLMKNGQVRASAIAQDADQNYDYASNSVILHLDVGDEVFIKLDGGKVHGGNTNKYSTFSGFIIYPD

SEQ ID NO: 1785 - protein, 281 aa, Homo Sapiens
MGSRGQGLLLAYCLLLAFASGLVLSRVPHVQGEQQEWEGTEELPSPPDHAERAEEQHEKYRPSQDQGLPASRCLRCCDPGTSMYPATAVPQINITILKGEKGDRGDRGLQGKYGKTGSAGARGHTGPKGQKGSMGAPGERCKSHYAAFSVGRKKPMHSNHYYQTVIFDTEFVNLYDHFNMFTGKFYCYVPGLYFFSLNVHTWNQKETYLHIMKNEEEVVILFAQVGDRSIMQSQSLMLELREQDQVWVRLYKGERENAIFSEELDTYITFSGYLVKHATEP

SEQ ID NO: 1786 - protein, 281 aa, Homo Sapiens; identical to SEQ ID NO: 1785

SEQ ID NO: 1787 - protein, 281 aa, Homo Sapiens; identical to SEQ ID NO: 1785

SEQ ID NO: 1788 - protein, 281 aa, Homo Sapiens; identical to SEQ ID NO: 1785

SEQ ID NO: 1789 - protein, 281 aa, Homo Sapiens; identical to SEQ ID NO: 1785

SEQ ID NO: 1790 - protein, 281 aa, Homo Sapiens; identical to SEQ ID NO: 1785

SEQ ID NO: 1791 - protein, 281 aa, Homo Sapiens; identical to SEQ ID NO: 1785

SEQ ID NO: 1792 - protein, 281 aa, Homo Sapiens; identical to SEQ ID NO: 1785

SEQ ID NO: 1793 - protein, 199 aa, Homo Sapiens
MYPATAVPQINITILKGEKGDRGDRGLQGKYGKTGSAGARGHTGPKGQKGSMGAPGERCKSHYAAFSVGRKKPMHSNHYYQTVIFDTEFVNLYDHFNMFTGKFYCYVPGLYFFSLNVHTWNQKETYLHIMKNEEEVVILFAQVGDRSIMQSQSLMLELREQDQVWVRLYKGERENAIFSEELDTYITFSGYLVKHATEP

SEQ ID NO: 1794 - protein, 199 aa, Homo Sapiens; identical to SEQ ID NO: 1793

SEQ ID NO: 1795 - protein, 302 aa, Homo Sapiens
MRRWAWAAVVVLLGPQLVLLGGVGARREAQRTQQPGQRADPPNATASASSREGLPEAPKPSQASGPEFSDAHMTWLNFVRRPDDGALRKRCGSRDKKPRDLFGPPGPPGAEVTAETLLHEFQELLKEATERRFSGLLDPLLPQGAGLRLVGEAFHCRLQGPRRVDKRTLVELHGFQAPAAQGAFLRGSGLSLASGRFTAPVSGIFQFSASLHVDHSELQGKARLRARDVVCVLICIESLCQRHTCLEAVSGLESNSRVFTLQVQGLLQLQAGQYASVFVDNGSGAVLTIQAGSSFSGLLLGT

SEQ ID NO: 1796 - protein, 330 aa, Homo Sapiens
MGKLCLGPTLCPAAAAEESRDAEPRRELLCSGRPWTWRAAARVTTMIPWVLLACALPCAADPLLGAFARRDFRKGSPQLVCSLPGPQGPPGPPGAPGPSGMMGRMGFPGKDGQDGHDGDRGDSGEEGPPGRTGNRGKPGPKGKAGAIGRAGPRGPKGVNGTPGKHGTPGKKGPKGKKGEPGLPGPCSCGSGHTKSAFSVAVTKSYPRERLPIKFDKILMNEGGHYNASSGKFVCGVPGIYYFTYDITLANKHLAIGLVHNGQYRIRTFDANTGNHDVASGSTILALKQGDEVWLQIFYSEQNGLFYDPYWTDSLFTGFLIYADQDDPNEV

SEQ ID NO: 1797 - protein, 246 aa, Homo Sapiens
MLWRQLIYWQLLALFFLPFCLCQDEYMESPQTGGLPPDCSKCCHGDYSFRGYQGPPGPPGPPGIPGNHGNNGNNGATGHEGAKGEKGDKGDLGPRGERGQHGPKGEKGYPGIPPELQIAFMASLATHFSNQNSGIIFSSVETNIGNFFDVMTGRFGAPVSGVYFFTFSMMKHEDVEEVYVYLMHNGNTVFSMYSYEMKGKSDTSSNHAVLKLAKGDEVWLRMGNGALHGDHQRFSTFAGFLLFETK

SEQ ID NO: 1798 - protein, 319 aa, Homo Sapiens
MLWRQLIYWQLLALFFLPFCLCQDEYMEVSGRTNKVVARIVQSHQQTGRSGSRREKVRERSHPKTGTVDNNTSTDLKSLRPDELPHPEVDDLAQITTFWGQSPQTGGLPPDCSKCCHGDYSFRGYQGPPGPPGPPGIPGNHGNNGNNGATGHEGAKGEKGDKGDLGPRGERGQHGPKGEKGYPGIPPELQIAFMASLATHFSNQNSGIIFSSVETNIGNFFDVMTGRFGAPVSGVYFFTFSMMKHEDVEEVYVYLMHNGNTVFSMYSYEMKGKSDTSSNHAVLKLAKGDEVWLRMGNGALHGDHQRFSTFAGFLLFETK

SEQ ID NO: 1799 - protein, 100 aa, Homo Sapiens
MLPLLLGLLGPAACWALGPTPGPGSSELRSAFSAARTTPLEGTSEMAVTFDKVYVNIGGDFDVATGQFRCRVPGAYFFSFTAGKAPHKSLSVMLVRNRDE

SEQ ID NO: 1800 - protein, 329 aa, Homo Sapiens
MLPLLLGLLGPAACWALGPTPGPGSSELRSAFSAARTTPLEGTSEMAVTFDKVYVNIGGDFDVATGQFRCRVPGAYFFSFTAGKAPHKSLSVMLVRNRDEVQALAFDEQRRPGARRAASQSAMLQLDYGDTVWLRLHGAPQYALGAPGATFSGYLVYADADADAPARGPPAPPEPRSAFSAARTRSLVGSDAGPGPRHQPLAFDTEFVNIGGDFDAAAGVFRCRLPGAYFFSFTLGKLPRKTLSVKLMKNRDEVQAMIYDDGASRRREMQSQSVMLALRRGDAVWLLSHDHDGYGAYSNHGKYITFSGFLVYPDLAPAAPPGLGASELL

SEQ ID NO: 1801 - protein, 60 aa, Homo Sapiens
MRPLLVLLLLGLAAGSPPLDDNKIPSLCPGHPGLPGLPGPRGDPGPRGEAGPAGPTGPAG

SEQ ID NO: 1802 - protein, 243 aa, Homo Sapiens
MRPLLVLLLLGLAAGSPPLDDNKIPSLCPGHPGLPGTPGHHGSQGLPGRDGRDGRDGAPGAPGEKGEGGRPGLPGPRGDPGPRGEAGPAGPTGPAGECSVPPRSAFSAKRSESRVPPPSDAPLPFDRVLVNEQGHYDAVTGKFTCQVPGVYYFAVHATVYRASLQFDLVKNGESIASFFQFFGGWPKPASLSGGAMVRLEPEDQVWVQVGVGDYIGIYASIKTDSTFSGFLVYSDWHSSPVFA

SEQ ID NO: 1803 - protein, 243 aa, Homo Sapiens; identical to SEQ ID NO: 1802

SEQ ID NO: 1804 - protein, 112 aa, Homo Sapiens
MFVLLYVTSFAICASGQPRGNQLKGENYSPRYICSIPGLPGPPGPPGANGSPGPHGRIGLPGRDGRDGRKGEKGEKGTAGLRGKTGPLGLAGEKGDQGETGKKGPIGPEGEK

SEQ ID NO: 1805 - protein, 289 aa, Homo Sapiens
MFVLLYVTSFAICASGQPRGNQLKGENYSPRYICSIPGLPGPPGPPGANGSPGPHGRIGLPGRDGRDGRKGEKGEKGTAGLRGKTGPLGLAGEKGDQGETGKKGPIGPEGEKGEVGPIGPPGPKGDRGEQGDPGLPGVCRCGSIVLKSAFSVGITTSYPEERLPIIFNKVLFNEGEHYNPATGKFICAFPGIYYFSYDITLANKHLAIGLVHNGQYRIKTFDANTGNHDVASGSTVIYLQPEDEVWLEIFFTDQNGLFSDPGWADSLFSGFLLYVDTDYLDSISEDDEL

SEQ ID NO: 1806 - protein, 289 aa, Homo Sapiens; identical to SEQ ID NO: 1805

SEQ ID NO: 1807 - protein, 151 aa, Homo Sapiens
MSRQEPKMFVLLYVTSFAICASGQPRGNQLKGENYSPRYICSIPGLPGPPGPPGANGSPGPHGRIGLPGRDGRDGRKGEKGEKGTAGLRGKTGPLGLAGEKGDQGETGKKGPIGPEGEKGEVGPIGPPGPKGDRGEQGDPGLPGVCRCGSI

SEQ ID NO: 1808 - protein, 296 aa, Homo Sapiens
MSRQEPKMFVLLYVTSFAICASGQPRGNQLKGENYSPRYICSIPGLPGPPGPPGANGSPGPHGRIGLPGRDGRDGRKGEKGEKGTAGLRGKTGPLGLAGEKGDQGETGKKGPIGPEGEKGEVGPIGPPGPKGDRGEQGDPGLPGVCRCGSIVLKSAFSVGITTSYPEERLPIIFNKVLFNEGEHYNPATGKFICAFPGIYYFSYDITLANKHLAIGLVHNGQYRIKTFDANTGNHDVASGSTVIYLQPEDEVWLEIFFTDQNGLFSDPGWADSLFSGFLLYVDTDYLDSISEDDEL

SEQ ID NO: 1809 - protein, 256 aa, Homo Sapiens [sequence omitted]

SEQ ID NO: 1810 - protein, 252 aa, Homo Sapiens
MAAPALLLLALLLPVGAWPGLPRRPCVHCCRPAWPPGPYARVSDRDLWRGDLWRGLPRVRPTIDIEILKGEKGEAGVRGRAGRSGKEGPPGARGLQGRRGQKGQVGPPGAACRRAYAAFSVGRREGLHSSDHFQAVPFDTELVNLDGAFDLAAGRFLCTVPGVYFLSLNVHTWNYKETYLHIMLNRRPAAVLYAQPSERSVMQAQSLMLLLAAGDAVWVRMFQRDRDNAIYGEHGDLYITFSGHLVKPAAEL

SEQ ID NO: 1811 - protein, 333 aa, Homo Sapiens
MRIWWLLLAIEICTGNINSQDTCRQGHPGIPGNPGHNGLPGRDGRDGAKGDKGDAGEPGRPGSPGKDGTSGEKGERGADGKVEAKGIKGDQGSRGSPGKHGPKGLAGPMGEKGLRGETGPQGQKGNKGDVGPTGPEGPRGNIGPLGPTGLPGPMGPIGKPGPKGEAGPTGPQGEPGVRGIRGWKGDRGEKGKIGETLVLPKSAFTVGLTVLSKFPSSDMPIKFDKILYNEFNHYDTAAGKFTCHIAGVYYFTYHITVFSRNVQVSLVKNGVKILHTKDAYMSSEDQASGGIVLQLKLGDEVWLQVTGGERFNGLFADEDDDTTFTGFLLFSSP

SEQ ID NO: 1812 - protein, 333 aa, Homo Sapiens; identical to SEQ ID NO: 1811

SEQ ID NO: 1813 - protein, 333 aa, Homo Sapiens
MRIWWLLLAIEICTGNINSQDTCRQGHPGIPGNPGHNGLPGRDGRDGAKGDKGDAGEPGCPGSPGKDGTSGEKGERGADGKVEAKGIKGDQGSRGSPGKHGPKGLAGPMGEKGLRGETGPQGQKGNKGDVGPTGPEGPRGNIGPLGPTGLPGPMGPIGKPGPKGEAGPTGPQGEPGVRGIRGWKGDRGEKGKIGETLVLPKSAFTVGLTVLSKFPSSDVPIKFDKILYNEFNHYDTAVGKFTCHIAGVYYFTYHITVFSRNVQVSLVKNGVKILHTRDAYVSSEDQASGSIVLQLKLGDEMWLQVTGGERFNGLFADEDDDTTFTGFLLFSSQ

SEQ ID NO: 1814 - protein, 333 aa, Homo Sapiens; identical to SEQ ID NO: 1813

SEQ ID NO: 1815 - protein, 99 aa, Homo Sapiens
MRIWWLLLAIEICTGNINSQDTCRQGHPGIPGNPGHNGLPGRDGRDGAKGDKGDAGEPGCPGSPGKDGTSGEKGERGADGKVEAKGIKGMFRCLWSKTE

SEQ ID NO: 1816 - protein, 49 aa, Homo Sapiens
MSQGNKMLLTFHTDFSNEENGTIMFYKGFLAYYQAVDLDECASRSKSGE

SEQ ID NO: 1817 - protein, 72 aa, Homo Sapiens
MSQGNKMLLTFHTDFSNEENGTIMFYKGFLAYYQAVDLDECASRSKSGEEDPQPQCQHLCHNYVGGYFCSCR

SEQ ID NO: 1818 - protein, 94 aa, Homo Sapiens
MSQGNKMLLTFHTDFSNEENGTIMFYKGFLAYYQAVDLDECASRSKSGEEDPQPQCQHLCHNYVGGYFCSCRPGYELQEDRHSCQAECSSELYT

SEQ ID NO: 1819 - protein, 719 aa, Homo Sapiens
MSVRFRVGREENAQWWLLYLLVPALFCRAGGSIPIPQKLFGEVTSPLFPKPYPNNFETTTVITVPTGYRVKLVFQQFDLEPSEGCFYDYVKISADKKSLGRFCGQLGSPLGNPPGKKEFMSQGNKMLLTFHTDFSNEENGTIMFYKGFLAYYQAVDLDECASRSKSGEEDPQPQCQHLCHNYVGGYFCSCRPGYELQEDRHSCQAECSSELYTEASGYISSLEYPRSYPPDLRCNYSIRVERGLTLHLKFLEPFDIDDHQQVHCPYDQLQIYANGKNIGEFCGKQRPPDLDTSSNAVDLLFFTDESGDSRGWKLRYTTEIIKCPQPKTLDEFTIIQNLQPQYQFRDYFIATCKQGYQLIEGNQVLHSFTAVCQDDGTWHRAMPRCKIKDCGQPRNLPNGDFRYTTTMGVNTYKARIQYYCHEPYYKMQTRAGSRESEQGVYTCTAQGIWKNEQKGEKIPRCLPVCGKPVNPVEQRQRIIGGQKAKMGNFPWQVFTNIHGRGGGALLGDRWILTAAHTLYPKEHEAQSNASLDVFLGHTNVEELMKLGNHPIRRVSVHPDYRQDESYNFEGDIALLELENSVTLGPNLLPICLPDNDTFYDLGLMGYVSGFGVMEEKIAHDLRFVRLPVANPQACENWLRGKNRMDVFSQNMFCAGHPSLKQDACQGDSGGVFAVRDPNTDRWVATGIVSWGIGCSRGYGFYTKVLNYVDWIKKEMEEED

SEQ ID NO: 1820 - protein, 705 aa, Homo Sapiens
MWLLYLLVPALFCRAGGSIPIPQKLFGEVTSPLFPKPYPNNFETTTVITVPTGYRVKLVFQQFDLEPSEGCFYDYVKISADKKSLGRFCGQLGSPLGNPPGKKEFMSQGNKMLLTFHTDFSNEENGTIMFYKGFLAYYQAVDLDECASRSKSGEEDPQPQCQHLCHNYVGGYFCSCRPGYELQEDRHSCQAECSSELYTEASGYISSLEYPRSYPPDLRCNYSIRVERGLTLHLKFLEPFDIDDHQQVHCPYDQLQIYANGKNIGEFCGKQRPPDLDTSSNAVDLLFFTDESGDSRGWKLRYTTEIIKCPQPKTLDEFTIIQNLQPQYQFRDYFIATCKQGYQLIEGNQVLHSFTAVCQDDGTWHRAMPRCKIKDCGQPRNLPNGDFRYTTTMGVNTYKARIQYYCHEPYYKMQTRAGSRESEQGVYTCTAQGIWKNEQKGEKIPRCLPVCGKPVNPVEQRQRIIGGQKAKMGNFPWQVFTNIHGRGGGALLGDRWILTAAHTLYPKEHEAQSNASLDVFLGHTNVEELMKLGNHPIRRVSVHPDYRQDESYNFEGDIALLELENSVTLGPNLLPICLPDNDTFYDLGLMGYVSGFGVMEEKIAHDLRFVRLPVANPQACENWLRGKNRMDVFSQNMFCAGHPSLKQDACQGDSGGVFAVRDPNTDRWVATGIVSWGIGCSRGYGFYTKVLNYVDWIKKEMEEED

SEQ ID NO: 1821 - protein, 156 aa, Homo Sapiens
MWLLYLLVPALFCRAGGSIPIPQKLFGEVTSPLFPKPYPNNFETTTVITVPTGYRVKLVFQQFDLEPSEGCFYDYVKISADKKSLGRFCGQLGSPLGNPPGKKEFMSQGNKMLLTFHTDFSNEENGTIMFYKGFLAYYQAVGEEDPQPQCQHLCHN

SEQ ID NO: 1822 - protein, 144 aa, Homo Sapiens
MWLLYLLVPALFCRAGGSIPIPQKLFGEVTSPLFPKPYPNNFETTTVITVPTGYRVKLVFQQFDLEPSEGCFYDYVKISADKKSLGRFCGQLGSPLGNPPGKKEFMSQGNKMLLTFHTDFSNEENGTIMFYKGFLAYYQAVGLW

SEQ ID NO: 1823 - protein, 156 aa, Homo Sapiens
MWLLYLLVPALFCRAGGSIPIPQKLFGEVTSPLFPKPYPNNFETTTVITVPTGYRVKLVFQQFDLEPSEGCFYDYVKKEFMSQGNKMLLTFHTDFSNEENGTIMFYKGFLAYYQAVDLDECASRSKSGEEDPQPQCQHLCHNYVGGYFCSCRPGYE

SEQ ID NO: 1824 - protein, 671 aa, Homo Sapiens
MWLLYLLVPALFCRAGGSIPIPQKLFGEVTSPLFPKPYPNNFETTTVITVPTGYRVKLVFQQFDLEPSEGCFYDYVKMLLTFHTDFSNEENGTIMFYKGFLAYYQAVDLDECASRSKSGEEDPQPQCQHLCHNYVGGYFCSCRPGYELQEDRHSCQAECSSELYTEASGYISSLEYPRSYPPDLRCNYSIRVERGLTLHLKFLEPFDIDDHQQVHCPYDQLQIYANGKNIGEFCGKQRPPDLDTSSNAVDLLFFTDESGDSRGWKLRYTTEIIKCPQPKTLDEFTIIQNLQPQYQFRDYFIATCKQGYQLIEGNQVLHSFTAVCQDDGTWHRAMPRCKIKDCGQPRNLPNGDFRYTTTMGVNTYKARIQYYCHEPYYKMQTRAGSRESEQGVYTCTAQGIWKNEQKGEKIPRCLPVCGKPVNPVEQRQRIIGGQKAKMGNFPWQVFTNIHGRGGGALLGDRWILTAAHTLYPKEHEAQSNASLDVFLGHTNVEELMKLGNHPIRRVSVHPDYRQDESYNFEGDIALLELENSVTLGPNLLPICLPDNDTFYDLGLMGYVSGFGVMEEKIAHDLRFVRLPVANPQACENWLRGKNRMDVFSQNMFCAGHPSLKQDACQGDSGGVFAVRDPNTDRWVATGIVSWGIGCSRGYGFYTKVLNYVDWIKKEMEEED

SEQ ID NO: 1825 - protein, 83 aa, Homo Sapiens
GLRPGAVPGLCRGLCHNLIRRFGSKPVLWSARLPSGQAPWSEGVCILREEFAADLPHTAFLGEQDCPPPQGLPGPLPNRGCEL

SEQ ID NO: 1826 - protein, 110 aa, Homo Sapiens
MPGPRVWGKYLWRSPHSKGCPGAISHSSVRIQASSVVSKAPLWAGPLVRGSFQPISEASRGSEAINAPGDNPAKVQNHCQEPYYQAAAAGCGSYADPITDQPSVRFSPQL

SEQ ID NO: 1827 - protein, 314 aa, Homo Sapiens
MPGPRVWGKYLWRSPHSKGCPGAMWWLLLWGVLQACPTRGSVLLAQELPQQLTSPGYPEPYGKGQESSTDIKAPEGFAVRLVFQDFDLEPSQDCAGDSVTISFVGSDPSQFCGQQGSPLGRPPGQREFVSSGRSLRLTFRTQPSSENKTAHLHKGFLALYQTVAVNYSQPISEASRGSEAINAPGDNPAKVQNHCQEPYYQAAAAASTPSLFLCLSSFTPQGHSPVQPQGPGKTDRMGRRFFSVCLSADGQSPPLPRIRRPSVLPEPSWATSPGKPSPVSTAVGAGPCWGTDGSSLLPTPSTPRTVFLSGRTRV

SEQ ID NO: 1828 - protein, 487 aa, Homo Sapiens
MPGPRVWGKYLWRSPHSKGCPGAMWWLLLWGVLQACPTRGSVLLAQELPQQLTSPGYPEPYGKGQESSTDIKAPEGFAVRLVFQDFDLEPSQDCAGDSVTISFVGSDPSQFCGQQGSPLGRPPGQREFVSSGRSLRLTFRTQPSSENKTAHLHKGFLALYQTVAVNYSQPISEASRGSEAINAPGDNPAKVQNHCQEPYYQAAAAGALTCATPGTWKDRQDGEEVLQCMPVCGRPVTPIAQNQTTLGSSRAKLGNFPWQAFTSIHGRGGGALLGDRWILTAAHTIYPKDSVSLRKNQSVNVFLGHTAIDEMLKLGNHPVHRVVVHPDYRQNESHNFSGDIALLELQHSIPLGPNVLPVCLPDNETLYRSGLLGYVSGFGMEMGWLTTELKYSRLPVAPREACNAWLQKRQRPEVFSDNMFCVGDETQRHSVCQGDSGSVYVVWDNHAHHWVATGIVSWGIGCGEGYDFYTKVLSYVDWIKGVMNGKN

SEQ ID NO: 1829 - protein, 192 aa, Homo Sapiens
MPGPRVWGKYLWRSPHSKGCPGAMWWLLLWGVLQACPTRGSVLLAQELPQQLTSPGYPEPYGKGQESSTDIKAPEGFAVRLVFQDFDLEPSQDCAGDSVTISFVGSDPSQFCGQQGSPLGRPPGQREFVSSGRSLRLTFRTQPSSENKTAHLHKGFLALYQTVGALTCATPGTWKDRQDGEEVLQCMPVCGR

SEQ ID NO: 1830 - protein, 187 aa, Homo Sapiens
MPGPRVWGKYLWRSPHSKGCPGAMWWLLLWGVLQACPTRGSVLLAQELPQQLTSPGYPEPYGKGQESSTDIKAPEGFAVRLVFQDFDLEPSQDCAGDSVTISFVGSDPSQFCGQQGSPLGRPPGQREFVSSGRSLRLTFRTQPSSENKTAHLHKGFLALYQTVGECPSWGCREGASVPSHDPGIFKP

SEQ ID NO: 1831 - protein, 66 aa, Homo Sapiens
  misc_feature (1)..(1): Xaa can be any naturally occurring amino acid
XNPAKVQNHCQEPYYQAAAAGALTCATPGTWKDRQDGEEVLQCMPGCGSYADPITDQPSVRFSPQL

SEQ ID NO: 1832 - protein, 85 aa, Homo Sapiens
  misc_feature (1)..(1): Xaa can be any naturally occurring amino acid
XPGLRPGAVPGLCRGLCHNLIRRFGSKPVLWSARLPSGQAPWSEGVCILREEFAADLPHTAFLGEQDCPPPQGLPGPLPNRGCEL

SEQ ID NO: 1833 - protein, 194 aa, Homo Sapiens
  misc_feature (1)..(1): Xaa can be any naturally occurring amino acid
XSFVGSDPSQFCGQQGSPLGRPPGQREFVSSGRSLRLTFRTQPSSENKTAHLHKGFLALYQTVVCGRPVTPIAQNQTTLGSSRAKLGNFPWQAFTSIHGRGGGALLGDRWILTAAHTIYPKDSVSLRKNQSVNVFLGHTAIDEMLKLGNHPVHRVVVHPDYRQNESHNFSGDIALLELQHSIPLGPNVLPVCLP

SEQ ID NO: 1834 - protein, 157 aa, Homo Sapiens
MKNCGVNCSGDVFTALIGEIASPNYPKPYPENSRCEYQIRLEKGFQVVVTLRREDFDVEAADSAGNCLDSLVFVAGDRQFGPYCGHGFPGPLNIETKSNALDIIFQTDLTGQKKGWKLRYHGDPMPCPKEDTPNSVWEPAKAKYVFRDVVQITCLDG

SEQ ID NO: 1835 - protein, 521 aa, Homo Sapiens
MKNCGVNCSGDVFTALIGEIASPNYPKPYPENSRCEYQIRLEKGFQVVVTLRREDFDVEAADSAGNCLDSLVFVAGDRQFGPYCGHGFPGPLNIETKSNALDIIFQTDLTGQKKGWKLRYHGDPMPCPKEDTPNSVWEPAKAKYVFRDVVQITCLDGFEVVEGRVGATSFYSTCQSNGKWSNSKLKCQPVDCGIPESIENGKVEDPESTLFGSVIRYTCEEPYYYMENGGGGEYHCAGNGSWVNEVLGPELPKCVPVCGVPREPFEEKQRIIGGSDADIKNFPWQVFFDNPWAGGALINEYWVLTAAHVVEGNREPTMYVGSTSVQTSRLAKSKMLTPEHVFIHPGWKLLEVPEGRTNFDNDIALVRLKDPVKMGPTVSPICLPGTSSDYNLMDGDLGLISGWGRTEKRDRAVRLKAARLPVAPLRKCKEVKVEKPTADAEAYVFTPNMICAGGEKGMDSCKGDSGGAFAVQDPNDKTKFYAAGLVSWGPQCGTYGLYTRVKNYVDWIMKTMQENSTPRED

SEQ ID NO: 1836 - protein, 101 aa, Homo Sapiens
MWCIVLFSLLAWVYAEPTMYGEILSPNYPQAYPSEVEKSWDIEVPEGYGIHLYFTHLDIELSENCAYDSVQIISGDTEEGRLCGQRSSNNPHSPIVEEFQV

SEQ ID NO: 1837 - protein, 103 aa, Homo Sapiens
MWCIVLFSLLAWVYAEPTMYGEILSPNYPQAYPSEVEKSWDIEVPEGYGIHLYFTHLDIELSENCAYDSVQIISGDTEEGRLCGQRSSNNPHSPIVEEFQVPY

SEQ ID NO: 1838 - protein, 168 aa, Homo Sapiens
MWCIVLFSLLAWVYAEPTMYGEILSPNYPQAYPSEVEKSWDIEVPEGYGIHLYFTHLDIELSENCAYDSVQIISGDTEEGRLCGQRSSNNPHSPIVEEFQVPYNKLQVIFKSDFSNEERFTGFAAYYVATDINECTDFVDVPCSHFCNNFIGGYFCSCPPEYFLHDDM

SEQ ID NO: 1839 - protein, 688 aa, Homo Sapiens
MWCIVLFSLLAWVYAEPTMYGEILSPNYPQAYPSEVEKSWDIEVPEGYGIHLYFTHLDIELSENCAYDSVQIISGDTEEGRLCGQRSSNNPHSPIVEEFQVPYNKLQVIFKSDFSNEERFTGFAAYYVATDINECTDFVDVPCSHFCNNFIGGYFCSCPPEYFLHDDMKNCGVNCSGDVFTALIGEIASPNYPKPYPENSRCEYQIRLEKGFQVVVTLRREDFDVEAADSAGNCLDSLVFVAGDRQFGPYCGHGFPGPLNIETKSNALDIIFQTDLTGQKKGWKLRYHGDPMPCPKEDTPNSVWEPAKAKYVFRDVVQITCLDGFEVVEGRVGATSFYSTCQSNGKWSNSKLKCQPVDCGIPESIENGKVEDPESTLFGSVIRYTCEEPYYYMENGGGGEYHCAGNGSWVNEVLGPELPKCVPVCGVPREPFEEKQRIIGGSDADIKNFPWQVFFDNPWAGGALINEYWVLTAAHVVEGNREPTMYVGSTSVQTSRLAKSKMLTPEHVFIHPGWKLLEVPEGRTNFDNDIALVRLKDPVKMGPTVSPICLPGTSSDYNLMDGDLGLISGWGRTEKRDRAVRLKAARLPVAPLRKCKEVKVEKPTADAEAYVFTPNMICAGGEKGMDSCKGDSGGAFAVQDPNDKTKFYAAGLVSWGPQCGTYGLYTRVKNYVDWIMKTMQENSTPRED

SEQ ID NO: 1840 - protein, 688 aa, Homo Sapiens; identical to SEQ ID NO: 1839

SEQ ID NO: 1841 - protein, 688 aa, Homo Sapiens; identical to SEQ ID NO: 1839

SEQ ID NO: 1842 - protein, 682 aa, Homo Sapiens [sequence omitted]

SEQ ID NO: 1843 - protein, 355 aa, Homo Sapiens
  misc_feature (1)..(1): Xaa can be any naturally occurring amino acid
XSKVRRCRKPGPRDRQLTRVDKSPEMWCIVLFSLLAWVYAEPTMYGEILSPNYPQAYPSEVEKSWDIEVPEGYGIHLYFTHLDIELSENCAYDSVQIISGDTEEGRLCGQRSSNNPHSPIVEEFQVPYNKLQVIFKSDFSNEERFTGFAAYYVATDINECTDFVDVPCSHFCNNFIGGYFCSCPPEYFLHDDMKNCGVNCSGDVFTALIGEIASPNYPKPYPENSRCEYQIRLEKGFQVVVTLRREDFDVEAADSAGNCLDSLVFVAGDRQFGPYCGHGFPGPLNIETKSNALDIIFQTDLTGQKKGWKLRYHGDPMPCPKEDTPNSVWEPAKAKYVFRDVVQITCLDGFEVVEK

SEQ ID NO: 1844 - protein, 620 aa, Homo Sapiens
MGPLMVLFCLLFLYPAGHCPNPGISLGAVRTGFRFGHGDKVRYRCSSNLVLTGSSERECQGNGVWSGTEPICRQPYSYDFPEDVAPALGTSFSHMLGATNPTQKTKESLGRKIQIQRSGHLNLYLLLDCSQSVSENDFLIFKESASLMVDRIFSFEINVSVAIITFASEPKVLMSVLNDNSRDMTEVISSLENANYKDHENGTGTNTYAALNSVYLMMNNQMRLLGMETMAWQEIRHAIILLTDGKSNMGGSPKTAVDHIREILNINQKRNDYLDIYAIGVGKLDVDWRELNELGSKKDGERHAFILQDTKALHQVFEHMLDVSKLTDTICGVGNMSANASDQERTPWHVTIKPKSQETCRGALISDQWVLTAAHCFRDGNDHSLWRVNVGDPKSQWGKEFLIEKAVISPGFDVFAKKNQGILEFYGDDIALLKLAQKVKMSTHARPICLPCTMEANLALRRPQGSTCRDHENELLNKQSVPAHFVALNGSKLNINLKMGVEWTSCAEVVSQEKTMFPNLTDVREVVTDQFLCSGTQEDESPCKGESGGAVFLERRFRFFQVGLVSWGLYNPCLGSADKNSRKRAPRSKVPPPRDFHINLFRMQPWLRQHLGDVLNFLPL

SEQ ID NO: 1845 - protein, 203 aa, Homo Sapiens
MGPLMVLFCLLFLYPGLADSAPSCPQNVNISGGTFTLSHGWAPGSLLTYSCPQGLYPSPASRLCKSSGQWQTPGATRSLSKAVCKPGHCPNPGISLGAVRTGFRFGHGDKVRYRCSSNLVLTGSSERECQGNGVWSGTEPICRQPYSYDFPEDVAPALGTSFSHMLGATNPTQKTKESLGRKIQIQRSGHLNLYLLLDCSQSV

SEQ ID NO: 1846 - protein, 139 aa, Homo Sapiens
MGPLMVLFCLLFLYPGLADSAPSCPQNVNISGGTFTLSHGWAPGSLLTYSCPQGLYPSPASRLCKSSGQWQTPGATRSLSKAVCKPVRCPAPVSFENGIYTPRLGSYPVGGNVSFECEDGFILRGSPVRQCRPNGMWDG

SEQ ID NO: 1847 - protein, 752 aa, Homo Sapiens
MGPLMVLFCLLFLYPGLADSAPSCPQNVNISGGTFTLSHGWAPGSLLTYSCPQGLYPSPASRLCKSSGQWQTPGATRSLSKAVCKPVRCPAPVSFENGIYTPRLGSYPVGGNVSFECEDGFILRGSPVRQCRPNGMWDGETAVCDNGAGHCPNPGISLGAVRTGFRFGHGDKVRYRCSSNLVLTGSSERECQGNGVWSGTEPICRQPYSYDFPEDVAPALGTSFSHMLGATNPTQKTKESLGRKIQIQRSGHLNLYLLLDCSQSVSENDFLIFKESASLMVDRIFSFEINVSVAIITFASEPKVLMSVLNDNSRDMTEVISSLENANYKDHENGTGTNTYAALNSVYLMMNNQMRLLGMETMAWQEIRHAIILLTDGKSNMGGSPKTAVDHIREILNINQKRNDYLDIYAIGVGKLDVDWRELNELGSKKDGERHAFILQDTKALHQVFEHMLDVSKLTDTICGVGNMSANASDQERTPWHVTIKPKSQETCRGALISDQWVLTAAHCFRDGNDHSLWRVNVGDPKSQWGKEFLIEKAVISPGFDVFAKKNQGILEFYGDDIALLKLAQKVKMSTHARPICLPCTMEANLALRRPQGSTCRDHENELLNKQSVPAHFVALNGSKLNINLKMGVEWTSCAEVVSQEKTMFPNLTDVREVVTDQFLCSGTQEDESPCKGESGGAVFLERRFRFFQVGLVSWGLYNPCLGSADKNSRKRAPRSKVPPPRDFHINLFRMQPWLRQHLGDVLNFLPL

SEQ ID NO: 1848 - protein, 328 aa, Homo Sapiens
MGPLMVLFCLLFLYPGLADSAPSCPQNVNISGGTFTLSHGWAPGSLLTYSCPQGLYPSPASRLCKSSGQWQTPGATRSLSKAVCKPVRCPAPVSFENGIYTPRLGSYPVGGNVSFECEDGFILRGSPVRQCRPNGMWDGETAVCDNGAGHCPNPGISLGAVRTGFRFGHGDKVRYRCSSNLVLTGSSERECQGNGVWSGTEPICRQPYSYDFPEDVAPALGTSFSHMLGATNPTQKTKESLGRKIQIQRSGHLNLYLLLDCSQSVSENDFLIFKESASLMVDRVRNQESACSRGLPVLTISLCLLPLLRTPLTAHLLQEVFSDYTHAM

SEQ ID NO: 1849 - protein, 104 aa, Homo Sapiens
MGPLMVLFCLLFLYPGLADSAPSCPQNVNISGGTFTLSHGWAPGSLLTYSCPQGLYPSPASRLCKSSGQWQTPGATRSLSKAVCKREAPCGLCSGCALSSPCLL

SEQ ID NO: 1850 - protein, 136 aa, Homo Sapiens
MGRPGRAGHCPNPGISLGAVRTGFRFGHGDKVRYRCSSNLVLTGSSERECQGNGVWSGTEPICRQPYSYDFPEDVAPALGTSFSHMLGATNPTQKTKESLGRKIQIQRSGHLNLYLLLDCSQSVSENDFLIFKESA

SEQ ID NO: 1851 - protein, 506 aa, Homo Sapiens
MGTRSAIAAPRILCSRGLRSGSARATGSGVERSPSAAIFSFEINVSVAIITFASEPKVLMSVLNDNSRDMTEVISSLENANYKDHENGTGTNTYAALNSVYLMMNNQMRLLGMETMAWQEIRHAIILLTDGKSNMGGSPKTAVDHIREILNINQKRNDYLDIYAIGVGKLDVDWRELNELGSKKDGERHAFILQDTKALHQVFEHMLDVSKLTDTICGVGNMSANASDQERTPWHVTIKPKSQETCRGALISDQWVLTAAHCFRDGNDHSLWRVNVGDPKSQWGKEFLIEKAVISPGFDVFAKKNQGILEFYGDDIALLKLAQKVKMSTHARPICLPCTMEANLALRRPQGSTCRDHENELLNKQSVPAHFVALNGSKLNINLKMGVEWTSCAEVVSQEKTMFPNLTDVREVVTDQFLCSGTQEDESPCKGESGGAVFLERRFRFFQVGLVSWGLYNPCLGSADKNSRKRAPRSKVPPPRDFHINLFRMQPWLRQHLGDVLNFLPL

SEQ ID NO: 1852 - protein, 463 aa, Homo Sapiens
MGTRSAIAAPRILCSRGLRSGSARATGSGVERSPSAANPTLMTSLRTWPLPWALPSPTCLGPPIPPRRQRIFSFEINVSVAIITFASEPKVLMSVLNDNSRDMTEVISSLENANYKDHENGTGTNTYAALNSVYLMMNNQMRLLGMETMAWQEIRHAIILLTDGKSNMGGSPKTAVDHIREILNINQKRNDYLDIYAIGVGKLDVDWRELNELGSKKDGERHAFILQDTKALHQVFEHMLDVSKLTDTICGVGNMSANASDQERTPWHVTIKPKSQETCRGALISDQWVLTAAHCFRDGNDHSLWRVNVGDPKSQWGKEFLIEKAVISPGFDVFAKKNQGILEFYGDDIALLKLAQKVKMSTHARPICLPCTMEANLALRRPQGSTCRDHENELLNKQSVPAHFVALNGSKLNINLKMGVEWTSCAEVVSQEKTMFPNLTDVREVVTDQFLCSGTQEDESPCK

SEQ ID NO: 1853 - protein, 84 aa, Homo Sapiens
MGTRSAIAAPRILCSRGLRSGSARATGSGVERSPSAANPTLMTSLRTWPLPWALPSPTCLGPPIPPRRQRKAWAVKSKSSALVI

SEQ ID NO: 1854 - protein, 84 aa, Homo Sapiens; identical to SEQ ID NO: 1853

SEQ ID NO: 1855 - protein, 538 aa, Homo Sapiens
MRALCIRETCSSELGFSRNWSRRKAGHCPNPGISLGAVRTGFRFGHGDKVRYRCSSNLVLTGSSERECQGNGVWSGTEPICRQPYSYDFPEDVAPALGTSFSHMLGATNPTQKTKDHENGTGTNTYAALNSVYLMMNNQMRLLGMETMAWQEIRHAIILLTDGKSNMGGSPKTAVDHIREILNINQKRNDYLDIYAIGVGKLDVDWRELNELGSKKDGERHAFILQDTKALHQVFEHMLDVSKLTDTICGVGNMSANASDQERTPWHVTIKPKSQETCRGALISDQWVLTAAHCFRDGNDHSLWRVNVGDPKSQWGKEFLIEKAVISPGFDVFAKKNQGILEFYGDDIALLKLAQKVKMSTHARPICLPCTMEANLALRRPQGSTCRDHENELLNKQSVPAHFVALNGSKLNINLKMGVEWTSCAEVVSQEKTMFPNLTDVREVVTDQFLCSGTQEDESPCKGESGGAVFLERRFRFFQVGLVSWGLYNPCLGSADKNSRKRAPRSKVPPPRDFHINLFRMQPWLRQHLGDVLNFLPL

SEQ ID NO: 1856 - protein, 158 aa, Homo Sapiens
MRALCIRETCSSELGFSRNWSRRKAGHCPNPGISLGAVRTGFRFGHGDKVRYRCSSNLVLTGSSERECQGNGVWSGTEPICRQPYSYDFPEDVAPALGTSFSHMLGATNPTQKTKESLGRKIQIQRSGHLNLYLLLDCSQSVSENDFLIFKESASLMV

SEQ ID NO: 1857 - protein, 160 aa, Homo Sapiens
  misc_feature (1)..(1): Xaa can be any naturally occurring amino acid
XLMVDRIFSFEINVSVAIITFASEPKVLMSVLNDNSRDMTEVISSLENANYKDHENGTGTNTYAALNSVYLMMNNQMRLLGMETMAWQEIRHAIILLTDGKSNMGGSPKTAVDHIREILNINQKRNDYLAPKPQESGDFPLPHQTSMPSGWASWMWTGEN

SEQ ID NO: 1858 - protein, 526 aa, Homo Sapiens
  misc_feature (1)..(1): Xaa can be any naturally occurring amino acid
XMVLFCLLFLYPAGHCPNPGISLGAVRTGFRFGHGDKVRYRCSSNLVLTGSSERECQGNGVWSGTEPICRQPYSYDFPEDVAPALGTSFSHMLGATNPTQKTKDHENGTGTNTYAALNSVYLMMNNQMRLLGMETMAWQEIRHAIILLTDGKSNMGGSPKTAVDHIREILNINQKRNDYLDIYAIGVGKLDVDWRELNELGSKKDGERHAFILQDTKALHQVFEHMLDVSKLTDTICGVGNMSANASDQERTPWHVTIKPKSQETCRGALISDQWVLTAAHCFRDGNDHSLWRVNVGDPKSQWGKEFLIEKAVISPGFDVFAKKNQGILEFYGDDIALLKLAQKVKMSTHARPICLPCTMEANLALRRPQGSTCRDHENELLNKQSVPAHFVALNGSKLNINLKMGVEWTSCAEVVSQEKTMFPNLTDVREVVTDQFLCSGTQEDESPCKGESGGAVFLERRFRFFQVGLVSWGLYNPCLGSADKNSRKRAPRSKVPPPRDFHINLFRMQPWLRQHLGDVLNFLPL

SEQ ID NO: 1859 - protein, 57 aa, Homo Sapiens
MAAVRVLVASRLAAASAFTSLSPGGRTPSQRAALHLSVPRPAARVALDPGAPEPWRG

SEQ ID NO: 1860 - protein, 163 aa, Homo Sapiens
MAAVRVLVASRLAAASAFTSLSPGGRTPSQRAALHLSVPRPAARVALVLSGCGVYDGTEIHEASAILVHLSRGGAEVQIFAPDVPQMHVIDHTKGQPSEGESRNVLTESARIARGKITDLANLSAANHDAAIFPGGFGAAKNLDSVSLWTSSLWNCERYMSVM

SEQ ID NO: 1861 - protein, 237 aa, Homo Sapiens
MAAVRVLVASRLAAASAFTSLSPGGRTPSQRAALHLSVPRPAARVALVLSGCGVYDGTEIHEASAILVHLSRGGAEVQIFAPDVPQMHVIDHTKGQPSEGESRNVLTESARIARGKITDLANLSAANHDAAIFPGGFGAAKNLLCCIAPVLAAKVLRGVEVTVGHEQEEGGKWPYAGTAEAIKALGAKHCVKEVVEAHVDQKNKVVTTPAFMCETALHYIHDGIGAMVRKVLELTGK

SEQ ID NO: 1862 - protein, 217 aa, Homo Sapiens
MAAVRVLVASRLAAASAFTSLSPGGRTPSQRAALHLSVPRPAARVALVLSGCGVYDGTEIHEASAILVHLSRGGAEVQIFAPDVPQMHVIDHTKGQPSEGESRNVLTESARIARGKITDLANLSAANHDAAIFPGGFGAAKNLSTFAVDGKDCKVNKEVERVLKEFHQAGKPIGCDASTSLPAPAPWWSWNAALCCPGLSCVWCWQGESRTCVGEHQ

SEQ ID NO: 1863 - protein, 268 aa, Homo Sapiens
MAAVRVLVASRLAAASAFTSLSPGGRTPSQRAALHLSVPRPAARVALVLSGCGVYDGTEIHEASAILVHLSRGGAEVQIFAPDVPQMHVIDHTKGQPSEGESRNVLTESARIARGKITDLANLSAANHDAAIFPGGFGAAKNLSTFAVDGKDCKVNKEVERVLKEFHQAGKPIGLCCIAPVLAAKVLRGVEVTVGHEQEEGGKWPYAGTAEAIKALGAKHCVKEVVEAHVDQKNKVVTTPAFMCETALHYIHDGIGAMVRKVLELTGK

SEQ ID NO: 1864 - protein, 224 aa, Homo Sapiens
PSQRAALHLSVPRPAARVALVLSGCGVYDGTEIHEASAILVHLSRGGAEVQIFAPDVPQMHVIDHTKGQPSEGESRNVLTESARIARGKITDLANLSAANHDAAIFPGGFGAAKNLSTFAVDGKDCKVNKEVERVLKEFHQAGKPIGHSLKDLPGHCPGRPLKWSLRKRCRLRAPEGGPCCSRVTAGVKVSPMVSTSGSRPCQRSVPWMSAQREEPMALSSVTD

SEQ ID NO: 1865 - protein, 184 aa, Homo Sapiens
QPSEGESRNVLTESARIARGKITDLANLSAANHDAAIFPGGFGAAKNLSTFAVDGKDCKVNKEVERVLKEFHQAGKPIGLCCIAPVLAAKVLRGVEVTVGHEQEEGGKWPYAGTAEAIKALGAKHCVKEVVEAHVDQKNKVVTTPAFMCETALHYIHDGIGAMASWACWLMPVIPALWEAKARG

SEQ ID NO: 1866 - protein, 191 aa, Homo Sapiens
  misc_feature (1)..(1): Xaa can be any naturally occurring amino acid
XQMHVIDHTKGQPSEGESRNVLTESARIARGKITDLANLSAANHDAAIFPGGFGAAKNLSTFAVDGKDCKVNKEVERVLKEFHQAGKPIGLCCIAPVLAAKVLRGVEVTVGHEQEEGGKWPYAGTAEAIKALGAKHCVKEVVEAHVDQKNKVVTTPAFMCETALHYIHDGIGAMEEREIAAPQPPGLTSGE

SEQ ID NO: 1867 - protein, 190 aa, Homo Sapiens
  misc_feature (1)..(1): Xaa can be any naturally occurring amino acid
XSRGGAEVQIFAPDVPQMHVIDHTKGQPSEGESRNVLTESARIARGKITDLANLSAANHDAAIFPGGFGAAKNLSTFAVDGKDCKVNKEVERVLKEFHQAGKPIGPGDGGDVSMSVSLRSLSLALSLPGGSCSQPSLPPHRHPACPSGPARLLCLEGATKEEDVNVQVLREAGPAASVSVFRPQEEPRPG

SEQ ID NO: 1868 - protein, 266 aa, Homo Sapiens
CRLNQLSSQGEGSVARQRSVEWRGEASRWNSQMTACRHQESGRTYRRQPCTELGTCNNNSTLGVFALNCFTKGQKNSTLIFTRENTIRNCSCSADIRDCDYSLANLMCNCKTVLPLAVERTSYNGHLTIWFTDTSALGHLLNFTLVQDLKLSLCSTNTLPTEYLAICGLKRLRINMEAKHPFPEQSLLIHSGGDSDSREKPMWLHKGWQPCMYISFLDMALFNRDSALKSYSIENVTSIANNFPDFSYFRTFPMPSNKSYVVTFIY

SEQ ID NO: 1869 - protein, 219 aa, Homo Sapiens
MAPPSRHCLLLISTLGVFALNCFTKGQKNSTLIFTRENTIRNCSCSADIRDCDYSLANLMCNCKTVLPLAVERTSYNGHLTIWFTDTSALGHLLNFTLVQDLKLSLCSTNTLPTEYLAICGLKRLRINMEAKHPFPEQSLLIHSGGDSDSREKPMWLHKGWQPCMYISFLDMALFNRDSALKSYSIENVTSIANNFPDFSYFRTFPMPSNKSYVVTFIY

SEQ ID NO: 1870 - protein, 219 aa, Homo Sapiens; identical to SEQ ID NO: 1869

SEQ ID NO: 1871 - protein, 219 aa, Homo Sapiens; identical to SEQ ID NO: 1869

SEQ ID NO: 1872 - protein, 148 aa, Homo Sapiens
MFIKVMFGAGCSVLVNTSCRLVNLTAHLRQKAGLPPDATIALLAEDGNLVSLEEDLKEGASRAQTMGNSLLKERAIYVLVRIIKGEDMASTRYESLLENLDDHYPELAEELRRLSGLSSVGHNWRKRMGTRRGRHEQSPTSRPRKGPD

SEQ ID NO: 1873 - protein, 157 aa, Homo Sapiens
MFIKVMFGAGCSVLVNTSCRLVNLTAHLRQKAGLPPDATIALLAEDGNLVSLEEDLKEGASRAQTMGNSLLKERAIYVLVRIISKRERTWPPPAMSPYWRTWMTITQSWQRNCAGCQASPLWATTGGSVWALGEAAMSKAPLQGPERALIKGMDCTL

SEQ ID NO: 1874 - protein, 142 aa, Homo Sapiens
MFIKVMFGAGCSVLVNTSCRLVNLTAHLRQKAGLPPDATIALLAEDGNLVSLEEDLKEGASRAQTMGNSLLKERAIYVLVRIISKVAQEGEDMASTRYESLLENLDDHYPELAGANRQQPSRTPLAESGIAEKLHQQEGQGP

SEQ ID NO: 1875 - protein, 243 aa, Homo Sapiens
MLLSLLGACAVVGPFHGPEWEPVQGLLSQNHSCRDPQCCGNLLVLCLFLVWQVRHCWHQVTRTRFSTRNVIKVPLQKRAVPSMRCETVFKLTPEFFSPGKSRGLDSQQCAQRQRWGYRRSLQESWAQNLLSPQHPCPGPPSGVHTHSEPIFCTTSISNTCLLPQNSSWKAWQVPWCLHDGQTRPALDMCQEMEQLLLHSQERLVSLEPVISVRSRPTSMTLTTSLPNLLSAERLQFCPQRAPA

SEQ ID NO: 1876 - protein, 696 aa, Homo Sapiens
MAMARLGSWLGEAQWLALVSLFVAALATVGLYLAQWALARARPQPQRRAVEPGEGPRPGSDALLSWILTLGSWRSQWQAAWVTALNEEAERKGGPPFLSFEEDPRQQALELVVQEVSSVLRSAEEKVVVCHVVGQAIQFLVSETPALGAGCRLYDMRLSPFHLQLEFHMKEKREDLQISWSFISVPEMAVNIQPKALGEDQVAETSAMSDVLKDILKHLAGSASPSVVLITKPTTVKEAQNLQCAASTAQESCPPKPPRAHELKLLVRNIHVLLLSEPGASGHINAVCVVQLNDPVQRFSSTLTKNTPDLMWEEEFTFELNAKSKELHLQISEAGRSSEGLLATATVPLDLFKKQPSGPQSFTLTSGSACGSSVLGSVTAEFSYMEPGELKSWPIPPPVPAAKIEKDRTVMPCGTVVTTVTAVKTKPRVDVGRASPLSSDSPVKTPIKVKVIEKDISVQAIACRSAPVSKTLSSSDTELLVLNGSDPVAEVAIRQLSESSKLKLKSPRKKSTIIISGISKTSLSQDHDAALMQGYTASVDSTHQEDAPSHPERAAASAPPEEAESAQASLAPKPQEDELDSWDLEKEPQAAAWSSQVLLDPDGDELSESSMSVLEPGTAKKHKGGILRKGAKLFFRRRHQQKDPGMSQSHNDLVFLEQPEGSRRKGITLTRILNKKLLSRHRNKNTMNGAPVEPCT

SEQ ID NO: 1877 - protein, 541 aa, Homo Sapiens
MRLSPFHLQLEFHMKEKREDLQISWSFISVPEMAVNIQPKALGEDQVAETSAMSDVLKDILKHLAGSASPSVVLITKPTTVKEAQNLQCAASTAQESCPPKPPRAHELKLLVRNIHVLLLSEPGASGHINAVCVVQLNDPVQRFSSTLTKNTPDLMWEEEFTFELNAKSKELHLQISEAGRSSEGLLATATVPLDLFKKQPSGPQSFTLTSGSACGSSVLGSVTAEFSYMEPGELKSWPIPPPVPAAKIEKDRTVMPCGTVVTTVTAVKTKPRVDVGRASPLSSDSPVKTPIKVKVIEKDISVQAIACRSAPVSKTLSSSDTELLVLNGSDPVAEVAIRQLSESSKLKLKSPRKKSTIIISGISKTSLSQDHDAALMQGYTASVDSTHQEDAPSHPERAAASAPPEEAESAQASLAPKPQEDELDSWDLEKEPQAAAWSSQVLLDPDGDELSESSMSVLEPGTAKKHKGGILRKGAKLFFRRRHQQKDPGMSQSHNDLVFLEQPEGSRRKGITLTRILNKKLLSRHRNKNTMNGAPVEPCT

SEQ ID NO: 1878 - protein, 182 aa, Homo Sapiens
  misc_feature (1)..(1): Xaa can be any naturally occurring amino acid
XSTIIISGISKDHDAALMQGYTASVDSTHQEDAPSHPERAAASAPPEEAESAQASLAPKPQEDELDSWDLEKEPQAAAWSSQVLLDPDGDELSESSMSVLEPGTAKKHKGGILRKGAKLFFRRRHQQKDPGMSQSHNDLVFLEQPEGSRRKGITLTRILNKKLLSRHRNKNTMNGAPVEPCT

SEQ ID NO: 1879 - protein, 148 aa, Homo Sapiens
MAASPARPAVLALTGLALLLLLCWGPGGISGNKLKLMLQKREAPVPTKTKVAVDENKAKEFLGSLKRQKRQLWDRTRPEVQQWYQQFLYMGFDEAKFEDDITYWLNRDRNGHEYYGDYYQRHYDEDSAIGPRSPYGFRHGASVNYDDY

SEQ ID NO: 1880 - protein, 112 aa, Homo Sapiens
MLQKREAPVPTKTKVAVDENKAKEFLGSLKRQKRQLWDRTRPEVQQWYQQFLYMGFDEAKFEDDITYWLNRDRNGHEYYGDYYQRHYDEDSAIGPRSPYGFRHGASVNYDDY

SEQ ID NO: 1881 - protein, 142 aa, Homo Sapiens
MQQLRVRGSYRSASQFAGWRRVFYQARQGGISGNKLKLMLQKREAPVPTKTKVAVDENKAKEFLGSLKRQKRQLWDRTRPEVQQWYQQFLYMGFDEAKFEDDITYWLNRDRNGHEYYGDYYQRHYDEDSAIGPRSPYGFRHG

SEQ ID NO: 1882 - protein, 117 aa, Homo Sapiens
MIIDSSRIPSFTQLHSTMTRAPLLLLCVALVLLGHVNGATVRNEDKWKPLNNPRNRDLFFRRLQAYFKGRGLDLGTFPNPFPTNENPRPLSFQSELTASASADYEEQKNSFHNYLKG

SEQ ID NO: 1883 - protein, 385 aa, Homo Sapiens
MWGFRLLRSPPLLLLLPQLGIGNASSCSQARTMNPGGSGGARCSLSAEVRRRQCLQLSTVPGADPQRSNELLLLAAAGEGLERQDLPGDPAKEEPQPPPQHHVLYFPGDVQNYHEIMTRHPENYQWENWSLENVATILAHRFPNSYIWVIKCSRMHLHKFSCYDNFVKSNMFGAPEHNTDFGAFKHLYMLLVNAFNLSQNSLSKKSLNVWNKDSIASNCRSSPSHTTNGCQGEKVRTCEKSDESAMSFYPPSLNDASFTLIGFSKGCVVLNQLLFELKEAKKDKNIDAFIKSIRTMYWLDGGHSGGSNTWVTYPEVLKEFAQTGIIVHTHVTPYQVRDPMRSWIGKEHKKFVQILGDLGMQVTSQIHFTKEAPSIENHFRVHEVF

SEQ ID NO: 1884 - protein, 922 aa, Homo Sapiens
MHWLASATQTSASIVSSSLLSAVDVSSSLTMSEYFQNTSLPGTANSRQFSLPVVSNAAFLTGSISNFSRASAPAISSAWLQPSASGTSFQPLMGSAYLYQHSSTTMLSGVTGQSHICTSAASYPGVFEWDSTASTVKKSSSLRDFTVTVIDQNTAVSSMSMTAQYYKTSDTNTMVPLYPSLSASLVQGTLTQIPNQQGHNLSLPCQIGSQVYYYNQGTLGPQLSCLQSYGSVSYTGYRASAHQPEMVMVLKEVQPTNVLPPVSTSGMYYSVSSQPITETSVQVMETSLGMDTSLGLQSPSQTFCLPQTPEFSKSFSSRNTQTLESNPSPELGDISITPVQSPTNLLTLSPAPSQEKNENENLDEIKTNLSKPLDVHQILIGNQDPPLLPVEIPDIHPLLACIDPLGQEEQPGSENANLRNKSLSLEDQGIFENGIESSSDLADITTWVEDTYLPPIFSSLQDLDQPESPSAKKAKDTSAIKVNQVQEKSCVIKGHSDQVRKNKHKASEPIQGAPKAKIQPKNPECLLEREVVVGSATVSNSASVNKAKHSSNKPHKAASSRISKTKSHGQEKTKGNRKNSSKKSEESKQSGKKVKVEEKQTIPNMKRKKNQPELSQKTLKKPRSSLGMHMLESVQVFHALGKKIDMKTGFSSSRTLGSSSNTQNRQPFPALKPWLDIQHEGKGPEKIQVKAQKLDGSAEKECTSPSHSELPPPGKVKLIPLPFLTLDQPQARHVSRRPNPLASRRPAVAYPARPDSTNSAQSNAVNPSRPAPTNTSLTGPATPAQPISAKATQPSSANPTQPTVPQSAASRPSAYKTSSCSSLQREPVSTAVTSLRSLPKPQNQFLIQDFSLQPRPWRKPTVPEPVMSTPITEEQRPEREAMKRKAQQERENAAKYTSLGKVQFFIERERDMEIAEYYGYTI

SEQ ID NO: 1885 - protein, 192 aa, Homo Sapiens
ITHRIHWESASLLRSEETKENEGFTVTAEGKGQGTLSVVTMYHAKAKDQLTCNKFDLKVTIKPAPETGIPSPIFLSSVFLEKRPQDAKNTMILEICTRYRGDQDATMSILDISMMTGFAPDTDDLKQLANGVDRYISKYELDKAFSDRNTLIIYLDKVSHSEDDCLAFKVHQYFNVELIQPGAVKVYAYYNL

SEQ ID NO: 1886 - protein, 1663 aa, Homo Sapiens
MGPTSGPSLLLLLLTHLPLALGSPMYSIITPNILRLESEETMVLEAHDAQGDVPVTVTVHDFPGKKLVLSSEKTVLTPATNHMGNVTFTIPANREFKSEKGRNKFVTVQATFGTQVVEKVVLVSLQSGYLFIQTDKTIYTPGSTVLYRIFTVNHKLLPVGRTVMVNIENPEGIPVKQDSLSSQNQLGVLPLSWDIPELVNMGQWKIRAYYENSPQQVFSTEFEVKEYVLPSFEVIVEPTEKFYYIYNEKGLEVTITARFLYGKKVEGTAFVIFGIQDGEQRISLPESLKRIPIEDGSGEVVLSRKVLLDGVQNPRAEDLVGKSLYVSATVILHSGSDMVQAERSGIPIVTSPYQIHFTKTPKYFKPGMPFDLMVFVTNPDGSPAYRVPVAVQGEDTVQSLTQGDGVAKLSINTHPSQKPLSITVRTKKQELSEAEQATRTMQALPYSTVGNSNNYLHLSVLRTELRPGETLNVNFLLRMDRAHEAKIRYYTYLIMNKGRLLKAGRQVREPGQDLVVLPLSITTDFIPSFRLVAYYTLIGASGQREVVADSVWVDVKDSCVGSLVVKSGQSEDRQPVPGQQMTLKIEGDHGARVVLVAVDKGVFVLNKKNKLTQSKIWDVVEKADIGCTPGSGKDYAGVFSDAGLTFTSSSGQQTAQRAELQCPQPAARRRRSVQLTEKRMDKVGKYPKELRKCCEDGMRENPMRFSCQRRTRFISLGEACKKVFLDCCNYITELRRQHARASHLGLARSNLDEDIIAEENIVSRSEFPESWLWNVEDLKEPPKNGISTKLMNIFLKDSITTWEILAVSMSDKKGICVADPFEVTVMQDFFIDLRLPYSVVRNEQVEIRAVLYNYRQNQELKVRVELLHNPAFCSLATTKRRHQQTVTIPPKSSLSVPYVIVPLKTGLQEVEVKAAVYHHFISDGVRKSLKVVPEGIRMNKTVAVRTLDPERLGREGVQKEDIPPADLSDQVPDTESETRILLQGTPVAQMTEDAVDAERLKHLIVTPSGCGEQNMIGMTPTVIAVHYLDETEQWEKFGLEKRQGALELIKKGYTQQLAFRQPSSAFAAFVKRAPSTWLTAYVVKVFSLAVNLIAIDSQVLCGAVKWLILEKQKPDGVFQEDAPVIHQEMIGGLRNNNEKDMALTAFVLISLQEAKDICEEQVNSLPGSITKAGDFLEANYMNLQRSYTVAIAGYALAQMGRLKGPLLNKFLTTAKDKNRWEDPGKQLYNVEATSYALLALLQLKDFDFVPPVVRWLNEQRYYGGGYGSTQATFMVFQALAQYQKDAPDHQELNLDVSLQLPSRSSKITHRIHWESASLLRSEETKENEGFTVTAEGKGQGTLSVVTMYHAKAKDQLTCNKFDLKVTIKPAPETEKRPQDAKNTMILEICTRYRGDQDATMSILDISMMTGFAPDTDDLKQLANGVDRYISKYELDKAFSDRNTLIIYLDKVSHSEDDCLAFKVHQYFNVELIQPGAVKVYAYYNLEESCTRFYHPEKEDGKLNKLCRDELCRCAEENCFIQKSDDKVTLEERLDKACEPGVDYVYKTRLVKVQLSNDFDEYIMAIEQTIKSGSDEVQVGQQRTFISPIKCREALKLEEKKHYLMWGLSSDFWGEKPNLSYIIGKDTWVEHWPEEDECQDEENQKQCQDLGAFTESMVVFGCPN

SEQ ID NO: 1887 - protein, 103 aa, Homo Sapiens
MVLEAHDAQGDVPVTVTVHDFPGKKLVLSSEKTVLTPATNHMGNVTFTIPANREFKSEKGRNKFVTVQATFGTQVVEKVVLVSLQSGYLFIQTDKTIYTPGST

SEQ ID NO: 1888 - protein, 101 aa, Homo Sapiens
NNEKDMALTAFVLISLQEAKDICEEQVNSLPGSITKAGDFLEANYMNLQRSYTVAIAGYALAQMGRLKGPLLNKFLTTAKDEENQKQCQDLGAFTESMVVF

SEQ ID NO: 1889 - protein, 100 aa, Homo Sapiens
  misc_feature (1)..(1): Xaa can be any naturally occurring amino acid
XFIQKSDDKVTLEERLDKACEPGVDYVYKTRLVKVQLSNDFDEYIMAIEQTIKSGSDEVQVGQQRTFISPIKCREALKLEEKKHYLMWGLSSDFWGEKPK

SEQ ID NO: 1890 - protein, 119 aa, Homo Sapiens
MAGQPAATGSPSADKDGMEPNVVARISQWADDHLRLVRGHGIPLWPKLECSGTIIAHCCCSTHFGRKDPPTSASRVAGTTEHQHWNGHSWNNVTFEKHSTDIKIYKLFGYSSRIYKKKC

SEQ ID NO: 1891 - protein, 71 aa, Homo Sapiens
MAGQPAATGSPSADKDGMEPNVVARISQWADDHLRLVRNISTGMAIAGIMLLLRSIRLKSHVVLCWLSWLE

SEQ ID NO: 1892 - protein, 294 aa, Homo Sapiens
MAGQPAATGSPSADKDGMEPNVVARISQWADDHLRLVRNISTGMAIAGIMLLLRSIRLTSKFTSSSDIPVEFIRRNVKLRGRLRRITENGLEIEHIPITLPIIASLRKEPRGALLVKLAGVELAETGKAWLQKELKPSQLLWFQLLGKENSALFCYLLVSKGGYFSVNLNEEILRRGLGKTVLVKGLKYDSKIYWTVHRNLLKAELTALKKGEGIWKEDSEKESYLEKFKDSWREIWKKDSFLKTTGSDFSLKKESYYEKLKRTYEIWKDNMNNCSLILKFRELISRINFRRKG

SEQ ID NO: 1893 - protein, 251 aa, Homo Sapiens
MAIAGIMLLLRSIRLTSKFTSSSDIPVEFIRRNVKLRGRLRRITENGLEIEHIPITLPIIASLRKEPRGALLVKLAGVELAETGKAWLQKELKPSQLLWFQLLGKENSALFCYLLVSKGGYFSVNLNEEILRRGLGKTVLVKGLKYDSKIYWTVHRNLLKAELTALKKGEGIWKEDSEKESYLEKFKDSWREIWKKDSFLKTTGSDFSLKKESYYEKLKRTYEIWKDNMNNCSLILKFRELISRINFRRKG

SEQ ID NO: 1894 - protein, 115 aa, Homo Sapiens
  misc_feature (1)..(1): Xaa can be any naturally occurring amino acid
XAGQPAATGSPSADKDGMEPNVVARISQWADDHLRLVRGHGIPLWPKLECSGTIIAHCCCSTHFGRKDPPTSASRVAGTTDQVLHLSPRLECNGVISAHCNLCLPGSSDCPASPS

SEQ ID NO: 1895 - protein, 213 aa, Homo Sapiens
MESLLLLPRFGRISDLTVDLSTPEGSFPSDEGWPFAKYLGACGRMVAVNYVGEELWSYFNAPWEKRVDLAWQLMEIAEQLTNNDFEFALYLLDVSFDNFAVGPRDGKVIIVDAENVLVADKRLIRQNKPENWDVWYESKFDDCDKEACLSFSKEILCARATVDHNYYAVCQNLLSRHATWRGTSGGLLHDPPSEIAKDGRLEALLDECANPKK

SEQ ID NO: 1896 - protein, 221 aa, Homo Sapiens
MKSENGTVVGSFPSDEGWPFAKYLGACGRMVAVNYVGEELWSYFNAPWEKRVDLAWQLMEIAEQLTNNDFEFALYLLDVSFDNFAVGPRDGKVIIVDAENVLVADKRLIRQNKPENWDVWYESKFDDCDKEACLSFSKEILCARATVDHNYYAVCQNLLSRHATWRGTSGGLLHDPPSEIAKDGRLEALLDECANPKKRYGRFQAAKELREYLAQLSNNVR

SEQ ID NO: 1897 - protein, 192 aa, Homo Sapiens
MVAVNYVGEELWSYFNAPWEKRVDLAWQLMEIAEQLTNNDFEFALYLLDVSFDNFAVGPRDGKVIIVDAENVLVADKRLIRQNKPENWDVWYESKFDDCDKEACLSFSKEILCARATVDHNYYAVCQNLLSRHATWRGTSGGLLHDPPSEIAKDGRLEALLDECANPKKRYGRFQAAKELREYLAQLSNNVR

SEQ ID NO: 1898 - protein, 430 aa, Homo Sapiens
MWRLVPPKLGRLSRSLKLAALGSLLVLMVLHSPSLLASWQRNELTDRRFLQLNKCPACFGTSWCRRFLNGQVVFEAWGRLRLLDFLNVKNVYFAQYGEPREGGRRRVVLKRLGSQRELAQLDQSICKRATGRPRCDLLQAMPRTEFARLNGDVRLLTPEAVEGWSDLVHCPSQRLLDRLVRRYAETKDSGSFLLRNLKDSERMQLLLTLAFNPEPLVLQSFPSDEGWPFAKYLGACGRMVAVNYVGEELWSYFNAPWEKRVDLAWQLMEIAEQLTNNDFEFALYLLDVSFDNFAVGPRDGKVIIVDAENVLVADKRLIRQNKPENWDVWYESKFDDCDKEACLSFSKEILCARATVDHNYYAVCQNLLSRHATWRGTSGGLLHDPPSEIAKDGRLEALLDECANPKKRYGRFQAAKELREYLAQLSNNVR

SEQ ID NO: 1899 - protein, 1744 aa, Homo Sapiens
MRLLWGLIWASSFFTLSLQKPRLLLFSPSVVHLGVPLSVGVQLQDVPRGQVVKGSVFLRNPSRNNVPCSPKVDFTLSSERDFALLSLQVPLKDAKSCGLHQLLRGPEVQLVAHSPWLKDSLSRTTNIQGINLLFSSRRGHLFLQTDQPIYNPGQRVRYRVFALDQKMRPSTDTITVMVENSHGLRVRKKEVYMPSSIFQDDFVIPDISEPGTWKISARFSDGLESNSSTQFEVKKYVLPNFEVKITPGKPYILTVPGHLDEMQLDIQARYIYGKPVQGVAYVRFGLLDEDGKKTFFRGLESQTKLVNGQSHISLSKAEFQDALEKLNMGITDLQGLRLYVAAAIIESPGGEMEEAELTSWYFVSSPFSLDLSKTKRHLVPGAPFLLQALVREMSGSPASGIPVKVSATVSSPGSVPEVQDIQQNTDGSGQVSIPIIIPQTISELQLSVSAGSPHPAIARLTVAAPPSGGPGFLSIERPDSRPPRVGDTLNLNLRAVGSGATFSHYYYMILSRGQIVFMNREPKRTLTSVSVFVDHHLAPSFYFVAFYYHGDHPVANSLRVDVQAGACEGKLELSVDGAKQYRNGESVKLHLETDSLALVALGALDTALYAAGSKSHKPLNMGKVFEAMNSYDLGCGPGGGDSALQVFQAAGLAFSDGDQWTLSRKRLSCPKEKTTRKKRNVNFQKAINEKLGQYASPTAKRCCQDGVTRLPMMRSCEQRAARVQQPDCREPFLSCCQFAESLRKKSRDKGQAGLQRALEILQEEDLIDEDDIPVRSFFPENWLWRVETVDRFQILTLWLPDSLTTWEIHGLSLSKTKGLCVATPVQLRVFREFHLHLRLPMSVRRFEQLELRPVLYNYLDKNLTVSVHVSPVEGLCLAGGGGLAQQVLVPAGSARPVAFSVVPTAAAAVSLKVVARGSFEFPVGDAVSKVLQIEKEGAIHREELVYELNPLDHRGRTLEIPGNSDPNMIPDGDFNSYVRVTASDPLDTLGSEGALSPGGVASLLRLPRGCGEQTMIYLAPTLAASRYLDKTEQWSTLPPETKDHAVDLIQKGYMRIQQFRKADGSYAAWLSRDSSTWLTAFVLKVLSLAQEQVGGSPEKLQETSNWLLSQQQADGSFQDPCPVLDRSMQGGLVGNDETVALTAFVTIALHHGLAVFQDEGAEPLKQRVEASISKANSFLGEKASAGLLGAHAAAITAYALTLTKAPVDLLGVAHNNLMAMAQETGDNLYWGSVTGSQSNAVSPTPAPRNPSDPMPQAPALWIETTAYALLHLLLHEGKAEMADQASAWLTRQGSFQGGFRSTQDTVIALDALSAYWIASHTTEERGLNVTLSSTGRNGFKSHALQLNNRQIRGLEEELQFSLGSKINVKVGGNSKGTLKVLRTYNVLDMKNTTCQDLQIEVTVKGHVEYTMEANEDYEDYEYDELPAKDDPDAPLQPVTPLQLFEGRRNRRRREAPKVVEEQESRVHYTVCIWRNGKVGLSGMAIADVTLLSGFHALRADLEKLTSLSDRYVSHFETEGPHVLLYFDSVPTSRECVGFEAVQEVPVGLVQPASATLYDYYNPERRCSVFYGAPSKSRLLATLCSAEVCQCAEGKCPRQRRALERGLQDEDGYRMKFACYYPRVEYGFQVKVLREDSRAAFRLFETKITQVLHFTKDVKAAANQMRNFLVRASCRLRLEPGKEYLIMGLDGATYDLEGHPQYLLDSNSWIEEMPSERLCRSTRQRAACAQLNDFLQEYGTQGCQV

SEQ ID NO: 1900 - protein, 1698 aa, Homo Sapiens
MRLLWGLIWASSFFTLSLQKPRLLLFSPSVVHLGVPLSVGVQLQDVPRGQVVKGSVFLRNPSRNNVPCSPKVDFTLSSERDFALLSLQVPLKDAKSCGLHQLLRGPEVQLVAHSPWLKDSLSRTTNIQGINLLFSSRRGHLFLQTDQPIYNPGQRVRYRVFALDQKMRPSTDTITVMVENSHGLRVRKKEVYMPSSIFQDDFVIPDISEPGTWKISARFSDGLESNSSTQFEVKKYVLPNFEVKITPGKPYILTVPGHLDEMQLDIQARYIYGKPVQGVAYVRFGLLDEDGKKTFFRGLESQTKLVNGQSHISLSKAEFQDALEKLNMGITDLQGLRLYVAAAIIESPGGEMEEAELTSWYFVSSPFSLDLSKTKRHLVPGAPFLLQALVREMSGSPASGIPVKVSATVSSPGSVPEVQDIQQNTDGSGQVSIPIIIPQTISELQLSVSAGSPHPAIARLTVAAPPSGGPGFLSIERPDSRPPRVGDTLNLNLRAVGSGATFSHYYYMILSRGQIVFMNREPKRTLTSVSVFVDHHLAPSFYFVAFYYHGDHPVANSLRVDVQAGACEGKLELSVDGAKQYRNGESVKLHLETDSLALVALGALDTALYAAGSKSHKPLNMGKVFEAMNSYDLGCGPGGGDSALQVFQAAGLAFSDGDQWTLSRKRLSCPKEKTTRKKRNVNFQKAINEKLGQYASPTAKRCCQDGVTRLPMMRSCEQRAARVQQPDCREPFLSCCQFAESLRKKSRDKGQAGLQRALEILQEEDLIDEDDIPVRSFFPENWLWRVETVDRFQILTLWLPDSLTTWEIHGLSLSKTKGLCVATPVQLRVFREFHLHLRLPMSVRRFEQLELRPVLYNYLDKNLTVSVHVSPVEGLCLAGGGGLAQQVLVPAGSARPVAFSVVPTAAAAVSLKVVARGSFEFPVGDAVSKVLQIEKEGAIHREELVYELNPLDHRGRTLEIPGNSDPNMIPDGDFNSYVRVTASDPLDTLGSEGALSPGGVASLLRLPRGCGEQTMIYLAPTLAASRYLDKTEQWSTLPPETKDHAVDLIQKGYMRIQQFRKADGSYAAWLSRDSSTWLTAFVLKVLSLAQEQVGGSPEKLQETSNWLLSQQQADGSFQDPCPVLDRSMQGGLVGNDETVALTAFVTIALHHGLAVFQDEGAEPLKQRVEASISKANSFLGEKASAGLLGAHAAAITAYALTLTKAPVDLLGVAHNNLMAMAQETGDNLYWGSVTGSQSNAVSPTPAPRNPSDPMPQAPALWIETTAYALLHLLLHEGKAEMADQASAWLTRQGSFQGGFRSTQDTVIALDALSAYWIASHTTEERGLNVTLSSTGRNGFKSHALQLNNRQIRGLEEELQFSLGSKINVKVGGNSKGTLKVLRTYNVLDMKNTTCQDLQIEVTVKGHVEYTMEANEDYEDYEYDELPAKDDPDAPLQPVTPLQLFEGRRNRRRREAPKLTSLSDRYVSHFETEGPHVLLYFDSVPTSRECVGFEAVQEVPVGLVQPASATLYDYYNPERRCSVFYGAPSKSRLLATLCSAEVCQCAEGKCPRQRRALERGLQDEDGYRMKFACYYPRVEYGFQVKVLREDSRAAFRLFETKITQVLHFTKDVKAAANQMRNFLVRASCRLRLEPGKEYLIMGLDGATYDLEGHPQYLLDSNSWIEEMPSERLCRSTRQRAACAQLNDFLQEYGTQGCQV

SEQ ID NO: 1901 - protein, 1698 aa, Homo Sapiens
MRLLWGLIWASSFFTLSLQKPRLLLFSPSVVHLGVPLSVGVQLQDVPRGQVVKGSVFLRNPSRNNVPCSPKVDFTLSSERDFALLSLQVPLKDAKSCGLHQLLRGPEVQLVAHSPWLKDSLSRTTNIQGINLLFSSRRGHLFLQTDQPIYNPGQRVRYRVFALDQKMRPSTDTITVMVENSHGLRVRKKEVYMPSSIFQDDFVIPDISEPGTWKISARFSDGLESNSSTQFEVKKYVLPNFEVKITPGKPYILTVPGHLDEMQLDIQARYIYGKPVQGVAYVRFGLLDEDGKKTFFRGLESQTKLVNGQSHISLSKAEFQDALEKLNMGITDLQGLRLYVAAAIIESPGGEMEEAELTSWYFVSSPFSLDLSKTKRHLVPGAPFLLQALVREMSGSPASGIPVKVSATVSSPGSVPEVQDIQQNTDGSGQVSIPIIIPQTISELQLSVSAGSPHPAIARLTVAAPPSGGPGFLSIERPDSRPPRVGDTLNLNLRAVGSGATFSHYYYMILSRGQIVFMNREPKRTLTSVSVFVDHHLAPSFYFVAFYYHGDHPVANSLRVDVQAGACEGKLELSVDGAKQYRNGESVKLHLETDSLALVALGALDTALYAAGSKSHKPLNMGKVFEAMNSYDLGCGPGGGDSALQVFQAAGLAFSDGDQWTLSRKRLSCPKEKTTRKKRNVNFQKAINEKLGQYASPTAKRCCQDGVTRLPMMRSCEQRAARVQQPDCREPFLSCCQFAESLRKKSRDKGQAGLQRALEILQEEDLIDEDDIPVRSFFPENWLWRVETVDRFQILTLWLPDSLTTWEIHGLSLSKTKGLCVATPVQLRVFREFHLHLRLPMSVRRFEQLELRPVLYNYLDKNLTVSVHVSPVEGLCLAGGGGLAQQVLVPAGSARPVAFSVVPTAATAVSLKVVARGSFEFPVGDAVSKVLQIEKEGAIHREELVYELNPLDHRGRTLEIPGNSDPNMIPDGDFNSYVRVTASDPLDTLGSEGALSPGGVASLLRLPRGCGEQTMIYLAPTLAASRYLDKTEQWSTLPPETKDHAVDLIQKGYMRIQQFRKADGSYAAWLSRGSSTWLTAFVLKVLSLAQEQVGGSPEKLQETSNWLLSQQQADGSFQDLSPVIHRSMQGGLVGNDETVALTAFVTIALHHGLAVFQDEGAEPLKQRVEASISKASSFLGEKASAGLLGAHAAAITAYALTLTKAPADLRGVAHNNLMAMAQETGDNLYWGSVTGSQSNAVSPTPAPRNPSDPMPQAPALWIETTAYALLHLLLHEGKAEMADQAAAWLTRQGSFQGGFRSTQDTVIALDALSAYWIASHTTEERGLNVTLSSTGRNGFKSHALQLNNRQIRGLEEELQFSLGSKINVKVGGNSKGTLKVLRTYNVLDMKNTTCQDLQIEVTVKGHVEYTMEANEDYEDYEYDELPAKDDPDAPLQPVTPLQLFEGRRNRRRREAPKLTSLSDRYVSHFETEGPHVLLYFDSVPTSRECVGFEAVQEVPVGLVQPASATLYDYYNPERRCSVFYGAPSKSRLLATLCSAEVCQCAEGKCPRQRRALERGLQDEDGYRMKFACYYPRVEYGFQVKVLREDSRAAFRLFETKITQVLHFTKDVKAAANQMRNFLVRASCRLRLEPGKEYLIMGLDGATYDLEGHPQYLLDSNSWIEEMPSERLCRSTRQRAACAQLNDFLQEYGTQGCQV

SEQ ID NO: 1902 - protein, 1744 aa, Homo Sapiens
MRLLWGLIWASSFFTLSLQKPRLLLFSPSVVHLGVPLSVGVQLQDVPRGQVVKGSVFLRNPSRNNVPCSPKVDFTLSSERDFALLSLQVPLKDAKSCGLHQLLRGPEVQLVAHSPWLKDSLSRTTNIQGINLLFSSRRGHLFLQTDQPIYNPGQRVRYRVFALDQKMRPSTDTITVMVENSHGLRVRKKEVYMPSSIFQDDFVIPDISEPGTWKISARFSDGLESNSSTQFEVKKYVLPNFEVKITPGKPYILTVPGHLDEMQLDIQARYIYGKPVQGVAYVRFGLLDEDGKKTFFRGLESQTKLVNGQSHISLSKAEFQDALEKLNMGITDLQGLRLYVAAAIIESPGGEMEEAELTSWYFVSSPFSLDLSKTKRHLVPGAPFLLQALVREMSGSPASGIPVKVSATVSSPGSVPEVQDIQQNTDGSGQVSIPIIIPQTISELQLSVSAGSPHPAIARLTVAAPPSGGPGFLSIERPDSRPPRVGDTLNLNLRAVGSGATFSHYYYMILSRGQIVFMNREPKRTLTSVSVFVDHHLAPSFYFVAFYYHGDHPVANSLRVDVQAGACEGKLELSVDGAKQYRNGESVKLHLETDSLALVALGALDTALYAAGSKSHKPLNMGKVFEAMNSYDLGCGPGGGDSALQVFQAAGLAFSDGDQWTLSRKRLSCPKEKTTRKKRNVNFQKAINEKLGQYASPTAKRCCQDGVTRLPMMRSCEQRAARVQQPDCREPFLSCCQFAESLRKKSRDKGQAGLQRALEILQEEDLIDEDDIPVRSFFPENWLWRVETVDRFQILTLWLPDSLTTWEIHGLSLSKTKGLCVATPVQLRVFREFHLHLRLPMSVRRFEQLELRPVLYNYLDKNLTVSVHVSPVEGLCLAGGGGLAQQVLVPAGSARPVAFSVVPTAATAVSLKVVARGSFEFPVGDAVSKVLQIEKEGAIHREELVYELNPLDHRGRTLEIPGNSDPNMIPDGDFNSYVRVTASDPLDTLGSEGALSPGGVASLLRLPRGCGEQTMIYLAPTLAASRYLDKTEQWSTLPPETKDHAVDLIQKGYMRIQQFRKADGSYAAWLSRGSSTWLTAFVLKVLSLAQEQVGGSPEKLQETSNWLLSQQQADGSFQDLSPVIHRSMQGGLVGNDETVALTAFVTIALHHGLAVFQDEGAEPLKQRVEASISKASSFLGEKASAGLLGAHAAAITAYALTLTKAPADLRGVAHNNLMAMAQETGDNLYWGSVTGSQSNAVSPTPAPRNPSDPMPQAPALWIETTAYALLHLLLHEGKAEMADQAAAWLTRQGSFQGGFRSTQDTVIALDALSAYWIASHTTEERGLNVTLSSTGRNGFKSHALQLNNRQIRGLEEELQFSLGSKINVKVGGNSKGTLKVLRTYNVLDMKNTTCQDLQIEVTVKGHVEYTMEANEDYEDYEYDELPAKDDPDAPLQPVTPLQLFEGRRNRRRREAPKVVEEQESRVHYTVCIWRNGKVGLSGMAIADVTLLSGFHALRADLEKLTSLSDRYVSHFETEGPHVLLYFDSVPTSRECVGFEAVQEVPVGLVQPASATLYDYYNPERRCSVFYGAPSKSRLLATLCSAEVCQCAEGKCPRQRRALERGLQDEDGYRMKFACYYPRVEYGFQVKVLREDSRAAFRLFETKITQVLHFTKDVKAAANQMRNFLVRASCRLRLEPGKEYLIMGLDGATYDLEGHPQYLLDSNSWIEEMPSERLCRSTRQRAACAQLNDFLQEYGTQGCQV

SEQ ID NO: 1903 - protein, 118 aa, Homo Sapiens
MHPPKTPSGALHRKRKMAAWPFSRLWKVSDPILFQMTLIAALLPAVLGNCGPPPTLSFAAPMDITLTETRFKTGTTLKYTCLPGYVRSHSTQTLTCNSDGEWVYNTFCILDTGFHHIG

SEQ ID NO: 1904 - protein, 152 aa, Homo Sapiens
MHPPKTPSGALHRKRKMAAWPFSRLWKVSDPILFQMTLIAALLPAVLGNCGPPPTLSFAAPMDITLTETRFKTGTTLKYTCLPGYVRSHSTQTLTCNSDGEWVYNTFCIYKRCRHPGELRNGQVEIKTDLSFGSQIEFSCSEGFFLIGSTTS

SEQ ID NO: 1905 - protein, 597 aa, Homo Sapiens
MHPPKTPSGALHRKRKMAAWPFSRLWKVSDPILFQMTLIAALLPAVLGNCGPPPTLSFAAPMDITLTETRFKTGTTLKYTCLPGYVRSHSTQTLTCNSDGEWVYNTFCIYKRCRHPGELRNGQVEIKTDLSFGSQIEFSCSEGFFLIGSTTSRCEVQDRGVGWSHPLPQCEIVKCKPPPDIRNGRHSGEENFYAYGFSVTYSCDPRFSLLGHASISCTVENETIGVWRPSPPTCEKITCRKPDVSHGEMVSGFGPIYNYKDTIVFKCQKGFVLRGSSVIHCDADSKWNPSPPACEPNSCINLPDIPHASWETYPRPTKEDVYVVGTVLRYRCHPGYKPTTDEPTTVICQKNLRWTPYQGCEALCCPEPKLNNGEITQHRKSRPANHCVYFYGDEISFSCHETSRFSAICQGDGTWSPRTPSCGDICNFPPKIAHGHYKQSSSYSFFKEEIIYECDKGYILVGQAKLSCSYSHWSAPAPQCKALCRKPELVNGRLSVDKDQYVEPENVTIQCDSGYGVVGPQSITCSGNRTWYPEVPKCEWETPEGCEQVLTGKRLMQCLPNPEDVKMALEVYKLSLEIEQLELQRDSARQSTLDKEL

SEQ ID NO: 1906 - protein, 181 aa, Homo Sapiens
MFFWCACCLMVAWRVSASDAEHCPELPPVDNSIFVAKEVEGQILGTYVCIKGYHLVGKKTLFCNASKEWDNTTTECRLGHCPDPVLVNGEFSSSGPVNVSDKITFMCNDHYILKGSNRSQCLEDHTWAPPFPICKSRDCDPPGNPVHGYFEGNNFTLGSTISYYCEDRYYLVGVQEQQCVD

SEQ ID NO: 1907 - protein, 252 aa, Homo Sapiens
MFFWCACCLMVAWRVSASDAEHCPELPPVDNSIFVAKEVEGQILGTYVCIKGYHLVGKKTLFCNASKEWDNTTTECRLGHCPDPVLVNGEFSSSGPVNVSDKITFMCNDHYILKGSNRSQCLEDHTWAPPFPICKSRDCDPPGNPVHGYFEGNNFTLGSTISYYCEDRYYLVGVQEQQCVDGEWSSALPVCKLIQEAPKPECEKALLAFQESKNLCEAMENFMQQLKESGMTMEELKYSLELKKAELKAKLL

SEQ ID NO: 1908 - protein, 252 aa, Homo Sapiens; identical to SEQ ID NO: 1907

SEQ ID NO: 1909 - protein, 252 aa, Homo Sapiens; identical to SEQ ID NO: 1907

SEQ ID NO: 1910 - protein, 251 aa, Homo Sapiens
MFFWCACCLMVAWRVSASDEHCPELPPVDNSIFVAKEVEGQILGTYVCIKGYHLVGKKTLFCNASKEWDNTTTECRLGHCPDPVLVNGEFSSSGPVNVSDKITFMCNDHYILKGSNRSQCLEDHTWAPPFPICKSRDCDPPGNPVHGYFEGNNFTLGSTISYYCEDRYYLVGVQEQQCVDGEWSSALPVCKLIQEAPKPECEKALLAFQESKNLCEAMENFMQQLKESGMTMEELKYSLELKKAELKAKLL

SEQ ID NO: 1911 - protein, 95 aa, Homo Sapiens
MAPPPACRSPMSPPPPPLLLLLLSLALLGARARAEPAGSAVPAQSRPCVDCHAFEFMQRALQDLRKTACSLDARTETLLLQAERRALCACWPAGH

SEQ ID NO: 1912 - protein, 128 aa, Homo Sapiens
MRVARRTRNVCRCPRAAGPGVPEPRAAPLPLLAMAPPPACRSPMSPPPPPLLLLLLSLALLGARARAEPAGSAVPAQSRPCVDCHAFEFMQRALQDLRKTACSLDARTETLLLQAERRALCACWPAGH

SEQ ID NO: 1913 - protein, 1676 aa, Homo Sapiens
MGLLGILCFLIFLGKTWGQEQTYVISAPKIFRVGASENIVIQVYGYTEAFDATISIKSYPDKKFSYSSGHVHLSSENKFQNSAILTIQPKQLPGGQNPVSYVYLEVVSKHFSKSKRMPITYDNGFLFIHTDKPVYTPDQSVKVRVYSLNDDLKPAKRETVLTFIDPEGSEVDMVEEIDHIGIISFPDFKIPSNPRYGMWTIKAKYKEDFSTTGTAYFEVKEYVLPHFSVSIEPEYNFIGYKNFKNFEITIKARYFYNKVVTEADVYITFGIREDLKDDQKEMMQTAMQNTMLINGIAQVTFDSETAVKELSYYSLEDLNNKYLYIAVTVIESTGGFSEEAEIPGIKYVLSPYKLNLVATPLFLKPGIPYPIKVQVKDSLDQLVGGVPVTLNAQTIDVNQETSDLDPSKSVTRVDDGVASFVLNLPSGVTVLEFNVKTDAPDLPEENQAREGYRAIAYSSLSQSYLYIDWTDNHKALLVGEHLNIIVTPKSPYIDKITHYNYLILSKGKIIHFGTREKFSDASYQSINIPVTQNMVPSSRLLVYYIVTGEQTAELVSDSVWLNIEEKCGNQLQVHLSPDADAYSPGQTVSLNMATGMDSWVALAAVDSAVYGVQRGAKKPLERVFQFLEKSDLGCGAGGGLNNANVFHLAGLTFLTNANADDSQENDEPCKEILRPRRTLQKKIEEIAAKYKHSVVKKCCYDGACVNNDETCEQRAARISLGPRCIKAFTECCVVASQLRANISHKDMQLGRLHMKTLLPVSKPEIRSYFPESWLWEVHLVPRRKQLQFALPDSLTTWEIQGVGISNTGICVADTVKAKVFKDVFLEMNIPYSVVRGEQIQLKGTVYNYRTSGMQFCVKMSAVEGICTSESPVIDHQGTKSSKCVRQKVEGSSSHLVTFTVLPLEIGLHNINFSLETWFGKEILVKTLRVVPEGVKRESYSGVTLDPRGIYGTISRRKEFPYRIPLDLVPKTEIKRILSVKGLLVGEILSAVLSQEGINILTHLPKGSAEAELMSVVPVFYVFHYLETGNHWNIFHSDPLIEKQKLKKKLKEGMLSIMSYRNADYSYSVWKGGSASTWLTAFALRVLGQVNKYVEQNQNSICNSLLWLVENYQLDNGSFKENSQYQPIKLQGTLPVEARENSLYLTAFTVIGIRKAFDICPLVKIDTALIKADNFLLENTLPAQSTFTLAISAYALSLGDKTHPQFRSIVSALKREALVKGNPPIYRFWKDNLQHKDSSVPNTGTARMVETTAYALLTSLNLKDINYVNPVIKWLSEEQRYGGGFYSTQDTINAIEGLTEYSLLVKQLRLSMDIDVSYKHKGALHNYKMTDKNFLGRPVEVLLNDDLIVSTGFGSGLATVHVTTVVHKTSTSEEVCSFYLKIDTQDIEASHYRGYGNSDYKRIVACASYKPSREESSSGSSHAVMDISLPTGISANEEDLKALVEGVDQLFTDYQIKDGHVILQLNSIPSSDFLCVRFRIFELFEVGFLSPATFTVYEYHRPDKQCTMFYSTSNIKIQKVCEGAACKCVEADCGQMQEELDLTISAETRKQTACKPEIAYAYKVSITSITVENVFVKYKATLLDIYKTGEAVAEKDSEITFIKKVTCTNAELVKGRQYLIMGKEALQIKYNFSFRYIYPLDSLTWIEYWPRDTTCSSCQAFLANLDEFAEDIFLNGC

SEQ ID NO: 1914 - protein, 72 aa, Homo Sapiens
MAVSVLRLTVVLGLLVLFLTCYADDKPDKPDDKPDDSGKDPKPDFPKFLSLLGTEIIENAVEFILRSMSRST

SEQ ID NO: 1915 - protein, 87 aa, Homo Sapiens
MAVSVLRLTVVLGLLVLFLTCYADDKPDKPDDKPDDSGKDPKPDFPKFLSLLGTEIIENAVEFILRSMSRSTGFMEFDDNEGKHSSK

SEQ ID NO: 1916 - protein, 31 aa, Homo Sapiens
MARRSVLYFILLNALINKGQACFCDHYAWTQ

SEQ ID NO: 1917 - protein, 133 aa, Homo Sapiens
MARRSVLYFILLNALINKGQACFCDHYAWTQWTSCSKTCNSGTQSRHRQIVVDKYYQENFCEQICSKQETRECNWQRCPINCLLGDFGPWSDCDPCIEKQSKVRSVLRPSQFGGQPCTAPLVAFQPCIPSKLC

SEQ ID NO: 1918 - protein, 934 aa, Homo Sapiens
MARRSVLYFILLNALINKGQACFCDHYAWTQWTSCSKTCNSGTQSRHRQIVVDKYYQENFCEQICSKQETRECNWQRCPINCLLGDFGPWSDCDPCIEKQSKVRSVLRPSQFGGQPCTAPLVAFQPCIPSKLCKIEEADCKNKFRCDSGRCIARKLECNGENDCGDNSDERDCGRTKAVCTRKYNPIPSVQLMGNGFHFLAGEPRGEVLDNSFTGGICKTVKSSRTSNPYRVPANLENVGFEVQTAEDDLKTDFYKDLTSLGHNENQQGSFSSQGGSSFSVPIFYSSKRSENINHNSAFKQAIQASHKKDSSFIRIHKVMKVLNFTTKAKDLHLSDVFLKALNHLPLEYNSALYSRIFDDFGTHYFTSGSLGGVYDLLYQFSSEELKNSGLTEEEAKHCVRIETKKRVLFAKKTKVEHRCTTNKLSEKHEGSFIQGAEKSISLIRGGRSEYGAALAWEKGSSGLEEKTFSEWLESVKENPAVIDFELAPIVDLVRNIPCAVTKRNNLRKALQEYAAKFDPCQCAPCPNNGRPTLSGTECLCVCQSGTYGENCEKQSPDYKSNAVDGQWGCWSSWSTCDATYKRSRTRECNNPAPQRGGKRCEGEKRQEEDCTFSIMENNGQPCINDDEEMKEVDLPEIEADSGCPQPVPPENGFIRNEKQLYLVGEDVEISCLTGFETVGYQYFRCLPDGTWRQGDVECQRTECIKPVVQEVLTITPFQRLYRIGESIELTCPKGFVVAGPSRYTCQGNSWTPPISNSLTCEKDTLTKLKGHCQLGQKQSGSECICMSPEEDCSHHSEDLCVFDTDSNDYFTSPACKFLAEKCLNNQQLHFLHIGSCQDGRQLEWGLERTRLSSNSTKKESCGYDTCYDWEKCSASTSKCVCLLPPQCFKGGNQLYCVKMGSSTSEKTLNICEVGTIRCANRKMEILHPGKCLA

SEQ ID NO: 1919 - protein, 934 aa, Homo Sapiens; identical to SEQ ID NO: 1918

SEQ ID NO: 1920 - protein, 191 aa, Homo Sapiens
MAAPRGRAAPWTTALLLLLASQVLSPGSCADEEEVPEEWVLLHVVQGQIGAGNYSYLRLNHEGKIVLRMRSLKGDADLYVSASSLHPSFDDYELQSATCGPDAVSIPAHFRRPVGIGVYGHPSHLESEFEMKVYYDGTVEQHPFGEAAYPADGADAGQKHAGAPEDASQEEESVLWTILISILKLVLEILF

SEQ ID NO: 1921 - protein, 325 aa, Homo Sapiens
MQGRVAGSCAPLGLLLVCLHLPGLFARSIGVVEEKVSQNLGTNLPQLGQPSSTGPSNSEHPQPALDPRSNDLARVPLKLSVPASDGFPPAGGSAVQRWPPSWGLPAMDSWPPEDPWQMMAAAAEDRLGEALPEELSYLSSAAALAPGSGPLPGESSPDATGLSPKASLLHQDSESRRLPRSNSLGAGGKILSQRPPWSLIHRVLPDHPWGTLNPSVSWGGGGPGTGWGTRPMPHPEGIWGINNQPPGTSWGNINRYPGGSWGNINRYPGGSWGNINRYPGGSWGNIHLYPGINNPFPPGVLRPPGSSWNIPAGFPNPPSPRLQWG

SEQ ID NO: 1922 - protein, 330 aa, Homo Sapiens
MAFLPSWVCVLVGSFSASLAGTSNLSETEPPLWKESPGQLSDYRVENSMYIINPWVYLERMGMYKIILNQTARYFAKFAPDNEQNILWGLPLQYGWQYRTGRLADPTRRTNCGYESGDHMCISVDSWWADLNYFLSSLPFLAAVDSGVMGISSDQVRLLPPPKNERKFCYDVSSCRSSFPETMNKWNTFYQYLQSPFSKFDDLLKYLWAAHTSTLADNIKSFEDRYDYYSKAEAHFERSWVLAVDHLAAVLFPTTLIRSYKFQKGMPPRILLNTDVAPFISDFTAFQNVVLVLLNMLDNVDKSIGYLCTEKSNVYRDHSESSSRSYGNNS

SEQ ID NO: 1923 - protein, 843 aa, Homo Sapiens
MKVISLFILVGFIGEFQSFSSASSPVNCQWDFYAPWSECNGCTKTQTRRRSVAVYGQYGGQPCVGNAFETQSCEPTRGCPTEEGCGERFRCFSGQCISKSLVCNGDSDCDEDSADEDRCEDSERRPSCDIDKPPPNIELTGNGYNELTGQFRNRVINTKSFGGQCRKVFSGDGKDFYRLSGNVLSYTFQVKINNDFNYEFYNSTWSYVKHTSTEHTSSSRKRSFFRSSSSSSRSYTSHTNEIHKGKSYQLLVVENTVEVAQFINNNPEFLQLAEPFWKELSHLPSLYDYSAYRRLIDQYGTHYLQSGSLGGEYRVLFYVDSEKLKQNDFNSVEEKKCKSSGWHFVVKFSSHGCKELENALKAASGTQNNVLRGEPFIRGGGAGFISGLSYLELDNPAGNKRRYSAWAESVTNLPQVIKQKLTPLYELVKEVPCASVKKLYLKWALEEYLDEFDPCHCRPCQNGGLATVEGTHCLCHCKPYTFGAACEQGVLVGNQAGGVDGGWSCWSSWSPCVQGKKTRSRECNNPPPSGGGRSCVGETTESTQCEDEELEHLRLLEPHCFPLSLVPTEFCPSPPALKDGFVQDEGTMFPVGKNVVYTCNEGYSLIGNPVARCGEDLRWLVGEMHCQKIACVLPVLMDGIQSHPQKPFYTVGEKVTVSCSGGMSLEGPSAFLCGSSLKWSPEMKNARCVQKENPLTQAVPKCQRWEKLQNSRCVCKMPYECGPSLDVCAQDERSKRILPLTVCKMHVLHCQGRNYTLTGRDSCTLPASAEKACGACPLWGKCDAESSKCVCREASECEEEGFSICVEVNGKEQTMSECEAGALRCRGQSISVTSIRPCAAETQ

SEQ ID NO: 1924 - protein, 324 aa, Homo Sapiens
MLWFRGALGVWVWLAAASQPCKNSNAGRRGQHPRRPAGSCVQRLTMRNTSKELQGATHRYAPCDWYYHVPVKRSEKAVDAPPASQIPGLSNLGDSHSENLPGTRRYWIKETDSEYVKLAKQGGRPDLLKHFAPGTRKGSPVAYSLPDWYIHHSKPPTASQQEVRAVSMPDYMVHEEFNPDQANGSYASRRGPFDFDMKTVWQREAEELEKEKKKLRLPAIDSKYLSKAGTPLGPKNPAGSRLSFPPVNGYKDEWLQQQQRADSDKRTPKTSRASVLSQSPRDLEGPQDAARLQDAEASEGPEDTPESSQSPEESVSASTPAELK

SEQ ID NO: 1925 - protein, 340 aa, Homo Sapiens
MLWFRGALGVWVWLAAASQPCKNSNAGRRGQHPRRPAGSCVQRLTMRNTSKELQGATHRYAPCDWYYHVPVKRSEKAVDAPPASQIPGLSNLGDSHSENLPGTRRYWIKETDSEYVKLAKQGGRPDLLKHFAPGTRKGSPVAYSLPDWYIHHSKPPTASQQEVRAVSMPDYMVHEEFNPDQANGSYASRRGPFDFDMKTVWQREAEELEKEKKKLRLPAIDSKYLSKAGTPLGPKNPAGSRLSFPPVPGQKNSSPTNFSKLISNGYKDEWLQQQQRADSDKRTPKTSRASVLSQSPRDLEGPQDAARLQDAEASEGPEDTPESSQSPEESVSASTPAELK

SEQ ID NO: 1926 - protein, 157 aa, Homo Sapiens
MPDYMVHEEFNPDQANGSYASRRGPFDFDMKTVWQREAEELEKEKKKLRLPAIDSKYLSKAGTPLGPKNPAGSRLSFPPVNGYKDEWLQQQQRADSDKRTPKTSRASVLSQSPRDLEGPQDAARLQDAEASEGPEDTPESSQSPEESVSASTPAELK

SEQ ID NO: 1927 - protein, 153 aa, Homo Sapiens
MPDYMVHEEFNPDQANGSYASRRGPFDFDMKTVWQREAEELEKEKKKLRLPAIDSKYLSKAGTPLGPKNPAGSRLSFPPVNGYKDEWLQQQQRADSDKRTPKTSRASVLSQSPRDLEGPQDAARLQDAEASEGPEDTPGPEESVSASTPAELK

SEQ ID NO: 1928 - protein, 295 aa, Homo Sapiens
MRNTSKELQGATHRYAPCDWYYHVPVKRSEKAVDAPPASQIPGLSNLGDSHSENLPGTRRYWIKETDSEYVKLAKQGGRPDLLKHFAPGTRKGSPVAYSLPDWYIHHSKPPTASQQEVRAVSMPDYMVHEEFNPDQANGSYASRRGPFDFDMKTVWQREAEELEKEKKKLRLPAIDSKYLSKAGTPLGPKNPAGSRLSFPPVPGQKNSSPTNFSKLISNGYKDEWLQQQQRADSDKRTPKTSRASVLSQSPRDLEGPQDAARLQDAEASEGPEDTPESSQSPEESVSASTPAELK

SEQ ID NO: 1929 - protein, 584 aa, Homo Sapiens
MFAVVFFILSLMTCQPGVTAQEKVNQRVRRAATPAAVTCQLSNWSEWTDCFPCQDKKYRHRSLLQPNKFGGTICSGDIWDQASCSSSTTCVRQAQCGQDFQCKETGRCLKRHLVCNGDQDCLDGSDEDDCEDVRAIDEDCSQYEPIPGSQKAALGYNILTQEDAQSVYDASYYGGQCETVYNGEWRELRYDSTCERLYYGDDEKYFRKPYNFLKYHFEALADTGISSEFYDNANDLLSKVKKDKSDSFGVTIGIGPAGSPLLVGVGVSHSQDTSFLNELNKYNEKKFIFTRIFTKVQTAHFKMRKDDIMLDEGMLQSLMELPDQYNYGMYAKFINDYGTHYITSGSMGGIYEYILVIDKAKMESLGITSRDITTCFGGSLGIQYEDKINVGGGLSGDHCKKFGGGKTERARKAMAVEDIISRVRGGSSGWSGGLAQNRSTITYRSWGRSLKYNPVVIDFEMQPIHEVLRHTSLGPLEAKRQNLRRALDQYLMEFNACRCGPCFNNGVPILEGTSCRCQCRLGSLGAACEQTQTEGAKADGSWSCWSSWSVCRAGIQERRRECDNPAPQNGGASCPGRKVQTQAC

SEQ ID NO: 1930 - protein, 529 aa, Homo Sapiens
MDTCMTLAFTLSGRFFMLLSQYRYAYLLQPSQFHGEPCNFSDKEVEDCVTNRPCGSQVRCEGFVCAQTGRCVNRRLLCNGDNDCGDQSDEANCRRIYKKCQHEMDQYWGIGSLASGINLFTNSFEGPVLDHRYYAGGCSPHYILNTRFRKPYNVESYTPQTQGKYEFILKEYESYSDFERNVTEKMASKSGFSFGFKIPGIFELGISSQSDRGKHYIRRTKRFSHTKSVFLHARSDLEVAHYKLKPRSLMLHYEFLQRVKRLPLEYSYGEYRDLFRDFGTHYITEAVLGGIYEYTLVMNKEAMERGDYTLNNVHACAKNDFKIGGAIEEVYVSLGVSVGKCRGILNEIKDRNKRDTMVEDLVVLVRGGASEHITTLAYQELPTADLMQEWGDAVQYNPAIIKVKVEPLYELVTATDFAYSSTVRQNMKQALEEFQKEVSSCHCAPCQGNGVPVLKGSRCDCICPVGSQGLACEVSYRKNTPIDGKWNCWSNWSSCSGRRKTRQRQCNNPPPQNGGSPCSGPASETLDCS

SEQ ID NO: 1931 - protein, 591 aa, Homo Sapiens
MKNSRTWAWRAPVELFLLCAALGCLSLPGSRGERPHSFGSNAVNKSFAKSRQMRSVDVTLMPIDCELSSWSSWTTCDPCQKKRYRYAYLLQPSQFHGEPCNFSDKEVEDCVTNRPCGSQVRCEGFVCAQTGRCVNRRLLCNGDNDCGDQSDEANCRRIYKKCQHEMDQYWGIGSLASGINLFTNSFEGPVLDHRYYAGGCSPHYILNTRFRKPYNVESYTPQTQGKYEFILKEYESYSDFERNVTEKMASKSGFSFGFKIPGIFELGISSQSDRGKHYIRRTKRFSHTKSVFLHARSDLEVAHYKLKPRSLMLHYEFLQRVKRLPLEYSYGEYRDLFRDFGTHYITEAVLGGIYEYTLVMNKEAMERGDYTLNNVHACAKNDFKIGGAIEEVYVSLGVSVGKCRGILNEIKDRNKRDTMVEDLVVLVRGGASEHITTLAYQELPTADLMQEWGDAVQYNPAIIKVKVEPLYELVTATDFAYSSTVRQNMKQALEEFQKEVSSCHCAPCQGNGVPVLKGSRCDCICPVGSQGLACEVSYRKNTPIDGKWNCWSNWSSCSGRRKTRQRQCNNPPPQNGGSPCSGPASETLDCS

SEQ ID NO: 1932 - protein, 539 aa, Homo Sapiens
MRSVDVTLMPIDCELSSWSSWTTCDPCQKKRYRYAYLLQPSQFHGEPCNFSDKEVEDCVTNRPCGSQVRCEGFVCAQTGRCVNRRLLCNGDNDCGDQSDEANCRRIYKKCQHEMDQYWGIGSLASGINLFTNSFEGPVLDHRYYAGGCSPHYILNTRFRKPYNVESYTPQTQGKYEFILKEYESYSDFERNVTEKMASKSGFSFGFKIPGIFELGISSQSDRGKHYIRRTKRFSHTKSVFLHARSDLEVAHYKLKPRSLMLHYEFLQRVKRLPLEYSYGEYRDLFRDFGTHYITEAVLGGIYEYTLVMNKEAMERGDYTLNNVHACAKNDFKIGGAIEEVYVSLGVSVGKCRGILNEIKDRNKRDTMVEDLVVLVRGGASEHITTLAYQELPTADLMQEWGDAVQYNPAIIKVKVEPLYELVTATDFAYSSTVRQNMKQALEEFQKEVSSCHCAPCQGNGVPVLKGSRCDCICPVGSQGLACEVSYRKNTPIDGKWNCWSNWSSCSGRRKTRQRQCNNPPPQNGGSPCSGPASETLDCS

SEQ ID NO: 1933 - protein, 202 aa, Homo Sapiens
MLPPGTATLLTLLLAAGSLGQKPQRPRRPASPISTIQPKANFDAQQFAGTWLLVAVGSACRFLQEQGHRAEATTLHVAPQGTAMAVSTFRKLDGICWQVRQLYGDTGVLGRFLLQARDARGAVHVVVAETDYQSFAVLYLERAGQLSVKLYARSLPVSDSVLSGFEQRVQEAHLTEDQIFYFPKYGFCEAADQFHVLDEVRR

SEQ ID NO: 1934 - protein, 164 aa, Homo Sapiens
MLPPGTATLLTLLLAAGSLGQKPQRPRRPASPISTIQPKANFDAQQFAGTWLLVAVGSACRFLQEQGHRAEATTLHVAPQGTAMAVSTFRKLDGICWQVRQLYGDTGVLGRFLLQARDARGAVHVVVAETDYQSFAVLYLERAGQLSVKLYGAQGVVTDRPGVG

SEQ ID NO: 1935 - protein, 559 aa, Homo Sapiens
MSACRSFAVAICILEISILTAQYTTSYDPELTESSGSASHIDCRMSPWSEWSQCDPCLRQMFRSRSIEVFGQFNGKRCTDAVGDRRQCVPTEPCEDAEDDCGNDFQCSTGRCIKMRLRCNGDNDCGDFSDEDDCESEPRPPCRDRVVEESELARTAGYGINILGMDPLSTPFDNEFYNGLCNRDRDGNTLTYYRRPWNVASLIYETKGEKNFRTEHYEEQIEAFKSIIQEKTSNFNAAISLKFTPTETNKAEQCCEETASSISLHGKGSFRFSYSKNETYQLFLSYSSKKEKMFLHVKGEIHLGRFVMRNRDVVLTTTFVDDIKALPTTYEKGEYFAFLETYGTHYSSSGSLGGLYELIYVLDKASMKRKGVELKDIKRCLGYHLDVSLAFSEISVGAEFNKDDCVKRGEGRAVNITSENLIDDVVSLIRGGTRKYAFELKEKLLRGTVIDVTDFVNWASSINDAPVLISQKLSPIYNLVPVKMKNAHLKKQNLERAIEDYINEFSVRKCHTCQNGGTVILMDGKCLCACPFKFEGIACEISKQKISEGLPALEFPNEK

SEQ ID NO: 1936 - protein, 183 aa, Homo Sapiens
MVRIWTTIMIVLILLLRIGPNKPSLSGRQAPAQAQTSDLVPSLFPLGLWAPGFCTWSSPDEDKRPRKPVPGTGNRDSGTRRRLQDATEQDPRPGNDVASAETAGPPSPSGIRAQDRAPRHRRAPPARMPVAPAPSADGEPLQEQGGGLFHRTRSVYNGLELNTWMKVERLFVEKFHQSFSLDN

SEQ ID NO: 1937 - protein, 235 aa, Homo Sapiens
MVRIWTTIMIVLILLLRIGPNKPSLSGRQAPAQAQTSDLVPSLFPLGLWAPGFCTWSSPDEDKRPRKPVPGTGNRDSGTRRRLQDATEQDPRPGNDVASAETAGPPSPSGIRAQDRAPRHRRAPPARMPVAPAPSADGGERRARAGRGTRVGGWGPKDPPFQQNPHRSRARRGLGRATAAGALHISTPPPEPLQEQGGGLFHRTRSVYNGLELNTWMKVERLFVEKFHQSFSLDN

SEQ ID NO: 1938 - protein, 202 aa, Homo Sapiens
MVRIWTTIMIVLILLLRIGPNKPSLSGRQAPAQAQTSDLVPSLFPLGLWAPGFCTWSSPDEDKVWRPAWEQGPKGEPDPRGLRPRKPVPGTGNRDSGTRRRLQDATEQDPRPGNDVASAETAGPPSPSGIRAQDRAPRHRRAPPARMPVAPAPSADGEPLQEQGGGLFHRTRSVYNGLELNTWMKVERLFVEKFHQSFSLDN

SEQ ID NO: 1939 - protein, 56 aa, Homo Sapiens
HVSLRLDKEHLVNISGGPMTYSHRLEEIRLHFGSEDSQGSEHLLNGQAFSGEEKVC

SEQ ID NO: 1940 - protein, 328 aa, Homo Sapiens
MEIVWEVLFLLQANFIVCISAQQNSPKIHEGWWAYKEVVQGSFVPVPSFWGLVNSAWNLCSVGKRQSPVNIETSHMIFDPFLTPLRINTGGRKVSGTMYNTGRHVSLRLDKEHLVNISGGPMTYSHRLEEIRLHFGSEDSQGSEHLLNGQAFSGEVQLIHYNHELYTNVTEAAKSPNGLVVVSIFIKVSDSSNPFLNRMLNRDTITRITYKNDAYLLQGLNIEELYPETSSFITYDGSMTIPPCYETASWIIMNKPVYITRMQMHSLRLLSQNQPSQIFLSMSDNFRPVQPLNNRCIRTNINFSLQGKDCPNNRAQKLQYRVNEWLLK

SEQ ID NO: 1941 - protein, 328 aa, Homo Sapiens; identical to SEQ ID NO: 1940

SEQ ID NO: 1942 - protein, 328 aa, Homo Sapiens; identical to SEQ ID NO: 1940

SEQ ID NO: 1943 - protein, 276 aa, Homo Sapiens
MEIVWEVLFLLQANFIVCISAQQNSPKIHEGWWAYKEVVQGSFVPVPSFWGLVNSAWNLCSVGKRQSPVNIETSHMIFDPFLTPLRINTGGRKVSGTMYNTGRHVSLRLDKEHLVNISGGPMTYSHRLEEIRLHFGSEDSQGSEHLLNGQAFSGEVQLIHYNHELYTNVTEAAKSPNGLVVVSIFIKVSDSSNPFLNRMLNRDTITRITYKNDAYLLQGLNIEELYPETSSFITYDGSMTIPPCYETASWIIMNKPVYITRMQMHSLRLLSQNQPS

SEQ ID NO: 1944 - protein, 42 aa, Homo Sapiens
MEIVWEVLFLLQANFIVCISGDLRRAVRRLWWQSGLEMQVTC

SEQ ID NO: 1945 - protein, 253 aa, Homo Sapiens
MIFDPFLTPLRINTGGRKVSGTMYNTGRHVSLRLDKEHLVNISGGPMTYSHRLEEIRLHFGSEDSQGSEHLLNGQAFSGEVQLIHYNHELYTNVTEAAKSPNGLVVVSIFIKVSDSSNPFLNRMLNRDTITRITYKNDAYLLQGLNIEELYPETSSFITYDGSMTIPPCYETASWIIMNKPVYITRMQMHSLRLLSQNQPSQIFLSMSDNFRPVQPLNNRCIRTNINFSLQGKDCPNNRAQKLQYRVNEWLLK

SEQ ID NO: 1946 - protein, 328 aa, Homo Sapiens
MGAAARLSAPRALVLWAALGAAAHIGPAPDPEDWWSYKDNLQGNFVPGPPFWGLVNAAWSLCAVGKRQSPVDVELKRVLYDPFLPPLRLSTGGEKLRGTLYNTGRHVSFLPAPRPVVNVSGGPLLYSHRLSELRLLFGARDGAGSEHQINHQGFSAEVQLIHFNQELYGNFSAASRGPNGLAILSLFVNVASTSNPFLSRLLNRDTITRISYKNDAYFLQDLSLELLFPESFGFITYQGSLSTPPCSETVTWILIDRALNITSLQMHSLRLLSQNPPSQIFQSLSGNSRPLQPLAHRALRGNRDPRHPERRCRGPNYRLHVDGVPHGR

SEQ ID NO: 1947 - protein, 113 aa, Homo Sapiens
  misc_feature (1)..(1): Xaa can be any naturally occurring amino acid
XDAYFLQDLSLELLFPESFGFITYQGSLSTPPCSETVTWILIDRALNITSLQMHSLRLLSQNPPSQIFQSLSGNSRPLQPLAHRALRGNRDPRHPERRCRGPNYRLHAQCFST

SEQ ID NO: 1948 - protein, 187 aa, Homo Sapiens
MRALVLLLSLFLLGGQAQHVSDWTYSEGALDEAHWPQHYPACGGQRQSPINLQRTKISLPSTMRMTVADGTVYIAQQMHFHWGGASSEISGSEHTVDGIRHVIEIHIVHYNSKYKSYDIAQDAPDGLAVLAAFVEVKNYPENTYYSNFISHLANIKYPGQRTTLTGLDVQDMLPRNLQHYYTYHGSL

SEQ ID NO: 1949 - protein, 179 aa, Homo Sapiens
MRALVLLLSLFLLGGQAQHVSDWTYSEGALDEAHWPQHYPACGGQRQSPINLQRTKVRYNPSLKGLNMTGYETQAGEFPMVNNGHTDWQAELFLPSLSSPCGEGAKHKGQRQWLCSPSLDSWWEAIIDGGSLWATLAECGLRAEGPEEGRHMEEKSPASQGACSGSRLPISRGPCTFFL

SEQ ID NO: 1950 - protein, 313 aa, Homo Sapiens
MRALVLLLSLFLLGGQAQHVSDWTYSEGALDEAHWPQHYPACGGQRQSPINLQRTKVRYNPSLKGLNMTGYETQAGEFPMVNNGHTVQISLPSTMRMTVADGTVYIAQQMHFHWGGASSEISGSEHTVDGIRHVIEIHIVHYNSKYKSYDIAQDAPDGLAVLAAFVEVKNYPENTYYSNFISHLANIKYPGQRTTLTGLDVQDMLPRNLQHYYTYHGSLTTPPCTENVHWFVLADFVKLSRTQVWKLENSLLDHRNKTIHNDYRRTQPLNHRVVESNFPNQGKGHGGHRGRSQNPRVQPTSTRHPLALGSLEA

SEQ ID NO: 1951 - protein, 308 aa, Homo Sapiens
MRALVLLLSLFLLGGQAQHVSDWTYSEGALDEAHWPQHYPACGGQRQSPINLQRTKVRYNPSLKGLNMTGYETQAGEFPMVNNGHTVQISLPSTMRMTVADGTVYIAQQMHFHWGGASSEISGSEHTVDGIRHVIEIHIVHYNSKYKSYDIAQDAPDGLAVLAAFVEVKNYPENTYYSNFISHLANIKYPGQRTTLTGLDVQDMLPRNLQHYYTYHGSLTTPPCTENVHWFVLADFVKLSRTQVWKLENSLLDHRNKTIHNDYRRTQPLNHRVVESNFPNQEYTLGSEFQFYLHKIEEILDYLRRALN

SEQ ID NO: 1952 - protein, 248 aa, Homo Sapiens
MRALVLLLSLFLLGGQAQHVSDWTYSVQISLPSTMRMTVADGTVYIAQQMHFHWGGASSEISGSEHTVDGIRHVIEIHIVHYNSKYKSYDIAQDAPDGLAVLAAFVEVKNYPENTYYSNFISHLANIKYPGQRTTLTGLDVQDMLPRNLQHYYTYHGSLTTPPCTENVHWFVLADFVKLSRTQVWKLENSLLDHRNKTIHNDYRRTQPLNHRVVESNFPNQEYTLGSEFQFYLHKIEEILDYLRRALN

SEQ ID NO: 1953 - protein, 459 aa, Homo Sapiens
MAPLCPSPWLPLLIPAPAPGLTVQLLLSLLLLVPVHPQRLPRMQEDSPLGGGSSGEDDPLGEEDLPSEEDSPREEDPPGEEDLPGEEDLPGEEDLPEVKPKSEEEGSLKLEDLPTVEAPGDPQEPQNNAHRDKEGDDQSHWRYGGDPPWPRVSPACAGRFQSPVDIRPQLAAFCPALRPLELLGFQLPPLPELRLRNNGHSVQLTLPPGLEMALGPGREYRALQLHLHWGAAGRPGSEHTVEGHRFPAEIHVVHLSTAFARVDEALGRPGGLAVLAAFLEEGPEENSAYEQLLSRLEEIAEEGSETQVPGLDISALLPSDFSRYFQYEGSLTTPPCAQGVIWTVFNQTVMLSAKQLHTLSDTLWGPGDSRLQLNFRATQPLNGRVIEASFPAGVDSSPRAAEPVQLNSCLAAGDILALVFGLLFAVTSVAFLVQMRRQHRRGTKGGVSYRPAEVAETGA

SEQ ID NO: 1954 - protein, 356 aa, Homo Sapiens [sequence omitted]

SEQ ID NO: 1955 - protein, 633 aa, Homo Sapiens
MAAAAAAATTAACSSGSAGTDAAGASGLQQPPPQPQPQPAAAAPAQPPPEPPRKPRMDPRRRQAALSFLTNISLDGRLPPQDAEWGGGEEGGAAKPGAGGACGARTRFSLLAAAERGGCIALAAPGTPAAGLAAGSGPCLPQPSSLPPLIPGGHATVSGPGVARGFASPLGAGRASGEQWQPPRPAPLAACAQLQLLDGSGAAGQEELEEDDAFISVQVPAAAFLGSGTPGSGSGSRGRLNSFTQGILPIAFSRPTSQNYCSLEQPGQGGSTSAFEQLQRSRRRLISQRSSLETLEDIEENAPLRRCRTLSGSPRPKNFKKIHFIKNMRQHDTRNGRIVLISGRRSFCSIFSVLPYRDSTQVGDLKLDGGRQSTGAVSLKEIIGLEGVELGADGKTVSYTQFLLPTNAFGARRNTIDSTSSFSQFRNLSHRSLSIGRASGTQGSLDTGSDLGDFMDYDPNLLDDPQWPCGKHKRVLIFPSYMTTVIDYVKPSDLKKDMNETFKEKFPHIKLTLSKIRSLKREMRKLAQEDCGLEEPTVAMAFVYFEKLALKGKLNKQNRKLCAGACVLLAAKIGSDLKKHEVKHLIDKLEEKFRLNRRELIAFEFPVLVALEFALHLPEHEVMPHYRRLVQSS

SEQ ID NO: 1956 - protein, 368 aa, Homo Sapiens
MLSKRGCHARIYADFPIRRLISQRSSLETLEDIEENAPLRRCRTLSGSPRPKNFKKIHFIKNMRQHDTRNGRIVLISGRRSFCSIFSVLPYRDSTQVGDLKLDGGRQSTGAVSLKEIIGLEGVELGADGKTVSYTQFLLPTNAFGARRNTIDSTSSFSQFRNLSHRSLSIGRASGTQGSLDTGSDLGDFMDYDPNLLDDPQWPCGKHKRVLIFPSYMTTVIDYVKPSDLKKDMNETFKEKFPHIKLTLSKIRSLKREMRKLAQEDCGLEEPTVAMAFVYFEKLALKGKLNKQNRKLCAGACVLLAAKIGSDLKKHEVKHLIDKLEEKFRLNRRELIAFEFPVLVALEFALHLPEHEVMPHYRRLVQSS

SEQ ID NO: 1957 - protein, 9 aa, Homo Sapiens
MRQHDTRNG

SEQ ID NO: 1958 - protein, 306 aa, Homo Sapiens
MRQHDTRNGRIVLISGRRSFCSIFSVLPYRDSTQVGDLKLDGGRQSTGAVSLKEIIGLEGVELGADGKTVSYTQFLLPTNAFGARRNTIDSTSSFSQFRNLSHRSLSIGRASGTQGSLDTGSDLGDFMDYDPNLLDDPQWPCGKHKRVLIFPSYMTTVIDYVKPSDLKKDMNETFKEKFPHIKLTLSKIRSLKREMRKLAQEDCGLEEPTVAMAFVYFEKLALKGKLNKQNRKLCAGACVLLAAKIGSDLKKHEVKHLIDKLEEKFRLNRRELIAFEFPVLVALEFALHLPEHEVMPHYRRLVQSS

SEQ ID NO: 1959 - protein, 38 aa, Homo Sapiens
MRQHDTRNGRIVLISGRRSFCSIFSVLPYRDSTQVGQQ

SEQ ID NO: 1960 - protein, 163 aa, Homo Sapiens
  misc_feature (1)..(1): Xaa can be any naturally occurring amino acid
XAAFLGSGTPGSGSGSRGRLNSFTQGILPIAFSRPTSQNYCSLEQPGQGGSTSAFEQLQRSRRRLISQRSSLETLEDIEENAPLRRCRTLSGSPRPKNFKKIHFIKNMRQHDTRNGRIVLISGRRSFCSIFSVLPYRDSTQVGYVYACMLCSSLGEKISHQCT

SEQ ID NO: 1961 - protein, 306 aa, Homo Sapiens
MCQCVRACVCVCVCACATQRASHSALPGTTISVKDWRLCLLDQFDACARSGLSEPRSLTLRVPSCGKPLPGPGARLGREVTPCLSFAFAWCWLKMCQEEQTSYMVVQTSEEGLAADAELPGPLLMLAQNCAVMHNLLGPACIFLRKGFAENRQPDRSLRPEEIEELREAFREFDKDKDGYINCRDLGNCMRTMGYMPTEMELIELSQQINMNLGGHVDFDDFVELMGPKLLAETADMIGVKELRDAFREFDTNGDGEISTSELREAMRKLLGHQVGHRDIEEIIRDVDLNGDGRVDFEEFVRMMSR

SEQ ID NO: 1962 - protein, 370 aa, Homo Sapiens
MGGGDGAAFKRPGDGARLQRVLGLGSRREPRSLPAGGPAPRRTAPPPPGHASAGPAAMSSHIAKSESKTSLLKAAAAAASGGSRAPRHGPARDPGLPSRRLPGSCPATPQSSGDPSSRRPLCRPAPREEGARGSQRVLPQAHCRPREALPAAASRPSPSSPLPPARGRDGEERGLSPALGLRGSLRARGRGDSVPAAASEADPFLHRLRPMLSSAFGQDRSLRPEEIEELREAFREFDKDKDGYINCRDLGNCMRTMGYMPTEMELIELSQQINMNLGGHVDFDDFVELMGPKLLAETADMIGVKELRDAFREFDTNGDGEISTSELREAMRKLLGHQVGHRDIEEIIRDVDLNGDGRVDFEEFVRMMSR

SEQ ID NO: 1963 - protein, 167 aa, Homo Sapiens
MGNCVKYPLRNLSRKDRSLRPEEIEELREAFREFDKDKDGYINCRDLGNCMRTMGYMPTEMELIELSQQINMNLGGHVDFDDFVELMGPKLLAETADMIGVKELRDAFREFDTNGDGEISTSELREAMRKLLGHQVGHRDIEEIIRDVDLNGDGRVDFEEFVRMMSR

SEQ ID NO: 1964 - protein, 227 aa, Homo Sapiens
MGNCVKYPLRNLSRKMCQEEQTSYMVVQTSEEGLAADAELPGPLLMLAQNCAVMHNLLGPACIFLRKGFAENRQPDRSLRPEEIEELREAFREFDKDKDGYINCRDLGNCMRTMGYMPTEMELIELSQQINMNLGGHVDFDDFVELMGPKLLAETADMIGVKELRDAFREFDTNGDGEISTSELREAMRKLLGHQVGHRDIEEIIRDVDLNGDGRVDFEEFVRMMSR

SEQ ID NO: 1965 - protein, 1091 aa, Homo Sapiens
MAAGCLLALTLTLFQSLLIGPSSEEPFPSAVTIKSWVDKMQEDLVTLAKTASGVNQLVDIYEKYQDLYTVEPNNARQLVEIAARDIEKLLSNRSKALVRLALEAEKVQAAHQWREDFASNEVVYYNAKDDLDPEKNDSEPGSQRIKPVFIEDANFGRQISYQHAAVHIPTDIYEGSTIVLNELNWTSALDEVFKKNREEDPSLLWQVFGSATGLARYYPASPWVDNSRTPNKIDLYDVRRRPWYIQGAASPKDMLILVDVSGSVSGLTLKLIRTSVSEMLETLSDDDFVNVASFNSNAQDVSCFQHLVQANVRNKKVLKDAVNNITAKGITDYKKGFSFAFEQLLNYNVSRANCNKIIMLFTDGGEERAQEIFNKYNKDKKVRVFTFSVGQHNYDRGPIQWMACENKGYYYEIPSIGAIRINTQEYLDVLGRPMVLAGDKAKQVQWTNVYLDALELGLVITGTLPVFNITGQFENKTNLKNQLILGVMGVDVSLEDIKRLTPRFTLCPNGYYFAIDPNGYVLLHPNLQPKNPKSQEPVTLDFLDAELENDIKVEIRNKMIDGESGEKTFRTLVKSQDERYIDKGNRTYTWTPVNGTDYSLALVLPTYSFYYIKAKLEETITQARSKKGKMKDSETLKPDNFEESGYTFIAPRDYCNDLKISDNNTEFLLNFNEFIDRKTPNNPSCNADLINRVLLDAGFTNELVQNYWSKQKNIKGVKARFVVTDGGITRVYPKEAGENWQENPETYEDSFYKRSLDNDNYVFTAPYFNKSGPGAYESGIMVSKAVEIYIQGKLLKPAVVGIKIDVNSWIENFTKTSIRDPCAGPVCDCKRNSDVMDCVILDDGGFLLMANHDDYTNQIGRFFGEIDPSLMRHLVNISVYAFNKSYDYQSVCEPGAAPKQGAGHRSAYVPSVADILQIGWWATAAAWSILQQFLLSLTFPRLLEAVEMEDDDFTASLSKQSCITEQTQYFFDNDSKSFSGVLDCGNCSRIFHGEKLMNTNLIFIMVESKGTCPCDTRLLIQAEQTSDGPNPCDMVKQPRYRKGPDVCFDNNVLEDYTDCGGVSGLNPSLWYIIGIQFLLLWLVSGSTHRLL

SEQ ID NO: 1966 - protein, 1103 aa, Homo Sapiens
MAAGCLLALTLTLFQSLLIGPSSEEPFPSAVTIKSWVDKMQEDLVTLAKTASGVNQLVDIYEKYQDLYTVEPNNARQLVEIAARDIEKLLSNRSKALVRLALEAEKVQAAHQWREDFASNEVVYYNAKDDLDPEKNDSEPGSQRIKPVFIEDANFGRQISYQHAAVHIPTDIYEGSTIVLNELNWTSALDEVFKKNREEDPSLLWQVFGSATGLARYYPASPWVDNSRTPNKIDLYDVRRRPWYIQGAASPKDMLILVDVSGSVSGLTLKLIRTSVSEMLETLSDDDFVNVASFNSNAQDVSCFQHLVQANVRNKKVLKDAVNNITAKGITDYKKGFSFAFEQLLNYNVSRANCNKIIMLFTDGGEERAQEIFNKYNKDKKVRVFTFSVGQHNYDRGPIQWMACENKGYYYEIPSIGAIRINTQEYLDVLGRPMVLAGDKAKQVQWTNVYLDALELGLVITGTLPVFNITGQFENKTNLKNQLILGVMGVDVSLEDIKRLTPRFTLCPNGYYFAIDPNGYVLLHPNLQPKPIGVGIPTINLRKRRPNIQNPKSQEPVTLDFLDAELENDIKVEIRNKMIDGESGEKTFRTLVKSQDERYIDKGNRTYTWTPVNGTDYSLALVLPTYSFYYIKAKLEETITQARYSETLKPDNFEESGYTFIAPRDYCNDLKISDNNTEFLLNFNEFIDRKTPNNPSCNADLINRVLLDAGFTNELVQNYWSKQKNIKGVKARFVVTDGGITRVYPKEAGENWQENPETYEDSFYKRSLDNDNYVFTAPYFNKSGPGAYESGIMVSKAVEIYIQGKLLKPAVVGIKIDVNSWIENFTKTSIRDPCAGPVCDCKRNSDVMDCVILDDGGFLLMANHDDYTNQIGRFFGEIDPSLMRHLVNISVYAFNKSYDYQSVCEPGAAPKQGAGHRSAYVPSVADILQIGWWATAAAWSILQQFLLSLTFPRLLEAVEMEDDDFTASLSKQSCITEQTQYFFDNDSKSFSGVLDCGNCSRIFHGEKLMNTNLIFIMVESKGTCPCDTRLLIQAEQTSDGPNPCDMVKQPRYRKGPDVCFDNNVLEDYTDCGGVSGLNPSLWYIIGIQFLLLWLVSGSTHRLL

SEQ ID NO: 1967 - protein, 309 aa, Homo Sapiens
MAAGCLLALTLTLFQSLLIGPSSEEPFPSAVTIKSWVDKMQEDLVTLAKTASGVNQLVDIYEKYQDLYTVEPNNARQLVEIAARDIEKLLSNRSKALVRLALEAEKVQAAHQWREDFASNEVVYYNAKDDLDPEKNDSEPGSQRIKPVFIEDANFGRQISYQHAAVHIPTDIYEGSTIVLNELNWTSALDEVFKKNREEDPSLLWQVFGSATGLARYYPASPWVDNSRTPNKIDLYDVRRRPWYIQGAASPKDMLILVDVSGSVSGLTLKLIRTSVSEMLETLSDDDFVNVASDSKEISPSPEEIFNAE

SEQ ID NO: 1968 - protein, 280 aa, Homo Sapiens
  misc_feature (1)..(1): Xaa can be any naturally occurring amino acid
XKRLTPRFTLCPNGYYFAIDPNGYVLLHPNLQPKPIGVGIPTINLRKRRPNIQEPVTLDFLDAELENDIKVEIRNKMIDGESGEKTFRTLVKSQDERYIDKGNRTYTWTPVNGTDYSLALVLPTYSFYYIKAKLEETITQARYSETLKPDNFEESGYTFIAPRDYCNDLKISDNNTEFLLNFNEFIDRKTPNNPSCNADLINRVLLDAGFTNELVQNYWSKQKNIKGVKARFVVTDGGITRVYPKEAGENWQENPETYEDSFYKRSLDNDNYVFTAPYFN

SEQ ID NO: 1969 - protein, 1073 aa, Homo Sapiens
MAVALGTRRRDRVKLWADTFGGDLYNTVTKYSGSLLLQKKYKDVESSLKIEEVDGLELVRKFSEDMENMLRRKVEAVQNLVEAAEEADLNHEFNESLVFDYYNSVLINERDEKGNFVELGAEFLLESNAHFSNLPVNTSISSVQLPTNVYNKDPDILNGVYMSEALNAVFVENFQRDPTLTWQYFGSATGFFRIYPGIKWTPDENGVITFDCRNRGWYIQAATSPKDIVILVDVSGSMKGLRMTIAKHTITTILDTLGENDFINIIAYNDYVHYIEPCFKGILVQADRDNREHFKLLVEELMVKGVGVVDQALREAFQILKQFQEAKQGSLCNQAIMLISDGAVEDYEPVFEKYNWPDCKVRVFTYLIGREVSFADRMKWIACNNKGYYTQISTLADTQENVMEYLHVLSRPMVINHDHDIIWTEAYMDSKLLSSQAQSLTLLTTVAMPVFSKKNETRSHGILLGVVGSDVALRELMKLAPRYKLGVHGYAFLNTNNGYILSHPDLRPLYREGKKLKPKPNYNSVDLSEVEWEDQAESLRTAMINRETGTLSMDVKVPMDKGKRVLFLTNDYFFTDISDTPFSLGVVLSRGHGEYILLGNTSVEEGLHDLLHPDLALAGDWIYCITDIDPDHRKLSQLEAMIRFLTRKDPDLECDEELVREVLFDAVVTAPMEAYWTALALNMSEESEHVVDMAFLGTRAGLLRSSLFVGSEKVSDRKFLTPEDEASVFTLDRFPLWYRQASEHPAGSFVFNLRWAEGPESAGEPMVVTASTAVAVTVDKRTAIAAAAGVQMKLEFLQRKFWAATRQCSTVDGPCTQSCEDSDLDCFVIDNNGFILISKRSRETGRFLGEVDGAVLTQLLSMGVFSQVTMYDYQAMCKPSSHHHSAAQPLVSPISAFLTATRWLLQELVLFLLEWSVWGSWYDRGAEAKSVFHHSHKHKKQDPLQPCDTEYPVFVYQPAIREANGIVECGPCQKVFVVQQIPNSNLLLLVTDPTCDCSIFPPVLQEATEVKYNASVKCDRMRSQKLRRRPDSCHAFHPEENAQDCGGASDTSASPPLLLLPVCAWGLLPQLLR

SEQ ID NO: 1970 - protein, 1090 aa, Homo Sapiens
MAVALGTRRRDRVKLWADTFGGDLYNTVTKYSGSLLLQKKYKDVESSLKIEEVDGLELVRKFSEDMENMLRRKVEAVQNLVEAAEEADLNHEFNESLVFDYYNSVLINERDEKGNFVELGAEFLLESNAHFSNLPVNTSISSVQLPTNVYNKDPDILNGVYMSEALNAVFVENFQRDPTLTWQYFGSATGFFRIYPGIKWTPDENGVITFDCRNRGWYIQAATSPKDIVILVDVSGSMKGLRMTIAKHTITTILDTLGENDFINIIAYNDYVHYIEPCFKGILVQADRDNREHFKLLVEELMVKGVGVVDQALREAFQILKQFQEAKQGSLCNQAIMLISDGAVEDYEPVFEKYNWPDCKVRVFTYLIGREVSFADRMKWIACNNKGYYTQISTLADTQENVMEYLHVLSRPMVINHDHDIIWTEAYMDSKLLSSQAQSLTLLTTVAMPVFSKKNETRSHGILLGVVGSDVALRELMKLAPRYKLGVHGYAFLNTNNGYILSHPDLRPLYREGKKLKPKPNYNSVDLSEVEWEDQAESLRTAMINRETGTLSMDVKVPMDKGKRVLFLTNDYFFTDISDTPFSLGVVLSRGHGEYILLGNTSVEEGLHDLLHPDLALAGDWIYCITDIDPDHRKLSQLEAMIRFLTRKDPDLECDEELVREVLFDAVVTAPMEAYWTALALNMSEESEHVVDMAFLGTRAGLLRSSLFVGSEKVSDRKFLTPEDEASVFTLDRFPLWYRQASEHPAGSFVFNLRWAEGPESAGEPMVVTASTAVAVTVDKRTAIAAAAGVQMKLEFLQRKFWAATRQCSTVDGPCTQSCEDSDLDCFVIDNNGFILISKRSRETGRFLGEVDGAVLTQLLSMGVFSQVTMYDYQAMCKPSSHHHSAAQPLVSPISAFLTATRWLLQELVLFLLEWSVWGSWYDRGAEAKSVFHHSHKHKKQDPLQPCDTEYPVFVYQPAIREANGIVECGPCQKVFVVQQIPNSNLLLLVTDPTCDCSIFPPVLQEATEVKYNASVKCDRMRSQKLRRRPDSCHAFHPEVRVEADRGWAGFSSPNPLCLGLCPCRQEHIGMPMNTPVPVLLGGNIRVYAL

SEQ ID NO: 1971 - protein, 56 aa, Homo Sapiens
MKLEFLQRKFWAATRQCSTVDGPCTQSCEDSDLDCFVIDNNGFILISKRSRESDYV

SEQ ID NO: 1972 - protein, 56 aa, Homo Sapiens; identical to SEQ ID NO: 1971

SEQ ID NO: 1973 - protein, 282 aa, Homo Sapiens
MKLEFLQRKFWAATRQCSTVDGPCTQSCEDSDLDCFVIDNNGFILISKRSRETGRFLGEVDGAVLTQLLSMGVFSQVTMYDYQAMCKPSSHHHSAAQPLVSPISAFLTATRWLLQELVLFLLEWSVWGSWYDRGAEAKSVFHHSHKHKKQDPLQPCDTEYPVFVYQPAIREANGIVECGPCQKVFVVQQIPNSNLLLLVTDPTCDCSIFPPVLQEATEVKYNASVKCDRMRSQKLRRRPDSCHAFHPEENAQDCGGASDTSASPPLLLLPVCAWGLLPQLLR

SEQ ID NO: 1974 - protein, 41 aa, Homo Sapiens
MKLEFLQRKFWAATRQDLDCFVIDNNGFILISKRSRESDYV

SEQ ID NO: 1975 - protein, 267 aa, Homo Sapiens
MKLEFLQRKFWAATRQDLDCFVIDNNGFILISKRSRETGRFLGEVDGAVLTQLLSMGVFSQVTMYDYQAMCKPSSHHHSAAQPLVSPISAFLTATRWLLQELVLFLLEWSVWGSWYDRGAEAKSVFHHSHKHKKQDPLQPCDTEYPVFVYQPAIREANGIVECGPCQKVFVVQQIPNSNLLLLVTDPTCDCSIFPPVLQEATEVKYNASVKCDRMRSQKLRRRPDSCHAFHPEENAQDCGGASDTSASPPLLLLPVCAWGLLPQLLR

SEQ ID NO: 1976 - protein, 1137 aa, Homo Sapiens
MVCGCSALLPLPNPRPTMPATPNFLANPSSSSRWIPLQPMPVAWAFVQKTSALLWLLLLGTSLSPAWGQAKIPLETVKLWADTFGGDLYNTVTKYSGSLLLQKKYKDVESSLKIEEVDGLELVRKFSEDMENMLRRKVEAVQNLVEAAEEADLNHEFNESLVFDYYNSVLINERDEKGNFVELGAEFLLESNAHFSNLPVNTSISSVQLPTNVYNKDPDILNGVYMSEALNAVFVENFQRDPTLTWQYFGSATGFFRIYPGIKWTPDENGVITFDCRNRGWYIQAATSPKDIVILVDVSGSMKGLRMTIAKHTITTILDTLGENDFINIIAYNDYVHYIEPCFKGILVQADRDNREHFKLLVEELMVKGVGVVDQALREAFQILKQFQEAKQGSLCNQAIMLISDGAVEDYEPVFEKYNWPDCKVRVFTYLIGREVSFADRMKWIACNNKGYYTQISTLADTQENVMEYLHVLSRPMVINHDHDIIWTEAYMDSKLLSSQAQSLTLLTTVAMPVFSKKNETRSHGILLGVVGSDVALRELMKLAPRYKLGVHGYAFLNTNNGYILSHPDLRPLYREGKKLKPKPNYNSVDLSEVEWEDQAESLRTAMINRETGTLSMDVKVPMDKGKRVLFLTNDYFFTDISDTPFSLGVVLSRGHGEYILLGNTSVEEGLHDLLHPDLALAGDWIYCITDIDPDHRKLSQLEAMIRFLTRKDPDLECDEELVREVLFDAVVTAPMEAYWTALALNMSEESEHVVDMAFLGTRAGLLRSSLFVGSEKVSDRKFLTPEDEASVFTLDRFPLWYRQASEHPAGSFVFNLRWAEGPESAGEPMVVTASTAVAVTVDKRTAIAAAAGVQMKLEFLQRKFWAATRQCSTVDGPCTQSCEDSDLDCFVIDNNGFILISKRSRETGRFLGEVDGAVLTQLLSMGVFSQVTMYDYQAMCKPSSHHHSAAQPLVSPISAFLTATRWLLQELVLFLLEWSVWGSWYDRGAEAKSVFHHSHKHKKQDPLQPCDTEYPVFVYQPAIREANGIVECGPCQKVFVVQQIPNSNLLLLVTDPTCDCSIFPPVLQEATEVKYNASVKCDRMRSQKLRRRPDSCHAFHPEENAQDCGGASDTSASPPLLLLPVCAWGLLPQLLR

SEQ ID NO: 1977 - protein, 601 aa, Homo Sapiens
MVCGCSALLPLPNPRPTMPATPNFLANPSSSSRWIPLQPMPVAWAFVQKTSALLWLLLLGTSLSPAWGQAKIPLETVKLWADTFGGDLYNTVTKYSGSLLLQKKYKDVESSLKIEEVDGLELVRKFSEDMENMLRRKVEAVQNLVEAAEEADLNHEFNESLVFDYYNSVLINERDEKGNFVELGAEFLLESNAHFSNLPVNTSISSVQLPTNVYNKDPDILNGVYMSEALNAVFVENFQRDPTLTWQYFGSATGFFRIYPGIKWTPDENGVITFDCRNRGWYIQAATSPKDIVILVDVSGSMKGLRMTIAKHTITTILDTLGENDFINIIAYNDYVHYIEPCFKGILVQADRDNREHFKLLVEELMVKGVGVVDQALREAFQILKQFQEAKQGSLCNQAIMLISDGAVEDYEPVFEKYNWPDCKVRVFTYLIGREVSFADRMKWIACNNKGYYTQISTLADTQENVMEYLHVLSRPMVINHDHDIIWTEAYMDSKLLSSQAQSLTLLTTVAMPVFSKKNETRSHGILLGVVGSDVALRELMKLAPRYKMPSTNSRPNAPPPWTLAAWSARIRLSEHQQWLHPLPSRPPAPVQRGEETKTQT

SEQ ID NO: 1978 - protein, 1154 aa, Homo Sapiens
MVCGCSALLPLPNPRPTMPATPNFLANPSSSSRWIPLQPMPVAWAFVQKTSALLWLLLLGTSLSPAWGQAKIPLETVKLWADTFGGDLYNTVTKYSGSLLLQKKYKDVESSLKIEEVDGLELVRKFSEDMENMLRRKVEAVQNLVEAAEEADLNHEFNESLVFDYYNSVLINERDEKGNFVELGAEFLLESNAHFSNLPVNTSISSVQLPTNVYNKDPDILNGVYMSEALNAVFVENFQRDPTLTWQYFGSATGFFRIYPGIKWTPDENGVITFDCRNRGWYIQAATSPKDIVILVDVSGSMKGLRMTIAKHTITTILDTLGENDFINIIAYNDYVHYIEPCFKGILVQADRDNREHFKLLVEELMVKGVGVVDQALREAFQILKQFQEAKQGSLCNQAIMLISDGAVEDYEPVFEKYNWPDCKVRVFTYLIGREVSFADRMKWIACNNKGYYTQISTLADTQENVMEYLHVLSRPMVINHDHDIIWTEAYMDSKLLSSQAQSLTLLTTVAMPVFSKKNETRSHGILLGVVGSDVALRELMKLAPRYKLGVHGYAFLNTNNGYILSHPDLRPLYREGKKLKPKPNYNSVDLSEVEWEDQAESLRTAMINRETGTLSMDVKVPMDKGKRVLFLTNDYFFTDISDTPFSLGVVLSRGHGEYILLGNTSVEEGLHDLLHPDLALAGDWIYCITDIDPDHRKLSQLEAMIRFLTRKDPDLECDEELVREVLFDAVVTAPMEAYWTALALNMSEESEHVVDMAFLGTRAGLLRSSLFVGSEKVSDRKFLTPEDEASVFTLDRFPLWYRQASEHPAGSFVFNLRWAEGPESAGEPMVVTASTAVAVTVDKRTAIAAAAGVQMKLEFLQRKFWAATRQCSTVDGPCTQSCEDSDLDCFVIDNNGFILISKRSRETGRFLGEVDGAVLTQLLSMGVFSQVTMYDYQAMCKPSSHHHSAAQPLVSPISAFLTATRWLLQELVLFLLEWSVWGSWYDRGAEAKSVFHHSHKHKKQDPLQPCDTEYPVFVYQPAIREANGIVECGPCQKVFVVQQIPNSNLLLLVTDPTCDCSIFPPVLQEATEVKYNASVKCDRMRSQKLRRRPDSCHAFHPEVRVEADRGWAGFSSPNPLCLGLCPCRQEHIGMPMNTPVPVLLGGNIRVYAL

SEQ ID NO: 1979 - protein, 780 aa, Homo Sapiens
MVCGCSALLPLPNPRPTMPATPNFLANPSSSSRWIPLQPMPVAWAFVQKTSALLWLLLLGTSLSPAWGQAKIPLETVKLWADTFGGDLYNTVTKYSGSLLLQKKYKDVESSLKIEEVDGLELVRKFSEDMENMLRRKVEAVQNLVEAAEEADLNHEFNESLVFDYYNSVLINERDEKGNFVELGAEFLLESNAHFSNLPVNTSISSVQLPTNVYNKDPDILNGVYMSEALNAVFVENFQRDPTLTWQYFGSATGFFRIYPGILVQADRDNREHFKLLVEELMVKGVGVVDQALREAFQILKQFQEAKQGSLCNQAIMLISDGAVEDYEPVFEKYNWPDCKISTLADTQENVMEYLHVLSRPMVINHDHDIIWTEAYMDSKLLSSQAQSLTLLTTVAMPVFSKKNETRSHGILLGVVGSDVALRELMKLAPRYKLGVHGYAFLNTNNGYILSHPDLRPLYREGKKLKPKPNYNSVDLSEVEWEDQAESKRVLFLTNDYFFTDISDTPFSLGVVLSRGHGEYILLGNTSVEEGLHDLLHPDLALAGDWIYCITDIDPDHRKLSQLEAMIRFLTRKDPDLECDEELVREVLFDAVVTAPMEAYWTALALNMSEESEHVVDMAFLGTRAGLLRSSLFVGSEKVSDRKFLTPEDEASVFTLDRFPLWYRQASEHPAGSFVFNLRWAEGPESAGEPMVVTASTAVAVTVDKRTAIAAAAGVQMKLEFLQRKFWAATRQCSTVDGPCTQSCEDSDLDCFVIDNNGFILISKRSREPGIKLRKKPIQT

SEQ ID NO: 1980 - protein, 1112 aa, Homo Sapiens
MVCGCSALLPLPNPRPTMPATPNFLANPSSSSRWIPLQPMPVAWAFVQKTSALLWLLLLGTSLSPAWGQAKIPLETVKLWADTFGGDLYNTVTKYSGSLLLQKKYKDVESSLKIEEVDGLELVRKFSEDMENMLRRKVEAVQNLVEAAEEADLNHEFNESLVFDYYNSVLINERDEKGNFVELGAEFLLESNAHFSNLPVNTSISSVQLPTNVYNKDPDILNGVYMSEALNAVFVENFQRDPTLTWQYFGSATGFFRIYPGIKWTPDENGVITFDCRNRGWYIQAATSPKDIVILVDVSGSMKGLRMTIAKHTITTILDTLGENDFINIIAYNDYVHYIEPCFKGILVQADRDNREHFKLLVEELMVKGVGVVDQALREAFQILKQFQEAKQGSLCNQAIMLISDGAVEDYEPVFEKYNWPDCKVRVFTYLIGREVSFADRMKWIACNNKGYYTQISTLADTQENVMEYLHVLSRPMVINHDHDIIWTEAYMDSKLLSSQAQSLTLLTTVAMPVFSKKNETRSHGILLGVVGSDVALRELMKLAPRYKYREGKKLKPKPNYNSVDLSEVEWEDQAESLRTAMINRETGTLSMDVKVPMDKGKRVLFLTNDYFFTDISDTPFSLGVVLSRGHGEYILLGNTSVEEGLHDLLHPDLALAGDWIYCITDIDPDHRKLSQLEAMIRFLTRKDPDLECDEELVREVLFDAVVTAPMEAYWTALALNMSEESEHVVDMAFLGTRAGLLRSSLFVGSEKVSDRKFLTPEDEASVFTLDRFPLWYRQASEHPAGSFVFNLRWAEGPESAGEPMVVTASTAVAVTVDKRTAIAAAAGVQMKLEFLQRKFWAATRQCSTVDGPCTQSCEDSDLDCFVIDNNGFILISKRSRETGRFLGEVDGAVLTQLLSMGVFSQVTMYDYQAMCKPSSHHHSAAQPLVSPISAFLTATRWLLQELVLFLLEWSVWGSWYDRGAEAKSVFHHSHKHKKQDPLQPCDTEYPVFVYQPAIREANGIVECGPCQKVFVVQQIPNSNLLLLVTDPTCDCSIFPPVLQEATEVKYNASVKCDRMRSQKLRRRPDSCHAFHPEENAQDCGGASDTSASPPLLLLPVCAWGLLPQLLR

SEQ ID NO: 1981 - protein, 192 aa, Homo Sapiens
  misc_feature (1)..(1): Xaa can be any naturally occurring amino acid
XELVREVLFDAVVTAPMEAYWTALALNMSEESEHVVDMAFLGTRAGLLRSSLFVGSEKVSDRKFLTPEDEASVFTLDRFPLWYRQASEHPAGSFVFNLRWAEGPESAGEPMVVTASTAVAVTVDKRTAIAAAAGVQMKLEFLQRKFWAATRQCSTVDGPCTQSCEDSDLDCFVIDNNGFILISKRSRESDYV

SEQ ID NO: 1982 - protein, 284 aa, Homo Sapiens
  misc_feature (1)..(1): Xaa can be any naturally occurring amino acid
XGVQMKLEFLQRKFWAATRQCSTVDGPCTQSCEDSDLDCFVIDNNGFILISKRSRETGRFLGEVDGAVLTQLLSMGVFSQVTMYDYQAMCKPSSHHHSAAQPLPISAFLTATRWLLQELVLFLLEWSVWGSWYDRGAEAKSVFHHSHKHKKQDPLQPCDTEYPVFVYQPAIREANGIVECGPCQKVFVVQQIPNSNLLLLVTDPTCDCSIFPPVLQEATEVKYNASVKCDRMRSQKLRRRPDSCHAFHPEENAQDCGGASDTSASPPLLLLPVCAWGLLPQLLR

SEQ ID NO: 1983 - protein, 234 aa, Homo Sapiens
MGAPAASLLLLLLLFACCWAPGGANLSQDDSQPWTSDETVVAGGTVVLKCQVKDHEDSSLQWSNPAQQTLYFGEKRALRDNRIQLVTSTPHELSISISNVALADEGEYTCSIFTMPVRTAKSLVTVLGIPQKPIITGYKSSLREKDTATLNCQSSGSKPAARLTWRKGDQELHGEPTRIQEDPNDTPTAMIRPDPPHPREGQKLLLHCEGRGNPVPQQYLWEKEGSVPPLKMTQ

SEQ ID NO: 1984 - protein, 398 aa, Homo Sapiens
MGAPAASLLLLLLLFACCWAPGGANLSQDDSQPWTSDETVVAGGTVVLKCQVKDHEDSSLQWSNPAQQTLYFGEKRALRDNRIQLVTSTPHELSISISNVALADEGEYTCSIFTMPVRTAKSLVTVLGIPQKPIITGYKSSLREKDTATLNCQSSGSKPAARLTWRKGDQELHGEPTRIQEDPNGKTFTVSSSVTFQVTREDDGASIVCSVNHESLKGADRSTSQRIEVLYTPTAMIRPDPPHPREGQKLLLHCEGRGNPVPQQYLWEKEGSVPPLKMTQESALIFPFLNKSDSGTYGCTATSNMGSYKAYYTLNVNDPSPVPSSSSTYHAIIGGIVAFIVFLLLIMLIFLGHYLIRHKGTYLTHEAKGSDDAPDADTAIINAEGGQSGGDDKKEYFI

SEQ ID NO: 1985 - protein, 432 aa, Homo Sapiens
MGAPAASLLLLLLLFACCWAPGGANLSQDGYWQEQDLELGTLAPLDEAISSTVWSSPDMLASQDSQPWTSDETVVAGGTVVLKCQVKDHEDSSLQWSNPAQQTLYFGEKRALRDNRIQLVTSTPHELSISISNVALADEGEYTCSIFTMPVRTAKSLVTVLGIPQKPIITGYKSSLREKDTATLNCQSSGSKPAARLTWRKGDQELHGEPTRIQEDPNGKTFTVSSSVTFQVTREDDGASIVCSVNHESLKGADRSTSQRIEVLYTPTAMIRPDPPHPREGQKLLLHCEGRGNPVPQQYLWEKEGSVPPLKMTQESALIFPFLNKSDSGTYGCTATSNMGSYKAYYTLNVNDPSPVPSSSSTYHAIIGGIVAFIVFLLLIMLIFLGHYLIRHKGTYLTHEAKGSDDAPDADTAIINAEGGQSGGDDKKEYFI

SEQ ID NO: 1986 - protein, 128 aa, Homo Sapiens
MGFQKFSPFLALSILVLLQAGSLHAAPFRSALESSPADPATLSEDEARLLLAALVQDYVQMKASELEQEQEREGSRIIAQKRACDTATCVTHRLAGLLSRSGGVVKNNFVPTNVGSKAFGRRRRDLQA

SEQ ID NO: 1987 - protein, 128 aa, Homo Sapiens; identical to SEQ ID NO: 1986

SEQ ID NO: 1988 - protein, 141 aa, Homo Sapiens
MGFQKFSPFLALSILVLLQAGSLHAAPFRSALESSPADPATLSEDEARLLLAALVQDYVQMKASELEQEQEREGSSLDSPRSKRCGNLSTCMLGTYTQDFNKFHTFPQTAIGVGAPGKKRDMSSDLERDHRPHNHCPEESL

SEQ ID NO: 1989 - protein, 141 aa, Homo Sapiens
MGFQKFSPFLALSILVLLQAGSLHAAPFRSALESSPADPATLSEDEARLLLAALVQDYVQMKASELEQEQEREGSSLDSPRSKRCGNLSTCMLGTYTQDFNKFHTFPQTAIGVGAPGKKRDMSSDLERDHRPHVSMPQNAN

SEQ ID NO: 1990 - protein, 141 aa, Homo Sapiens; identical to SEQ ID NO: 1989

SEQ ID NO: 1991 - protein, 127 aa, Homo Sapiens
MGFRKFSPFLALSILVLYQAGSLQAAPFRSALESSPDPATLSKEDARLLLAALVQDYVQMKASELKQEQETQGSSSAAQKRACNTATCVTHRLAGLLSRSGGMVKSNFVPTNVGSKAFGRRRRDLQA

SEQ ID NO: 1992 - protein, 127 aa, Homo Sapiens; identical to SEQ ID NO: 1991

SEQ ID NO: 1993 - protein, 138 aa, Homo Sapiens
MKKEANLQRGGMGFRKFSPFLALSILVLYQAGSLQAAPFRSALESSPDPATLSKEDARLLLAALVQDYVQMKASELKQEQETQGSSSAAQKRACNTATCVTHRLAGLLSRSGGMVKSNFVPTNVGSKAFGRRRRDLQA

SEQ ID NO: 1994 - protein, 508 aa, Homo Sapiens
MQFSGEKISGQRDLQKSKMRFTFTSRCLALFLLLNHPTPILPAFSNQTYPTIEPKPFLYVVGRKKMMDAQYKCYDRMQQLPAYQGEGPYCNRTWDGWLCWDDTPAGVLSYQFCPDYFPDFDPSEKVTKYCDEKGVWFKHPENNRTWSNYTMCNAFTPEKLKNAYVLYYLAIVGHSLSIFTLVISLGIFVFFRKLTTIFPLNWKYRKALSLGCQRVTLHKNMFLTYILNSMIIIIHLVEVVPNGELVRRDPVSCKILHFFHQYMMACNYFWMLCEGIYLHTLIVVAVFTEKQRLRWYYLLGWGFPLVPTTIHAITRAVYFNDNCWLSVETHLLYIIHGPVMAALVVNFFFLLNIVRVLVTKMRETHEAESHMYLKAVKATMILVPLLGIQFVVFPWRPSNKMLGKIYDYVMHSLIHFQGFFVATIYCFCNNEVQTTVKRQWAQFKIQWNQRWGRRPSNRSARAAAAAAEAGDIPIYICHQELRNEPANNQGEESAEIIPLNIIEQESSA

SEQ ID NO: 1995 - protein, 162 aa, Homo Sapiens
MRFTFTSRCLALFLLLNHPTPILPAFSNQTYPTIEPKPFLYVVGRKKMMDAQYKCYDRMQQLPAYQGEGPYCNRTWDGWLCWDDTPAGVLSYQFCPDYFPDFDPSEKVTKYCDEKGVWFKHPENNRTWSNYTMCNAFTPEKLKNAYVLYYLAIVGHSCQFSP

SEQ ID NO: 1996 - protein, 290 aa, Homo Sapiens
MRFTFTSRCLALFLLLNHPTPILPAFSNQTYPTIEPKPFLYVVGRKKMMDAQYKCYDRMQQLPAYQGEGPYCNRTWDGWLCWDDTPAGVLSYQFCPDYFPDFDPSEKVTKYCDEKGVWFKHPENNRTWSNYTMCNAFTPEKLKNAYVLYYLAIVGHSLSIFTLVISLGIFVFFRKLTTIFPLNWKYRKALSLGCQRVTLHKNMFLTYILNSMIIIIHLVEVVPNGELVRRDPVSCKILHFFHQYMMACNYFWMLCEGIYLHTLIVVAVFTEKQRLRWYYLLGWAPAFHRD

SEQ ID NO: 1997 - protein, 490 aa, Homo Sapiens
MRFTFTSRCLALFLLLNHPTPILPAFSNQTYPTIEPKPFLYVVGRKKMMDAQYKCYDRMQQLPAYQGEGPYCNRTWDGWLCWDDTPAGVLSYQFCPDYFPDFDPSEKVTKYCDEKGVWFKHPENNRTWSNYTMCNAFTPEKLKNAYVLYYLAIVGHSLSIFTLVISLGIFVFFRKLTTIFPLNWKYRKALSLGCQRVTLHKNMFLTYILNSMIIIIHLVEVVPNGELVRRDPVSCKILHFFHQYMMACNYFWMLCEGIYLHTLIVVAVFTEKQRLRWYYLLGWGFPLVPTTIHAITRAVYFNDNCWLSVETHLLYIIHGPVMAALVVNFFFLLNIVRVLVTKMRETHEAESHMYLKAVKATMILVPLLGIQFVVFPWRPSNKMLGKIYDYVMHSLIHFQGFFVATIYCFCNNEVQTTVKRQWAQFKIQWNQRWGRRPSNRSARAAAAAAEAGDIPIYICHQELRNEPANNQGEESAEIIPLNIIEQESSA

SEQ ID NO: 1998 - protein, 474 aa, Homo Sapiens
MRFTFTSRCLALFLLLNHPTPILPAFSNQTYPTIEPKPFLYVVGRKKMMDAQYKCYDRMQQLPAYQGEGPYCNRTWDGWLCWDDTPAGVLSYQFCPDYFPDFDPSEKVTKYCDEKGVWFKHPENNRTWSNYTMCNAFTPEKLKNAYVLYYLAIVGHSLSIFTLVISLGIFVFFRSLGCQRVTLHKNMFLTYILNSMIIIIHLVEVVPNGELVRRDPVSCKILHFFHQYMMACNYFWMLCEGIYLHTLIVVAVFTEKQRLRWYYLLGWGFPLVPTTIHAITRAVYFNDNCWLSVETHLLYIIHGPVMAALVVNFFFLLNIVRVLVTKMRETHEAESHMYLKAVKATMILVPLLGIQFVVFPWRPSNKMLGKIYDYVMHSLIHFQGFFVATIYCFCNNEVQTTVKRQWAQFKIQWNQRWGRRPSNRSARAAAAAAEAGDIPIYICHQELRNEPANNQGEESAEIIPLNIIEQESSA

SEQ ID NO: 1999 - protein, 474 aa, Homo Sapiens; identical to SEQ ID NO: 1998

SEQ ID NO: 2000 - protein, 274 aa, Homo Sapiens
MRFTFTSRCLALFLLLNHPTPILPAFSNQTYPTIEPKPFLYVVGRKKMMDAQYKCYDRMQQLPAYQGEGPYCNRTWDGWLCWDDTPAGVLSYQFCPDYFPDFDPSEKVTKYCDEKGVWFKHPENNRTWSNYTMCNAFTPEKLKNAYVLYYLAIVGHSLSIFTLVISLGIFVFFRSLGCQRVTLHKNMFLTYILNSMIIIIHLVEVVPNGELVRRDPVSCKILHFFHQYMMACNYFWMLCEGIYLHTLIVVAVFTEKQRLRWYYLLGWAPAFHRD

SEQ ID NO: 2001 - protein, 37 aa, Homo Sapiens
MEKKCTLYFLVLLPFFMILVTAELEESPEDSIQLGVT

SEQ ID NO: 2002 - protein, 78 aa, Homo Sapiens
MEKKCTLYFLVLLPFFMILVTAELEESPEDSIQLGVTRNKIMTAQYECYQKIMQDPIQQAEGVYCNRTWDGWLCWNDV

SEQ ID NO: 2003 - protein, 461 aa, Homo Sapiens [sequence omitted]

SEQ ID NO: 2004 - protein, 461 aa, Homo Sapiens [sequence omitted]

SEQ ID NO: 2005 - protein, 461 aa, Homo Sapiens [sequence omitted]

SEQ ID NO: 2006 - protein, 170 aa, Homo Sapiens
MAPRSAKETFRINPNVAANLSAPSDVILVRDEIALLHRYQSQMLGWILITLATIAALVSCCVAKCCSPLTSLQHCYWTSHLQNERELFEQAAEQHSRLLMMHRIKKLFGFIPGSEDVKHIRIPSCQDWKDISVPTLLCMGDDLQGHYSFLGNRVDEDNEEDRSRGIELKP

SEQ ID NO: 2007 - protein, 314 aa, Homo Sapiens
MCPTLNNIVSSLQRNGIFINSLIAALTIGGQQLFSSSTFSCPCQVGKNFYYGSAFLVIPALILLVAGFALRSQMWTITGEYCCSCAPPYRRISPLECKLACLRFFSITGRAVIAPLTWLAVTLLTGTYYECAASEFASVDHYPMFDNVSASKREEILAGFPCCRSAPSDVILVRDEIALLHRYQSQMLGWILITLATIAALVSCCVAKCCSPLTSLQHCYWTSHLQNERELFEQAAEQHSRLLMMHRIKKLFGFIPGSEDVKHIRIPSCQDWKDISVPTLLCMGDDLQGHYSFLGNRVDEDNEEDRSRGIELKP

SEQ ID NO: 2008 - protein, 171 aa, Homo Sapiens
MFDNVSASKREEILAGFPCCRSAPSDVILVRDEIALLHRYQSQMLGWILITLATIAALVSCCVAKCCSPLTSLQHCYWTSHLQNERELFEQAAEQHSRLLMMHRIKKLFGFIPGSEDVKHIRIPSCQDWKDISVPTLLCMGDDLQGHYSFLGNRVDEDNEEDRSRGIELKP

SEQ ID NO: 2009 - protein, 123 aa, Homo Sapiens
MLGWILITLATIAALVSCCVAKCCSPLTSLQHCYWTSHLQNERELFEQAAEQHSRLLMMHRIKKLFGFIPGSEDVKHIRIPSCQDWKDISVPTLLCMGDDLQGHYSFLGNRVDEDNEEDRSRG

SEQ ID NO: 2010 - protein, 128 aa, Homo Sapiens
MLGWILITLATIAALVSCCVAKCCSPLTSLQHCYWTSHLQNERELFEQAAEQHSRLLMMHRIKKLFGFIPGSEDVKHIRIPSCQDWKDISVPTLLCMGDDLQGHYSFLGNRVDEDNEEDRSRGIELKP

SEQ ID NO: 2011 - protein, 417 aa, Homo Sapiens
MLLSVPLLLGLLGLAVAEPAVYFKEQFLDGDGWTSRWIESKHKSDFGKFVLSSGKFYGDEEKDKGLQTSQDARFYALSASFEPFSNKGQTLVVQFTVKHEQNIDCGGGYVKLFPNSLDQTDMHGDSEYNIMFGPDICGPGTKKVHVIFNYKGKNVLINKDIRCKDDEFTHLYTLIVRPDNTYEVKIDNSQVESGSLEDDWDFLPPKKIKDPDASKPEDWDERAKIDDPTDSKPEDWDKPEHIPDPDAKKPEDWDEEMDGEWEPPVIQNPEYKGEWKPRQIDNPDYKGTWIHPEIDNPEYSPDPSIYAYDNFGVLGLDLWQVKSGTIFDNFLITNDEAYAEEFGNETWGVTKAAEKQMKDKQDEEQRLKEEEEDKKRKEEEEAEDKEDDEDKDEDEEDEEDKEEDEEEDVPGQAKDEL

SEQ ID NO: 2012 - protein, 247 aa, Homo Sapiens
MLLSVPLLLGLLGLAVAEPAVYFKEQFLDGDGWTSRWIESKHKSDFGKFVLSSGKFYGDEEKDKGPDICGPGTKKVHVIFNYKGKNVLINKDIRCKDDEFTHLYTLIVRPDNTYEVKIDNSQVESGSLEDDWDFLPPKKIKDPDASKPEDWDERAKIDDPTDSKPEDWDKPEHIPDPDAKKPEDWDEEMDGEWEPPVIQNPEYKGEWKPRQIDNPDYKGTWIHPEIDNPEYSPDPSIYAYDNFGVLG

SEQ ID NO: 2013 - protein, 163 aa, Homo Sapiens
  misc_feature (1)..(1): Xaa can be any naturally occurring amino acid
XEDWDERAKIDDPTDSKPEDWDKPEHIPDPDAKKPEDWDEEMDGEWEPPVIQNPEYKGEWKPRQIDNPDYKGTWIHPEIDNPEYSPDPSIYAYDNFGVLGLDLWQVKSGTIFDNFLITNDEAYAEEFGNETWGVTKAAEKQMKDKQDEEQRPERSCRRAGRAK

SEQ ID NO: 2014 - protein, 13 aa, Homo Sapiens
  misc_feature (1)..(1): Xaa can be any naturally occurring amino acid
XEEDVPGQAKDEL

SEQ ID NO: 2015 - protein, 384 aa, Homo Sapiens
MARALVQLWAICMLRVALATVYFQEEFLDGEHWRNRWLQSTNDSRFGHFRLSSGKFYGHKEKDKGLQTTQNGRFYAISARFKPFSNKGKTLVIQYTVKHEQKMDCGGGYIKVFPADIDQKNLNGKSQYYIMFGPDICGFDIKKVHVILHFKNKYHENKKLIRCKVDGFTHLYTLILRPDLSYDVKIDGQSIESGSIEYDWNLTSLKKETSPAESKDWEQTKDNKAQDWEKHFLDASTSKQSDWNGDLDGDWPAPMLQKPPYQDGLKPEGIHKDVWLHRKMKNTDYLTQYDLSEFENIGAIGLELWQVRSGTIFDNFLITDDEEYADNFGKATWGETKGPEREMDAIQAKEEMKKAREEEEEELLSGKINRHEHYFNQFHRRNEL

SEQ ID NO: 2016 - protein, 142 aa, Homo Sapiens
  misc_feature (1)..(1): Xaa can be any naturally occurring amino acid
XLVQLWAICMLRVALATVYFQEEFLDGEHWRNRWLQSTNDSRFGHFRLSSGKFYGHKEKDKGPDICGFDIKKVHVILHFKNKYHENKKLIRCKVDGFTHLYTLILRPDLSYDVKIDGQSIESGSIEYDWNLTSLKKETSPAE

SEQ ID NO: 2017 - protein, 315 aa, Homo Sapiens
MDLRQFLMCLSLCTAFALSKPTEKKDRVHHEPQLSDKVHNDAQSFDYDHDAFLGAEEAKTFDQLTPEESKERLGKIVSKIDGDKDGFVTVDELKDWIKFAQKRWIYEDVERQWKGHDLNEDGLVSWEEYKNATYGYVLDDPDPDDGFNYKQMMVRDERRFKMADKDGDLIATKEEFTAFLHPEEYDYMKDIVVQETMEDIDKNADGFIDLEEYIGDMYSHDGNTDEPEWVKTEREQFVEFRDKNRDGKMDKEETKDWILPSDYDHAEAEARHLVYESDQNKDGKLTKEEIVDKYDLFVGSQATDFGEALVRHDEF

SEQ ID NO: 2018 - protein, 224 aa, Homo Sapiens
MDLRQFLMCLSLCTAFALSKPTEKKDRVHHEPQLSDKVHNDAQSFDYDHDAFLGAEEAKTFDQLTPEESKERLGKIVSKIDGDKDGFVTVDELKDWIKFAQKRWIYEDVERQWKGHDLNEDGLVSWEEYKNATYGYVLDDPDPDDGFNYKQMMVRDERRFKMADKDGDLIATKEEFTAFLHPEEYDYMKDIVVQETMEDIDKNADGFIDLEEYIGWQAYQGGDR

SEQ ID NO: 2019 - protein, 315 aa, Homo Sapiens
MDLRQFLMCLSLCTAFALSKPTEKKDRVHHEPQLSDKVHNDAQSFDYDHDAFLGAEEAKTFDQLTPEESKERLGMIVDKIDADKDGFVTEGELKSWIKHAQKKYIYDNVENQWQEFDMNQDGLISWDEYRNVTYGTYLDDPDPDDGFNYKQMMVRDERRFKMADKDGDLIATKEEFTAFLHPEEYDYMKDIVVQETMEDIDKNADGFIDLEEYIGDMYSHDGNTDEPEWVKTEREQFVEFRDKNRDGKMDKEETKDWILPSDYDHAEAEARHLVYESDQNKDGKLTKEEIVDKYDLFVGSQATDFGEALVRHDEF

SEQ ID NO: 2020 - protein, 323 aa, Homo Sapiens
MKETDLIIMDLRQFLMCLSLCTAFALSKPTEKKDRVHHEPQLSDKVHNDAQSFDYDHDAFLGAEEAKTFDQLTPEESKERLGKIVSKIDGDKDGFVTVDELKDWIKFAQKRWIYEDVERQWKGHDLNEDGLVSWEEYKNATYGYVLDDPDPDDGFNYKQMMVRDERRFKMADKDGDLIATKEEFTAFLHPEEYDYMKDIVVQETMEDIDKNADGFIDLEEYIGDMYSHDGNTDEPEWVKTEREQFVEFRDKNRDGKMDKEETKDWILPSDYDHAEAEARHLVYESDQNKDGKLTKEEIVDKYDLFVGSQATDFGEALVRHDEF

SEQ ID NO: 2021 - protein, 323 aa, Homo Sapiens
MKETDLIIMDLRQFLMCLSLCTAFALSKPTEKKDRVHHEPQLSDKVHNDAQSFDYDHDAFLGAEEAKTFDQLTPEESKERLGMIVDKIDADKDGFVTEGELKSWIKHAQKKYIYDNVENQWQEFDMNQDGLISWDEYRNVTYGTYLDDPDPDDGFNYKQMMVRDERRFKMADKDGDLIATKEEFTAFLHPEEYDYMKDIVVQETMEDIDKNADGFIDLEEYIGDMYSHDGNTDEPEWVKTEREQFVEFRDKNRDGKMDKEETKDWILPSDYDHAEAEARHLVYESDQNKDGKLTKEEIVDKYDLFVGSQATDFGEALVRHDEF

SEQ ID NO: 2022 - protein, 147 aa, Homo Sapiens
  misc_feature (1)..(1): Xaa can be any naturally occurring amino acid
XIATKEEFTAFLHPEEYDYMKDIVVQETMEDIDKNADGFIDLEEYIGDMYSHDGNTDEPEWVKTEREQFVEFRDKNRDGKMDKEETKDWILPSDYDHAEAEARHLVYESDQNKDGKLTKEEIVDKYDLFVGSQATDFGEALVRHDEF

SEQ ID NO: 2023 - protein, 194 aa, Homo Sapiens
ILLVGYPPFWDEDQHRLYQQIKAGAYDFPSPEWDTVTPEAKDLINKMLTINPAKRITASEALKHPWICQRSTVASMMHRQETVDCLKKFNARRKLKGAILTTMLATRNFSAKSLLKKPDGVKSTESSNTTIEDEDVKARKQEIIKVTEQLIEAINNGDFEAYTKICDPGLTAFEPEALGNLVEGMDFHRFYFEN

SEQ ID NO: 2024 - protein, 512 aa, Homo Sapiens
MASTTTCTRFTDEYQLFEELGKGAFSVVRRCMKIPTGQEYAAKIINTKKLSARDHQKLEREARICRLLKHPNIVRLHDSISEEGFHYLVFDLVTGGELFEDIVAREYYSEADASHCIQQILEAVLHCHQMGVVHRDLKPENLLLASKSKGAAVKLADFGLAIEVQGDQQAWFGFAGTPGYLSPEVLRKDPYGKPVDMWACGVILYILLVGYPPFWDEDQHRLYQQIKAGAYDFPSPEWDTVTPEAKDLINKMLTINPAKRITASEALKHPWICQRSTVASMMHRQETVDCLKKFNARRKLKGAILTTMLATRNFSAAKSLLKKPDGVKINNKANVVTSPKENIPTPALEPQTTVIHNPDGNKESTESSNTTIEDEDVKARKQEIIKVTEQLIEAINNGDFEAYTKICDPGLTAFEPEALGNLVEGMDFHRFYFENALSKSNKPIHTIILNPHVHLVGDDAACIAYIRLTQYMDGSGMPKTMQSEETRVWHRRDGKWQNVHFHRSGSPTVPIK

SEQ ID NO: 2025 - protein, 533 aa, Homo Sapiens
MASTTTCTRFTDEYQLFEELGKGAFSVVRRCMKIPTGQEYAAKIINTKKLSARDHQKLEREARICRLLKHPNIVRLHDSISEEGFHYLVFDLVTGGELFEDIVAREYYSEADASHCIQQILEAVLHCHQMGVVHRDLKPENLLLASKSKGAAVKLADFGLAIEVQGDQQAWFGFAGTPGYLSPEVLRKDPYGKPVDMWACGVILYILLVGYPPFWDEDQHRLYQQIKAGAYDFPSPEWDTVTPEAKDLINKMLTINPAKRITASEALKHPWICQRSTVASMMHRQETVDCLKKFNARRKLKGAILTTMLATRNFSAAKSLLKKPDGVKINNKANVVTSPKENIPTPALEPQTTVIHNPDGNKESTESSNTTIEDEDVKARKQEIIKVTEQLIEAINNGDFEAYTKICDPGLTAFEPEALGNLVEGMDFHRFYFENALSKSNKPIHTIILNPHVHLVGDDAACIAYIRLTQYMDGSGMPKTMQSEETRVWHRRDGKWQNVHFHRSGSPTVPIKPPCIPNGKENFSGGTSLWQNI

SEQ ID NO: 2026 - protein, 478 aa, Homo Sapiens
MASTTTCTRFTDEYQLFEELGKGAFSVVRRCMKIPTGQEYAAKIINTKKLSARDHQKLEREARICRLLKHPNIVRLHDSISEEGFHYLVFDLVTGGELFEDIVAREYYSEADASHCIQQILESVNHCHLNGIVHRDLKPENLLLASKSKGAAVKLADFGLAIEVQGDQQAWFGFAGTPGYLSPEVLRKDPYGKPVDMWACGVILYILLVGYPPFWDEDQHRLYQQIKAGAYDFPSPEWDTVTPEAKDLINKMLTINPAKRITASEALKHPWICQRSTVASMMHRQETVDCLKKFNARRKLKGAILTTMLATRNFSAAKSLLKKPDGVKESTESSNTTIEDEDVKARKQEIIKVTEQLIEAINNGDFEAYTKICDPGLTAFEPEALGNLVEGMDFHRFYFENALSKSNKPIHTIILNPHVHLVGDDAACIAYIRLTQYMDGSGMPKTMQSEETRVWHRRDGKWQNVHFHRSGSPTVPIK

SEQ ID NO: 2027 - protein, 499 aa, Homo Sapiens
MASTTTCTRFTDEYQLFEELGKGAFSVVRRCMKIPTGQEYAAKIINTKKLSARDHQKLEREARICRLLKHPNIVRLHDSISEEGFHYLVFDLVTGGELFEDIVAREYYSEADASHCIQQILESVNHCHLNGIVHRDLKPENLLLASKSKGAAVKLADFGLAIEVQGDQQAWFGFAGTPGYLSPEVLRKDPYGKPVDMWACGVILYILLVGYPPFWDEDQHRLYQQIKAGAYDFPSPEWDTVTPEAKDLINKMLTINPAKRITASEALKHPWICQRSTVASMMHRQETVDCLKKFNARRKLKGAILTTMLATRNFSAAKSLLKKPDGVKESTESSNTTIEDEDVKARKQEIIKVTEQLIEAINNGDFEAYTKICDPGLTAFEPEALGNLVEGMDFHRFYFENALSKSNKPIHTIILNPHVHLVGDDAACIAYIRLTQYMDGSGMPKTMQSEETRVWHRRDGKWQNVHFHRSGSPTVPIKPPCIPNGKENFSGGTSLWQNI

SEQ ID NO: 2028 - protein, 492 aa, Homo Sapiens
MASTTTCTRFTDEYQLFEELGKGAFSVVRRCMKIPTGQEYAAKIINTKKLSARDHQKLEREARICRLLKHPNIVRLHDSISEEGFHYLVFDLVTGGELFEDIVAREYYSEADASHCIQQILESVNHCHLNGIVHRDLKPENLLLASKSKGAAVKLADFGLAIEVQGDQQAWFGFAGTPGYLSPEVLRKDPYGKPVDMWACGVILYILLVGYPPFWDEDQHRLYQQIKAGAYDFPSPEWDTVTPEAKDLINKMLTINPAKRITASEALKHPWICQRSTVASMMHRQETVDCLKKFNARRKLKGAILTTMLATRNFSAAKSLLKKPDGVKEPQTTVIHNPDGNKESTESSNTTIEDEDVKARKQEIIKVTEQLIEAINNGDFEAYTKICDPGLTAFEPEALGNLVEGMDFHRFYFENALSKSNKPIHTIILNPHVHLVGDDAACIAYIRLTQYMDGSGMPKTMQSEETRVWHRRDGKWQNVHFHRSGSPTVPIK

SEQ ID NO: 2029 - protein, 478 aa, Homo Sapiens
MASTTTCTRFTDEYQLFEELGKGAFSVVRRCMKIPTGQEYAAKIINTKKLSARDHQKLEREARICRLLKHPNIVRLHDSISEEGFHYLVFDLVTGGELFEDIVAREYYSEADASHCIQQILESVNHCHLNGIVHRDLKPENLLLASKSKGAAVKLADFGLAIEVQGDQQAWFGFAGTPGYLSPEVLRKDPYGKPVDMWACGVILYILLVGYPPFWDEDQHRLYQQIKAGAYDFPSPEWDTVTPEAKDLINKMLTINPAKRITASEALKHPWICQRSTVASMMHRQETVDCLKKFNARRKLKGAILTTMLATRNFSAAKSLLKKPDGVKESTESSNTTIEDEDVKARKQEIIKVTEQLIEAINNGDFEAYTKICDPGLTAFEPEALGNLVEGMDFHRFYFENALSKSNKPIHTIILNPHVHLVGDDAACIAYIRLTQYMDGSGMPKTMQSEETRVWHRRDGKWQNVHFHRSGSPTVPIN

SEQ ID NO: 2030 - protein, 478 aa, Homo Sapiens; identical to SEQ ID NO: 2026

SEQ ID NO: 2031 - protein, 510 aa, Homo Sapiens
MASTTTCTRFTDEYQLFEELGKGAFSVVRRCMKIPTGQEYAAKIINTKKLSARDHQKLEREARICRLLKHPNIVRLHDSISEEGFHYLVFDLVTGGELFEDIVAREYYSEADASHCIQQILESVNHCHLNGIVHRDLKPENLLLASKSKGAAVKLADFGLAIEVQGDQQAWFGFAGTPGYLSPEVLRKDPYGKPVDMWACGVILYILLVGYPPFWDEDQHRLYQQIKAGAYDFPSPEWDTVTPEAKDLINKMLTINPAKRITASEALKHPWICQRSTVASMMHRQETVDCLKKFNARRKLKGAILTTMLATRNFSAAKSLLKKPDGVKKRKSSSSVQMMESTESSNTTIEDEDVKARKQEIIKVTEQLIEAINNGDFEAYTKICDPGLTAFEPEALGNLVEGMDFHRFYFENALSKSNKPIHTIILNPHVHLVGDDAACIAYIRLTQYMDGSGMPKTMQSEETRVWHRRDGKWQNVHFHRSGSPTVPIKPPCIPNGKENFSGGTSLWQNI

SEQ ID NO: 2032 - protein, 489 aa, Homo Sapiens
MASTTTCTRFTDEYQLFEELGKGAFSVVRRCMKIPTGQEYAAKIINTKKLSARDHQKLEREARICRLLKHPNIVRLHDSISEEGFHYLVFDLVTGGELFEDIVAREYYSEADASHCIQQILESVNHCHLNGIVHRDLKPENLLLASKSKGAAVKLADFGLAIEVQGDQQAWFGFAGTPGYLSPEVLRKDPYGKPVDMWACGVILYILLVGYPPFWDEDQHRLYQQIKAGAYDFPSPEWDTVTPEAKDLINKMLTINPAKRITASEALKHPWICQRSTVASMMHRQETVDCLKKFNARRKLKGAILTTMLATRNFSAAKSLLKKPDGVKKRKSSSSVQMMESTESSNTTIEDEDVKARKQEIIKVTEQLIEAINNGDFEAYTKICDPGLTAFEPEALGNLVEGMDFHRFYFENALSKSNKPIHTIILNPHVHLVGDDAACIAYIRLTQYMDGSGMPKTMQSEETRVWHRRDGKWQNVHFHRSGSPTVPIK

SEQ ID NO: 2033 - protein, 498 aa, Homo Sapiens
MASTTTCTRFTDEYQLFEELGKGAFSVVRRCMKIPTGQEYAAKIINTKKLSARDHQKLEREARICRLLKHPNIVRLHDSISEEGFHYLVFDLVTGGELFEDIVAREYYSEADASHCIQQILESVNHCHLNGIVHRDLKPENLLLASKSKGAAVKLADFGLAIEVQGDQQAWFGFAGTPGYLSPEVLRKDPYGKPVDMWACGVILYILLVGYPPFWDEDQHRLYQQIKAGAYDFPSPEWDTVTPEAKDLINKMLTINPAKRITASEALKHPWICQRSTVASMMHRQETVDCLKKFNARRKLKGAILTTMLATRNFSAKSLLKKPDGVKESTESSNTTIEDEDVKARKQEIIKVTEQLIEAINNGDFEAYTKICDPGLTAFEPEALGNLVEGMDFHRFYFENALSKSNKPIHTIILNPHVHLVGDDAACIAYIRLTQYMDGSGMPKTMQSEETRVWHRRDGKWQNVHFHRSGSPTVPIKPPCIPNGKENFSGGTSLWQNI

SEQ ID NO: 2034 - protein, 182 aa, Homo Sapiens
  misc_feature (1)..(1): Xaa can be any naturally occurring amino acid
XRKLKGAILTTMLATRNFSAAKSLLKKPDGVKESTESSNTTIEDEDVKARKQEIIKVTEQLIEAINNGDFEAYTKICDPGLTAFEPEALGNLVEGMDFHRFYFENALSKSNKPIHTIILNPHVHLVGDDAACIAYIRLTQYMDGSGMPKTMQSEETRVWHRRDGKWQNVHFHRSGSPTVPIK

SEQ ID NO: 2035 - protein, 173 aa, Homo Sapiens
MGTMKTQRDGHSLGRWSLVLLLLGLVMPLAIIAQVLSYKEAVLRAIDGINQRSSDANLYRLLDLDPRPTMDGDPDTPKPVSFTVKETVCPRTTQQSPEDCDFKKDGLVKRCMGTVTLNQARGSFDISCDKDNKRFALLGDFFRKSKEKIGKEFKRIVQRIKDFLRNLVPRTES

SEQ ID NO: 2036 - protein, 32 aa, Homo Sapiens
MEGKWLLCMLLVLGTAIVEAHDGHDDDVIDIE

SEQ ID NO: 2037 - protein, 61 aa, Homo Sapiens
MEGKWLLCMLLVLGTAIVEAHDGHDDDVIDIEDDLDDVIEEVEDSKPDTTAPPSSPKESGR

SEQ ID NO: 2038 - protein, 79 aa, Homo Sapiens
MEGKWLLCMLLVLGTAIVEAHDGHDDDVIDIEDDLDDVIEEVEDSKPDTTAPPSSPKVTYKAPVPTGEVYFADSFDRGT

SEQ ID NO: 2039 - protein, 96 aa, Homo Sapiens
MEGKWLLCMLLVLGTAIVEAHDGHDDDVIDIEDDLDDVIEEVEDSKPDTTAPPSSPKVTYKAPVPTGEVYFADSFDRGTLSGKVGGRGNEGVKASR

SEQ ID NO: 2040 - protein, 107 aa, Homo Sapiens
MEGKWLLCMLLVLGTAIVEAHDGHDDDVIDIEDDLDDVIEEVEDSKPDTTAPPSSPKVTYKAPVPTGEVYFADSFDRGTLSGWILSKAKKDDTDDEIAKYDGKWEVE

SEQ ID NO: 2041 - protein, 134 aa, Homo Sapiens
MEGKWLLCMLLVLGTAIVEAHDGHDDDVIDIEDDLDDVIEEVEDSKPDTTAPPSSPKVTYKAPVPTGEVYFADSFDRGTLSGWILSKAKKDDTDDEIAKYDGKWEVEEMKESKLPGDKGLVLMSRAKHHAISAK

SEQ ID NO: 2042 - protein, 144 aa, Homo Sapiens
MEGKWLLCMLLVLGTAIVEAHDGHDDDVIDIEDDLDDVIEEVEDSKPDTTAPPSSPKVTYKAPVPTGEVYFADSFDRGTLSGWILSKAKKDDTDDEIAKYDGKWEVEEMKESKLPGDKGLVLMSRAKHHAISAKLNKPFLFDTK

SEQ ID NO: 2043 - protein, 168 aa, Homo Sapiens
MEGKWLLCMLLVLGTAIVEAHDGHDDDVIDIEDDLDDVIEEVEDSKPDTTAPPSSPKVTYKAPVPTGEVYFADSFDRGTLSGWILSKAKKDDTDDEIAKYDGKWEVEEMKESKLPGDKGLVLMSRAKHHAISAKLNKPFLFDTKPLIVQYEVNFQNGIECGGAYVKLL

SEQ ID NO: 2044 - protein, 592 aa, Homo Sapiens
MEGKWLLCMLLVLGTAIVEAHDGHDDDVIDIEDDLDDVIEEVEDSKPDTTAPPSSPKVTYKAPVPTGEVYFADSFDRGTLSGWILSKAKKDDTDDEIAKYDGKWEVEEMKESKLPGDKGLVLMSRAKHHAISAKLNKPFLFDTKPLIVQYEVNFQNGIECGGAYVKLLSKTPELNLDQFHDKTPYTIMFGPDKCGEDYKLHFIFRHKNPKTGIYEEKHAKRPDADLKTYFTDKKTHLYTLILNPDNSFEILVDQSVVNSGNLLNDMTPPVNPSREIEDPEDRKPEDWDERPKIPDPEAVKPDDWDEDAPAKIPDEEATKPEGWLDDEPEYVPDPDAEKPEDWDEDMDGEWEAPQIANPRCESAPGCGVWQRPVIDNPNYKGKWKPPMIDNPSYQGIWKPRKIPNPDFFEDLEPFRMTPFSAIGLELWSMTSDIFFDNFIICADRRIVDDWANDGWGLKKAADGAAEPGVVGQMIEAAEERPWLWVVYILTVALPVFLVILFCCSGKKQTSGMEYKKTDAPQPDVKEEEEEKEEEKDKGDEEEEGEEKLEEKQKSDAEEDGGTVSQEEEDRKPKAEEDEILNRSPRNRKPRRE

SEQ ID NO: 2045 - protein, 592 aa, Homo Sapiens; identical to SEQ ID NO: 2044

SEQ ID NO: 2046 - protein, 592 aa, Homo Sapiens; identical to SEQ ID NO: 2044

SEQ ID NO: 2047 - protein, 308 aa, Homo Sapiens
MEGKWLLCMLLVLGTAIVEAHDGHDDDVIDIEDDLDDVIEEVEEMKESKLPGDKGLVLMSRAKHHAISAKLNKPFLFDTKPLIVQYEVNFQNGIECGGAYVKLLSKTPELNLDQFHDKTPYTIMFGPDKCGEDYKLHFIFRHKNPKTGIYEEKHAKRPDADLKTYFTDKKTHLYTLILNPDNSFEILVDQSVVNSGNLLNDMTPPVNPSREIEDPEDRKPEDWDERPKIPDPEAVKPDDWDEDAPAKIPDEEATKPEGWLDDEPEYVPDPDAEKPEDWDEDMDGEWEAPQIANPRCESAPGCGVWQRP

SEQ ID NO: 2048 - protein, 131 aa, Homo Sapiens
MKESKLPGDKGLVLMSRAKHHAISAKLNKPFLFDTKPLIVQYEVNFQNGIECGGAYVKLLSKTPELNLDQFHDKTPYTIMFGPDKCGEDYKLHFIFRHKNPKTGIYEEKHAKRPDADLKTYFTDKKTHLYT

SEQ ID NO: 2049 - protein, 190 aa, Homo Sapiens
  misc_feature (1)..(1): Xaa can be any naturally occurring amino acid
XGLVLMSRAKHHAISAKLNKPFLFDTKPLIVQYEVNFQNGIECGGAYVKLLSKTPELNLDQFHDKTPYTIMFGPDKCGEDYKLHFIFRHKNPKTGIYEEKHAKRPDADLKTYFTDKKTHLYTLKSRGTNHLCFVHKEMGVSFPKTPGARHCSYPKASVLNPDNSFEILVDQSVVNSGNLLNDMTPPVNPS

SEQ ID NO: 2050 - protein, 170 aa, Homo Sapiens
  misc_feature (1)..(1): Xaa can be any naturally occurring amino acid
XLYCGAGQGVRAGRGTGTPAVPGRLEVTYKAPVPTGEVYFADSFDRGTLSGWILSKAKKDDTDDEIAKYDGKWEVEEMKESKLPGDKGLVLMSRAKHHAISAKLNKPFLFDTKPLIVQYEVNFQNGIECGGAYVKLLSKTPELNLDQFHDKTPYTIMFGPDKCGEDYKLH

SEQ ID NO: 2051 - protein, 111 aa, Homo Sapiens
AEQQALRLEVRAGPDSAGIALYSHEDVCVFKCSVSRETECSRVGKQSFIITLGCNSVLIQFATPNDFCSFYNILKTCRGHTLERSVFSERTEESSAVQYFQMRKLRLREVK

SEQ ID NO: 2052 - protein, 92 aa, Homo Sapiens
ALYSHEDVCVFKCSVSRETECSRVGKQSFIITLGCNSVLIQFATPNDFCSFYNILKTCRGHTLERSVFSERTEESSAVQYFQMRKLRLREVK

SEQ ID NO: 2053 - protein, 176 aa, Homo Sapiens
LAFWFDVAFIGSIQSYDISIVAQVDQTGSKSSNLLDLKNPFFRYTGTTPSPPPGSHYTSPSENMWNTGSTYNLSSGMAVAGMPTAYDLSSVIASGSSVGHNNLIPLANTGIVNHTHSRMGSIMSTGIVQGSSGAQGSGGGSTSAHYAVNSQFTMGGPAISMASPMSIPTNTMHYGS

SEQ ID NO: 2054 - protein, 608 aa, Homo Sapiens
MAAAAAAVGPGAGGAGSAVPGGAGPCATVSVFPGARLLTIGDANGEIQRHAEQQALRLEVRAGPDSAGIALYSHEDVCVFKCSVSRETECSRVGKQSFIITLGCNSVLIQFATPNDFCSFYNILKTCRGHTLERSVFSERTEESSAVQYFQFYGYLSQQQNMMQDYVRTGTYQRAILQNHTDFKDKIVLDVGCGSGILSFFAAQAGARKIYAVEASTMAQHAEVLVKSNNLTDRIVVIPGKVEEVSLPEQVDIIISEPMGYMLFNERMLESYLHAKKYLKPSGNMFPTIGDVHLAPFTDEQLYMEQFTKANFWYQPSFHGVDLSALRGAAVDEYFRQPVVDTFDIRILMAKSVKYTVNFLEAKEGDLHRIEIPFKFHMLHSGLVHGLAFWFDVAFIGSIMTVWLSTAPTEPLTHWYQVRCLFQSPLFAKAGDTLSGTCLLIANKRQSYDISIVAQVDQTGSKSSNLLDLKNPFFRYTGTTPSPPPGSHYTSPSENMWNTGSTYNLSSGMAVAGMPTAYDLSSVIASGSSVGHNNLIPLANTGIVNHTHSRMGSIMSTGIVQGSSGAQGSGGGSTSAHYAVNSQFTMGGPAISMASPMSIPTNTMHYGS

SEQ ID NO: 2055 - protein, 585 aa, Homo Sapiens
MAAAAAAVGPGAGGAGSAVPGGAGPCATVSVFPGARLLTIGDANGEIQRHAEQQALRLEVRAGPDSAGIALYSHEDVCVFKCSVSRETECSRVGKQSFIITLGCNSVLIQFATPNDFCSFYNILKTCRGHTLERSVFSERTEESSAVQYFQFYGYLSQQQNMMQDYVRTGTYQRAILQNHTDFKDKIVLDVGCGSGILSFFAAQAGARKIYAVEASTMAQHAEVLVKSNNLTDRIVVIPGKVEEVSLPEQVDIIISEPMGYMLFNERMLESYLHAKKYLKPSGNMFPTIGDVHLAPFTDEQLYMEQFTKANFWYQPSFHGVDLSALRGAAVDEYFRQPVVDTFDIRILMAKSVKYTVNFLEAKEGDLHRIEIPFKFHMLHSGLVHGLAFWFDVAFIGSIMTVWLSTAPTEPLTHWYQVRCLFQSPLFAKAGDTLSGTCLLIANKRQSYDISIVAQVDQTGSKSSNLLDLKNPFFRYTGTTPSPPPGSHYTSPSENMWNTGSTYNLSSGMAVAGMPTAYDLSSVIASGSSVGHNNLIPLGSSGAQGSGGGSTSAHYAVNSQFTMGGPAISMASPMSIPTNTMHYGS

SEQ ID NO: 2056 - protein, 161 aa, Homo Sapiens
MAAAAAAVGPGAGGAGSAVPGGAGPCATVSVFPGARLLTIGDANGEIQRHAEQQALRLEVRAGPDSAGIALYSHEDVCVFKCSVSRETECSRVGKQSFIITLGCNSVLIQFATPNDFCSFYNILKTCRGHTLERSVFSERTEESSAVQYFQMRKLRLREVK

SEQ ID NO: 2057 - protein, 120 aa, Homo Sapiens
MAAAAAAVGPGAGGAGSAVPGGAGPCATVSVFPGARLLTIGDANGEIQRHAEQQALRLEVRAGPDSAGIALYSHFCSFYNILKTCRGHTLERSVFSERTEESSAVQYFQFYGYLSQQQNM

SEQ ID NO: 2058 - protein, 343 aa, Homo Sapiens
  misc_feature (1)..(1): Xaa can be any naturally occurring amino acid
XANGEIQRHAEQQALRLEVRAGPDSAGIALYSHEDVCVFKCSVSRETECSRVGKQSFIITLGCNSVLIQFATPNDFCSFYNILKTCRGHTLERSVFSERTEESSAVQYFQFYGYLSQQQNMMQDYVRTGTYQRAILQNHTDFKDKIVLDVGCGSGILSFFAAQAGARKIYAVEASTMAQHAEVLVKSNNLTDRIVVIPGKVEEVSLPEQVDIIISEPMGYMLFNERMLESYLHAKKYLKPSGNMFPTIGDVHLAPFTDEQLYMEQFTKANFWYQPSFHGVDLSALRGAAVDEYFRQPVVDTFDIRILMAKSVKYTVNFLEAKEGDLHSACLASPAATALCLPG

SEQ ID NO: 2059 - protein, 827 aa, Homo Sapiens
MLLCLSPAWLMKVPAPGQPGEAALLVSKAVSFHPGGLTFLDDFVPPRRATYFLAGLGLGPGRGREAAELARDLTCPTGASAELARLLEDRLLTRQLLAQQGGVAVPATLAFTYKPPGLLRGGDASLGLRLVELSGKEGQETLVKEEVEAFLRSEALGDILQVAVKLSGWRWRGRQAWRLHPRAELGAVVDTVLALLEKLEEEESVLVEAVYPPAQLPCSDGPSPGPGLAVRICAVVCRTQGDRPLLSKVVCGVGRGDRPLRHHNSLPRTLEVALAQCGLGEEAQVAAVRQRVKAAAEAALAAVLALEAGLSAEQRGGRRAHTDFLGVDFALTAAGGVLTPVALELNGGLCLEACGALEGLWAAPRLGPAADEAVAAPLVETMLRRSARCLMEGKQLLVVGAGGVSKKFVWEAARDYGLQLHLVESDPNHFASQLVQTFIHFDMTEHRRDEENARLLAELVRARGLKLDGCFSYWDDCLVLTALLCQELGLPCSSPAAMRLAKQKSLTQLHLLHHHGPPWPAPSLHAVPCCPLESEADVERAVHQVPLPGVMKLEFGAGAVGVRLVEDAPQCHEHFSRITRDLQGEADHPGIGLGWGNAMLLMEFVEGTEHDVDLVLFGGRLLAAFVSDNGPTRLPGFTETAACMPTGLAPEQEAQMVQAAFRCCLGCGLLDGVFNVELKLTGAGPRLIEINPRMGGFYLRDWILELYGVDLLLAAVMVACGLRPALPTRPRARGHLVGVMCLVSQHLQALSSTASRETLQALHDRGLLRLNLLEEALVPGEYEEPYCSVACAGPSPTEARLRLLGLCQGLGIDGPSYPVAHFLSHFK

SEQ ID NO: 2060 - protein, 950 aa, Homo Sapiens
MLSLDPSGPEWDCPLGSKDLEEEGPWGGGSGLPPTGCFPGSWRQDVGLDCKGSPEGAEARAWTVYYYSLLQSCLQQAGLPETQDRGQVPRTGCPGAEVTLCVLGSPSTFLPVLLEGGVQSPGNMLLCLSPAWLMKVPAPGQPGEAALLVSKAVSFHPGGLTFLDDFVPPRRATYFLAGLGLGPGRGREAAELARDLTCPTGASAELARLLEDRLLTRQLLAQQGGVAVPATLAFTYKPPGLLRGGDASLGLRLVELSGKEGQETLVKEEVEAFLRSEALGDILQVAVKLSGWRWRGRQAWRLHPRAELGAVVDTVLALLEKLEEEESVLVEAVYPPAQLPCSDGPSPGPGLAVRICAVVCRTQGDRPLLSKVVCGVGRGDRPLRHHNSLPRTLEVALAQCGLGEEAQVAAVRQRVKAAAEAALAAVLALEAGLSAEQRGGRRAHTDFLGVDFALTAAGGVLTPVALELNGGLCLEACGALEGLWAAPRLGPAADEAVAAPLVETMLRRSARCLMEGKQLLVVGAGGVSKKFVWEAARDYGLQLHLVESDPNHFASQLVQTFIHFDMTEHRRDEENARLLAELVRARGLKLDGCFSYWDDCLVLTALLCQELGLPCSSPAAMRLAKQKSLTQLHLLHHHGPPWPAPSLHAVPCCPLESEADVERAVHQVPLPGVMKLEFGAGAVGVRLVEDAPQCHEHFSRITRDLQGEADHPGIGLGWGNAMLLMEFVEGTEHDVDLVLFGGRLLAAFVSDNGPTRLPGFTETAACMPTGLAPEQEAQMVQAAFRCCLGCGLLDGVFNVELKLTGAGPRLIEINPRMGGFYLRDWILELYGVDLLLAAVMVACGLRPALPTRPRARGHLVGVMCLVSQHLQALSSTASRETLQALHDRGLLRLNLLEEALVPGEYEEPYCSVACAGPSPTEARLRLLGLCQGLGIDGPSYPVAHFLSHFK

SEQ ID NO: 2061 - protein, 924 aa, Homo Sapiens
MLSLDPSGPEWDCPLGSKDLEEEGPWGGGSGLPPTGCFPGSWRQDVGLDCKGSPEGAEARAWTVYYYSLLQSCLQQAGLPETQDRGQVPRTGCPGAEVTLCVLGSPSTFLPVLLEGGVQSPGNMLLCLSPAWLMKVPAPGQPGEAALLVSKAVSFHPGGLTFLDDFVPPRRATYFLAGLGLGPGRGREAAELARDLTCPTGASAELARLLEDRLLTRQLLAQQGGVAVPATLAFTYKPPGLLRGGDASLGLRLVELSGKEGQETLVKEEVEAFLRSEALGDILQVAVKLSGWRWRGRQAWRLHPRAELGAVVDTVLALLEKLEEEESVLVEAVYPPAQLPCSDGPSPGPGLAVRICAVVCRTQGDRPLLSKVVCGVGRGDRPLRHHNSLPRTLEAALAAVLALEAGLSAEQRGGRRAHTDFLGVDFALTAAGGVLTPVALELNGGLCLEACGALEGLWAAPRLGPAADEAVAAPLVETMLRRSARCLMEGKQLLVVGAGGVSKKFVWEAARDYGLQLHLVESDPNHFASQLVQTFIHFDMTEHRRDEENARLLAELVRARGLKLDGCFSYWDDCLVLTALLCQELGLPCSSPAAMRLAKQKSLTQLHLLHHHGPPWPAPSLHAVPCCPLESEADVERAVHQVPLPGVMKLEFGAGAVGVRLVEDAPQCHEHFSRITRDLQGEADHPGIGLGWGNAMLLMEFVEGTEHDVDLVLFGGRLLAAFVSDNGPTRLPGFTETAACMPTGLAPEQEAQMVQAAFRCCLGCGLLDGVFNVELKLTGAGPRLIEINPRMGGFYLRDWILELYGVDLLLAAVMVACGLRPALPTRPRARGHLVGVMCLVSQHLQALSSTASRETLQALHDRGLLRLNLLEEALVPGEYEEPYCSVACAGPSPTEARLRLLGLCQGLGIDGPSYPVAHFLSHFK

SEQ ID NO: 2062 - protein, 116 aa, Homo Sapiens
MESSRVRLLPLLGAALLLMLPLLGTRAQEDAELQPRALDIYSAVDDASHEKELIEALQEVLKKLKSKRVPIYEKKYGQVPMCDAGEQCAVRKGARIGKLCDCPRGTSCNSFLLKCL

SEQ ID NO: 2063 - protein, 117 aa, Homo Sapiens
MDGIHIVAFAEEADPDGFEFLETLKAVAQDNTENPDLSIIWIDPDDFPLLVPYWEKTFDIDLSAPQIGVVNVTDADSVWMEMDDEEDLPSAEELEDWLEDVLEGEINTEDDDDDDDD

SEQ ID NO: 2064 - protein, 396 aa, Homo Sapiens
MSATDRMGPRAVPGLRLALLLLLVLGTPKSGVQGQEGLDFPEYDGVDRVINVNAKNYKNVFKKYEVLALLYHEPPEDDKASQRQFEMEELILELAAQVLEDKGVGFGLVDSEKDAAVAKKLGLTEVDSMYVFKGDEVIEYDGEFSADTIVEFLLDVLEDPVELIEGERELQAFENIEDEIKLIGYFKSKDSEHYKAFEDAAEEFHPYIPFFATFDSKVAKKLTLKLNEIDFYEAFMEEPVTIPDKPNSEEEIVNFVEEHRRSTLRKLKPESMYETWEDDMDGIHIVAFAEEADPDGFEFLETLKAVAQDNTENPDLSIIWIDPDDFPLLVPYWEKTFDIDLSAPQIGVVNVTDADSVWMEMDDEEDLPSAEELEDWLEDVLEGEINTEDDDDDDDD

SEQ ID NO: 2065 - protein, 399 aa, Homo Sapiens
MKRTHLFIVGIYFLSSCRAEEGLNFPTYDGKDRVVSLSEKNFKQVLKKYDLLCLYYHEPVSSDKVTQKQFQLKEIVLELVAQVLEHKAIGFVMVDAKKEAKLAKKLGFDEEGSLYILKGDRTIEFDGEFAADVLVEFLLDLIEDPVEIISSKLEVQAFERIEDYIKLIGFFKSEDSEYYKAFEEAAEHFQPYIKFFATFDKGVAKKLSLKMNEVDFYEPFMDEPIAIPNKPYTEEELVEFVKEHQRPTLRRLRPEEMFETWEDDLNGIHIVAFAEKSDPDGYEFLEILKQVARDNTDNPDLSILWIDPDDFPLLVAYWEKTFKIDLFRPQIGVVNVTDADSVWMEIPDDDDLPTAEELEDWIEDVLSGKINTEDDDEDDDDDDNSDEEDNDDSDDDDDE

SEQ ID NO: 2066 - protein, 1119 aa, Homo Sapiens
MCGPAMFPAGPPWPRVRVVQVLWALLAVLLASWRLWAIKDFQECTWQVVLNEFKRVGESGVSDSFFEQEPVDTVSSLFHMLVDSPIDPSEKYLGFPYYLKINYSCEEKPSEDLVRMGHLTGLKPLVLVTFQSPVNFYRWKIEQLQIQMEAAPFRSKEPCMAEEVCSMSWYTPMPIKKGSVVMRVDISSNGLGTFIPDKRFQMNINGFLKRDRDNNIQFTVGEELFNLMPQYFVGVSSRPLWHTVDQSPVLILGGIPNEKYVLMTDTSFKDFSLVELSIDSCWVGSFYCPHSGFTATIYDTIATESTLFIRQNQLVYYFTGTYTTLYERNRGSGSWIRVLASECIKKLCPVYFHSNGSEYIMALTTGKHEGYVHFGTIRDGQVSFEMLPRQWSVCEQIGASDDLELLYHIPEFIPEARGLEFLMILGTESYTSTAMAPKGIFCNPYNNLIFIWGNFLLQSSNKENFIYLADFPKELSIKYMARSFRGAVAIVTETEEIWYLLEGSYRVYQLFPSKGWQVHISLKLMQQSSLYASNETMLTLFYEDSKLYQLVYLMNNQKGQLVKRLVPVEQLLMYQQHTSHYDLERKGGYLMLSFIDFCPFSVMRLRSLPSPQRYTRQERYRARPPRVLERSGFHNENSLAIYQGLVYYLLWLHSVYDKPYADPVHDPTWRWWANNKQDQDYYFFLASNWRSAGGVSIEMDSYEKIYNLESAYELPERIFLDKGTEYSFAIFLSAQGHSFRTQSELGTAFQLHSQVDVGVVLADPGCIEASVKQEVLINRNSVLFSITLKDKKLCYDQGISGHHLMETSMTVNVVGSSGLCFQETHLGPHMQGNLMVPVFIGCPPGKRLAFDITYTLEYSRLKNKHYFDCVNVNPEMPCFLFRDIFYPFFLIQDLVTGDSGSFQGSYVLLVVGGGPTLDSLKDYSEDEIYRFNSPLDKTNSLIWTTRTTRTTKDSAFHIMSHESPGIEWLCLENAPCYDNVPQGIFAPEFFFKVLVSNRGVDTSTYCNYQLTFLLHIHGLPLSPKRALFIIMVSASVFVGLVIFYIAFCLLWPLVVKGCTMIRWKINNLIASESYYTYASISGISSMPSLRHSRMGSMFSSRMTEDRAEPKEAVERQLMT

SEQ ID NO: 2067 - protein, 661 aa, Homo Sapiens
MCGPAMFPAGPPWPRVRVVQVLWALLAVLLASWRLWAIKDFQECTWQVVLNEFKRVGESGVSDSFFEQEPVDTVSSLFHMLVDSPIDPSEKYLGFPYYLKINYSCEEKPSEDLVRMGHLTGLKPLVLVTFQSPVNFYRWKIEQLQIQMEAAPFRSKEPCMAEEVCSMSWYTPMPIKKGSVVMRVDISSNGLGTFIPDKRFQMNINGFLKRDRDNNIQFTVGEELFNLMPQYFVGVSSRPLWHTVDQSPVLILGGIPNEKYVLMTDTSFKDFSLVELSIDSCWVGSFYCPHSGFTATIYDTIATESTLFIRQNQLVYYFTGTYTTLYERNRGSGSWIRVLASECIKKLCPVYFHSNGSEYIMALTTGKHEGYVHFGTIRDGQVSFEMLPRQWSVCEQIGVTTCSIIWSEYIAGEYTLLLLVESGYGNASKRFQVVSYNTASDDLELLYHIPEFIPEARGLEFLMILGTESYTSTAMAPKGIFCNPYNNLIFIWGNFLLQSSNKENFIYLADFPKELSIKYMARSFRGAVAIVTETEEIWYLLEGSYRVYQLFPSKGWQVHISLKLMQQSSLYASNETMLTLFYEDSKLYQLVYLMNNQKGQLVKRLVPVEQLLMYQQHTSHYDLERKGGYLMLSFIDFCPFSVMRLRSLPSPQRYTRQERYR

SEQ ID NO: 2068 - protein, 1159 aa, Homo Sapiens
MCGPAMFPAGPPWPRVRVVQVLWALLAVLLASWRLWAIKDFQECTWQVVLNEFKRVGESGVSDSFFEQEPVDTVSSLFHMLVDSPIDPSEKYLGFPYYLKINYSCEEKPSEDLVRMGHLTGLKPLVLVTFQSPVNFYRWKIEQLQIQMEAAPFRSKEPCMAEEVCSMSWYTPMPIKKGSVVMRVDISSNGLGTFIPDKRFQMNINGFLKRDRDNNIQFTVGEELFNLMPQYFVGVSSRPLWHTVDQSPVLILGGIPNEKYVLMTDTSFKDFSLVELSIDSCWVGSFYCPHSGFTATIYDTIATESTLFIRQNQLVYYFTGTYTTLYERNRGSGSWIRVLASECIKKLCPVYFHSNGSEYIMALTTGKHEGYVHFGTIRDGQVSFEMLPRQWSVCEQIGVTTCSIIWSEYIAGEYTLLLLVESGYGNASKRFQVVSYNTASDDLELLYHIPEFIPEARGLEFLMILGTESYTSTAMAPKGIFCNPYNNLIFIWGNFLLQSSNKENFIYLADFPKELSIKYMARSFRGAVAIVTETEEIWYLLEGSYRVYQLFPSKGWQVHISLKLMQQSSLYASNETMLTLFYEDSKLYQLVYLMNNQKGQLVKRLVPVEQLLMYQQHTSHYDLERKGGYLMLSFIDFCPFSVMRLRSLPSPQRYTRQERYRARPPRVLERSGFHNENSLAIYQGLVYYLLWLHSVYDKPYADPVHDPTWRWWANNKQDQDYYFFLASNWRSAGGVSIEMDSYEKIYNLESAYELPERIFLDKGTEYSFAIFLSAQGHSFRTQSELGTAFQLHSQVDVGVVLADPGCIEASVKQEVLINRNSVLFSITLKDKKLCYDQGISGHHLMETSMTVNVVGSSGLCFQETHLGPHMQGNLMVPVFIGCPPGKRLAFDITYTLEYSRLKNKHYFDCVNVNPEMPCFLFRDIFYPFFLIQDLVTGDSGSFQGSYVLLVVGGGPTLDSLKDYSEDEIYRFNSPLDKTNSLIWTTRTTRTTKDSAFHIMSHESPGIEWLCLENAPCYDNVPQGIFAPEFFFKVLVSNRGVDTSTYCNYQLTFLLHIHGLPLSPKRALFIIMVSASVFVGLVIFYIAFCLLWPLVVKGCTMIRWKINNLIASESYYTYASISGISSMPSLRHSRMGSMFSSRMTEDRAEPKEAVERQLMT

SEQ ID NO: 2069 - protein, 292 aa, Homo Sapiens
MCGPAMFPAGPPWPRVRVVQVLWALLAVLLASWRLWAIKDFQECTWQVVLNEFKRVGESGVSDSFFEQEPVDTVSSLFHMLVDSPIDPSEKYLGFPYYLKINYSCEEKSPVNFYRWKIEQLQIQMEAAPFRSKEPCMAEEVCSMSWYTPMPIKKGSVVMRVDISSNGLGTFIPDKRFQMNINGFLKRDRDNNIQFTVGEELFNLMPQYFVGVSSRPLWHTVDQSPVLILGGIPNEKYVLMTDTSFKDFSLVEAPIPHSMRETAAVAVGFVSWPASASRSCALCISIAMALST

SEQ ID NO: 2070 - protein, 136 aa, Homo Sapiens
MCGPAMFPAGPPWPRVRVVQVLWALLAVLLASWRLWAIKDFQECTWQVVLNEFKRVGESGVSDSFFEQEPVDTVSSLFHMLVDSPIDPSEKYLGFPYYLKINYSCEEKSPVNFYRWKIEQLQIQMEAAPFRSKGSR

SEQ ID NO: 2071 - protein, 159 aa, Homo Sapiens
MCGPAMFPAGPPWPRVRVVQVLWALLAVLLASWRLWAIKDFQECTWQVVLNEFKRVGESGVSDSFFEQEPVDTVSSLFHMLVDSPIDPSEKYLGFPYYLKINYSCEEKTESCAVAQTGVQWRDLGSLQPPPPVFKRCSCLGLPSSWNYSPLRTWCAWAT

SEQ ID NO: 2072 - protein, 165 aa, Homo Sapiens
RWKIEQLQIQMEAAPFRSKEPCMAEEVCSMSWYTPMPIKKGSVVMRVDISSNGLGTFIPDKRFQMNINGFLKRDRDNNIQFTVGEELFNLMPQYFVGVSSRPLWHTVDQSPVLILGGIPNEKYVLMTDTSFKDFSLVEAVGFVSWPASASRSCALCISIAMALST

SEQ ID NO: 2073 - protein, 180 aa, Homo Sapiens
  misc_feature (1)..(1): Xaa can be any naturally occurring amino acid
XRNRGSGSWIRVLASECIKKLCPVYFHSNGSEYIMALTTGKHEGYVHFGTIRASDDLELLYHIPEFIPEARGLEFLMILGTESYTSTAMAPKGIFCNPYNNLIFIWGNFLLQSSNKENFIYLADFPKELSIKYMARSFRGAVAIVTETEEIWYLLEGSYRVYQLFPSKGWQVHISLKLMQ

SEQ ID NO: 2074 - protein, 193 aa, Homo Sapiens
MLGVLELLLLGAAWLAGPARGQNETEPIVLEGKCLVVCDSNPTSDPTGTALGISVRSGSAKVAFSAIRSTNHEPSEMSNRTMIIYFDQVLVNIGNNFDSERSTFIAPRKGIYSFNFHVVKVYNRQTIQVSLMLNGWPVISAFAGDQDVTREAASNGVLIQMEKGDRAYLKLERGNLMGGWKYSTFSGFLVFPL

SEQ ID NO: 2075 - protein, 193 aa, Homo Sapiens; identical to SEQ ID NO: 2074

SEQ ID NO: 2076 - protein, 140 aa, Homo Sapiens
MLGVLELLLLGAAWLAGPARGQNETEPIVLEGKCLVVCDSNPTSDPTGTALGISVRSGSAKVAFSAIRSTNHEPSEMSNRTMIIYFDQVSVPSSRGVQIGLVKEGWMEDRCPVLSKGSAEARGRQSGTDSCPLPFVPVSL

SEQ ID NO: 2077 - protein, 110 aa, Homo Sapiens
MDWDKVLVNIGNHFDLASSIFVAPRKGIYSFSFHVVKVYNRQTIQVSLMQNGYPVISAFAGDQDVTREAASNGVLLLMEREDKVHLKLERGNLMGGWKYSTFSGFLVFPL

SEQ ID NO: 2078 - protein, 108 aa, Homo Sapiens
MFQVLVNIGNHFDLASSIFVAPRKGIYSFSFHVVKVYNRQTIQVSLMQNGYPVISAFAGDQDVTREAASNGVLLLMEREDKVHLKLERGNLMGGWKYSTFSGFLVFPL

SEQ ID NO: 2079 - protein, 224 aa, Homo Sapiens
MQAPGRGPLGLRLMMPGRRGALREPGGCGSCLGVALALLLLLLPACCPVRAQNDTEPIVLEGKCLVVCDSSPSADGAVTSSLGISVRSGSAKVAFSATRSTNHEPSEMSNRTMTIYFDQVLVNIGNHFDLASSIFVAPRKGIYSFSFHVVKVYNRQTIQVSLMQNGYPVISAFAGDQDVTREAASNGVLLLMEREDKVHLKLERGNLMGGWKYSTFSGFLVFPL

SEQ ID NO: 2080 - protein, 224 aa, Homo Sapiens; identical to SEQ ID NO: 2079

SEQ ID NO: 2081 - protein, 205 aa, Homo Sapiens
MLGAKPHWLPGPLHSPGLPLVLVLLALGAGWAQEGSEPVLLEGECLVVCEPGRAAAGGPGGAALGEAPPGRVAFAAVRSHHHEPAGETGNGTSGAIYFDQVLVNEGGGFDRASGSFVAPVRGVYSFRFHVVKVYNRQTVQVSLMLNTWPVISAFANDPDVTREAATSSVLLPLDPGDRVSLRLRRGNLLGGWKYSSFSGFLIFPL

SEQ ID NO: 2082 - protein, 154 aa, Homo Sapiens
MWGLSGQSFGRTLTPTLKMRSTWGCCSRTLFSASADTAKRSGDAGRAPQVLVNEGGGFDRASGSFVAPVRGVYSFRFHVVKVYNRQTVQVSLMLNTWPVISAFANDPDVTREAATSSVLLPLDPGDRVSLRLRRGNLLGGWKYSSFSGFLIFPL

SEQ ID NO: 2083 - protein, 201 aa, Homo Sapiens
MGSGRRALSAVPAVLLVLTLPGLPVWAQNDTEPIVLEGKCLVVCDSNPATDSKGSSSSPLGISVRAANSKVAFSAVRSTNHEPSEMSNKTRIIYFDQILVNVGNFFTLESVFVAPRKGIYSFSFHVIKVYQSQTIQVNLMLNGKPVISAFAGDKDVTREAATNGVLLYLDKEDKVYLKLEKGNLVGGWQYSTFSGFLVFPL

SEQ ID NO: 2084 - protein, 46 aa, Homo Sapiens
MVKAGTCCATCKEFYQMKQTVLQLKQKIALLPNNAADLGKYITGDK

SEQ ID NO: 2085 - protein, 406 aa, Homo Sapiens
MVPPPPSRGGAARGQLGRSLGPLLLLLALGHTWTYREEPEDGDREICSESKIATTKYPCLKSSGELTTCYRKKCCKGYKFVLGQCIPEDYDVCAEAPCEQQCTDNFGRVLCTCYPGYRYDRERHRKREKPYCLDIDECASSNGTLCAHICINTLGSYRCECREGYIREDDGKTCTRGDKYPNDTGHEKSENMVKAGTCCATCKEFYQMKQTVLQLKQKIALLPNNAADLGKYITGDKVLASNTYLPGPPGLPGGQGPPGSPGPKGSPGFPGMPGPPGQPGPRGSMGPMGPSPDLSHIKQGRRGPVGPPGAPGRDGSKGERGAPGPRGSPGPPGSFDFLLLMLADIRNDITELQEKVFGHRTHSSAEEFPLPQEFPSYPEAMDLGSGDDHPRRTETRDLRAPRDFYP

SEQ ID NO: 2086 - protein, 336 aa, Homo Sapiens
RKKCCKGYKFVLGQCIPEDYDVCAEAPCEQQCTDNFGRVLCTCYPGYRYDRERHRKREKPYCLDIDECASSNGTLCAHICINTLGSYRCECREGYIREDDGKTCTRGDKYPNDTGHEKSENMVKAGTCCATCKEFYQMKQTVLQLKQKIALLPNNAADLGKYITGDKVLASNTYLPGPPGLPGGQGPPGSPGPKGSPGFPGMPGPPGQPGPRGSMGPMGPSPDLSHIKQGRRGPVGPPGAPGRDGSKGERGAPGPRGSPGPPGSFDFLLLMLADIRNDITELQEKVFGHRTHSSAEEFPLPQEFPSYPEAMDLGSGDDHPRRTETRDLRAPRDFYP

SEQ ID NO: 2087 - protein, 529 aa, Homo Sapiens
MAALTTVVVAAAATAVAGAVAGAGAATGTGVGATPAPQQSDGCFSTSGGIRPFHLQNWKQKVNQTKKAEFVRTAEKFKNQVINMEKDKHSHFYNQKSDFRIEHSMLEELENKLIHSRKTERAKIQQQLAKIHNNVKKLQHQLKDVKPTPDFVEKLREMMEEIENAINTFKEEQRLIYEELIKEEKTTNNELSAISRKIDTWALGNSETEKAFRAISSKVPVDKVTPSTLPEEVLDFEKFLQQTGGRQGAWDDYDHQNFVKVRNKHKGKPTFMEEVLEHLPGKTQDEVQQHEKWYQKFLALEERKKESIQIWKTKKQQKREEIFKLKEKADNTPVLFHNKQEDNQKQKEEQRKKQKLAVEAWKKQKSIEMSMKCASQLKEEEEKEKKHQKERQRQFKLKLLLESYTQQKKEQEEFLRLEKEIREKAEKAEKRKNAADEISRFQERDLHKLELKILDRQAKEDEKSQKQRRLAKLKEKVENNVSRDPSRLYKPTKGWEERTKKIGPTGSGPLLHIPHRAIPTWRQGIQRRV

SEQ ID NO: 2088 - protein, 446 aa, Homo Sapiens
MEKDKHSHFYNQKSDFRIEHSMLEELENKLIHSRKTERAKIQQQLAKIHNNVKKLQHQLKDVKPTPDFVEKLREMMEEIENAINTFKEEQRLIYEELIKEEKTTNNELSAISRKIDTWALGNSETEKAFRAISSKVPVDKVTPSTLPEEVLDFEKFLQQTGGRQGAWDDYDHQNFVKVRNKHKGKPTFMEEVLEHLPGKTQDEVQQHEKWYQKFLALEERKKESIQIWKTKKQQKREEIFKLKEKADNTPVLFHNKQEDNQKQKEEQRKKQKLAVEAWKKQKSIEMSMKCASQLKEEEEKEKKHQKERQRQFKLKLLLESYTQQKKEQEEFLRLEKEIREKAEKAEKRKNAADEISRFQERDLHKLELKILDRQAKEDEKSQKQRRLAKLKEKVENNVSRDPSRLYKPTKGWEERTKKIGPTGSGPLLHIPHRAIPTWRQGIQRRV

SEQ ID NO: 2089 - protein, 414 aa, Homo Sapiens
MEKDKHSHFYNQKSDFRIEHSMLEELENKLIHSRKTERAKIQQQLAKIHNNVKKLQHQLKDVKPTPDFVEKLREMMEEIENAINTFKEEQRLIYEELIKEEKTTNNELSAISRKIDTWALGNSETEKAFRAISSKVPVDKVTPSTLPEEVLDFEKFLQQTGGRQGAWDDYDHQNFVKVRNKHKGKPTFMEEVLEHLPGKTQDEVQQHEKWYQKFLALEERKKESIQIWKTKKQQKREEIFKLKEKADNTPVLFHNKQEDNQKQKEEQRKKQKLAVEAWKKQKSIEMSMKCASQLKEEEEKEKKHQKERQRQFKLKLLLESYTQQKKEQEEFLRLEKEIREKAEKAEKRKNAADEISRFQERVENNVSRDPSRLYKPTKGWEERTKKIGPTGSGPLLHIPHRAIPTWRQGIQRRV

SEQ ID NO: 2090 - protein, 446 aa, Homo Sapiens; identical to SEQ ID NO: 2088

SEQ ID NO: 2091 - protein, 142 aa, Homo Sapiens
MMAQKSQGSDNLQEGQEKSKREILKCTKSAWAPLDEWLPPDPEEESQSLTIPMLEDSKQESIQQWLDSGFFVSANENFQQVIDRTVSLYEQGMVQMTVKDYMRSLHQFSETPILSRGTSFNSCYSTASVPQSIPEWLEFWEI

SEQ ID NO: 2092 - protein, 163 aa, Homo Sapiens
MMAQKSQGSDNLQEGQEKSKREILKCTKSAWAPLDEWLPPDPEEESQSLTIPMLEDSKQESIQQWLDSGFFVSANENFQQVIDRTVSLYEQGMVQMTVKDYMRSLHQFSETPILSRGTSFNSCYSTASVPQSIPEWLEFWEIDPVEILLDLGFGADEPDICMQ

SEQ ID NO: 2093 - protein, 168 aa, Homo Sapiens
MMAQKSQGSDNLQEGQEKSKREILKCTKSAWAPLDEWLPPDPEEESQSLTIPMLEDSKQESIQQWLDSGFFVSANENFQQVIDRTVSLYEQGMVQMTVKDYMRSLHQFSETPILSRGTSFNSCYSTASVPQSIPEWLEFWEIDPVEILLDLGFGADEPDICMQIPARF

SEQ ID NO: 2094 - protein, 896 aa, Homo Sapiens
MMAQKSQGSDNLQEGQEKSKREILKCTKSAWAPLDEWLPPDPEEESQSLTIPMLEDSKQESIQQWLDSGFFVSANENFQQVIDRTVSLYEQGMVQMTVKDYMRSLHQFSETPILSRGTSFNSCYSTASVPQSIPEWLEFWEIDPVEILLDLGFGADEPDICMQIPARFLGCGSAARGINIRVFLEAQKQRMDIENPNLYGRFRQLEILDHVTNAFSSLLSDVSILPNRAEEKAGGESVQRTSVQSFEEETGNPLDMTSGTVGARVDRANSCQSDSSGFLEEPLEPLPLQMPSLPNSQSPAENGGRKPRDQSHSLVSSQDCQLESDGPDSKSRASMSFSSQEANALEQRASVSVMEEEFLLEAMEGPPELYIPDMACAKTTTRGECPRKDSHLWQLLPMPHAEYEVTRPTATSKYDHPLGFMVTHVTEMQDSFVRPEGAGKVQSHHNESQRSPGNDHTQDKFLHVDSEAPREEESSGFCPHTNHSLLVPESSSQCIPKHSEITPYATDLAQTSEKLIPHLHKLPGDPAQVKSRSGTLGQILPGTEAEMENLPLNTGSSRSVMTQMSSSLVSAAQRAVALGTGPRGTSLECTVCDPVTATETRLGTKARQLNDASIQTSALSNKTLTHGPQPLTKSVSLDSGFSSICPMGTCHAIPAHCCICCHHHPHCHGERQSPGPEPSVCRHCLCSLTGHQEAQFMTTLKALQDTTVRELCSCTVHEMEAMKTICQSFREYLEEIEQHLMGQQALFSRDMSEEEREEAEQLQTLREALRQQVAELEFQLGDRAQQIREGILLQLEVLTAEPPEHYSNLHQYNWIEESNGQTSCSKIHPGMAPRTVFPPDDGQEAPCSGGTQLAAFTPPTLENSTRMSPSSSAWAKLGPTPLSNCPVGEKDADVFL

SEQ ID NO: 2095 - protein, 1044 aa, Homo Sapiens
MMAQKSQGSDNLQEGQEKSKREILKCTKSAWAPLDEWLPPDPEEESQSLTIPMLEDSKQESIQQWLDSGFFVSANENFQQVIDRTVSLYEQGMVQMTVKDYMRSLHQFSETPILSRGTSFNSCYSTASVPQSIPEWLEFWEIDPVEILLDLGFGADEPDICMQIPARFLGCGSAARGINIRVFLEAQKQRMDIENPNLYGRFRQLEILDHVTNAFSSLLSDVSILPNRAEEKAGGESVQRTSVSAAKEHRRRMGKLLRRASKQNIRRDCNPEVSESFKVKDEVFVPFTKPWDCGAELAATSINHKQNHLSLSVEHQSLQACDDLLPYPPHGLLSKQWPCSSMPAKQAPPSCVSEGSVKGRTQKENLFQTNKLKSLSHLAGKGPDSFEMEEVQSFEEETGNPLDMTSGTVGARVDRANSCQSDSSGFLEEPLEPLPLQMPSLPNSQSPAENGGRKPRDQSHSLVSSQDCQLESDGPDSKSRASMSFSSQEANALEQRASVSVMEEEFLLEAMEGPPELYIPDMACAKTTTRGECPRKDSHLWQLLPMPHAEYEVTRPTATSKYDHPLGFMVTHVTEMQDSFVRPEGAGKVQSHHNESQRSPGNDHTQDKFLHVDSEAPREEESSGFCPHTNHSLLVPESSSQCIPKHSEITPYATDLAQTSEKLIPHLHKLPGDPAQVKSRSGTLGQILPGTEAEMENLPLNTGSSRSVMTQMSSSLVSAAQRAVALGTGPRGTSLECTVCDPVTATETRLGTKARQLNDASIQTSALSNKTLTHGPQPLTKSVSLDSGFSSICPMGTCHAIPAHCCICCHHHPHCHGERQSPGPEPSVCRHCLCSLTGHQEAQFMTTLKALQDTTVRELCSCTVHEMEAMKTICQSFREYLEEIEQHLMGQQALFSRDMSEEEREEAEQLQTLREALRQQVAELEFQLGDRAQQIREGILLQLEVLTAEPPEHYSNLHQYNWIEESNGQTSCSKIHPGMAPRTVFPPDDGQEAPCSGGTQLAAFTPPTLENSTRMSPSSSAWAKLGPTPLSNCPVGEKDADVFL

SEQ ID NO: 2096 - protein, 1062 aa, Homo Sapiens
MPTTASCKTISLLKLLYSVSLQNYSPMMAQKSQGSDNLQEGQEKSKREILKCTKSAWAPLDEWLPPDPEEESQSLTIPMLEDSKQESIQQWLDSGFFVSANENFQQVIDRTVSLYEQGMVQMTVKDYMRSLHQFSETPILSRGTSFNSCYSTASVPQSIPEWLEFWEIDPVEILLDLGFGADEPDICMQIPARFLGCGSAARGINIRVFLEAQKQRMDIENPNLYGRFRQLEILDHVTNAFSSLLSDVSILPNRAEEKAGGESVQRTSVSAAKEHRRRMGKLLRRASKQNIRRDCNPEVSESFKVKDEVFVPFTKPWDCGAELAATSINHKQNHLSLSVEHQSLQACDDLLPYPPHGLLSKQWPCSSMPAKQAPPSCVSEGSVKGRTQKENLFQTNKLKSLSHLAGKGPDSFEMEEVQSFEEETGNPLDMTSGTVGARVDRANSCQSDSSGFLEEPLEPLPLQMPSLPNSQSPAENGGRKPRDQSHSLVSSQDCQLESDGPDSKSRASMSFSSQEANALEQRASVSVMEEEFLLEAMEGPPELYIPDMACAKTTTRGECPRKDSHLWQLLPMPHAEYEVTRPTATSKYDHPLGFMVTHVTEMQDSFVRPEGAGKVQSHHNESQRSPGNDHTQDKFLHVDSEAPREEESSGFCPHTNHSLLVPESSSQCIPKHSEITPYATDLAQTSEKLIPHLHKLPGDPAQVKSRSGTLGQILPGTEAEMENLPLNTGSSRSVMTQMSSSLVSAAQRAVALGTGPRGTSLECTVCDPVTATETRLGTKARQLNDASIQTSALSNKTLTHGPQPLTKSVSLDSGFSSICPMGTCHAIPAHCCICCHHHPHCHGERQSPGPEPSVCRHCLCSLTGHQEAQFMTTLKALQDTTVRELCSCTVHEMEAMKTICQSFREYLEEIEQHLMGQQALFSRDMSEEEREEAEQLQTLREALRQQVAELEFQLGDRAQQIREGILLQLEVLTAEPPEHYSNLHQYNWIEESNGQTSCSKIHPGMAPRTVFPPDDGQEAPCSGELLSAELDPFFFSSKANNSAKDEKIKSKDFLKTQDSGLL

SEQ ID NO: 2097 - protein, 1054 aa, Homo Sapiens
MSVSLQNYSPMMAQKSQGSDNLQEGQEKSKREILKCTKSAWAPLDEWLPPDPEEESQSLTIPMLEDSKQESIQQWLDSGFFVSANENFQQVIDRTVSLYEQGMVQMTVKDYMRSLHQFSETPILSRGTSFNSCYSTASVPQSIPEWLEFWEIDPVEILLDLGFGADEPDICMQIPARFLGCGSAARGINIRVFLEAQKQRMDIENPNLYGRFRQLEILDHVTNAFSSLLSDVSILPNRAEEKAGGESVQRTSVSAAKEHRRRMGKLLRRASKQNIRRDCNPEVSESFKVKDEVFVPFTKPWDCGAELAATSINHKQNHLSLSVEHQSLQACDDLLPYPPHGLLSKQWPCSSMPAKQAPPSCVSEGSVKGRTQKENLFQTNKLKSLSHLAGKGPDSFEMEEVQSFEEETGNPLDMTSGTVGARVDRANSCQSDSSGFLEEPLEPLPLQMPSLPNSQSPAENGGRKPRDQSHSLVSSQDCQLESDGPDSKSRASMSFSSQEANALEQRASVSVMEEEFLLEAMEGPPELYIPDMACAKTTTRGECPRKDSHLWQLLPMPHAEYEVTRPTATSKYDHPLGFMVTHVTEMQDSFVRPEGAGKVQSHHNESQRSPGNDHTQDKFLHVDSEAPREEESSGFCPHTNHSLLVPESSSQCIPKHSEITPYATDLAQTSEKLIPHLHKLPGDPAQVKSRSGTLGQILPGTEAEMENLPLNTGSSRSVMTQMSSSLVSAAQRAVALGTGPRGTSLECTVCDPVTATETRLGTKARQLNDASIQTSALSNKTLTHGPQPLTKSVSLDSGFSSICPMGTCHAIPAHCCICCHHHPHCHGERQSPGPEPSVCRHCLCSLTGHQEAQFMTTLKALQDTTVRELCSCTVHEMEAMKTICQSFREYLEEIEQHLMGQQALFSRDMSEEEREEAEQLQTLREALRQQVAELEFQLGDRAQQIREGILLQLEVLTAEPPEHYSNLHQYNWIEESNGQTSCSKIHPGMAPRTVFPPDDGQEAPCSGGTQLAAFTPPTLENSTRMSPSSSAWAKLGPTPLSNCPVGEKDADVFL

SEQ ID NO: 2098 - protein, 952 aa, Homo Sapiens
MVQMTVKDYMRSLHQFSETPILSRGTSFNSCYSTASVPQSIPEWLEFWEIDPVEILLDLGFGADEPDICMQIPARFLGCGSAARGINIRVFLEAQKQRMDIENPNLYGRFRQLEILDHVTNAFSSLLSDVSILPNRAEEKAGGESVQRTSVSAAKEHRRRMGKLLRRASKQNIRRDCNPEVSESFKVKDEVFVPFTKPWDCGAELAATSINHKQNHLSLSVEHQSLQACDDLLPYPPHGLLSKQWPCSSMPAKQAPPSCVSEGSVKGRTQKENLFQTNKLKSLSHLAGKGPDSFEMEEVQSFEEETGNPLDMTSGTVGARVDRANSCQSDSSGFLEEPLEPLPLQMPSLPNSQSPAENGGRKPRDQSHSLVSSQDCQLESDGPDSKSRASMSFSSQEANALEQRASVSVMEEEFLLEAMEGPPELYIPDMACAKTTTRGECPRKDSHLWQLLPMPHAEYEVTRPTATSKYDHPLGFMVTHVTEMQDSFVRPEGAGKVQSHHNESQRSPGNDHTQDKFLHVDSEAPREEESSGFCPHTNHSLLVPESSSQCIPKHSEITPYATDLAQTSEKLIPHLHKLPGDPAQVKSRSGTLGQILPGTEAEMENLPLNTGSSRSVMTQMSSSLVSAAQRAVALGTGPRGTSLECTVCDPVTATETRLGTKARQLNDASIQTSALSNKTLTHGPQPLTKSVSLDSGFSSICPMGTCHAIPAHCCICCHHHPHCHGERQSPGPEPSVCRHCLCSLTGHQEAQFMTTLKALQDTTVRELCSCTVHEMEAMKTICQSFREYLEEIEQHLMGQQALFSRDMSEEEREEAEQLQTLREALRQQVAELEFQLGDRAQQIREGILLQLEVLTAEPPEHYSNLHQYNWIEESNGQTSCSKIHPGMAPRTVFPPDDGQEAPCSGGTQLAAFTPPTLENSTRMSPSSSAWAKLGPTPLSNCPVGEKDADVFL

SEQ ID NO: 2099 - protein, 116 aa, Homo Sapiens
MDLLQFLAFLFVLLLSGMGATGTLRTSLDPSLEIYKKMFEVKRREQLLALKNLAQLNDIHQQYKILDVMLKGLFKFIPSTDPFQKALREEEKRRKKEEKRKEIRKGPRISRSQSEL

SEQ ID NO: 2100 - protein, 229 aa, Homo Sapiens
MDLLQFLAFLFVLLLSGMGATGTLRTSLDPSLEIYKKMFEVKRREQLLALKNLAQLNDIHQQYKILDVMLKGLFKVLEDSRTVLTAADVLPDGPFPQDEKLKDAFSHVVENTAFFGDVVLRFPRIVHYYFDHNSNWNLLIRWGISFCNQTGVFNQGPHSPILSLMAQELGISEKDSNFQNPFKIDRTEFIPSTDPFQKALREEEKRRKKEEKRKEIRKGPRISRSQSEL

SEQ ID NO: 2101 - protein, 141 aa, Homo Sapiens
MEEEAMNGDRTESDWQGLVSEYLVCKRKLESKKEALLILSKELDTCQQERDQYKLMANQLRERHQSLKKKYRELIDGDPSLPPEKRKQANLAQLLRDSQDRNKHLGEEIKELQQRLGEVQGDNKGRLRSKKKMKVVPLLRR

SEQ ID NO: 2102 - protein, 529 aa, Homo Sapiens
MEEEAMNGDRTESDWQGLVSEYLVCKRKLESKKEALLILSKELDTCQQERDQYKLMANQLRERHQSLKKKYRELIDGDPSLPPEKRKQANLAQLLRDSQDRNKHLGEEIKELQQRLGEVQGDNKLLRMTIAKQRLGDEAIGVRHFAAHEREDLVQQLERAKEQIESLEHDLQASVDELQDVKEERSSYQDKVERLNQELNHILSGHENRIIDVDALCMENRYLQERLKQLHEEVNLLKSNIAKYKNALERRKNSKGQGKSSSSALTGVLSAKQVQDLLSEDHGCSLPATPQSISDLKSLATALLETIHEKNMVIQHQRQTNKILGNRVAELEKKLRTLEVSGLWSLPGGKDTILFSDPTLPSGQRSRSPLLKFVEQPTENKADPKDGEAQKQEEDESCAAAEALTAPEDAGRPAVNSPANQSRGNQCKLFHPSLPQLPSEEEVNSLGREIIKLTKEQAAAELEEVRRESPIEGQRSETGPAPPGLAIQGELPKSHLDSFEASRPAAKASTPEDGKGIPEGGGMRSTVKT

SEQ ID NO: 2103 - protein, 540 aa, Homo Sapiens
MEEEAMNGDRTESDWQGLVSEYLVCKRKLESKKEALLILSKELDTCQQERDQYKLMANQLRERHQSLKKKYRELIDGDPSLPPEKRKQANLAQLLRDSQDRNKHLGEEIKELQQRLGEVQGDNKLLRMTIAKQRLGDEAIGVRHFAAHEREDLVQQLERAKEQIESLEHDLQASVDELQDVKEERSSYQDKVERLNQELNHILSGHENRIIDVDALCMENRYLQERLKQLHEEVNLLKSNIAKYKNALERRKNSKGQGKSSSSALTGVLSAKQVQDLLSEDHGCSLPATPQSISDLKSLATALLETIHEKNMVIQHQRQTNKILGNRVAELEKKLRTLEVSGLWSLPGLSYNVSVGFGRGKDTILFSDPTLPSGQRSRSPLLKFVEQPTENKADPKDGEAQKQEEDESCAAAEALTAPEDAGRPAVNSPANQSRGNQCKLFHPSLPQLPSEEEVNSLGREIIKLTKEQAAAELEEVRRESPIEGQRSETGPAPPGLAIQGELPKSHLDSFEASRPAAKASTPEDGKGIPEGGGMRSTVKT

SEQ ID NO: 2104 - protein, 529 aa, Homo Sapiens
MVVIVVVIIIIIARAATWDSEYLVCKRKLESKKEALLILSKELDTCQQERDQYKLMANQLRERHQSLKKKYRELIDGDPSLPPEKRKQANLAQLLRDSQDRNKHLGEEIKELQQRLGEVQGDNKLLRMTIAKQRLGDEAIGVRHFAAHEREDLVQQLERAKEQIESLEHDLQASVDELQDVKEERSSYQDKVERLNQELNHILSGHENRIIDVDALCMENRYLQERLKQLHEEVNLLKSNIAKYKNALERRKNSKGQGKSSSSALTGVLSAKQVQDLLSEDHGCSLPATPQSISDLKSLATALLETIHEKNMVIQHQRQTNKILGNRVAELEKKLRTLEVSGLWSLPGGKDTILFSDPTLPSGQRSRSPLLKFVEQPTENKADPKDGEAQKQEEDESCAAAEALTAPEDAGRPAVNSPANQSRGNQCKLFHPSLPQLPSEEEVNSLGREIIKLTKEQAAAELEEVRRESPIEGQRSETGPAPPGLAIQGELPKSHLDSFEASRPAAKASTPEDGKGIPEGGGMRSTVKT

SEQ ID NO: 2105 - protein, 145 aa, Homo Sapiens
MDENYNLLPHGVNFQDAIFPDTQENRRMFSSLFQFSNCSQGQQLATFSSDWEIQEDSRLMCSSVQKALFEEEDHVKKLQQKVATLEKRNRQLRERVKKVKRSLRQARKKGRHLELANQKLSEKLAAGALPHINARGPVRPPYLRG

SEQ ID NO: 2106 - protein, 270 aa, Homo Sapiens
MLRQLLLAALCLAGPPAPARACQLPSEWRPLSEGCRAELAETIVYARVLALHPEAPGLYNHLPWQYHAGQGGLFYSAEVEMLCDQAWGSMLEVPAGSRLNLTGLGYFSCHSHTVVQDYSYFFFLRMDENYNLLPHGVNFQDAIFPDTQENRRMFSSLFQFSNCSQGQQLATFSSDWEIQEDSRLMCSSVQKALFEEEDHVKKLQQKVATLEKRNRQLRERVKKVKRSLRQARKKGRHLELANQKLSEKLAAGALPHINARGPVRPPYLRG

SEQ ID NO: 2107 - protein, 212 aa, Homo Sapiens
MALRSMGQFSVFFFFFFWAQKKIASLSHSGFLHWFLLFEAVSSNGVLLFFSRFRWRRRLLVISAPNDEDWAYSQQLSALSGQACNFGLRHITILKLLGVGEEVGGVLELFPINGSSVVEREDVPAHLVKDIRNYFQVSPEYFSMLLVGKDGNVKSWYPSPMWSMVIVYDLIDSMQLRRQEMAIQQSLGMRCPEDEYAGYGYHSYHQGYQDGY

SEQ ID NO: 2108 - protein, 950 aa, Homo Sapiens
MTWRMGPRFTMLLAMWLVCGSEPHPHATIRGSHGGRKVPLVSPDSSRPARFLRHTGRSRGIERSTLEEPNLQPLQRRRSVPVLRLARPTEPPARSDINGAAVRPEQRPAARGSPREMIRDEGSSARSRMLRFPSGSSSPNILASFAGKNRVWVISAPHASEGYYRLMMSLLKDDVYCELAERHIQQIVLFHQAGEEGGKVRRITSEGQILEQPLDPSLIPKLMSFLKLEKGKFGMVLLKKTLQVEERYPYPVRLEAMYEVIDQGPIRRIEKIRQKGFVQKCKASGVEGQVVAEGNDGGGGAGRPSLGSEKKKEDPRRAQVPPTRESRVKVLRKLAATAPALPQPPSTPRATTLPPAPATTVTRSTSRAVTVAARPMTTTAFPTTQRPWTPSPSHRPPTTTEVITARRPSVSENLYPPSRKDQHRERPQTTRRPSKATSLESFTNAPPTTISEPSTRAAGPGRFRDNRMDRREHGHRDPNVVPGPPKPAKEKPPKKKAQDKILSNEYEEKYDLSRPTASQLEDELQVGNVPLKKAKESKKHEKLEKPEKEKKKKMKNENADKLLKSEKQMKKSEKKSKQEKEKSKKKKGGKTEQDGYQKPTNKHFTQSPKKSVADLLGSFEGKRRLLLITAPKAENNMYVQQRDEYLESFCKMATRKISVITIFGPVNNSTMKIDHFQLDNEKPMRVVDDEDLVDQRLISELRKEYGMTYNDFFMVLTDVDLRVKQYYEVPITMKSVFDLIDTFQSRIKDMEKQKKEGIVCKEDKKQSLENFLSRFRWRRRLLVISAPNDEDWAYSQQLSALSGQACNFGLRHITILKLLGVGEEVGGVLELFPINGSSVVEREDVPAHLVKDIRNYFQVSPEYFSMLLVGKDGNVKSWYPSPMWSMVIVYDLIDSMQLRRQEMAIQQSLGMRCPEDEYAGYGYHSYHQGYQDGYQDDYRHHESYHHGYPY

SEQ ID NO: 2109 - protein, 950 aa, Homo Sapiens; identical to SEQ ID NO: 2108

SEQ ID NO: 2110 - protein, 261 aa, Homo Sapiens
  misc_feature (1)..(1): Xaa can be any naturally occurring amino acid
XFTQSPKKSVADLLGSFEGKRRLLLITAPKAENNMYVQQRDEYLESFCKMATRKISVITIFGPVNNSTMKIDHFQLDNEKPMRVVDDEDLVDQRLISELRKEYGMTYNDFFMVLTDVDLRVKQYYEVPITMKSVFDLIDTFQSRIKDMEKQKKEGIVCKEDKKQSLENFLSRFRWRRRLLVISAPNDEDWAYSQQLSALSGQACNFGSSVVEREDVPAHLVKDIRNYFQVSPEYFSMLLVGKDGNVKSWYPSPMWSMVIVY

SEQ ID NO: 2111 - protein, 553 aa, Homo Sapiens
MSKAAGGAAAAAAAAESCSPAPAGSSAAPPAPVEDLSKVSDEELLQWSKEELIRSLRRAEAEKVSAMLDHSNLIREVNRRLQLHLGEIRGLKDINQKLQEDNQELRDLCCFLDDDRQKGKRVSREWQRLGRYTAGVMHKEVALYLQKLKDLEVKQEEVVKENMELKELCVLLDEEKGAGCAGSRCSIDSQASLCQLTASTAPYVRDVGDGSSTSSTGSTDSPDHHKHHASSGSPEHLQKPRSEGSPEHSKHRSASPEHPQKPRACGTPDRPKALKGPSPEHHKPLCKGSPEQQRHPHPGSSPETLPKHVLSGSPEHFQKHRSGSSPEHARHSGGSPEHLQKHALGGSLEHLPRARGTSPEHLKQHYGGSPDHKHGGGSGGSGGSGGGSREGTLRRQAQEDGSPHHRNVYSGMNESTLSYVRQLEARVRQLEEENRMLPQASQNRRQPPTRNSSNMEKGWGSRARRVLQWWQGCRGIGRCLPTLPGSFRLSSGADGSNSSPNSAASFSGHATPSQQPEPVVHSLKVVWRKLGDAAGSCPGIRQHLSGNQYKGPM

SEQ ID NO: 2112 - protein, 712 aa, Homo Sapiens
MAGVAAHRAHPPFTAHMKNRGLREELEKAVVRGKELGDRLEHLQRELEQAALERQEFLREKESQHQRYQGLEQRLEAELQAAATSKEEALMELKTRALQLEEELFQLRQGPAGLGPKKRAEPQLVETQNVRLIEVERSNAMLVAEKAALQGQLQHLEGQLGSLQGRAQELLLQSQRAQEHSSRLQAEKSVLEIQGQELHRKLEVLEEEVRAARQSQEETRGQQQALLRDHKALAQLQRRQEAELEGLLVRHRDLKANMRALELAHRELQGRHEQLQAQRASVEAQEVALLAERERLMQDGHRQRGLEEELRRLQSEHDRAQMLLAELSRERGELQGERGELRGRLARLELERAQLEMQSQQLRESNQQLDLSACRLTTQCELLTQLRSAQEEENRQLLAEVQALSRENRELLERSLESRDHLHREQREYLDQLNALRREKQKLVEKIMDQYRVLEPVPLPRTKKGSWLADKGPLPRHPCAGPRAPSACGMRPWQAGSGGNSAQGSRWGEALSHSALGTPLGNDSDSAIQAPWGRPSPTAKDLVWDGRTPLRPCRNTKQMPTERALRYRNRRNVPSPHPSASDTVGTAGLGVQPSRHWSVSGGPRQPKSSGSQGPQGESLDKEAWALRSSTVSAGARRWSWDECVDRGDGWPPRAAPGWSSGSSRWLPLRQRSLGDPPAEGGWQELAREPPALSRWEAESQCWGTVAWADLEP

SEQ ID NO: 2113 - protein, 1476 aa, Homo Sapiens
MEGGKGPRLRDFLSGSLATWALGLAGLVGEAEDSEGEEEEEEEEPPLWLEKRFLRLSDGALLLRVLGIIAPSSRGGPRMLRGLDGPAAWRVWNLNHLWGRLRDFYQEELQLLILSPPPDLQTLGFDPLSEEAVEQLEGVLRLLLGASVQCEHRELFIRHIQGLSLEVQSELAAAIQEVTQPGAGVVLALSGPDPGELAPAELEMLSRSLMGTLSKLARERDLGAQRLAELLLEREPLCLRPEAPSRAPAEGPSHHLALQLANAKAQLRRLRQELEEKAELLLDSQAEVQGLEAEIRRLRQEAQALSGQAKRAELYREEAEALRERAGRLPRLQEELRRCRERLQAAEAYKSQLEEERVLSGVLEASKALLEEQLEAARERCARLHETQRENLLLRTRLGEAHAELDSLRHQVDQLAEENVELELELQRSLEPPPGSPGEAPLAGAAPSLQDEVREAEAGRLRTLERENRELRGLLQVLQGQPGGQHPLLEAPREDPVLPVLEEAPQTPVAFDHSPQGLVQKARDGGPQALDLAPPALDSVLEASAECPQAPDSDPQEAESPLQAAAMDPQASDWSPQESGSPVETQESPEKAGRRSSLQSPASVAPPQGPGTKIQAPQLLGGETEGREAPQGELVPEAWGLRQEGPEHKPGPSEPSSVQLEEQEGPNQGLDLATGQAEAREHDQRLEGTVRDPAWQKPQQKSEGALEVQVWEGPIPGESLASGVAEQEALREEVAQLRRKAEALGDELEAQARKLEAQNTEAARLSKELAQARRAEAEAHREAEAQAWEQARLREAVEAAGQELESASQEREALVEALAAAGRERRQWEREGSRLRAQSEAAEERMQVLESEGRQHLEEAERERREKEALQAELEKAVVRGKELGDRLEHLQRELEQAALERQEFLREKESQHQRYQGLEQRLEAELQAAATSKEEALMELKTRALQLEEELFQLRQGPAGLGPKKRAEPQLVETQNVRLIEVERSNAMLVAEKAALQGQLQHLEGQLGSLQGRAQELLLQSQRAQEHSSRLQAEKSVLEIQGQELHRKLEVLEEEVRAARQSQEETRGQQQALLRDHKALAQLQRRQEAELEGLLVRHRDLKANMRALELAHRELQGRHEQLQAQRASVEAQEVALLAERERLMQDGHRQRGLEEELRRLQSEHDRAQMLLAELSRERGELQGERGELRGRLARLELERAQLEMQSQQLRESNQQLDLSACRLTTQCELLTQLRSAQEEENRQLLAEVQALSRENRELLERSLESRDHLHREQREYLDQLNALRREKQKLVEKIMDQYRVLEPVPLPRTKKGSWLADKVKRLMRPRREGGPPGGLRLGADGAGSTESLGGPPETELPEGREADGTGSPSPAPMRRAQSSLCLRDETLAGGQRRKLSSRFPVGRSSESFSPGDTPRQRFRQRHPGPLGAPVSHSKGPGVGWENSAETLQEHETDANREGPEVQEPEKRPLTPSLSQ

SEQ ID NO: 2114 - protein, 139 aa, Homo Sapiens
MPCAARSRSSWRRSWTNTACWSLCPCPGPRSPSPAPMRRAQSSLCLRDETLAGGQRRKLSSRFPVGRSSESFSPGDTPRQRFRQRHPGPLGAPVSHSKGPGVGWENSAETLQEHETDANREGPEVQEPEKRPLTPSLSQ

SEQ ID NO: 2115 - protein, 122 aa, Homo Sapiens
EDEEEEKEERKRGPMETFEDLWQRHLENGGDLQKRVAEKASDKETAQFQAEEKGVRVLGGDRSLWQGAERGGGERREDLPHHHHHHHQPEAEPRQEKEEASEREEKEVEQLEHLRDELKKDC

SEQ ID NO: 2116 - protein, 266 aa, Homo Sapiens
MPPRGPASELLLLRLLLLGAATAAPLAPRPSKEELTRCLAEVVTEVLTVGQVQRGPCTALLHKELCGTEPHGCASTEEKGLLLGDFKKQEAGKMRSSQEVRDEEEEEVAERTHKSEVQEQAIRMQGHRQLHQEEDEEEEKEERKRGPMETFEDLWQRHLENGGDLQKRVAEKASDKETAQFQAEEKGVRVLGGDRSLWQGAERGGGERREDLPHHHHHHHQPEAEPRQEKEEASEREEKEVEQLEHLRDELKKVTETLGEQLRREG

SEQ ID NO: 2117 - protein, 115 aa, Homo Sapiens
MNSGVCLCVLMAVLAAGALTQPVPPADPAGSGLQRAEEAPRRQLRVSQRTDGESRAHLGALLARYIQQARKAPSGRMSIVKNLQNLDPSHRISDRDYMGWMDFGRRSAEEYEYPS

SEQ ID NO: 2118 - protein, 115 aa, Homo Sapiens; identical to SEQ ID NO: 2117

SEQ ID NO: 2119 - protein, 115 aa, Homo Sapiens; identical to SEQ ID NO: 2117

SEQ ID NO: 2120 - protein, 96 aa, Homo Sapiens
MQIITTALVCLLLAGMWPEDVDSKSMQVPFSRCCFSFAEQEIPLRAILCYRNTSSICSNEGLIFKLKRGKEACALDTVGWVQRHRKMLRHCPSKRK

SEQ ID NO: 2121 - protein, 97 aa, Homo Sapiens
MKVSAALLWLLLIAAAFSPQGLAGPASVPTTCCFNLANRKIPLQRLESYRRITSGKCPQKAVIFKTKLAKDICADPKKKWVQDSMKYLDQKSPTPKP

SEQ ID NO: 2122 - protein, 98 aa, Homo Sapiens
MKVSAVLLCLLLMTAAFNPQGLAQPDALNVPSTCCFTFSSKKISLQRLKSYVITTSRCPQKAVIFRTKLGKEICADPKEKWVQNYMKHLGRKAHTLKT

SEQ ID NO: 2123 - protein, 63 aa, Homo Sapiens
  misc_feature (1)..(1): Xaa can be any naturally occurring amino acid
XVPSTCCFTFSSKKISLQRLKSYVITTSSFRTKLGKEICADPKEKWVQNYMKHLGRKAHTLKT

SEQ ID NO: 2124 - protein, 109 aa, Homo Sapiens
MKISVAAIPFFLLITIALGTKTESSSQTGGKPKVVKIQLKLVGGPYHPSECCFTYTTYKIPRQRIMDYYETNSQCSKPGIVFITKRGHSVCTNPSDKWVQDYIKDMKEN

SEQ ID NO: 2125 - protein, 65 aa, Homo Sapiens
MKISVAAIPFFLLITIALGTKTESSSRGPYHPSECCFTYTTYKIPRQRIMDYYETNSQCSKPGIV

SEQ ID NO: 2126 - protein, 93 aa, Homo Sapiens
MKISVAAIPFFLLITIALGTKTESSSRGPYHPSECCFTYTTYKIPRQRIMDYYETNSQCSKPGIVFITKRGHSVCTNPSDKWVQDYIKDMKEN

SEQ ID NO: 2127 - protein, 115 aa, Homo Sapiens
MRKAYSPLQVLRGCLLLPSLLHALSLQEQPMVWPLTRGPSSASDALSSGGPYHPSECCFTYTTYKIPRQRIMDYYETNSQCSKPGIVFITKRGHSVCTNPSDKWVQDYIKDMKEN

SEQ ID NO: 2128 - protein, 113 aa, Homo Sapiens
MKVSVAALSCLMLVAVLGSQAQFTNDAETELMMSKLPLENPVVLNSFHFAADCCTSYISQSIPCSLMKSYFETSSECSKPGVIFLTKKGRQVCAKPSGPGVQDCMKKLKPYSI

SEQ ID NO: 2129 - protein, 61 aa, Homo Sapiens
  misc_feature (1)..(1): Xaa can be any naturally occurring amino acid
XCTSYISQSIPCSLMKSYFETSSECSKPGVIFLTKKGRQVCAKPSGPGVQDCMKKLKPYSI

SEQ ID NO: 2130 - protein, 120 aa, Homo Sapiens
MKVSEAALSLLVLILIITSASRSQPKVPEWVNTPSTCCLKYYEKVLPRRLVVGYRKALNCHLPAIIFVTKRNREVCTNPNDDWVQEYIKDPNLPLLPTRNLSTVKIITAKNGQPQLLNSQ

SEQ ID NO: 2131 - protein, 53 aa, Homo Sapiens
MKVSEAALSLLVLILIITSASRSQPSWSAVSRSRLTTTSASRVQVILLPQPPE

SEQ ID NO: 2132 - protein, 95 aa, Homo Sapiens
  misc_feature (1)..(1): Xaa can be any naturally occurring amino acid
XVPEWVNTPSTCCLKYYEKVLPRRLVVGYRKALNCHLPAIIFVTKRNREVCTNPNDDWVQEYIKDPNLPLLPTRNLSTVKIITAKNGQPQLLNSQ

SEQ ID NO: 2133 - protein, 94 aa, Homo Sapiens
MAPLKMLALVTLLLGASLQHIHAARGTNVGRECCLEYFKGAIPLRKLKTWYQTSEDCSRDAIVFVTVQGRAICSDPNNKRVKNAVKYLQSLERS

SEQ ID NO: 2134 - protein, 94 aa, Homo Sapiens; identical to SEQ ID NO: 2133

SEQ ID NO: 2135 - protein, 89 aa, Homo Sapiens
MKGLAAALLVLVCTMALCSCAQVGTNKELCCLVYTSWQIPQKFIVDYSETSPQCPKPGVILLTKRGRQICADPNKKWVQKYISDLKLNA

SEQ ID NO: 2136 - protein, 104 aa, Homo Sapiens
MALLLALSLLVLWTSPAPTLSGTNDAEDCCLSVTQKPIPGYIVRNFHYLLIKDGCRVPAVVFTTLRGRQLCAPPDQPWVERIIQRLQRTSAKASLALPGPVSSL

SEQ ID NO: 2137 - protein, 98 aa, Homo Sapiens
MALLLALSLLVLWTSPAPTLSGTNDAEDCCLSVTQKPIPGYIVRNFHYLLIKDGCRVPAVVFTTLRGRQLCAPPDQPWVERIIQRLQRTSAKMKRRSS

SEQ ID NO: 2138 - protein, 99 aa, Homo Sapiens
MKVSAALLCLLLIAATFIPQGLAQPDAINAPVTCCYNFTNRKISVQRLASYRRITSSKCPKEAVIFKTIVAKEICADPKQKWVQDSMDHLDKQTQTPKT

SEQ ID NO: 2139 - protein, 65 aa, Homo Sapiens
MKVSAALLCLLLIAATFIPQGLAQPDAINAPVTCCYNFTNRKISVQRLASYRRITSSKCPKEAVM

SEQ ID NO: 2140 - protein, 25 aa, Homo Sapiens
MCCTKSLLLAALMSVLLLHLCGESE

SEQ ID NO: 2141 - protein, 96 aa, Homo Sapiens
MCCTKSLLLAALMSVLLLHLCGESEAASNFDCCLGYTDRILHPKFIVGFTRQLANEGCDINAIIFHTKKKLSVCANPKQTWVKYIVRLLSKKVKNM

SEQ ID NO: 2142 - protein, 95 aa, Homo Sapiens
MCCTKSLLLAALMSVLLLHLCGESEASNFDCCLGYTDRILHPKFIVGFTRQLANEGCDINAIIFHTKKKLSVCANPKQTWVKYIVRLLSKKVKNM

SEQ ID NO: 2143 - protein, 124 aa, Homo Sapiens
MAQSLALSLLILVLAFGIPRTQGSDGGAQDCCLKYSQRKIPAKVVRSYRKQEPSLGCSIPAILFLPRKRSQAELCADPKELWVQQLMQHLDKTPSPQKPAQGCRKDRGASKTGKKGKGSKGCKR

SEQ ID NO: 2144 - protein, 134 aa, Homo Sapiens
MAQSLALSLLILVLAFGIPRTQGSDGGAQDCCLKYSQRKIPAKVVRSYRKQEPSLGCSIPAILFLPRKRSQAELCADPKELWVQQLMQHLDKTPSPQKPAQGCRKDRGASKTGKKGKGSKGCKRTERSQTPKGP

SEQ ID NO: 2145 - protein, 93 aa, Homo Sapiens
MDRLQTALLVVLVLLAVALQATEAGPYGANMEDSVCCRDYVRYRLPLRVVKHFYWTSDSCPRPGVVLLTFRDKEICADPRVPWVKMILNKLSQ

SEQ ID NO: 2146 - protein, 13 aa, Homo Sapiens
FETNSECSKPGVM

SEQ ID NO: 2147 - protein, 137 aa, Homo Sapiens
MKVSVAALSCLMLVTALGSQARVTKDAETEFMMSKLPLENPVLLDMLWRRKIGPQMTLSHAAGFHATSADCCISYTPRSIPCSLLESYFETNSECSKPGVIFLTKKGRRFCANPSDKQVQVCMRMLKLDTRIKTRKN

SEQ ID NO: 2148 - protein, 120 aa, Homo Sapiens
MKVSVAALSCLMLVTALGSQARVTKDAETEFMMSKLPLENPVLLDRFHATSADCCISYTPRSIPCSLLESYFETNSECSKPGVIFLTKKGRRFCANPSDKQVQVCMRMLKLDTRIKTRKN

SEQ ID NO: 2149 - protein, 119 aa, Homo Sapiens
MAGLMTIVTSLLFLGVCAHHIIPTGSVVIPSPCCMFFVSKRIPENRVVSYQLSSRSTCLKAGVIFTTKKGQQFCGDPKQEWVQRYMKNLDAKQKKASPRARAVAVKGPVQRYPGNQTTC

SEQ ID NO: 2150 - protein, 119 aa, Homo Sapiens; identical to SEQ ID NO: 2149

SEQ ID NO: 2151 - protein, 150 aa, Homo Sapiens
MNLWLLACLVAGFLGAWAPAVHTQGVFEDCCLAYHYPIGWAVLRRAWTYRIQEVSGSCNLPAAIFYLPKRHRKVCGNPKSREVQRAMKLLDARNKVFAKLHHNTQTFQAGPHAVKKLSSGNSKLSSSKFSNPISSSKRNVSLLISANSGK

SEQ ID NO: 2152 - protein, 150 aa, Homo Sapiens
MNLWLLACLVAGFLGAWAPAVHTQGVFEDCCLAYHYPIGWAVLRRAWTYRIQEVSGSCNLPAAIFYLPKRHRKVCGNPKSREVQRAMKLLDARNKVFAKLHHNTQTFQAGPHAVKKLSSGNSKLSSSKFSNPISSSKRNVSLLISANSGL

SEQ ID NO: 2153 - protein, 149 aa, Homo Sapiens
MNLWLLACLVAGFLGAWAPAVHTQGVFEDCCLAYHYPIGWAVLRRAWTYRIQEVSGSCNLPAAIFYLPKRHRKVCGNPKSREVQRAMKLLDARNKVFAKLHHNTQTFQGPHAVKKLSSGNSKLSSSKFSNPISSSKRNVSLLISANSGL

SEQ ID NO: 2154 - protein, 84 aa, Homo Sapiens
MNLWLLACLVAGFLGAWAPAVHTQGVFEDCCLAYHYPIGWAVLRRAWTYRIQEVSGSCNLPAAIRPSCCKEVEFWKLQVIIVQV

SEQ ID NO: 2155 - protein, 94 aa, Homo Sapiens
MMGLSLASAVLLASLLSLHLGTATRGSDISKTCCFQYSHKPLPWTWVRSYEFTSNSCSQRAVIFTTKRGKKVCTHPRKKWVQKYISLLKTPKQL

SEQ ID NO: 2156 - protein, 94 aa, Homo Sapiens; identical to SEQ ID NO: 2155

SEQ ID NO: 2157 - protein, 112 aa, Homo Sapiens
MKGPPTFCSLLLLSLLLSPDPTAAFLLPPSTACCTQLYRKPLSDKLLRKVIQVELQEADGDCHLQAFVLHLAQRSICIHPQNPSLSQWFEHQERKLHGTLPKLNFGMLRKMG

SEQ ID NO: 2158 - protein, 80 aa, Homo Sapiens
MCRIQRADGDCDLAAVILHVKRRRICVSPHNHTVKQWMKVQAAKKNGKGNVCHRKKHHGKRNSNRAHQGKHETYGHKTPY

SEQ ID NO: 2159 - protein, 127 aa, Homo Sapiens
MQQRGLAIVALAVCAALHASEAILPIASSCCTEVSHHISRRLLERVNMCRIQRADGDCDLAAVILHVKRRRICVSPHNHTVKQWMKVQAAKKNGKGNVCHRKKHHGKRNSNRAHQGKHETYGHKTPY

SEQ ID NO: 2160 - protein, 127 aa, Homo Sapiens; identical to SEQ ID NO: 2159

SEQ ID NO: 2161 - protein, 92 aa, Homo Sapiens
MQVSTAALAVLLCTMALCNQFSASLAADTPTACCFSYTSRQIPQNFIADYFETSSQCSKPGVIFLTKRSRQVCADPSEEWVQKYVSDLELSA

SEQ ID NO: 2162 - protein, 93 aa, Homo Sapiens
MQVSTAALAVLLCTMALCNQVLSAPLAADTPTACCFSYTSRQIPQNFIADYFETSSQCSKPSVIFLTKRGRQVCADPSEEWVQKYVSDLELSA

SEQ ID NO: 2163 - protein, 92 aa, Homo Sapiens
MKLCVTVLSLLMLVAAFCSPALSAPMGSDPPTACCFSYTARKLPRNFVVDYYETSSLCSQPAVVFQTKRSKQVCADPSESWVQEYVYDLELN

SEQ ID NO: 2164 - protein, 52 aa, Homo Sapiens
MKLCVTVLSLLMLVAAFCSPALSAPNSKPKEASKSVLIPVNPGSRSTCMTWN

SEQ ID NO: 2165 - protein, 47 aa, Homo Sapiens
MKLCVTVLSLLVLVAAFCSLALSAPKASKSALTPVSPGSRSTCMTWN

SEQ ID NO: 2166 - protein, 64 aa, Homo Sapiens
MKLCVTVLSLLVLVAAFCSLALSAPMGSDPPTACCFSYTARKLPRNFVVDYYETSSLCSQPAVV

SEQ ID NO: 2167 - protein, 64 aa, Homo Sapiens; identical to SEQ ID NO: 2166

SEQ ID NO: 2168 - protein, 96 aa, Homo Sapiens
MKLCVTVLSLLVLVAAFCSLALSAPMGSDPPTACCFSYTARKLPRNFVVDYYETSSLCSQPAVVAAPGRIPSTRAAPHGPWSGRGRCLPQARDKAR

SEQ ID NO: 2169 - protein, 86 aa, Homo Sapiens
MKLCVTVLSLLVLVAAFCSLALSAPMGSDPPTACCFSYTARKLPRNFVVDYYETSSLCSQPAVVAAPHGPWSGRGRCLPQARDKAR

SEQ ID NO: 2170 - protein, 103 aa, Homo Sapiens
MKLCVTVLSLLVLVAAFCSLALSAPMGSDPPTACCFSYTARKLPRNFVVDYYETSSLCSQPAVVEWKLQGVCFQCCSGKDPIHQSCPTWTMVRQRKMPTTGKG

SEQ ID NO: 2171 - protein, 92 aa, Homo Sapiens
MKLCVTVLSLLVLVAAFCSLALSAPMGSDPPTACCFSYTARKLPRNFVVDYYETSSLCSQPAVVFQTKRGKQVCADPSESWVQEYVYDLELN

SEQ ID NO: 2172 - protein, 87 aa, Homo Sapiens
MKLCVTVLSLLVLVAAFCSLALSAPMGSDPPTACCFSYTARKLPRNFVVDYYETSSLCSQPAVVGKQVCADPSESWVQEYVYDLELN

SEQ ID NO: 2173 - protein, 103 aa, Homo Sapiens
MKLCVTVLSLLVLVAAFCSLALSAPMGSDPPTACCFSYTARKLPRNFVVDYYETSSLCSQPAVVYRESASSAAPGRIPSTRAAPHGPWSGRGRCLPQARDKAR

SEQ ID NO: 2174 - protein, 68 aa, Homo Sapiens
MKLCVTVLSLLVLVAAFCSLALSAPTKSSEWKLQGVCFQCCSGKDPIHQSCPTWTMVRQRKMPTTGKG

SEQ ID NO: 2175 - protein, 91 aa, Homo Sapiens
MKVSAAALAVILIATALCAPASASPYSSDTTPCCFAYIARPLPRAHIKEYFYTSGKCSNPAVVFVTRKNRQVCANPEKKWVREYINSLEMS

SEQ ID NO: 2176 - protein, 91 aa, Homo Sapiens; identical to SEQ ID NO: 2175

SEQ ID NO: 2177 - protein, 150 aa, Homo Sapiens
  misc_feature (1)..(1): Xaa can be any naturally occurring amino acid
XAALAVILIATALCAPASASPYSSDTTPCCFAYIARPLPRAHIKEYFYTSGKCSNPAVVHRSRMPKREGQQVWQDFLYDSRLNKGKLCHPKEPPSVCQPREEMGSGVHQLFGDELGWRVLEPELTQICLFLLALVLAWEASPHYPTPPAP

SEQ ID NO: 2178 - protein, 47 aa, Homo Sapiens
MKASAALLCLLLTAAAFSPQGLAQPASRPNWTRRSVLTPHRSGSRTL

SEQ ID NO: 2179 - protein, 81 aa, Homo Sapiens
MKASAALLCLLLTAAAFSPQGLAQPERPRTHPQWTFLLVVSLQLGLILQLPAATDLSIRKSLSRGWRATEGPPVATVPGKL

SEQ ID NO: 2180 - protein, 99 aa, Homo Sapiens
MKASAALLCLLLTAAAFSPQGLAQPVGINTSTTCCYRFINKKIPKQRLESYRRTTSSHCPREAVIFKTKLDKEICADPTQKWVQDFMKHLDKKTQTPKL

SEQ ID NO: 2181 - protein, 99 aa, Homo Sapiens
MKVSAALLCLLLMAATFSPQGLAQPDSVSIPITCCFNVINRKIPIQRLESYTRITNIQCPKEAVIFKTKRGKEVCADPKERWVRDSMKHLDQIFQNLKP

SEQ ID NO: 2182 - protein, 68 aa, Homo Sapiens [sequence omitted]

SEQ ID NO: 2183 - protein, 4 aa, Homo Sapiens
MSLC

SEQ ID NO: 2184 - protein, 154 aa, Homo Sapiens
MSLCEDMLLCNYRKCRIKLSGYAWVTACSHIFCDQHGSGEFSRSPAICPACNSTLSGKLDIVRTELSPSEEYKAMVLAGLRPEIVLDISSRALAFWTYQVHQERLYQEYNFSKAEGHLKQMEKIYTQQIQSKDVELTSMKGEVTSMKKVLEEYK

SEQ ID NO: 2185 - protein, 277 aa, Homo Sapiens
MSLCEDMLLCNYRKCRIKLSGYAWVTACSHIFCDQHGSGEFSRSPAICPACNSTLSGKLDIVRTELSPSEEYKAMVLAGLRPEIVLDISSRALAFWTYQVHQERLYQEYNFSKAEGHLKQMEKIYTQQIQSKDVELTSMKGEVTSMKKVLEEYKKKFSDISEKLMERNRQYQKLQGLYDSLRLRNITIANHEGTLEPSMIAQSGVLGFPLGNNSKFPLDNTPVRNRGDGDGDFQFRPFFAGSPTAPEPSNSFFSFVSPSRELEQQQVSSRAFKVKRI

SEQ ID NO: 2186 - protein, 277 aa, Homo Sapiens; identical to SEQ ID NO: 2185

SEQ ID NO: 2187 - protein, 277 aa, Homo Sapiens; identical to SEQ ID NO: 2185

SEQ ID NO: 2188 - protein, 277 aa, Homo Sapiens; identical to SEQ ID NO: 2185

SEQ ID NO: 2189 - protein, 277 aa, Homo Sapiens; identical to SEQ ID NO: 2185

SEQ ID NO: 2190 - protein, 277 aa, Homo Sapiens; identical to SEQ ID NO: 2185

SEQ ID NO: 2191 - protein, 102 aa, Homo Sapiens
MSLCEDMLLCNYRKCRIKLSGYAWVTACSHIFCDQHGSGEFSRSPAICPACNSTLSGKLDIVRTELSPSEEYKAMVLAGLRPEIVLDISSRALAFWTYQYFL

SEQ ID NO: 2192 - protein, 64 aa, Homo Sapiens
  misc_feature (1)..(1): Xaa can be any naturally occurring amino acid
XEFSRSPAICPACNSTLSGKLDIVRTELSPSEEYKAMVLAGLRPEIVLDISSRALAFWTYQYFL

SEQ ID NO: 2193 - protein, 31 aa, Homo Sapiens
  misc_feature (1)..(1): Xaa can be any naturally occurring amino acid
XTLAPERWPSGHIRLVSNSWVQAILPPQPPE

SEQ ID NO: 2194 - protein, 526 aa, Homo Sapiens
MASGPHSTATAAAAASSAAPSAGGSSSGTTTTTTTTTGGILIGDRLYSEVSLTIDHSLIPEERLSPTPSMQDGLDLPSETDLRILGCELIQAAGILLRLPQVAMATGQVLFHRFFYSKSFVKHSFEIVAMACINLASKIEEAPRRIRDVINVFHHLRQLRGKRTPSPLILDQNYINTKNQVIKAERRVLKELGFCVHVKHPHKIIVMYLQVLECERNQTLVQTAWNYMNDSLRTNVFVRFQPETIACACIYLAARALQIPLPTRPHWFLLFGTTEEEIQEICIETLRLYTRKKPNYELLEKEVEKRKVALQEAKLKAKGLNPDGTPALSTLGGFSPASKPSSPREVKAEEKSPISINVKTVKKEPEDRQQASKSPYNGVRKDSKRSRNSRSASRSRSRTRSRSRSHTPRRHYNNRRSRSGTYSSRSRSRSRSHSESPRRHHNHGSPHLKAKHTRDDLKSSNRHGHKRKKSRSRSQSKSRDHSDAAKKHRHERGHHRDRRERSRSFERSHKSKHHGGSRSGHGRHRR

SEQ ID NO: 2195 - protein, 428 aa, Homo Sapiens
MASGPHSTATAAAAASSAAPSAGGSSSGTTTTTTTTTGGILIGDRLYSEVSLTIDHSLIPEERLSPTPSMQDGLDLPSETDLRILGCELIQAAGILLRLPQVAMATGQVLFHRFFYSKSFVKHSFEIVAMACINLASKIEEAPRRIRDVINVFHHLRQLRGKRTPSPLILDQNYINTKNQVIKAERRVLKELGFCVHVKHPHKIIVMYLQVLECERNQTLVQTAWNYMNDSLRTNVFVRFQPETIACACIYLAARALQIPLPTRPHWFLLFGTTEEEIQEICIETLRLYTRKKPNYELLEKEVEKRKVALQEAKLKAKGLNPDGTPALSTLGGFSPASKPSSPREVKAEEKSPISINVKTVKKEPEDRQQASKSPYNGVRKDSKRSRNSRSASRSRSRTRSRSRSHTPRRQDEVLLRCPGRSRTPGLK

SEQ ID NO: 2196 - protein, 232 aa, Homo Sapiens
MASGPHSTATAAAAASSAAPSAGGSSSGTTTTTTTTTGGILIGDRLYSEVSLTIDHSLIPEERLSPTPSMQDGLDLPSETDLRILGCELIQAAGILLRLPQVAMATGQVLFHRFFYSKSFVKHSFEIVAMACINLASKIEEAPRRIRDVINVFHHLRQLRGKRTPSPLILDQNYINTKNQVIKAERRVLKELGFCVHVKHPHKIIVMYLQVLECERNQTLVQTAWVVHDGKS

SEQ ID NO: 2197 - protein, 172 aa, Homo Sapiens
MASGPHSTATAAAAASSAAPSAGGSSSGTTTTTTTTTGGILIGDRLYSEVSLTIDHSLIPEERLSPTPSMQDGLDLPSETDLRILGCELIQAAGILLRLPQVAMATGQVLFHRFFYSKSFVKHSFEIVAMACINLASKIEEAPRRIRDVINVFHHLRQLRGKSDQLHLPKPG

SEQ ID NO: 2198 - protein, 172 aa, Homo Sapiens; identical to SEQ ID NO: 2197

SEQ ID NO: 2199 - protein, 172 aa, Homo Sapiens; identical to SEQ ID NO: 2197

SEQ ID NO: 2200 - protein, 172 aa, Homo Sapiens; identical to SEQ ID NO: 2197

SEQ ID NO: 2201 - protein, 172 aa, Homo Sapiens; identical to SEQ ID NO: 2197

SEQ ID NO: 2202 - protein, 59 aa, Homo Sapiens
  misc_feature (1)..(1): Xaa can be any naturally occurring amino acid
XRKKPNYELLEKEVEKRKVALQEAKLKAKGLNPDGTPALSTLGGFSPASKPCKMYLELK

SEQ ID NO: 2203 - protein, 520 aa, Homo Sapiens
MAAAAAAAGAAGSAAPAAAAGAPGSGGAPSGSQGVLIGDRLYSGVLITLENCLLPDDKLRFTPSMSSGLDTDTETDLRVVGCELIQAAGILLRLPQVAMATGQVLFQRFFYTKSFVKHSMEHVSMACVHLASKIEEAPRRIRDVINVFHRLRQLRDKKKPVPLLLDQDYVNLKNQIIKAERRVLKELGFCVHVKHPHKIIVMYLQVLECERNQHLVQTSWNYMNDSLRTDVFVRFQPESIACACIYLAARTLEIPLPNRPHWFLLFGATEEEIQEICLKILQLYARKKVDLTHLEGEVEKRKHAIEEAKAQARGLLPGGTQVLDGTSGFSPAPKLVESPKEGKGSKPSPLSVKNTKRRLEGAKKAKADSPVNGLPKGRESRSRSRSREQSYSRSPSRSASPKRRKSDSGSTSGGSKSQSRSRSRSDSPPRQAPRSAPYKGSEIRGSRKSKDCKYPQKPHKSRSRSSSRSRSRSRERADNPGKYKKKSHYYRDQRRERSRSYERTGRRYERDHPGHSRHRR

SEQ ID NO: 2204 - protein, 236 aa, Homo Sapiens
MAAAAAAAGAAGSAAPAAAAGAPGSGGAPSGSQGVLIGDRLYSGVLITLENCLLPDDKLRFTPSMSSGLDTDTETDLRVVGCELIQAAGILLRLPQVAMATGQVLFQRFFYTKSFVKHSMEHVSMACVHLASKIEEAPRRIRDVINVFHRLRQLRDKKKPVPLLLDQDYVNLKNQIIKAERRVLKELGFCVHVKHPHKIIVMYLQVLECERNQHLVQTSWVASEDPLLKWDSWQRL

SEQ ID NO: 2205 - protein, 227 aa, Homo Sapiens
MAAAAAAAGAAGSAAPAAAAGAPGSGGAPSGSQGVLIGDRLYSGVLITLENCLLPDDKLRFTPSMSSGLDTDTETDLRVVGCELIQAAGILLRLPQVAMATGQVLFQRFFYTKSFVKHSMEHVSMACVHLASKIEEAPRRIRDVINVFHRLRQLRDKKKPVPLLLDQDYVNLKNQIIKAERRVLKELGFCVHVKHPHKIIVMYLQVLECERNQHLVQTSWVASEGIT

SEQ ID NO: 2206 - protein, 226 aa, Homo Sapiens
MAAAAAAAGAAGSAAPAAAAGAPGSGGAPSGSQGVLIGDRLYSGVLITLENCLLPDDKLRFTPSMSSGLDTDTETDLRVVGCELIQAAGILLRLPQVAMATGQVLFQRFFYTKSFVKHSMEHVSMACVHLASKIEEAPRRIRDVINVFHRLRQLRDKKKPVPLLLDQDYVNLKNQIIKAERRVLKELGFCVHVKHPHKIIVMYLQVLECERNQHLVQTSWVASEGK

SEQ ID NO: 2207 - protein, 180 aa, Homo Sapiens
MAAAAAAAGAAGSAAPAAAAGAPGSGGAPSGSQGVLIGDRLYSGVLITLENCLLPDDKLRFTPSMSSGLDTDTETDLRVVGCELIQAAGILLRLPQVRARPRASGPGGHGYRAGVVPAVLLYQVLREALHGACVNGLCPPGFQDRRGPKTHTGRHQCVSPPSTAERQKEARASTTGSRLC

SEQ ID NO: 2208 - protein, 86 aa, Homo Sapiens
MATGQVLFQRFFYTKSFVKHSMEHVSMACVHLASKIEEAPRRIRDVINVFHRLRQLRDKKKPVPLLLDQDYVNLKNQIIKAERRVL

SEQ ID NO: 2209 - protein, 347 aa, Homo Sapiens [sequence omitted]

SEQ ID NO: 2210 - protein, 46 aa, Homo Sapiens
  misc_feature (1)..(1): Xaa can be any naturally occurring amino acid
XEEAPRRIRDVINVFHRLRQLRDKKPCALSLAGSPCLYYWIKIMLI

SEQ ID NO: 2211 - protein, 55 aa, Homo Sapiens
MERASCLLLLLLPLVHVSATTPEPCELDDEDFRCVCNFSEPQPDWSEAFQCVSAV

SEQ ID NO: 2212 - protein, 81 aa, Homo Sapiens
MERASCLLLLLLPLVHVSATTPEPCELDDEDFRCVCNFSEPQPDWSEAFQCVSAVEVEIHAGGLNLEPFLKRVDADADPRQ

SEQ ID NO: 2213 - protein, 213 aa, Homo Sapiens
MERASCLLLLLLPLVHVSATTPEPCELDDEDFRCVCNFSEPQPDWSEAFQCVSAVEVEIHAGGLNLEPFLKRVDADADPRQYADTVKALRVRRLTVGAAQVPAQLLVGALRVLAYSRLKELTLEDLKITGTMPPLPLEATGLALSSLRLRNVSWATGRSWLAELQQWLKPGLKVLSIAQAHSPAFSCEQVRAFPALTSLDLSDNPGLGERGLM

SEQ ID NO: 2214 - protein, 375 aa, Homo Sapiens
MERASCLLLLLLPLVHVSATTPEPCELDDEDFRCVCNFSEPQPDWSEAFQCVSAVEVEIHAGGLNLEPFLKRVDADADPRQYADTVKALRVRRLTVGAAQVPAQLLVGALRVLAYSRLKELTLEDLKITGTMPPLPLEATGLALSSLRLRNVSWATGRSWLAELQQWLKPGLKVLSIAQAHSPAFSCEQVRAFPALTSLDLSDNPGLGERGLMAALCPHKFPAIQNLALRNTGMETPTGVCAALAAAGVQPHSLDLSHNSLRATVNPSAPRCMWSSALNSLNLSFAGLEQVPKGLPAKLRVLDLSCNRLNRAPQPDELPEVDNLTLDGNPFLVPGTALPHEGSMNSGVVPACARSTLSVGVSGTLVLLQGARGFA

SEQ ID NO: 2215 - protein, 375 aa, Homo Sapiens; identical to SEQ ID NO: 2214

SEQ ID NO: 2216 - protein, 72 aa, Homo Sapiens
MLLEPGRGCCALAILLAIVDIQSGETGNYTVTGLKQRQHLEFSHNEGTLSSGFLQEKVWVMLVTSLVALQAL

SEQ ID NO: 2217 - protein, 125 aa, Homo Sapiens
MLLEPGRGCCALAILLAIVDIQSGETGNYTVTGLKQRQHLEFSHNEGTLSSGFLQEKVWVMLVTSLVALQGMSKRAVSTPSNEGAIIFLPPWLFSRRRRLERMSRGREKCYSSPGYPQESSNQFH

SEQ ID NO: 2218 - protein, 181 aa, Homo Sapiens
MLLEPGRGCCALAILLAIVDIQSGGCINITSSASQEGTRLNLICTVWHKKEEAEGFVVFLCKDRSGDCSPETSLKQLRLKRDPGIDGVGEISSQLMFTISQVTPLHSGTYQCCARSQKSGIRLQGHFFSILFTETGNYTVTGLKQRQHLEFSHNEGTLSSGFLQEKVWVMLVTSLVALQAL

SEQ ID NO: 2219 - protein, 181 aa, Homo Sapiens; identical to SEQ ID NO: 2218

SEQ ID NO: 2220 - protein, 234 aa, Homo Sapiens
MLLEPGRGCCALAILLAIVDIQSGGCINITSSASQEGTRLNLICTVWHKKEEAEGFVVFLCKDRSGDCSPETSLKQLRLKRDPGIDGVGEISSQLMFTISQVTPLHSGTYQCCARSQKSGIRLQGHFFSILFTETGNYTVTGLKQRQHLEFSHNEGTLSSGFLQEKVWVMLVTSLVALQGMSKRAVSTPSNEGAIIFLPPWLFSRRRRLERMSRGREKCYSSPGYPQESSNQFH

SEQ ID NO: 2221 - protein, 163 aa, Homo Sapiens
MRKGRKVPMYVPGVLRTYPKAKLEETCEGRNSCVSCFNVSVVNTTCFWIECKDESYCSHNSTVSDCQVGNTTDFCSVSTATPVPTANSTAKPTVQPSPSTTSKTVTTSGTTNNTVTPTSQPVRKSTFDAASFIGGIVLVLGVQAVIFFLYKFCKSKERNYHTL

SEQ ID NO: 2222 - protein, 184 aa, Homo Sapiens
MSRLSRSLLWAATCLGVLCVLSADKNTTQHPNVTTLAPISNVTSAPVTSLPLVTTPAPETCEGRNSCVSCFNVSVVNTTCFWIECKDESYCSHNSTVSDCQVGNTTDFCSAKPTVQPSPSTTSKTVTTSGTTNNTVTPTSQPVRKSTFDAASFIGGIVLVLGVQAVIFFLYKFCKSKERNYHTL

SEQ ID NO: 2223 - protein, 157 aa, Homo Sapiens
MSRLSRSLLWAATCLGVLCVLSADKNTTQHPNVTTLAPISNVTSAPVTSLPLVTTPAPETCEGRNSCVSCFNVSVVNTTCFWIECKDESYCSHNSTVSDCQVGNTTDFCSVSTATPVPTANSTAKPTVQPSPSTTSKTVTTSEIRCHTRNYIPDLKK

SEQ ID NO: 2224 - protein, 189 aa, Homo Sapiens
MSRLSRSLLWAATCLGVLCVLSADKNTTQHPNVTTLAPISNVTSAPVTSLPLVTTPAPETCEGRNSCVSCFNVSVVNTTCFWIECKDESYCSHNSTVSDCQVGNTTDFCSVSTATPVPTANSTAKPTVQPSPSTTSKTVTTSGTTNNTVTPTSQPVRKSTFDAASFIGGIVLVLEIRCHTRNYIPDLKK

SEQ ID NO: 2225 - protein, 197 aa, Homo Sapiens
MSRLSRSLLWAATCLGVLCVLSADKNTTQHPNVTTLAPISNVTSAPVTSLPLVTTPAPETCEGRNSCVSCFNVSVVNTTCFWIECKDESYCSHNSTVSDCQVGNTTDFCSVSTATPVPTANSTAKPTVQPSPSTTSKTVTTSGTTNNTVTPTSQPVRKSTFDAASFIGGIVLVLGVQAVIFFLYKFCKSKERNYHTL

SEQ ID NO: 2226 - protein, 178 aa, Homo Sapiens
MSRLSRSLLWAATCLGVLCVLSADKNTTQHPNVTTLAPISNVTSAPVTSLPLVTTPAPETCEGRNSCVSCFNVSVVNTTCFWIECKDESYCSHNSTVSDCQVGNTTDFCSVSTATPVPTANSTGTTNNTVTPTSQPVRKSTFDAASFIGGIVLVLGVQAVIFFLYKFCKSKERNYHTL

SEQ ID NO: 2227 - protein, 437 aa, Homo Sapiens
MSAVLLLALLGFILPLPGVQALLCQFGTVQHVWKVSDLPRQWTPKNTSCDSGLGCQDTLMLIESGPQVSLVLSKGCTEAKDQEPRVTEHRMGPGLSLISYTFVCRQEDFCNNLVNSLPLWAPQPPADPGSLRCPVCLSMEGCLEGTTEEICPKGTTHCYDGLLRLRGGGIFSNLRVQGCMPQPVCNLLNGTQEIGPVGMTENCDMKDFLTCHRGTTIMTHGNLAQEPTDWTTSNTEMCEVGQVCQETLLLLDVGLTSTLVGTKGCSTVGAQNSQKTTIHSAPPGVLVASYTHFCSSDLCNSASSSSVLLNSLPPQAAPVPGDRQCPTCVQPLGTCSSGSPRMTCPRGATHCYDGYIHLSGGGLSTKMSIQGCVAQPSSFLLNHTRQIGIFSAREKRDVQPPASQHEGGGAEGLESLTWGVGLALAPALWWGVVCPSC

SEQ ID NO: 2228 - protein, 145 aa, Homo Sapiens
MSAVLLLALLGFILPLPGVQALLCQFGTVQHVWKVSDLPRQWTPKNTSCDSGLGCQDTLMLIESGPQVSLVLSKGCTEAKDQEPRVTEHRMGPGLSLISYTFVCRQEDFCNNLVNSLPLWAPQPPADPMMGAAEGPFGKAEQVDS

SEQ ID NO: 2229 - protein, 139 aa, Homo Sapiens
MSAVLLLALLGFILPLPGVQALLCQFGTVQHVWKVSDLPRQWTPKNTSCDSGLGCQDTLMLIESGPQVSLVLSKGCTEAKDQEPRVTEHRMGPGLSLISYTFVCRQEDFCNNLVNSLPLWAPQPPAGACGRVGRRGRGC

SEQ ID NO: 2230 - protein, 286 aa, Homo Sapiens
MLLLFLLFEGLCCPGENTAAPQALQSYHLAAEEQLSFRMLQTSSFANHSWAHSEGSGWLGDLQTHGWDTVLGTIRFLKPWSHGNFSKQELKNLQSLFQLYFHSFIQIVQASAGQFQLELKPEAWLSCGPSPGPGRLQLVCHVSGFYPKPVWVMWMRGEQEQRGTQRGDVLPNADETWYLRATLDVAAGEAAGLSCRVKHSSLGGHDLIIHWGGYSIFLILICLTVIVTLVILVVVDSRLKKQSPVFLMGANTQDTKNSRHQFCLAQVSWIKNRVLKKWKTRLNQLW

SEQ ID NO: 2231 - protein, 298 aa, Homo Sapiens
MLLLFLLFEGLCCPGENTAAPQALQSYHLAAEEQLSFRMLQTSSFANHSWAHSEGSGWLGDLQTHGWDTVLGTIRFLKPWSHGNFSKQELKNLQSLFQLYFHSFIQIVQASAGQFQLELKPEAWLSCGPSPGPGRLQLVCHVSGFYPKPVWVMWMRGEQEQRGTQRGDVLPNADETWYLRATLDVAAGEAAGLSCRVKHSSLGGHDLIIHWGGYSIFLILICLTVIVTLVILVVVDSRLKKQSSNKNILSPHTPSPVFLMGANTQDTKNSRHQFCLAQVSWIKNRVLKKWKTRLNQLW

SEQ ID NO: 2232 - protein, 231 aa, Homo Sapiens
MLLLFLLFEGLCCPGENTAAPQALQSYHLAAEEQLSFRMLQTSSFANHSWAHSEGSGWLGDLQTHGWDTVLGTIRFLKPWSHGNFSKQELKNLQSLFQLYFHSFIQIVQASAGQFQLELKPEAWLSCGPSPGPGRLQLVCHVSGFYPKPVWVMWMRGGYSIFLILICLTVIVTLVILVVVDSRLKKQSPVFLMGANTQDTKNSRHQFCLAQVSWIKNRVLKKWKTRLNQLW

SEQ ID NO: 2233 - protein, 290 aa, Homo Sapiens
MLLLFLLFEGLCCPGENTAAPQALQSYHLAAEEQLSFRMLQTSSFANHSWAHSEGSGWLGDLQTHGWDTVLGTIRFLKPWSHGNFSKQELKNLQSLFQLYFHSFIQIVQASAGQFQLEYPFEIQILAGCRMNAPQIFLNMAYQGSDFLSFQGISWEPSPGAGIRAQNICKVLNRYLDIKEILQSLLGHTCPRFLAGLMEAGESELKRKVKPEAWLSCGPSPGPGRLQLVCHVSGFYPKPVWVMWMRGEQEQRGTQRGDVLPNADETWWIFHLSHPDLFDCDSYPGHIGCS

SEQ ID NO: 2234 - protein, 388 aa, Homo Sapiens
MLLLFLLFEGLCCPGENTAAPQALQSYHLAAEEQLSFRMLQTSSFANHSWAHSEGSGWLGDLQTHGWDTVLGTIRFLKPWSHGNFSKQELKNLQSLFQLYFHSFIQIVQASAGQFQLEYPFEIQILAGCRMNAPQIFLNMAYQGSDFLSFQGISWEPSPGAGIRAQNICKVLNRYLDIKEILQSLLGHTCPRFLAGLMEAGESELKRKVKPEAWLSCGPSPGPGRLQLVCHVSGFYPKPVWVMWMRGEQEQRGTQRGDVLPNADETWYLRATLDVAAGEAAGLSCRVKHSSLGGHDLIIHWGGYSIFLILICLTVIVTLVILVVVDSRLKKQSSNKNILSPHTPSPVFLMGANTQDTKNSRHQFCLAQVSWIKNRVLKKWKTRLNQLW

SEQ ID NO: 2235 - protein, 376 aa, Homo Sapiens
MLLLFLLFEGLCCPGENTAAPQALQSYHLAAEEQLSFRMLQTSSFANHSWAHSEGSGWLGDLQTHGWDTVLGTIRFLKPWSHGNFSKQELKNLQSLFQLYFHSFIQIVQASAGQFQLEYPFEIQILAGCRMNAPQIFLNMAYQGSDFLSFQGISWEPSPGAGIRAQNICKVLNRYLDIKEILQSLLGHTCPRFLAGLMEAGESELKRKVKPEAWLSCGPSPGPGRLQLVCHVSGFYPKPVWVMWMRGEQEQRGTQRGDVLPNADETWYLRATLDVAAGEAAGLSCRVKHSSLGGHDLIIHWGGYSIFLILICLTVIVTLVILVVVDSRLKKQSPVFLMGANTQDTKNSRHQFCLAQVSWIKNRVLKKWKTRLNQLW

SEQ ID NO: 2236 - protein, 321 aa, Homo Sapiens
MLLLFLLFEGLCCPGENTAAPQALQSYHLAAEEQLSFRMLQTSSFANHSWAHSEGSGWLGDLQTHGWDTVLGTIRFLKPWSHGNFSKQELKNLQSLFQLYFHSFIQIVQASAGQFQLEYPFEIQILAGCRMNAPQIFLNMAYQGSDFLSFQGISWEPSPGAGIRAQNICKVLNRYLDIKEILQSLLGHTCPRFLAGLMEAGESELKRKVKPEAWLSCGPSPGPGRLQLVCHVSGFYPKPVWVMWMRGGYSIFLILICLTVIVTLVILVVVDSRLKKQSPVFLMGANTQDTKNSRHQFCLAQVSWIKNRVLKKWKTRLNQLW

SEQ ID NO: 2237 - protein, 289 aa, Homo Sapiens
MLLLFLLFEGLCCPGENTADPFEIQILAGCRMNAPQIFLNMAYQGSDFLSFQGISWEPSPGAGIRAQNICKVLNRYLDIKEILQSLLGHTCPRFLAGLMEAGESELKRKVKPEAWLSCGPSPGPGRLQLVCHVSGFYPKPVWVMWMRGEQEQRGTQRGDVLPNADETWYLRATLDVAAGEAAGLSCRVKHSSLGGHDLIIHWGGYSIFLILICLTVIVTLVILVVVDSRLKKQSSNKNILSPHTPSPVFLMGANTQDTKNSRHQFCLAQVSWIKNRVLKKWKTRLNQLW

SEQ ID NO: 2238 - protein, 101 aa, Homo Sapiens
MLLLFLLFEGLCCPGENTAVKPEAWLSCGPSPGPGRLQLVCHVSGFYPKPVWVMWMRGEQEQRGTQRGDVLPNADETWWIFHLSHPDLFDCDSYPGHIGCS

SEQ ID NO: 2239 - protein, 187 aa, Homo Sapiens
MLLLFLLFEGLCCPGENTAVKPEAWLSCGPSPGPGRLQLVCHVSGFYPKPVWVMWMRGEQEQRGTQRGDVLPNADETWYLRATLDVAAGEAAGLSCRVKHSSLGGHDLIIHWGGYSIFLILICLTVIVTLVILVVVDSRLKKQSPVFLMGANTQDTKNSRHQFCLAQVSWIKNRVLKKWKTRLNQLW

SEQ ID NO: 2240 - protein, 199 aa, Homo Sapiens
MLLLFLLFEGLCCPGENTAVKPEAWLSCGPSPGPGRLQLVCHVSGFYPKPVWVMWMRGEQEQRGTQRGDVLPNADETWYLRATLDVAAGEAAGLSCRVKHSSLGGHDLIIHWGGYSIFLILICLTVIVTLVILVVVDSRLKKQSSNKNILSPHTPSPVFLMGANTQDTKNSRHQFCLAQVSWIKNRVLKKWKTRLNQLW

SEQ ID NO: 2241 - protein, 132 aa, Homo Sapiens
MLLLFLLFEGLCCPGENTAVKPEAWLSCGPSPGPGRLQLVCHVSGFYPKPVWVMWMRGGYSIFLILICLTVIVTLVILVVVDSRLKKQSPVFLMGANTQDTKNSRHQFCLAQVSWIKNRVLKKWKTRLNQLW

SEQ ID NO: 2242 - protein, 144 aa, Homo Sapiens
MLLLFLLFEGLCCPGENTAVKPEAWLSCGPSPGPGRLQLVCHVSGFYPKPVWVMWMRGGYSIFLILICLTVIVTLVILVVVDSRLKKQSSNKNILSPHTPSPVFLMGANTQDTKNSRHQFCLAQVSWIKNRVLKKWKTRLNQLW

SEQ ID NO: 2243 - protein, 60 aa, Homo Sapiens
  misc_feature (1)..(1): Xaa can be any naturally occurring amino acid
XVSGFYPKPVWVMWMRGEQEQRGTQRGDVLPNADETWWIFHLSHPDLFDCDSYPGHIGCS

SEQ ID NO: 2244 - protein, 351 aa, Homo Sapiens
MSFPCKFVASFLLIFNVSSKGAVSKEITNALETWGALGQDINLDIPSFQMSDDIDDIKWEKTSDKKKIAQFRKEKETFKEKDTYKLFKNGTLKIKHLKTDDQDIYKVSIYDTKGKNVLEKIFDLKIQERVSKPKISWTCINTTLTCEVMNGTDPELNLYQDGKHLKLSQRVITHKWTTSLSAKFKCTAGNKVSKESSVEPVSCPEKGLDIYLIIGICGGGSLLMVFVALLVFYITKRKKQRSRRNDEELETRAHRVATEERGRKPHQIPASTPQNPATSQHPPPPPGHRSQAPSHRPPPPGHRVQHQPQKRPPAPSGTQVHQQKGPPLPRPRVQPKPPHGAAENSLSPSSN

SEQ ID NO: 2245 - protein, 133 aa, Homo Sapiens
MSFPCKFVASFLLIFNVSSKGAVSKEITNALETWGALGQDINLDIPSFQMSDDIDDIKWEKTSDKKKIAQFRKEKETFKEKDTYKLFKNGTLKIKHLKTDDQDIYKVSIYDTKGKNVLEKIFDLKIQGKCSFP

SEQ ID NO: 2246 - protein, 294 aa, Homo Sapiens
MERLTLTRTIGGPLLTATLLGKTTINDYQVIRMPFSHLSTYSLVWVMAAVVLCTAQVQVVTQDEREQLYTPASLKCSLQNAQEALIVTWQKKKAVSPENMVTFSENHGVVIQPAYKDKINITQLGLQNSTITFWNITLEDEGCYMCLFNTFGFGKISGTACLTVYVQPIVSLHYKFSEDHLNITCSATARPAPMVFWKVPRSGIENSTVTLSHPNGTTSVTSILHIKDPKNQVGKEVICQVLHLGTVTDFKQTVNKGYWFSVPLLLSIVSLVILLVLISILLYWKRHRNQDREP

SEQ ID NO: 2247 - protein, 150 aa, Homo Sapiens
MERLVIRMPFSHLSTYSLVWVMAAVVLCTAQVQVVTQDEREQLYTPASLKCSLQNAQEALIVTWQKKKAVSPENMVTFSENHGVVIQPAYKDKINITQLGLQNSTITFWNITLEDEGCYMCLFNTFGFGKISGTACLTVYAHSIPSLQIL

SEQ ID NO: 2248 - protein, 269 aa, Homo Sapiens
MERLVIRMPFSHLSTYSLVWVMAAVVLCTAQVQVVTQDEREQLYTPASLKCSLQNAQEALIVTWQKKKAVSPENMVTFSENHGVVIQPAYKDKINITQLGLQNSTITFWNITLEDEGCYMCLFNTFGFGKISGTACLTVYVQPIVSLHYKFSEDHLNITCSATARPAPMVFWKVPRSGIENSTVTLSHPNGTTSVTSILHIKDPKNQVGKEVICQVLHLGTVTDFKQTVNKGYWFSVPLLLSIVSLVILLVLISILLYWKRHRNQDREP

SEQ ID NO: 2249 - protein, 202 aa, Homo Sapiens
MKVQVVTQDEREQLYTPASLKCSLQNAQEALIVTWQKKKAVSPENMVTFSENHGVVIQPAYKDKINITQLGLQNSTITFWNITLEDEGCYMCLFNTFGFGKISGTACLTVYVQPIVSLHYKFSEDHLNITCSATARPAPMVFWKVPRSGIENSTVTLSHPNGTTSVTSILHIKDPKNQVGKEVICQVLHLGTVTDFKQTVNK

SEQ ID NO: 2250 - protein, 62 aa, Homo Sapiens
MPFSHLSTYSLVWVMAAVVLCTAQVQVVTQDEREQLYTPASLKCSLQNAQEALIVTWQKKKA

SEQ ID NO: 2251 - protein, 76 aa, Homo Sapiens
MVTFSENHGVVIQPAYKDKINITQLGLQNSTITFWNITLEDEGCYMCLFNTFGFGKISGTACLTVYAHSIPSLQIL

SEQ ID NO: 2252 - protein, 195 aa, Homo Sapiens
MVTFSENHGVVIQPAYKDKINITQLGLQNSTITFWNITLEDEGCYMCLFNTFGFGKISGTACLTVYVQPIVSLHYKFSEDHLNITCSATARPAPMVFWKVPRSGIENSTVTLSHPNGTTSVTSILHIKDPKNQVGKEVICQVLHLGTVTDFKQTVNKGYWFSVPLLLSIVSLVILLVLISILLYWKRHRNQDREP

SEQ ID NO: 2253 - protein, 165 aa, Homo Sapiens
MLCPWRTANLGLLLILTIFLVAASSSLCMDEKQITQNYSKVLAEVNTSWPVKMATNAVLCCPPIALRNLIIITWEIILRGQPSCTKAYKKETNETKETNCTDERITWVSRPDQNSDLQIRTVAITHDGYYRCIMVTPDGNFHRGYHLQVLGKEHHILRYFTSPDL

SEQ ID NO: 2254 - protein, 325 aa, Homo Sapiens
MLCPWRTANLGLLLILTIFLVAASSSLCMDEKQITQNYSKVLAEVNTSWPVKMATNAVLCCPPIALRNLIIITWEIILRGQPSCTKAYKKETNETKETNCTDERITWVSRPDQNSDLQIRTVAITHDGYYRCIMVTPDGNFHRGYHLQVLVTPEVTLFQNRNRTAVCKAVAGKPAAHISWIPEGDCATKQEYWSNGTVTVKSTCHWEVHNVSTVTCHVSHLTGNKSLYIELLPVPGAKKSAKLYIPYIILTIIILTIVGFIWLLKVNGCRKYKLNKTESTPVVEEDEMQPYASYTEKNNPLYDTTNKVKASEALQSEVDTDLHTL

SEQ ID NO: 2255 - protein, 188 aa, Homo Sapiens
MLCPWRTANLGLLLILTIFLVAEAEGAAQPNNSLMLQTSKENHALASSSLCMDEKQITQNYSKVLAEVNTSWPVKMATNAVLCCPPIALRNLIIITWEIILRGQPSCTKAYKKETNETKETNCTDERITWVSRPDQNSDLQIRTVAITHDGYYRCIMVTPDGNFHRGYHLQVLGKEHHILRYFTSPDL

SEQ ID NO: 2256 - protein, 348 aa, Homo Sapiens
MLCPWRTANLGLLLILTIFLVAEAEGAAQPNNSLMLQTSKENHALASSSLCMDEKQITQNYSKVLAEVNTSWPVKMATNAVLCCPPIALRNLIIITWEIILRGQPSCTKAYKKETNETKETNCTDERITWVSRPDQNSDLQIRTVAITHDGYYRCIMVTPDGNFHRGYHLQVLVTPEVTLFQNRNRTAVCKAVAGKPAAHISWIPEGDCATKQEYWSNGTVTVKSTCHWEVHNVSTVTCHVSHLTGNKSLYIELLPVPGAKKSAKLYIPYIILTIIILTIVGFIWLLKVNGCRKYKLNKTESTPVVEEDEMQPYASYTEKNNPLYDTTNKVKASEALQSEVDTDLHTL

SEQ ID NO: 2257 - protein, 212 aa, Homo Sapiens
MLCPWRTANLGLLLILTIFLVAVNTSWPVKMATNAVLCCPPIALRNLIIITWEIILRGQPSCTKAYKKETNETKETNCTDERITWVSRPDQNSDLQIRTVAITHDGYYRCIMVTPDGNFHRGYHLQVLVTPEVTLFQNRNRTAVCKAVAGKPAAHISWIPEGDCATKQEYWSNGTVTVKSTCHWEVHNVSTVTCHVSHLTGNKSLYIELLPG

SEQ ID NO: 2258 - protein, 153 aa, Homo Sapiens
HIQLPPEIQESQEVTLTCLLNFSCYGYPIQLQWLLEGVPMRQAAVTSTSLTIKSVFTRSELKFSPQWSHHGKIVTCQLQDADGKFLSNDTVQLNVKRESPRHACGKGKVCVTFSPAPQGACTQGRGKPAQTAASSSPGHAALSALVFREKDLL

SEQ ID NO: 2259 - protein, 159 aa, Homo Sapiens [sequence omitted]

SEQ ID NO: 2260 - protein, 138 aa, Homo Sapiens
MHLLGPWLLLLEYLAFSDSSKWVFEHPETLYAWEGACVWIPCTYRALDGDLESFILFHNPEYNKNTSKFDGTRLYESTKDGKVPSEQKRVQFLGDKNKNCTLSIHPVHLNDSGQLGLRMESKTEKWMERIHLNVSERP

SEQ ID NO: 2261 - protein, 145 aa, Homo Sapiens
MHLLGPWLLLLEYLAFSDSSKWVFEHPETLYAWEGACVWIPCTYRALDGDLESFILFHNPEYNKNTSKFDGTRLYESTKDGKVPSEQKRVQFLGDKNKNCTLSIHPVHLNDSGQLGLRMESKTEKWMERIHLNVSERPFPPHIQL

SEQ ID NO: 2262 - protein, 191 aa, Homo Sapiens
MHLLGPWLLLLEYLAFSDSSKWVFEHPETLYAWEGACVWIPCTYRALDGDLESFILFHNPEYNKNTSKFDGTRLYESTKDGKVPSEQKRVQFLGDKNKNCTLSIHPVHLNDSGQLGLRMESKTEKWMERIHLNVSVAPRGGSNEAGCCHLDLLDHQVCLHPERAQVLPTVESPWEDCDLPASGCRWEVPLQ

SEQ ID NO: 2263 - protein, 106 aa, Homo Sapiens
MHLLGPWLLLLVLEYLAFSDSSKWVFEHPETLYAWEGACVWIPCTYRALDGDLESFILFHNPEYNKNTSKFDGTRLYESTKDGKVPSEQKRVQFLGDKNKNCTLSI

SEQ ID NO: 2264 - protein, 133 aa, Homo Sapiens
MHLLGPWLLLLVLEYLAFSDSSKWVFEHPETLYAWEGACVWIPCTYRALDGDLESFILFHNPEYNKNTSKFDGTRLYESTKDGKVPSEQKRVQFLGDKNKNCTLSIHPVHLNDSGQLGLRMESKTEKWMERIH

SEQ ID NO: 2265 - protein, 164 aa, Homo Sapiens
MHLLGPWLLLLVLEYLAFSDSSKWVFEHPETLYAWEGACVWIPCTYRALDGDLESFILFHNPEYNKNTSKFDGTRLYESTKDGKVPSEQKRVQFLGDKNKNCTLSIHPVHLNDSGQLGLRMESKTEKWMERIHLNVSDPPKKVTTVIQNPMPIREGDTVTLSCN

SEQ ID NO: 2266 - protein, 226 aa, Homo Sapiens
MHLLGPWLLLLVLEYLAFSDSSKWVFEHPETLYAWEGACVWIPCTYRALDGDLESFILFHNPEYNKNTSKFDGTRLYESTKDGKVPSEQKRVQFLGDKNKNCTLSIHPVHLNDSGQLGLRMESKTEKWMERIHLNVSERPFPPHIQLPPEIQESQEVTLTCLLNFSCYGYPIQLQWLLEGVPMRQAAVTSTSLTIKSVFTRSELKFSPQWSHHGKIVTCQLQDADG

SEQ ID NO: 2267 - protein, 670 aa, Homo Sapiens
MHLLGPWLLLLVLEYLAFSDSSKWVFEHPETLYAWEGACVWIPCTYRALDGDLESFILFHNPEYNKNTSKFDGTRLYESTKDGKVPSEQKRVQFLGDKNKNCTLSIHPVHLNDSGQLGLRMESKTEKWMERIHLNVSERPFPPHIQLPPEIQESQEVTLTCLLNFSCYGYPIQLQWLLEGVPMRQAAVTSTSLTIKSVFTRSELKFSPQWSHHGKIVTCQLQDADGKFLSNDTVQLNVKHPPKKVTTVIQNPMPIREGDTVTLSCNYNSSNPSVTRYEWKPHGAWEEPSLGVLKIQNVGWDNTTIACAACNSWCSWASPVALNVQYAPRDVRVRKIKPLSEIHSGNSVSLQCDFSSSHPKEVQFFWEKNGRLLGKESQLNFDSISPEDAGSYSCWVNNSIGQTASKAWTLEVLYAPRRLRVSMSPGDQVMEGKSATLTCESDANPPVSHYTWFDWNNQSLPYHSQKLRLEPVKVQHSGAYWCQGTNSVGKGRSPLSTLTVYYSPETIGRRVAVGLGSCLAILILAICGLKLQRRWKRTQSQQGLQENSSGQSFFVRNKKVRRAPLSEGPHSLGCYNPMMEDGISYTTLRFPEMNIPRTGDAESSEMQRPPPDCDDTVTYSALHKRQVGDYENVIPDFPEDEGIHYSELIQFGVGERPQAQENVDYVILKH

SEQ ID NO: 2268 - protein, 670 aa, Homo Sapiens; identical to SEQ ID NO: 2267

SEQ ID NO: 2269 - protein, 847 aa, Homo Sapiens
MHLLGPWLLLLVLEYLAFSDSSKWVFEHPETLYAWEGACVWIPCTYRALDGDLESFILFHNPEYNKNTSKFDGTRLYESTKDGKVPSEQKRVQFLGDKNKNCTLSIHPVHLNDSGQLGLRMESKTEKWMERIHLNVSERPFPPHIQLPPEIQESQEVTLTCLLNFSCYGYPIQLQWLLEGVPMRQAAVTSTSLTIKSVFTRSELKFSPQWSHHGKIVTCQLQDADGKFLSNDTVQLNVKHTPKLEIKVTPSDAIVREGDSVTMTCEVSSSNPEYTTVSWLKDGTSLKKQNTFTLNLREVTKDQSGKYCCQVSNDVGPGRSEEVFLQVQYAPEPSTVQILHSPAVEGSQVEFLCMSLANPLPTNYTWYHNGKEMQGRTEEKVHIPKILPWHAGTYSCVAENILGTGQRGPGAELDVQYPPKKVTTVIQNPMPIREGDTVTLSCNYNSSNPSVTRYEWKPHGAWEEPSLGVLKIQNVGWDNTTIACAACNSWCSWASPVALNVQYAPRDVRVRKIKPLSEIHSGNSVSLQCDFSSSHPKEVQFFWEKNGRLLGKESQLNFDSISPEDAGSYSCWVNNSIGQTASKAWTLEVLYAPRRLRVSMSPGDQVMEGKSATLTCESDANPPVSHYTWFDWNNQSLPYHSQKLRLEPVKVQHSGAYWCQGTNSVGKGRSPLSTLTVYYSPETIGRRVAVGLGSCLAILILAICGLKLQRRWKRTQSQQGLQENSSGQSFFVRNKKVRRAPLSEGPHSLGCYNPMMEDGISYTTLRFPEMNIPRTGDAESSEMQRPPPDCDDTVTYSALHKRQVGDYENVIPDFPEDEGIHYSELIQFGVGERPQAQENVDYVILKH

SEQ ID NO: 2270 - protein, 759 aa, Homo Sapiens
MHLLGPWLLLLVLEYLAFSDSSKWVFEHPETLYAWEGACVWIPCTYRALDGDLESFILFHNPEYNKNTSKFDGTRLYESTKDGKVPSEQKRVQFLGDKNKNCTLSIHPVHLNDSGQLGLRMESKTEKWMERIHLNVSERPFPPHIQLPPEIQESQEVTLTCLLNFSCYGYPIQLQWLLEGVPMRQAAVTSTSLTIKSVFTRSELKFSPQWSHHGKIVTCQLQDADGKFLSNDTVQLNVKHTPKLEIKVTPSDAIVREGDSVTMTCEVSSSNPEYTTVSWLKDGTSLKKQNTFTLNLREVTKDQSGKYCCQVSNDVGPGRSEEVFLQVQYPPKKVTTVIQNPMPIREGDTVTLSCNYNSSNPSVTRYEWKPHGAWEEPSLGVLKIQNVGWDNTTIACAACNSWCSWASPVALNVQYAPRDVRVRKIKPLSEIHSGNSVSLQCDFSSSHPKEVQFFWEKNGRLLGKESQLNFDSISPEDAGSYSCWVNNSIGQTASKAWTLEVLYAPRRLRVSMSPGDQVMEGKSATLTCESDANPPVSHYTWFDWNNQSLPYHSQKLRLEPVKVQHSGAYWCQGTNSVGKGRSPLSTLTVYYSPETIGRRVAVGLGSCLAILILAICGLKLQRRWKRTQSQQGLQENSSGQSFFVRNKKVRRAPLSEGPHSLGCYNPMMEDGISYTTLRFPEMNIPRTGDAESSEMQRPPPDCDDTVTYSALHKRQVGDYENVIPDFPEDEGIHYSELIQFGVGERPQAQENVDYVILKH

SEQ ID NO: 2271 - protein, 751 aa, Homo Sapiens
MHLLGPWLLLLVLEYLAFSDSSKWVFEHPETLYAWEGACVWIPCTYRALDGDLESFILFHNPEYNKNTSKFDGTRLYESTKDGKVPSEQKRVQFLGDKNKNCTLSIHPVHLNDSGQLGLRMESKTEKWMERIHLNVSERPFPPHIQLPPEIQESQEVTLTCLLNFSCYGYPIQLQWLLEGVPMRQAAVTSTSLTIKSVFTRSELKFSPQWSHHGKIVTCQLQDADGKFLSNDTVQLNVKHTPKLEIKVTPSDAIVREGDSVTMTCEVSSSNPEYTTVSWLKDGTSLKKQNTFTLNLREVTKDQSGKYCCQVSNDVGPGRSEEVFLQVQYAPEPSTVQILHSPAVEGSQVEFLCMSLANPLPTNYTWYHNGKEMQGRTEEKVHIPKILPWHAGTYSCVAENILGTGQRGPGAELDVQYPPKKVTTVIQNPMPIREGDTVTLSCNYNSSNPSVTRYEWKPHGAWEEPSLGVLKIQNVGWDNTTIACAACNSWCSWASPVALNVQYAPRDVRVRKIKPLSEIHSGNSVSLQCDFSSSHPKEVQFFWEKNGRLLGKESQLNFDSISPEDAGSYSCWVNNSIGQTASKAWTLEVLYAPRRLRVSMSPGDQVMEGKSATLTCESDANPPVSHYTWFDWNNQSLPYHSQKLRLEPVKVQHSGAYWCQGTNSVGKGRSPLSTLTVYYSPETIGRRVAVGLGSCLAILILAICGLKLQRRWKRTQSQQGLQENSSGQSFFVRNKKRCRVLRDAETSPGLR

SEQ ID NO: 2272 - protein, 38 aa, Homo Sapiens
MHLLGPWLLLLVNGFLSTLKPSTPGRGPASGSPAPTEP

SEQ ID NO: 2273 - protein, 675 aa, Homo Sapiens
MSLWLLEGVPMRQAAVTSTSLTIKSVFTRSELKFSPQWSHHGKIVTCQLQDADGKFLSNDTVQLNVKHTPKLEIKVTPSDAIVREGDSVTMTCEVSSSNPEYTTVSWLKDGTSLKKQNTFTLNLREVTKDQSGKYCCQVSNDVGPGRSEEVFLQVQYAPEPSTVQILHSPAVEGSQVEFLCMSLANPLPTNYTWYHNGKEMQGRTEEKVHIPKILPWHAGTYSCVAENILGTGQRGPGAELDVQYPPKKVTTVIQNPMPIREGDTVTLSCNYNSSNPSVTRYEWKPHGAWEEPSLGVLKIQNVGWDNTTIACAACNSWCSWASPVALNVQYAPRDVRVRKIKPLSEIHSGNSVSLQCDFSSSHPKEVQFFWEKNGRLLGKESQLNFDSISPEDAGSYSCWVNNSIGQTASKAWTLEVLYAPRRLRVSMSPGDQVMEGKSATLTCESDANPPVSHYTWFDWNNQSLPYHSQKLRLEPVKVQHSGAYWCQGTNSVGKGRSPLSTLTVYYSPETIGRRVAVGLGSCLAILILAICGLKLQRRWKRTQSQQGLQENSSGQSFFVRNKKVRRAPLSEGPHSLGCYNPMMEDGISYTTLRFPEMNIPRTGDAESSEMQRPPPDCDDTVTYSALHKRQVGDYENVIPDFPEDEGIHYSELIQFGVGERPQAQENVDYVILKH

SEQ ID NO: 2274 - protein, 145 aa, Homo Sapiens
NPLPTNYTWYHNGKEMQGRTEEKVHIPKILPWHAGTYSCVAENILGTGQRGPGAELDVQYPPKKVTTVIQNPMPIREGDTVTLSCNYNSSNPSVTRYEWKPHGAWEEPSLGVLKIQNVGWDNTTIACAACNSWCSWASPVALNVQ

SEQ ID NO: 2275 - protein, 148 aa, Homo Sapiens
VLEYLAFSDSSKWVFEHPETLYAWEGACVWIPCTYRALDGDLESFILFHNPEYNKNTSKFDGTRLYESTKDGKVPSEQKRVQFLGDKNKNCTLSIHPVHLNDSGQLGLRMESKTEKWMERIHLNVSVESPWEDCDLPASGCRWEVPLQ

SEQ ID NO: 2276 - protein, 37 aa, Homo Sapiens
IVIPDVTVSDSGLYRCYLQASAGENETFVMRLTVAEG

SEQ ID NO: 2277 - protein, 127 aa, Homo Sapiens
MDYPTLLLALLHVYRALCEEVLWHTSVPFAENMSLECVYPSMGILTQVEWFKIGTQQDSIAIFSPTHGMVIRKPYAERVYFLNSTMASNNMTLFFRNASEDDVGYYSCSLYTYPQGTWQKVIQVVQS

SEQ ID NO: 2278 - protein, 132 aa, Homo Sapiens
MDYPTLLLALLHVYRALCEEVLWHTSVPFAENMSLECVYPSMGILTQVEWFKIGTQQDSIAIFSPTHGMVIRKPYAERVYFLNSTMASNNMTLFFRNASEDDVGYYSCSLYTYPQGTWQKVIQVVQSDSFEA

SEQ ID NO: 2279 - protein, 336 aa, Homo Sapiens
MDYPTLLLALLHVYRALCEEVLWHTSVPFAENMSLECVYPSMGILTQVEWFKIGTQQDSIAIFSPTHGMVIRKPYAERVYFLNSTMASNNMTLFFRNASEDDVGYYSCSLYTYPQGTWQKVIQVVQSDSFEAAVPSNSHIVSEPGKNVTLTCQPQMTWPVQAVRWEKIQPRQIDLLTYCNLVHGRNFTSKFPRQIVSNCSHGRWSVIVIPDVTVSDSGLYRCYLQASAGENETFVMRLTVAEGKTDNQYTLFVAGGTVLLLLFVISITTIIVIFLNRRRRRERRDLFTESWDTQKAPNNYRSPISTSQPTNQSMDDTREDIYVNYPTFSRRPKTRV

SEQ ID NO: 2280 - protein, 276 aa, Homo Sapiens
MDYPTLLLALLHVYRALCEEVLWHTSVPFAENMSLECVYPSMGILTQVEWFKIGTQQDSIAIFSPTHGMVIRKPYAERVYFLNSTMASNNMTLFFRNASEDDVGYYSCSLYTYPQGTWQKVIQVVQSDSFEAAVPSNSHIVSEPGKNVTLTCQPQMTWPVQAVRWEKIQPRQIDLLTYCNLVHGRNFTSKFPRQIVSNCSHGRWSVIVIPDVTVSDSGLYRCYLQASAGENETFVMRLTVAEGKTDNQYTLFVAGGTVLLLLFVISITTIIVIFLN

SEQ ID NO: 2281 - protein, 336 aa, Homo Sapiens; identical to SEQ ID NO: 2279

SEQ ID NO: 2282 - protein, 181 aa, Homo Sapiens
MTWPVQAVRWEKIQPRQIDLLTYCNLVHGRNFTSKFPRQIVSNCSHGRWSVIVIPDVTVSDSGLYRCYLQASAGENETFVMRLTVAEGKTDNQYTLFVAGGTVLLLLFVISITTIIVIFLNRRRRRERRDLFTESWDTQKAPNNYRSPISTSQPTNQSMDDTREDIYVNYPTFSRRPKTRV

SEQ ID NO: 2283 - protein, 181 aa, Homo Sapiens; identical to SEQ ID NO: 2282

SEQ ID NO: 2284 - protein, 80 aa, Homo Sapiens
MGRAMVARLGLGLLLLALLLPTQIYSSETTTGTSSNSSQSTSNSGLAPNPTNATTKAAGGALQSTASLFVVSLSLLHLYS

SEQ ID NO: 2285 - protein, 80 aa, Homo Sapiens; identical to SEQ ID NO: 2284

SEQ ID NO: 2286 - protein, 80 aa, Homo Sapiens; identical to SEQ ID NO: 2284

SEQ ID NO: 2287 - protein, 37 aa, Homo Sapiens
MGRAMVARLGLGLLLLALLLPTQKMLRIPNLIDLKNM

SEQ ID NO: 2288 - protein, 129 aa, Homo Sapiens
MVGRFCPESPPGFVRVAATSAVSLDPPSGEPRPGCGYPGPRSAASRVYGCTAPARETGGWAWETLAGAGAKKIYSSETTTGTSSNSSQSTSNSGLAPNPTNATTKAAGGALQSTASLFVVSLSLLHLYS

SEQ ID NO: 2289 - protein, 88 aa, Homo Sapiens
  misc_feature (1)..(1): Xaa can be any naturally occurring amino acid
XDRSGPGHRLRGAPTSREGFALGGARVPSARIYSSETTTGTSSNSSQSTSNSGLAPNPTNATTKAAGGALQSTASLFVVSLSLLHLYS

SEQ ID NO: 2290 - protein, 122 aa, Homo Sapiens
  misc_feature (1)..(1): Xaa can be any naturally occurring amino acid
XLSSAAGREITLPEGSRRPPPTRSHWNSQPLSGPRGAFCSLSGNALAPGQAATPPQRRRGLFFWGIYSSETTTGTSSNSSQSTSNSGLAPNPTNATTKAAGGALQSTASLFVVSLSLLHLYS

SEQ ID NO: 2291 - protein, 38 aa, Homo Sapiens
MLRRRGSPGMGVHVGAALGALWFCLTADRYQTAGAQLC

SEQ ID NO: 2292 - protein, 38 aa, Homo Sapiens; identical to SEQ ID NO: 2291

SEQ ID NO: 2293 - protein, 51 aa, Homo Sapiens
MLRRRGSPGMGVHVGAALGALWFCLTGALEVQVPEDPVVALVGTDATLCCS

SEQ ID NO: 2294 - protein, 133 aa, Homo Sapiens
MLRRRGSPGMGVHVGAALGALWFCLTGALEVQVPEDPVVALVGTDATLCCSFSPEPGFSLAQLNLIWQLTDTKQLVHSFAEGQDQGSAYANRTALFPDLLAQGNASLRLQRVRVADEGSFTCFVSIRDFGSAA

SEQ ID NO: 2295 - protein, 133 aa, Homo Sapiens; identical to SEQ ID NO: 2294

SEQ ID NO: 2296 - protein, 136 aa, Homo Sapiens
MLRRRGSPGMGVHVGAALGALWFCLTGALEVQVPEDPVVALVGTDATLCCSFSPEPGFSLAQLNLIWQLTDTKQLVHSFAEGQDQGSAYANRTALFPDLLAQGNASLRLQRVRVADEGSFTCFVSIRDFGSAAVSL

SEQ ID NO: 2297 - protein, 156 aa, Homo Sapiens
MLRRRGSPGMGVHVGAALGALWFCLTGALEVQVPEDPVVALVGTDATLCCSFSPEPGFSLAQLNLIWQLTDTKQLVHSFAEGQDQGSAYANRTALFPDLLAQGNASLRLQRVRVADEGSFTCFVSIRDFGSAAVSLQVAAPYSKPSMTLEPNKDLR

SEQ ID NO: 2298 - protein, 165 aa, Homo Sapiens
MLRRRGSPGMGVHVGAALGALWFCLTGALEVQVPEDPVVALVGTDATLCCSFSPEPGFSLAQLNLIWQLTDTKQLVHSFAEGQDQGSAYANRTALFPDLLAQGNASLRLQRVRVADEGSFTCFVSIRDFGSAAVSLQVAAPYSKPSMTLEPNKDLRPGDTVTITC

SEQ ID NO: 2299 - protein, 534 aa, Homo Sapiens
MLRRRGSPGMGVHVGAALGALWFCLTGALEVQVPEDPVVALVGTDATLCCSFSPEPGFSLAQLNLIWQLTDTKQLVHSFAEGQDQGSAYANRTALFPDLLAQGNASLRLQRVRVADEGSFTCFVSIRDFGSAAVSLQVAAPYSKPSMTLEPNKDLRPGDTVTITCSSYQGYPEAEVFWQDGQGVPLTGNVTTSQMANEQGLFDVHSILRVVLGANGTYSCLVRNPVLQQDAHSSVTITPQRSPTGAVEVQVPEDPVVALVGTDATLRCSFSPEPGFSLAQLNLIWQLTDTKQLVHSFTEGRDQGSAYANRTALFPDLLAQGNASLRLQRVRVADEGSFTCFVSIRDFGSAAVSLQVAAPYSKPSMTLEPNKDLRPGDTVTITCSSYRGYPEAEVFWQDGQGVPLTGNVTTSQMANEQGLFDVHSVLRVVLGANGTYSCLVRNPVLQQDAHGSVTITGQPMTFPPEALWVTVGLSVCLIALLVALAFVCWRKIKQSCEEENAGAEDQDGEGEGSKTALQPLKHSDSKEDDGQEIA

SEQ ID NO: 2300 - protein, 533 aa, Homo Sapiens
MLRRRGSPGMGVHVGAALGALWFCLTGALEVQVPEDPVVALVGTDATLCCSFSPEPGFSLAQLNLIWQLTDTKQLVHSFAEGQDQGSAYANRTALFPDLLAQGNASLRLQRVRVADEGSFTCFVSIRDFGSAAVSLQVAAPYSKPSMTLEPNKDLRPGDTVTITCSSYQGYPEAEVFWQDGQGVPLTGNVTTSQMANEQGLFDVHSILRVVLGANGTYSCLVRNPVLQQDAHSSVTITPQRSPTGAVEVQVPEDPVVALVGTDATLRCSFSPEPGFSLAQLNLIWQLTDTKQLVHSFTEGRDQGSAYANRTALFPDLLAQGNASLRLQRVRVADEGSFTCFVSIRDFGSAAVSLQVAAPYSKPSMTLEPNKDLRPGDTVTITCSSYRGYPEAEVFWQDGQGVPLTGNVTTSQMANEQGLFDVHSVLRVVLGANGTYSCLVRNPVLQQDAHGSVTITGQPMTFPPEALWVTVGLSVCLIALLVALAFVCWRKIKQSCEEENAGAEDQDGEGEGSKTALQPLKHSDSKEGKDTWA

SEQ ID NO: 2301 - protein, 316 aa, Homo Sapiens
MLRRRGSPGMGVHVGAALGALWFCLTGALEVQVPEDPVVALVGTDATLCCSFSPEPGFSLAQLNLIWQLTDTKQLVHSFAEGQDQGSAYANRTALFPDLLAQGNASLRLQRVRVADEGSFTCFVSIRDFGSAAVSLQVAAPYSKPSMTLEPNKDLRPGDTVTITCSSYRGYPEAEVFWQDGQGVPLTGNVTTSQMANEQGLFDVHSVLRVVLGANGTYSCLVRNPVLQQDAHGSVTITGQPMTFPPEALWVTVGLSVCLIALLVALAFVCWRKIKQSCEEENAGAEDQDGEGEGSKTALQPLKHSDSKEDDGQEIA

SEQ ID NO: 2302 - protein, 316 aa, Homo Sapiens; identical to SEQ ID NO: 2301

SEQ ID NO: 2303 - protein, 146 aa, Homo Sapiens
MSLKAPMSSRKKKLYLQQHCEAGAAFHHGEPSCQPPHRKMLRRRGSPGMGVHVGAALGALWFCLTGALEVQVPEDPVVALVGTDATLCCSFSPEPGFSLAQLNLIWQLTDTKQLVHSFAEGQDQGSAYANRTALFPDLLAQGNASL

SEQ ID NO: 2304 - protein, 388 aa, Homo Sapiens
MTLEPNKDLRPGDTVTITCSSYQGYPEAEVFWQDGQGVPLTGNVTTSQMANEQGLFDVHSILRVVLGANGTYSCLVRNPVLQQDAHSSVTITPQRSPTGAVEVQVPEDPVVALVGTDATLRCSFSPEPGFSLAQLNLIWQLTDTKQLVHSFTEGRDQGSAYANRTALFPDLLAQGNASLRLQRVRVADEGSFTCFVSIRDFGSAAVSLQVAAPYSKPSMTLEPNKDLRPGDTVTITCSSYRGYPEAEVFWQDGQGVPLTGNVTTSQMANEQGLFDVHSVLRVVLGANGTYSCLVRNPVLQQDAHGSVTITGQPMTFPPEALWVTVGLSVCLIALLVALAFVCWRKIKQSCEEENAGAEDQDGEGEGSKTALQPLKHSDSKEDDGQEIA

SEQ ID NO: 2305 - protein, 199 aa, Homo Sapiens
  misc_feature (1)..(1): Xaa can be any naturally occurring amino acid
XRVRVADEGSFTCFVSIRDFGSAAVSLQVAAPYSKPSMTLEPNKDLRPGDTVTITCSSYRGYPEAEVFWQDGQGVPLTGNVTTSQMANEQGLFDVHSVLRVVLGANGTYSCLVRNPVLQQDAHGSVTITEALWVTVGLSVCLIALLVALAFVCWRKIKQSCEEENAGAEDQDGEGEGSKTALQPLKHSDSKEDDGQEIA

SEQ ID NO: 2306 - protein, 170 aa, Homo Sapiens
  misc_feature (1)..(1): Xaa can be any naturally occurring amino acid
XTLEPNKDLRPGDTVTITCSSYRGYPEAEVFWQDGQGVPLTGNVTTSQMANEQGLFDVHSVLRVVLGANGTYSCLVRNPVLQQDAHGSVTITGQPMTFPPEALWVTVGLSVCLIALLVALAFVCWRKIKQSCEEENAGAEDQDGEGEGSKTALQPLKHSDSKEDDGQEIA

SEQ ID NO: 2307 - protein, 169 aa, Homo Sapiens
MTPASITAAKTSTITTAFPPVSSTTLFAVGATHSASIQEETEEVVNSQLPLLLSLLALLLLLLVGASLLAWRMFQKWIKAGDHSELSQNPKQAATQSELHYANLELLMWPLQEKPAPPREVEVEYSTVASPREELHYASVVFDSNTNRIAAQRPREEEPDSDYSVIRKT

SEQ ID NO: 2308 - protein, 103 aa, Homo Sapiens
MWLPWALLLLWVPAGDHSELSQNPKQAATQSELHYANLELLMWPLQEKPAPPREVEVEYSTVASPREELHYASVVFDSNTNRIAAQRPREEEPDSDYSVIRKT

SEQ ID NO: 2309 - protein, 186 aa, Homo Sapiens
MWLPWALLLLWVPASTSMTPASITAAKTSTITTAFPPVSSTTLFAVGATHSASIQEETEEVVNSQLPLLLSLLALLLLLLVGASLLAWRMFQKWIKAGDHSELSQNPKQAATQSELHYANLELLMWPLQEKPAPPREVEVEYSTVASPREELHYASVVFDSNTNRIAAQRPREEEPDSDYSVIRKT

SEQ ID NO: 2310 - protein, 150 aa, Homo Sapiens
MWLPWALLLLWVPASTSMTPASITAAKTSTITTAFPPVSSTTLFAVGATHSASIQEETEEVVNSQLPLLLSLLALLLLLLVGASLLAWRMFQKWIKAGDHSELSQNPKQASPREELHYASVVFDSNTNRIAAQRPREEEPDSDYSVIRKT

SEQ ID NO: 2311 - protein, 299 aa, Homo Sapiens
MWLPWALLLLWVPGCFALSKCRTVAGPVGGSLSVQCPYEKEHRTLNKYWCRPPQIFLCDKIVETKGSAGKRNGRVSIRDSPANLSFTVTLENLTEEDAGTYWCGVDTPWLRDFHDPVVEVEVSVFPASTSMTPASITAAKTSTITTAFPPVSSTTLFAVGATHSASIQEETEEVVNSQLPLLLSLLALLLLLLVGASLLAWRMFQKWIKAGDHSELSQNPKQAATQSELHYANLELLMWPLQEKPAPPREVEVEYSTVASPREELHYASVVFDSNTNRIAAQRPREEEPDSDYSVIRKT

SEQ ID NO: 2312 - protein, 148 aa, Homo Sapiens
MWLPPALLLLSLSGCFSIQGPESVRAPEQGSLTVQCHYKQGWETYIKWWCRGVRWDTCKILIETRGSEQGEKSDRVSIKDNQKDRTFTVTMEGLRRDDADVYWCGIERRGPDLGTQVKVIVDPEGAASTTASSPTNSNMAVFIGSHKR

SEQ ID NO: 2313 - protein, 201 aa, Homo Sapiens
MWLPPALLLLSLSGCFSIQGPESVRAPEQGSLTVQCHYKQGWETYIKWWCRGVRWDTCKILIETRGSEQGEKSDRVSIKDNQKDRTFTVTMEGLRRDDADVYWCGIERRGPDLGTQVKVIVDPEGAASTTASSPTNSNMAVFIGSHKRNHYMLLVFVKVPILLILVTAILWLKGSQRVPEEPGEQPIYMNFSEPLTKDMAT

SEQ ID NO: 2314 - protein, 290 aa, Homo Sapiens
MPLLTLYLLLFWLSGYSIVTQITGPTTVNGLERGSLTVQCVYRSGWETYLKWWCRGAIWRDCKILVKTSGSEQEVKRDRVSIKDNQKNRTFTVTMEDLMKTDADTYWCGIEKTGNDLGVTVQVTIDPAPVTQEETSSSPTLTGHHLDNRHKLLKLSVLLPLIFTILLLLLVAASLLAWRMMKYQQKAAGMSPEQVLQPLEGDLCYADLTLQLAGTSPQKATTKLSSAQVDQVEVEYVTMASLPKEDISYASLTLGAEDQEPTYCNMGHLSSHLPGRGPEEPTEYSTISRP

SEQ ID NO: 2315 - protein, 244 aa, Homo Sapiens
MPLLTLYLLLFWLSGYSIVTQITGPTTVNGLERGSLTVQCVYRSGWETYLKWWCRGAIWRDCKILVKTSGSEQEVKRDRVSIKDNQKNRTFTVTMEDLMKTDADTYWCGIEKTGNDLGVTVQVTIDPAPVTQEETSSSPTLTGHHLDNRSEGSQAANYRPAAHQAQAPEAQCPPAPHLHHIAAAFGGRLTLGLEDDEVPAESSRDVPRAGTAAPGGRPLLCRPDPAAGRNLPAKGYHEAFLCPG

SEQ ID NO: 2316 - protein, 305 aa, Homo Sapiens
MPLLTLYLLLFWLSGYSIVTQITGPTTVNGLERGSLTVQCVYRSGWETYLKWWCRGAIWRDCKILVKTSGSEQEVKRDRVSIKDNQKNRTFTVTMEDLMKTDADTYWCGIEKTGNDLGVTVQVTIDPASTPAPTTPTSTTFTAPVTQEETSSSPTLTGHHLDNRHKLLKLSVLLPLIFTILLLLLVAASLLAWRMMKYQQKAAGMSPEQVLQPLEGDLCYADLTLQLAGTSPQKATTKLSSAQVDQVEVEYVTMASLPKEDISYASLTLGAEDQEPTYCNMGHLSSHLPGRGPEEPTEYSTISRP

SEQ ID NO: 2317 - protein, 293 aa, Homo Sapiens
MWLPQLDLMRVISAKSQGYSIVTQITGPTTVNGLERGSLTVQCVYRSGWETYLKWWCRGAIWRDCKILVKTSGSEQEVKRDRVSIKDNQKNRTFTVTMEDLMKTDADTYWCGIEKTGNDLGVTVQVTIDPAPVTQEETSSSPTLTGHHLDNRHKLLKLSVLLPLIFTILLLLLVAASLLAWRMMKYQQKAAGMSPEQVLQPLEGDLCYADLTLQLAGTSPQKATTKLSSAQVDQVEVEYVTMASLPKEDISYASLTLGAEDQEPTYCNMGHLSSHLPGRGPEEPTEYSTISRP

SEQ ID NO: 2318 - protein, 165 aa, Homo Sapiens
MWLPQLDLMRVISAKSQGYSIVTQITGPTTVNGLERGSLTVQCVYRSGWETYLKWWCRGAIWRDCKILVKTSGSEQEVKRDRVSIKDNQKNRTFTVTMEDLMKTDADTYWCGIEKTGNDLGVTVQVTIDPAPVTQEETSSSPTLTGHHLDNRYCSPWRATSAMQT

SEQ ID NO: 2319 - protein, 194 aa, Homo Sapiens
MWLPQLDLMRVISAKSQGYSIVTQITGPTTVNGLERGSLTVQCVYRSGWETYLKWWCRGAIWRDCKILVKTSGSEQEVKRDRVSIKDNQKNRTFTVTMEDLMKTDADTYWCGIEKTGNDLGVTVQVTIDPAPVTQEETSSSPTLTGHHLDNSSRDVPRAGTAAPGGRPLLCRPDPAAGRNLPAKGYHEAFLCPG

SEQ ID NO: 2320 - protein, 194 aa, Homo Sapiens; identical to SEQ ID NO: 2319

SEQ ID NO: 2321 - protein, 239 aa, Homo Sapiens
MWLPQLDLMRVISAKSQGYSIVTQITGPTTVNGLERGSLTVQCVYRSGWETYLKWWCRGAIWRDCKILVKTSGSEQEVKRDRVSIKDNQKNRTFTVTMEDLMKTDADTYWCGIEKTGNDLGVTVQVTIDPASTPAPTTPTSTTFTAPVTQEETSSSPTLTGHHLDNRHKLLKLSVLLPLIFTILLLLLVAASLLAWRMMKYQQKGTAAPGGRPLLCRPDPAAGRNLPAKGYHEAFLCPG

SEQ ID NO: 2322 - protein, 239 aa, Homo Sapiens; identical to SEQ ID NO: 2321

SEQ ID NO: 2323 - protein, 273 aa, Homo Sapiens
MRLLVLLWGCLLLPGYEALEGPEEISGFEGDTVSLQCTYREELRDHRKYWCRKGGILFSRCSGTIYAEEEGQETMKGRVSIRDSRQELSLIVTLWNLTLQDAGEYWCGVEKRGPDESLLISLFVFPASPGLYPAATTAKQGKTGAEAPPLPGTSQYGHERTSQYTGTSPHPATSPPAGSSRPPMQLDSTSAEDTSPALSSGSSKPRVSIPMVRILAPVLVLLSLLSAAGLIAFCSHLLLWRKEAQQATETQRNEKFCLSRLNSLMFSLSLPWL

SEQ ID NO: 2324 - protein, 150 aa, Homo Sapiens
MRLLVLLWGCLLLPGYEALEGPEEISGFEGDTVSLQCTYREELRDHRKYWCRKGGILFSRCSGTIYAEEEGQETMKGRVSIRDSRQELSLIVTLWNLTLQDAGEYWCGVEKRGPDESLLISLFVFPGNRYLSFPRLGTGAAEGRGRGGGA

SEQ ID NO: 2325 - protein, 332 aa, Homo Sapiens
MRLLVLLWGCLLLPGYEALEGPEEISGFEGDTVSLQCTYREELRDHRKYWCRKGGILFSRCSGTIYAEEEGQETMKGRVSIRDSRQELSLIVTLWNLTLQDAGEYWCGVEKRGPDESLLISLFVFPGPCCPPSPSPTFQPLATTRLQPKAKAQQTQPPGLTSPGLYPAATTAKQGKTGAEAPPLPGTSQYGHERTSQYTGTSPHPATSPPAGSSRPPMQLDSTSAEDTSPALSSGSSKPRVSIPMVRILAPVLVLLSLLSAAGLIAFCSHLLLWRKEAQQATETQRNEKFCLSRLTAEEKEAPSQAPEGDVISMPPLHTSEEELGFSKFVSA

SEQ ID NO: 2326 - protein, 307 aa, Homo Sapiens
MRLLVLLWGCLLLPGYEALEGPEEISGFEGDTVSLQCTYREELRDHRKYWCRKGGILFSRCSGTIYAEEEGQETMKGRVSIRDSRQELSLIVTLWNLTLQDAGEYWCGVEKRGPDESLLISLFVFPGPCCPPSPSPTFQPLATTRLQPKAKAQQTQPPGLTSPGLYPAATTAKQGKTGAEAPPLPGTSQYGHERTSQYTGTSPHPATSPPAGSSRPPMQLDSTSAEDTSPALSSGSSKPRVSIPMVRILAPVLVLLSLLSAAGLIAFCSHLLLWRKEAQQATETQRNEKFCLSRLNSLMFSLSLPWL

SEQ ID NO: 2327 - protein, 233 aa, Homo Sapiens
MRLLVLLWGCLLLPGYEALEGPEEISGFEGDTVSLQCTYREELRDHRKYWCRKGGILFSRCSGTIYAEEEGQETMKGRVSIRDSRQELSLIVTLWNLTLQDAGEYWCGVEKRGPDESLLISLFVFPGSSRPPMQLDSTSAEDTSPALSSGSSKPRVSIPMVRILAPVLVLLSLLSAAGLIAFCSHLLLWRKEAQQATETQRNEKFCLSRLNHRTSELDPDEAFEISSLTFLSV

SEQ ID NO: 2328 - protein, 222 aa, Homo Sapiens
MRLLVLLWGCLLLPGYEALEGPEEISGFEGDTVSLQCTYREELRDHRKYWCRKGGILFSRCSGTIYAEEEGQETMKGRVSIRDSRQELSLIVTLWNLTLQDAGEYWCGVEKRGPDESLLISLFVFPGSSRPPMQLDSTSAEDTSPALSSGSSKPRVSIPMVRILAPVLVLLSLLSAAGLIAFCSHLLLWRKEAQQATETQRNEKFCLSRLNSLMFSLSLPWL

SEQ ID NO: 2329 - protein, 98 aa, Homo Sapiens
MEHSTFLSGLVLATLLSQVCQSCVELDPATVAGIIVTDVIATLLLALGVFCFAGHETGRLSGAADTQALLRNDQVYQPLRDRDDAQYSHLGGNWARNK

SEQ ID NO: 2330 - protein, 171 aa, Homo Sapiens
MEHSTFLSGLVLATLLSQVSPFKIPIEELEDRVFVNCNTSITWVEGTVGTLLSDITRLDLGKRILDPRGIYRCNGTDIYKDKESTVQVHYRMCQSCVELDPATVAGIIVTDVIATLLLALGVFCFAGHETGRLSGAADTQALLRNDQVYQPLRDRDDAQYSHLGGNWARNK

SEQ ID NO: 2331 - protein, 127 aa, Homo Sapiens
MEHSTFLSGLVLATLLSQVSPFKIPIEELEDRVFVNCNTSITWVEGTVGTLLSDITRLDLGKRILDPRGIYRCNGTDIYKDKESTVQVHYRTADTQALLRNDQVYQPLRDRDDAQYSHLGGNWARNK

SEQ ID NO: 2332 - protein, 132 aa, Homo Sapiens
  misc_feature (1)..(1): Xaa can be any naturally occurring amino acid
XSRCFSGPCSPYSSSVVWIHFQEVSPFKIPIEELEDRVFVNCNTSITWVEGTVGTLLSDITRLDLGKRILDPRGIYRCNGTDIYKDKESTVQVHYRTADTQALLRNDQVYQPLRDRDDAQYSHLGGNWARNK

SEQ ID NO: 2333 - protein, 45 aa, Homo Sapiens
MNRGVPFRHLLLVLQLALLPAATQGKKVVLGKKGDTVELTCTASQ

SEQ ID NO: 2334 - protein, 458 aa, Homo Sapiens
MNRGVPFRHLLLVLQLALLPAATQGKKVVLGKKGDTVELTCTASQKKSIQFHWKNSNQIKILGNQGSFLTKGPSKLNDRADSRRSLWDQGNFPLIIKNLKIEDSDTYICEVEDQKEEVQLLVFGLTANSDTHLLQGQSLTLTLESPPGSSPSVQCRSPRGKNIQGGKTLSVSQLELQDSGTWTCTVLQNQKKVEFKIDIVVLAFQKASSIVYKKEGEQVEFSFPLAFTVEKLTGSGELWWQAERASSSKSWITFDLKNKEVSVKRVTQDPKLQMGKKLPLHLTLPQALPQYAGSGNLTLALEAKTGKLHQEVNLVVMRATQLQKNLTCEVWGPTSPKLMLSLKLENKEAKVSKREKAVWVLNPEAGMWQCLLSDSGQVLLESNIKVLPTWSTPVQPMALIVLGGVAGLLLFIGLGIFFCVRCRHRRRQAERMSQIKRLLSEKKTCQCPHRFQKTCSPI

SEQ ID NO: 2335 - protein, 148 aa, Homo Sapiens
MNRGVPFRHLLLVLQLGPSKLNDRADSRRSLWDQGNFPLIIKNLKIEDSDTYICEVEDQKEEVQLLVFGLTANSDTHLLQGQSLTLTLESPPGSSPSVQCRSPRGKNIQGGKTLSVSQLELQDSGTWTCTVLQNQKKVEFKIDIVVLG

SEQ ID NO: 2336 - protein, 203 aa, Homo Sapiens
MVRLPLQCVLWGCLLTAVHPEPPTACREKQYLINSQCCSLCQPGQKLVSDCTEFTETECLPCGESEFLDTWNRETHCHQHKYCDPNLGLRVQQKGTSETDTICTCEEGWHCTSEACESCVLHRSCSPGFGVKQIATGVSDTICEPCPVGFFSNVSSAFEKCHPWTRSPGSAESPGGDPHHLRDPVCHPLGAGLYQKGGQEANQ

SEQ ID NO: 2337 - protein, 277 aa, Homo Sapiens
MVRLPLQCVLWGCLLTAVHPEPPTACREKQYLINSQCCSLCQPGQKLVSDCTEFTETECLPCGESEFLDTWNRETHCHQHKYCDPNLGLRVQQKGTSETDTICTCEEGWHCTSEACESCVLHRSCSPGFGVKQIATGVSDTICEPCPVGFFSNVSSAFEKCHPWTSCETKDLVVQQAGTNKTDVVCGPQDRLRALVVIPIIFGILFAILLVLVFIKKVAKKPTNKAPHPKQEPQEINFPDDLPGSNTAAPVQETLHGCQPVTQEDGKESRISVQERQ

SEQ ID NO: 2338 - protein, 151 aa, Homo Sapiens
MVRLPLQCVLWGCLLTAVHPEPPTACREKQYLINSQCCSLCQPGQKLVSDCTEFTETECLPCGESEFLDTWNRETHCHQHKYCDPNLGLRVQQKGTSETDTICTCEEGWHCTSEACESCVLHRSCSPGFGVKQIDICQPHFPKDRGLNLLM

SEQ ID NO: 2339 - protein, 159 aa, Homo Sapiens
  misc_feature (1)..(1): Xaa can be any naturally occurring amino acid
XRLPLQCVLWGCLLTAVHPEPPTACREKQYLINSQCCSLCQPGQKLVSDCTEFTETECLPCGESEFLDTWNRETHCHQHKYCDPNLGLRVQQKGTSETDTICTCEEGWHCTSEACESCVLHRSCSPGFGVKQIAVRPKTWLCNRQAQTRLMLSVVPRIG

SEQ ID NO: 2340 - protein, 176 aa, Homo Sapiens
DTYCFNASAPPEEDCTSVTGPLSMTTQQSNSQSFSTSHEGLEEDKDHPTTSTLTSSNRNDVTGGRRDPNHSEGSTTLLEGYTSHYPHTKESRTFIPVTSAKTGSFGVTAVTVGDSNSNVNRSLSGDQDTFHPSGGSHTTHGSESDGHSHGSQEGGANTTSGPIRTPQIPEWLIILA

SEQ ID NO: 2341 - protein, 269 aa, Homo Sapiens
EDCTSVTDLPNAFDGPITITIVNRDGTRYVQKGEYRTNPEDIYPSNPTDDDVSSGSSSERSSTSGGYIFYTFSTVHPIPDEDSPWITDSTDRIPATIQATPSSTTEETATQKEQWFGNRWHEGYRQTPKEDSHSTTGTAAASAHTSHPMQGRTTPSPEDSSWTDFFNPISHPMGRGHQAGRRMDMDSSHSITLQPTANPNTGLVEDLDRTGPLSMTTQQSNSQSFSTSHEGLEEDKDHPTTSTLTSSNRNDVTGGRRDPNHSEGSTTLL

SEQ ID NO: 2342 - protein, 193 aa, Homo Sapiens
IYPSNPTDDDVSSGSSSERSSTSGGYIFYTFSTVHPIPDEDSPWITDSTDRIPATSTSSNTISAGWEPNEENEDERDRHLSFSGSGIDDDEDFISSTNMDSSHSITLQPTANPNTGLVEDLDRTGPLSMTTQQSNSQSFSTSHEGLEEDKDHPTTSTLTSSNRNDVTGGRRDPNHSEGSTTLLEGYTSHYPHT

SEQ ID NO: 2343 - protein, 78 aa, Homo Sapiens
MDKFWWHAAWGLCLVPLSLAQIDLNITCRFAGVFHVEKNGRYSISRTEAADLCKAFNSTLPTMAQMEKALSIGFETCR

SEQ ID NO: 2344 - protein, 493 aa, Homo Sapiens
MDKFWWHAAWGLCLVPLSLAQIDLNITCRFAGVFHVEKNGRYSISRTEAADLCKAFNSTLPTMAQMEKALSIGFETCRYGFIEGHVVIPRIHPNSICAANNTGVYILTSNTSQYDTYCFNASAPPEEDCTSVTDLPNAFDGPITITIVNRDGTRYVQKGEYRTNPEDIYPSNPTDDDVSSGSSSERSSTSGGYIFYTFSTVHPIPDEDSPWITDSTDRIPATNMDSSHSITLQPTANPNTGLVEDLDRTGPLSMTTQQSNSQSFSTSHEGLEEDKDHPTTSTLTSSNRNDVTGGRRDPNHSEGSTTLLEGYTSHYPHTKESRTFIPVTSAKTGSFGVTAVTVGDSNSNVNRSLSGDQDTFHPSGGSHTTHGSESDGHSHGSQEGGANTTSGPIRTPQIPEWLIILASLLALALILAVCIAVNSRRRCGQKKKLVINSGNGAVEDRKPSGLNGEASKSQEMVHLVNKESSETPDQFMTADETRNLQNVDMKIGV

SEQ ID NO: 2345 - protein, 429 aa, Homo Sapiens
MDKFWWHAAWGLCLVPLSLAQIDLNITCRFAGVFHVEKNGRYSISRTEAADLCKAFNSTLPTMAQMEKALSIGFETCRYGFIEGHVVIPRIHPNSICAANNTGVYILTSNTSQYDTYCFNASAPPEEDCTSVTDLPNAFDGPITITIVNRDGTRYVQKGEYRTNPEDIYPSNPTDDDVSSGSSSERSSTSGGYIFYTFSTVHPIPDEDSPWITDSTDRIPATNRNDVTGGRRDPNHSEGSTTLLEGYTSHYPHTKESRTFIPVTSAKTGSFGVTAVTVGDSNSNVNRSLSGDQDTFHPSGGSHTTHGSESDGHSHGSQEGGANTTSGPIRTPQIPEWLIILASLLALALILAVCIAVNSRRRCGQKKKLVINSGNGAVEDRKPSGLNGEASKSQEMVHLVNKESSETPDQFMTADETRNLQNVDMKIGV

SEQ ID NO: 2346 - protein, 361 aa, Homo Sapiens
MDKFWWHAAWGLCLVPLSLAQIDLNITCRFAGVFHVEKNGRYSISRTEAADLCKAFNSTLPTMAQMEKALSIGFETCRYGFIEGHVVIPRIHPNSICAANNTGVYILTSNTSQYDTYCFNASAPPEEDCTSVTDLPNAFDGPITITIVNRDGTRYVQKGEYRTNPEDIYPSNPTDDDVSSGSSSERSSTSGGYIFYTFSTVHPIPDEDSPWITDSTDRIPATRDQDTFHPSGGSHTTHGSESDGHSHGSQEGGANTTSGPIRTPQIPEWLIILASLLALALILAVCIAVNSRRRCGQKKKLVINSGNGAVEDRKPSGLNGEASKSQEMVHLVNKESSETPDQFMTADETRNLQNVDMKIGV

SEQ ID NO: 2347 - protein, 340 aa, Homo Sapiens
MDKFWWHAAWGLCLVPLSLAQIDLNITCRFAGVFHVEKNGRYSISRTEAADLCKAFNSTLPTMAQMEKALSIGFETCRYGFIEGHVVIPRIHPNSICAANNTGVYILTSNTSQYDTYCFNASAPPEEDCTSVTDLPNAFDGPITITIVNRDGTRYVQKGEYRTNPEDIYPSNPTDDDVSSGSSSERSSTSGGYIFYTFSTVHPIPDEDSPWITDSTDRIPATRHSHGSQEGGANTTSGPIRTPQIPEWLIILASLLALALILAVCIAVNSRRRCGQKKKLVINSGNGAVEDRKPSGLNGEASKSQEMVHLVNKESSETPDQFMTADETRNLQNVDMKIGV

SEQ ID NO: 2348 - protein, 699 aa, Homo Sapiens
MDKFWWHAAWGLCLVPLSLAQIDLNITCRFAGVFHVEKNGRYSISRTEAADLCKAFNSTLPTMAQMEKALSIGFETCRYGFIEGHVVIPRIHPNSICAANNTGVYILTSNTSQYDTYCFNASAPPEEDCTSVTDLPNAFDGPITITIVNRDGTRYVQKGEYRTNPEDIYPSNPTDDDVSSGSSSERSSTSGGYIFYTFSTVHPIPDEDSPWITDSTDRIPATSTSSNTISAGWEPNEENEDERDRHLSFSGSGIDDDEDFISSTISTTPRAFDHTKQNQDWTQWNPSHSNPEVLLQTTTRMTDVDRNGTTAYEGNWNPEAHPPLIHHEHHEEEETPHSTSTIQATPSSTTEETATQKEQWFGNRWHEGYRQTPKEDSHSTTGTAAASAHTSHPMQGRTTPSPEDSSWTDFFNPISHPMGRGHQAGRRMDMDSSHSITLQPTANPNTGLVEDLDRTGPLSMTTQQSNSQSFSTSHEGLEEDKDHPTTSTLTSSNRNDVTGGRRDPNHSEGSTTLLEGYTSHYPHTKESRTFIPVTSAKTGSFGVTAVTVGDSNSNVNRSLSGDQDTFHPSGGSHTTHGSESDGHSHGSQEGGANTTSGPIRTPQIPEWLIILASLLALALILAVCIAVNSRRRCGQKKKLVINSGNGAVEDRKPSGLNGEASKSQEMVHLVNKESSETPDQFMTADETRNLQNVDMKIGV

SEQ ID NO: 2349 - protein, 277 aa, Homo Sapiens
MDKFWWHAAWGLCLVPLSLAQIDLNITCRFAGVFHVEKNGRYSISRTEAADLCKAFNSTLPTMAQMEKALSIGFETCRYGFIEGHVVIPRIHPNSICAANNTGVYILTSNTSQYDTYCFNASAPPEEDCTSVTDLPNAFDGPITITIVNRDGTRYVQKGEYRTNPEDIYPSNPTDDDVSSGSSSERSSTSGGYIFYTFSTVHPIPDEDSPWITDSTDRIPATTASAHTSHPMQGRTTPSPEDSSWTDFFNPISHPMGRGHQAGRRMDMDSSHSITLQ

SEQ ID NO: 2350 - protein, 742 aa, Homo Sapiens
MDKFWWHAAWGLCLVPLSLAQIDLNITCRFAGVFHVEKNGRYSISRTEAADLCKAFNSTLPTMAQMEKALSIGFETCRYGFIEGHVVIPRIHPNSICAANNTGVYILTSNTSQYDTYCFNASAPPEEDCTSVTDLPNAFDGPITITIVNRDGTRYVQKGEYRTNPEDIYPSNPTDDDVSSGSSSERSSTSGGYIFYTFSTVHPIPDEDSPWITDSTDRIPATTLMSTSATATETATKRQETWDWFSWLFLPSESKNHLHTTTQMAGTSSNTISAGWEPNEENEDERDRHLSFSGSGIDDDEDFISSTISTTPRAFDHTKQNQDWTQWNPSHSNPEVLLQTTTRMTDVDRNGTTAYEGNWNPEAHPPLIHHEHHEEEETPHSTSTIQATPSSTTEETATQKEQWFGNRWHEGYRQTPKEDSHSTTGTAAASAHTSHPMQGRTTPSPEDSSWTDFFNPISHPMGRGHQAGRRMDMDSSHSITLQPTANPNTGLVEDLDRTGPLSMTTQQSNSQSFSTSHEGLEEDKDHPTTSTLTSSNRNDVTGGRRDPNHSEGSTTLLEGYTSHYPHTKESRTFIPVTSAKTGSFGVTAVTVGDSNSNVNRSLSGDQDTFHPSGGSHTTHGSESDGHSHGSQEGGANTTSGPIRTPQIPEWLIILASLLALALILAVCIAVNSRRRCGQKKKLVINSGNGAVEDRKPSGLNGEASKSQEMVHLVNKESSETPDQFMTADETRNLQNVDMKIGV

SEQ ID NO: 2351 - protein, 206 aa, Homo Sapiens
MDKFWWHAAWGLCLVPLSLAQIDLNITCRFAGVFHVEKNGRYSISRTEAADLCKAFNSTLPTMAQMEKALSIGFETCRYGFIEGHVVIPRIHPNSICGANTTSGPIRTPQIPEWLIILASLLALALILAVCIAVNSRRRCGQKKKLVINSGNGAVEDRKPSGLNGEASKSQEMVHLVNKESSETPDQFMTADETRNLQNVDMKIGV

SEQ ID NO: 2352 - protein, 139 aa, Homo Sapiens
MDKFWWHAAWGLCLVPLSLAQIDLNITCRFAGVFHVEKNGRYSISRTEAADLCKAFNSTLPTMAQMEKALSIGFETCSLHCSQQSKKVWAEEKASDQQWQWSCGGQKAKWTQRRGQQVSGNGAFGEQGVVRNSRPVYDS

SEQ ID NO: 2353 - protein, 80 aa, Homo Sapiens
MDKFWWHAAWGLCLVPLSLAQIDLNITCRFAGVFHVEKNGRYSISRTEAADLCKAFNSTLPTMAQMEKALSIGFETCSST

SEQ ID NO: 2354 - protein, 232 aa, Homo Sapiens
PEDIYPSNPTDDDVSSGSSSERSSTSGGYIFYTFSTVHPIPDEDSPWITDSTDRIPATNMDSSHSITLQPTANPNTGLVEDLDRTGPLSMTTQQSNSQSFSTSHEGLEEDKDHPTTSTLTSSRDQDTFHPSGGSHTTHGSESDGHSHGSQEGGANTTSGPIRTPQIPEWLIILASLLALALILAVCIAVNSRRRCGQKKKLVINSGNGAVEDRKPSGLNGEASKSQEMVHLV

SEQ ID NO: 2355 - protein, 195 aa, Homo Sapiens
RNGTTAYEGNWNPEAHPPLIHHEHHEEEETPHSTSTIQATPSSTTEETATQKEQWFGNRWHEGYRQTPKEDSHSTTGTADMDSSHSITLQPTANPNTGLVEDLDRTGPLSMTTQQSNSQSFSTSHEGLEEDKDHPTTSTLTSSNRNDVTGGRRDPNHSEGSTTLLEGYTSHYPHTKESRTFIPVTSAKTGSFGVT

SEQ ID NO: 2356 - protein, 187 aa, Homo Sapiens [sequence omitted]

SEQ ID NO: 2357 - protein, 287 aa, Homo Sapiens
RYSISRTEAADLCKAFNSTLPTMAQMEKALSIGFETCRYGFIEGHVVIPRIHPNSICAANNTGVYILTSNTSQYDTYCFNASAPPEEDCTSVTDLPNAFDGPITITIVNRDGTRYVQKGEYRTNPEDIYPSNPTDDDVSSGSSSERSSTSGGDQDTFHPSGGSHTTHGSESDGHSHGSQEGGANTTSGPIRTPQIPEWLIILASLLALALILAVCIAVNSRRRCGQKKKLVINSGNGAVEDRKPSGLNGEASKSQEMVHLVNKESSETPDQFMTADETRNLQNVDMK

SEQ ID NO: 2358 - protein, 82 aa, Homo Sapiens
SKHNLWSYKDTPNSRCGQKKKLVINSGNGAVEDRKPSGLNGEASKSQEMVHLVNKESSETPDQFMTADETRNLQNVDMKIGV

SEQ ID NO: 2359 - protein, 294 aa, Homo Sapiens
  misc_feature (1)..(1): Xaa can be any naturally occurring amino acid
XDKFWWHAAWGLCLVPLSLAQIDLNITCRFAGVFHVEKNGRYSISRTEAADLCKAFNSTLPTMAQMEKALSIGFETCRYGFIEGHVVIPRIHPNSICAANNTGVYILTSNTSQYDTYCFNASAPPEEDCTSVTDLPNAFDGPITITIVNRDGTRYVQKGEYRTNPEDIYPSNPTDDDVSSGSSSERSSTSGGYIFYTFSTVHPIPDEDSPWITDSTDRIPATRDQDTFHPSGGSHTTHGSESDGHSHGSQEGGANTTSGPIRTPQIPEWLIILASLLALALILAVCIAVNSRRS

SEQ ID NO: 2360 - protein, 243 aa, Homo Sapiens
  misc_feature (1)..(1): Xaa can be any naturally occurring amino acid
XDLPNAFDGPITITIVNRDGTRYVQKGEYRTNPEDIYPSNPTDDDVSSGSSSERSSTSGGYIFYTFSTVHPIPDEDSPWITDSTDRIPATTLMSTSATATETATKRQETWDWFSWLFLPSESKNHLHTTTQMAGTSSNTISAGWEPNEENEDERDRHLSFSGSGIDDDEDFISSTNMDSSHSITLQPTANPNTGLVEDLDRTGPLSMTTQQSNSQSFSTSHEGLEEDKDHPTTSTLTSSNRND

SEQ ID NO: 2361 - protein, 195 aa, Homo Sapiens
  misc_feature (1)..(1): Xaa can be any naturally occurring amino acid
XFIEGHVVIPRIHPNSICAANNTGVYILTSNTSQYDTYCFNASAPPEEDCTSVTDLPNAFDGPITITIVNRDGTRYVQKGEYRTNPEDIYPSNPTDDDVSSGSSSERSSTSGGYIFYTFSTVHPIPDEDSPWITDSTDRIPATKQSNSQSFSTSHEGLEEDKDHPTTSTLTSSNRNDVTGGRRDPNHSEGSTTLL

SEQ ID NO: 2362 - protein, 240 aa, Homo Sapiens
  misc_feature (1)..(1): Xaa can be any naturally occurring amino acid
XLNITCRFAGVFHVEKNGRYSISRTEAADLCKAFNSTLPTMAQMEKALSIGFETCRYGFIEGHVVIPRIHPNSICAANNTGVYILTSNTSQYDTYCFNASAPPEEDCTSVTDLPNAFDGPITITIVNRDGTRYVQKGEYRTNPEDIYPSNPTDDDVSSGSSSERSSTSGDRNDVTGGRRDPNHSEGSTTLLEGYTSHYPHTKESRTFIPVTSAKTGSFGVTAVTVGDSNSNVNRSLSGDQ

SEQ ID NO: 2363 - protein, 118 aa, Homo Sapiens
  misc_feature (1)..(1): Xaa can be any naturally occurring amino acid
XPDEDSPWITDSTDRIPATSWEPNEENEDERDRHLSFSGSGIDDDEDFISSTISTTPRAFDHTKQNQDWTQWNPSHSNPEVLLQTTTRMTDVDRNGTTAYEGNWNPEAHPPLIHHEHH

SEQ ID NO: 2364 - protein, 230 aa, Homo Sapiens
  misc_feature (1)..(1): Xaa can be any naturally occurring amino acid
XQMEKALSIGFETCRYGFIEGHVVIPRIHPNSICAANNTGVYILTSNTSQYDTYCFNASAPPEEDCTSVTDLPNAFDGPITITIVNRDGTRYVQKGEYRTNPEDIYPSNPTDDDVSSGSSSERSSTSGGYIFYTFSTVHPIPDEDSPWITDSTDRIPATISTTPRAFDHTKQNQDWTQWNPSHSNPEVLLQTTTRMTDVDRNGTTAYEGNWNPEAHPPLIHHEHHEEEET

SEQ ID NO: 2365 - protein, 183 aa, Homo Sapiens
  misc_feature (1)..(1): Xaa can be any naturally occurring amino acid
XRTEAADLCKAFNSTLPTMAQMEKALSIGFETCRYGFIEGHVVIPRIHPNSICAANNTGVYILTSNTSQYDTYCFNASAPPEEDCTSVTDLPNAFDGPITITIVNRDGTRYVQKGEYRTNPEDIYPSNPTDDDVSSGSSSERSSTSGDMDSSHSITLQPTANPNTGLVEDLDRTGPLSMTTQQ

SEQ ID NO: 2366 - protein, 191 aa, Homo Sapiens
  misc_feature (1)..(1): Xaa can be any naturally occurring amino acid
XSTTPRAFDHTKQNQDWTQWNPSHSNPEVLLQTTTRMTVQATPSSTTEETATQKEQWFGNRWHEGYRQTPKEDSHSTTGTAASAHTSHPMQGRTTPSPEDSSWTDFFNPISHPMGRGHQAGRRMDMDSSHSITLQPTANPNTGLVEDLDRTGPLSMTTQQSNSQSFSTSHEGLEEDKDHPTTSTLTSSNRN

SEQ ID NO: 2367 - protein, 243 aa, Homo Sapiens
MCSRGWDSCLALELLLLPLSLLVTSIQGHLVHMTVVSGSNVTLNISESLPENYKQLTWFYTFDQKIVEWDSRKSKYFESKFKGRVRLDPQSGALYISKVQKEDNSTYIMRVLKKTGNEQEWKIKLQVLDPVPKPVIKIEKIEDMDDNCYLKLSCVIPGESVNYTWYGDKRPFPKELQNSVLETTLMPHNYSRCYTCQVSNSVSSKNGTVCLSPPCTLARSFGVEWIASWLVVTVPTILGLLLT

SEQ ID NO: 2368 - protein, 252 aa, Homo Sapiens
MCSRGWDSCLALELLLLPLSLLVTSIQGHLVHMTVVSGSNVTLNISESLPENYKQLTWFYTFDQKIVEWDSRKSKYFESKFKGRVRLDPQSGALYISKVQKEDNSTYIMRVLKKTGNEQEWKIKLQVLDPVPKPVIKIEKIEDMDDNCYLKLSCVIPGESVNYTWYGDKRPFPKELQNSVLETTLMPHNYSRCYTCQVSNSVSSKNGTVCLSPPCTLGKKDPWELRGAQGNWSCFEQRKAGGPIQPPCTVWW

SEQ ID NO: 2369 - protein, 169 aa, Homo Sapiens
MCSRGWDSCLALELLLLPLSLLVTSIQGHLVHMTVVSGSNVTLNISESLPENYKQLTWFYTFDQKIVEWDSRKSKYFESKFKGRVRLDPQSGALYISKVQKEDNSTYIMRVLKKTGNEQEWKIKLQVLGESGEPKSKSPLQWPQMDHCRASWEAWGTLGEEERKTSGQV

SEQ ID NO: 2370 - protein, 165 aa, Homo Sapiens
MPMGSLQPLATLYLLGMLVASCLGRLSWYDPDFQARLTRSNSKCQGQLEVYLKDGWHMVCSQSWGRSSKQWEDPSQASKVCQRLNCGVPLSLGPFLVTYTPQSSIICYGQLGSFSNCSHSRNDMCHSLGLTCLEPQKTTPPTTRPPPTTTPEPTAMRPRTRPRTW

SEQ ID NO: 2371 - protein, 495 aa, Homo Sapiens
MPMGSLQPLATLYLLGMLVASCLGRLSWYDPDFQARLTRSNSKCQGQLEVYLKDGWHMVCSQSWGRSSKQWEDPSQASKVCQRLNCGVPLSLGPFLVTYTPQSSIICYGQLGSFSNCSHSRNDMCHSLGLTCLEPQKTTPPTTRPPPTTTPEPTAPPRLQLVAQSGGQHCAGVVEFYSGSLGGTISYEAQDKTQDLENFLCNNLQCGSFLKHLPETEAGRAQDPGEPREHQPLPIQWKIQNSSCTSLEHCFRKIKPQKSGRVLALLCSGFQPKVQSRLVGGSSICEGTVEVRQGAQWAALCDSSSARSSLRWEEVCREQQCGSVNSYRVLDAGDPTSRGLFCPHQKLSQCHELWERNSYCKKVFVTCQDPNPAGLAAGTVASIILALVLLVVLLVVCGPLAYKKLVKKFRQKKQRQWIGPTGMNQNMSFHRNHTATVRSHAENPTASHVDNEYSQPPRNSHLSAYPALEGALHRSSMQPDNSSDSDYDLHGAQRL

SEQ ID NO: 2372 - protein, 317 aa, Homo Sapiens
MTVARPSVPAALPLLGELPRLLLLVLLCLPAVWGDCGLPPDVPNAQPALEGRTSFPEDTVITYKCEESFVKIPGEKDSVICLKGSQWSDIEEFCNQKSCPNPGEIRNGQIDVPGGILFGATISFSCNTGYKLFGSTSSFCLISGSSVQWSDPLPECREIYCPAPPQIDNGIIQGERDHYGYRQSVTYACNKGFTMIGEHSIYCTVNNDEGEWSGPPPECRGKSLTSKVPPTVQKPTTVNVPTTEVSPTSQKTTTKTTTPNAQATRSTPVSRTTKHFHETTPNKGSGTTSGTTRLLSGHTCFTLTGLLGTLVTMGLLT

SEQ ID NO: 2373 - protein, 440 aa, Homo Sapiens
MTVARPSVPAALPLLGELPRLLLLVLLCLPAVWGDCGLPPDVPNAQPALEGRTSFPEDTVITYKCEESFVKIPGEKDSVICLKGSQWSDIEEFCNRSCEVPTRLNSASLKQPYITQNYFPVGTVVEYECRPGYRREPSLSPKLTCLQNLKWSTAVEFCKKKSCPNPGEIRNGQIDVPGGILFGATISFSCNTGYKLFGSTSSFCLISGSSVQWSDPLPECREIYCPAPPQIDNGIIQGERDHYGYRQSVTYACNKGFTMIGEHSIYCTVNNDEGEWSGPPPECRGKSLTSKVPPTVQKPTTVNVPTTEVSPTSQKTTTKTTTPNAQATRSTPVSRTTKHFHETTPNKGSGTTSGTTRLLSGSRPVTQAGMRWCDRSSLQSRTPGFKRSFHFSLPSSWYYRAHVFHVDRFAWDASNHGLADLAKEELRRKYTQVYRLFLVS

SEQ ID NO: 2374 - protein, 381 aa, Homo Sapiens
MTVARPSVPAALPLLGELPRLLLLVLLCLPAVWGDCGLPPDVPNAQPALEGRTSFPEDTVITYKCEESFVKIPGEKDSVICLKGSQWSDIEEFCNRSCEVPTRLNSASLKQPYITQNYFPVGTVVEYECRPGYRREPSLSPKLTCLQNLKWSTAVEFCKKKSCPNPGEIRNGQIDVPGGILFGATISFSCNTGYKLFGSTSSFCLISGSSVQWSDPLPECREIYCPAPPQIDNGIIQGERDHYGYRQSVTYACNKGFTMIGEHSIYCTVNNDEGEWSGPPPECRGKSLTSKVPPTVQKPTTVNVPTTEVSPTSQKTTTKTTTPNAQATRSTPVSRTTKHFHETTPNKGSGTTSGTTRLLSGHTCFTLTGLLGTLVTMGLLT

SEQ ID NO: 2375 - protein, 444 aa, Homo Sapiens
MTVARPSVPAALPLLGELPRLLLLVLLCLPAVWGDCGLPPDVPNAQPALEGRTSFPEDTVITYKCEESFVKIPGEKDSVICLKGSQWSDIEEFCNRSCEVPTRLNSASLKQPYITQNYFPVGTVVEYECRPGYRREPSLSPKLTCLQNLKWSTAVEFCKKKSCPNPGEIRNGQIDVPGGILFGATISFSCNTGYKLFGSTSSFCLISGSSVQWSDPLPECREIYCPAPPQIDNGIIQGERDHYGYRQSVTYACNKGFTMIGEHSIYCTVNNDEGEWSGPPPECRGKSLTSKVPPTVQKPTTVNVPTTEVSPTSQKTTTKTTTPNAQATRSTPVSRTTKHFHETTPNKGSGTTSGTTRLLSGSRPVTQAGMRWCDRSSLQSRTPGFKRSFHFSLPSSWYYRCVPRHPAKFLKFIFCRDRIFLCCPGWFQTPGRKRFFRPPKTLRL

SEQ ID NO: 2376 - protein, 550 aa, Homo Sapiens
MTVARPSVPAALPLLGELPRLLLLVLLCLPAVWGDCGLPPDVPNAQPALEGRTSFPEDTVITYKCEESFVKIPGEKDSVICLKGSQWSDIEEFCNRSCEVPTRLNSASLKQPYITQNYFPVGTVVEYECRPGYRREPSLSPKLTCLQNLKWSTAVEFCKKKSCPNPGEIRNGQIDVPGGILFGATISFSCNTGYKLFGSTSSFCLISGSSVQWSDPLPECREIYCPAPPQIDNGIIQGERDHYGYRQSVTYACNKGFTMIGEHSIYCTVNNDEGEWSGPPPECRGKSLTSKVPPTVQKPTTVNVPTTEVSPTSQKTTTKTTTPNAQGTETPSVLQKHTTENVSATRTPPTPQKPTTVNVPATIVTPTPKPTTINVPATGVSSTPQRHTIVNVSATGTLPTLQKPTRANDSATKSPAAAQTSFISKTLSTKTPSAAQNPMMTNASATQATLTAQKFTTAKVAFTQSPSAARKSTNVHSPVTNGLKSTQRFPSAHITATRSTPVSRTTKHFHETTPNKGSGTTSGTTRLLSGHTCFTLTGLLGTLVTMGLLT

SEQ ID NO: 2377 - protein, 439 aa, Homo Sapiens
MTVARPSVPAALPLLGELPRLLLLVLLCLPAVWGDCGLPPDVPNAQPALEGRTSFPEDTVITYKCEESFVKIPGEKDSVICLKGSQWSDIEEFCNRSCEVPTRLNSASLKQPYITQNYFPVGTVVEYECRPGYRREPSLSPKLTCLQNLKWSTAVEFCKKKSCPNPGEIRNGQIDVPGGILFGATISFSCNTGYKLFGSTSSFCLISGSSVQWSDPLPECREIYCPAPPQIDNGIIQGERDHYGYRQSVTYACNKGFTMIGEHSIYCTVNNDEGEWSGPPPECRGKSLTSKVPPTVQKPTTVNVPTTEVSPTSQKTTTKTTTPNAQATRSTPVSRTTKHFHETTPNKGSGTTSGTTRLLSETVFHRVIQDGLDLLASRSACLGLPKCWDYRREPPHLARAHVFHVDRFAWDASNHGLADLAKEELRRKYTQVYRLFLVS

SEQ ID NO: 2378 - protein, 384 aa, Homo Sapiens
MTVARPSVPAALPLLGELPRLLLLVLLCLPAVWGDCGLPPDVPNAQPALEGRTSFPEDTVITYKCEESFVKIPGEKDSVICLKGSQWSDIEEFCNRSCEVPTRLNSASLKQPYITQNYFPVGTVVEYECRPGYRREPSLSPKLTCLQNLKWSTAVEFCKKKSCPNPGEIRNGQIDVPGGILFGATISFSCNTGYKLFGSTSSFCLISGSSVQWSDPLPECREIYCPAPPQIDNGIIQGERDHYGYRQSVTYACNKGFTMIGEHSIYCTVNNDEGEWSGPPPECRGKSLTSKVPPTVQKPTTVNVPTTEVSPTSQKTTTKTTTPNAQATRSTPVSRTTKHFHETTPNKGSGTTSGTTRLLSALQVRPFEVSGSSHISSKKMMCIL

SEQ ID NO: 2379 - protein, 326 aa, Homo Sapiens
  misc_feature (1)..(1): Xaa can be any naturally occurring amino acid
XAALPLLGELPRLLLLVLLCLPAVWESSRVEHTMLQTCMSSLSGDCGLPPDVPNAQPALEGRTSFPEDTVITYKCEESFVKIPGEKDSVICLKGSQWSDIEEFCNRSCEVPTRLNSASLKQPYITQNYFPVGTVVEYECRPGYRREPSLSPKLTCLQNLKWSTAVEFCKKKSCPNPGEIRNGQIDVPGGILFGATISFSCNTGYKLFGSTSSFCLISGSSVQWSDPLPECREIYCPAPPQIDNGIIQGERDHYGYRQSVTYACNKGFTMIGEHSIYCTVNNDEGEWSGPPPECRGKSLTSKVPPTVQKPTTVNVPTTEVSPTSQKT

SEQ ID NO: 2380 - protein, 268 aa, Homo Sapiens
  misc_feature (1)..(1): Xaa can be any naturally occurring amino acid
XGEIRNGQIDVPGGILFGATISFSCNTGYKLFGSTSSFCLISGSSVQWSDPLPECREIYCPAPPQIDNGIIQGERDHYGYRQSVTYACNKGFTMIGEHSIYCTVNNDEGEWSGPPPECRGKSLTSKVPPTVQKPTTVNVPTTEVSPTSQKTTTKTTTPNAQATRSTPVSRTTKHFHETTPNKGSGTTSGTTRLLSESYSVTQAGVWWCDLRSLQPLPPEFKQFSCLSLRSSWDYRIITGHLLPGDFSVPSTIVDGIYFPTPLSPFFVG

SEQ ID NO: 2381 - protein, 194 aa, Homo Sapiens
  misc_feature (1)..(1): Xaa can be any naturally occurring amino acid
XREIYCPAPPQIDNGIIQGERDHYGYRQSVTYACNKGFTMIGEHSIYCTVNNDEGEWSGPPPECRGKSLTSKVPPTVQKPTTVNVPTTEVSPTSQKTTTKTTTPNAQATRSTPVSRTTKHFHETTPNKGSGTTSGTTRLLSESYSVTQAGVWWCDLRSLQPLPPEFKQFSCLSLRSSWDYRIEAADLHSECYSS

SEQ ID NO: 2382 - protein, 61 aa, Homo Sapiens
  misc_feature (1)..(1): Xaa can be any naturally occurring amino acid
XTTEVSPTSQKTTTKTTTPNAQATRSTPVSRTTKHFHETTPNKGSGTTSGTTRLLSAIFSC

SEQ ID NO: 2383 - protein, 119 aa, Homo Sapiens
MGIQGGSVLFGLLLVLAVFCHSGHSLQCYNCPNPTADCKTAVNCSSDFDACLITKAELGYHYVAQAGRRQSSHFSLLKCWDYRCEPSHWPHCPYFNWGYKCITSVGSLSIAISTTSQPA

SEQ ID NO: 2384 - protein, 119 aa, Homo Sapiens; identical to SEQ ID NO: 2383

SEQ ID NO: 2385 - protein, 120 aa, Homo Sapiens
MGIQGGSVLFGLLLVLAVFCHSGHSLQCYNCPNPTADCKTAVNCSSDFDACLITKAGLQVYNKCWKFEHCNFNDVTTRLRENELTYYCCKKDLCNFNEQLENGGTSLSEKTVLLLVTPFL

SEQ ID NO: 2386 - protein, 128 aa, Homo Sapiens
MGIQGGSVLFGLLLVLAVFCHSGHSLQCYNCPNPTADCKTAVNCSSDFDACLITKAGLQVYNKCWKFEHCNFNDVTTRLRENELTYYCCKKDLCNFNEQLENGGTSLSEKTVLLLVTPFLAAAWSLHP

SEQ ID NO: 2387 - protein, 128 aa, Homo Sapiens; identical to SEQ ID NO: 2386

SEQ ID NO: 2388 - protein, 128 aa, Homo Sapiens; identical to SEQ ID NO: 2386

SEQ ID NO: 2389 - protein, 128 aa, Homo Sapiens; identical to SEQ ID NO: 2386

SEQ ID NO: 2390 - protein, 128 aa, Homo Sapiens; identical to SEQ ID NO: 2386

SEQ ID NO: 2391 - protein, 128 aa, Homo Sapiens; identical to SEQ ID NO: 2386

SEQ ID NO: 2392 - protein, 128 aa, Homo Sapiens; identical to SEQ ID NO: 2386

SEQ ID NO: 2393 - protein, 128 aa, Homo Sapiens; identical to SEQ ID NO: 2386

SEQ ID NO: 2394 - protein, 347 aa, Homo Sapiens
MALLFSLILAICTRPGFLASPSGVRLVGGLHRCEGRVEVEQKGQWGTVCDDGWDIKDVAVLCRELGCGAASGTPSGILYEPPAEKEQKVLIQSVSCTGTEDTLAQCEQEEVYDCSHDEDAGASCENPESSFSPVPEGVRLADGPGHCKGRVEVKHQNQWYTVCQTGWSLRAAKVVCRQLGCGRAVLTQKRCNKHAYGRKPIWLSQMSCSGREATLQDCPSGPWGKNTCNHDEDTWVECEDPFDLRLVGGDNLCSGRLEVLHKGVWGSVCDDNWGEKEDQVVCKQLGCGKSLSPSFRDRKCYGPGVGRIWLDNVRCSGEEQSLEQCQHRFWGFHDCTHQEDVAVICSG

SEQ ID NO: 2395 - protein, 38 aa, Homo Sapiens
MWLFFGITGLLTAALSGCTVAKWIQLLGEICCFAGMGF

SEQ ID NO: 2396 - protein, 468 aa, Homo Sapiens
MWLFFGITGLLTAALSGHPSPAPPDQLNTSSAESELWEPGERLPVRLTNGSSSCSGTVEVRLEASWEPACGALWDSRAAEAVCRALGCGGAEAASQLAPPTPELPPPPAAGNTSVAANATLAGAPALLCSGAEWRLCEVVEHACRSDGRRARVTCAENRALRLVDGGGACAGRVEMLEHGEWGSVCDDTWDLEDAHVVCRQLGCGWAVQALPGLHFTPGRGPIHRDQVNCSGAEAYLWDCPGLPGQHYCGHKEDAGAVCSEHQSWRLTGGADRCEGQVEVHFRGVWNTVCDSEWYPSEAKVLCQSLGCGTAVERPKGLPHSLSGRMYYSCNGEELTLSNCSWRFNNSNLCSQSLAARVLCSASRSLHNLSTPEVPASVQTVTIESSVTVKIENKESRELMLLIPSIVLGILLLGSLIFIAFILLRIKGKYALPVMVNHQHLPTTIPAGSNSYQPVPITIPKEGPGPAP

SEQ ID NO: 2397 - protein, 668 aa, Homo Sapiens
MWLFFGITGLLTAALSGHPSPAPPDQLNTSSAESELWEPGERLPVRLTNGSSSCSGTVEVRLEASWEPACGALWDSRAAEAVCRALGCGGAEAASQLAPPTPELPPPPAAGNTSVAANATLAGAPALLCSGAEWRLCEVVEHACRSDGRRARVTCAENRALRLVDGGGACAGRVEMLEHGEWGSVCDDTWDLEDAHVVCRQLGCGWAVQALPGLHFTPGRGPIHRDQVNCSGAEAYLWDCPGLPGQHYCGHKEDAGAVCSEHQSWRLTGGADRCEGQVEVHFRGVWNTVCDSEWYPSEAKVLCQSLGCGTAVERPKGLPHSLSGRMYYSCNGEELTLSNCSWRFNNSNLCSQSLAARVLCSASRSLHNLSTPEVPASVQTVTIESSVTVKIENKESRELMLLIPSIVLGILLLGSLIFIAFILLRIKGKYALPVMVNHQHLPTTIPAGSNSYQPVPITIPKEVFMLPIQVQAPPPEDSDSGSDSDYEHYDFSAQPPVALTTFYNSQRHRVTDEEVQQSRFQMPPLEEGLEELHASHIPTANPGHCITDPPSLGPQYHPRSNSESSTSSGEDYCNSPKSKLPPWNPQVFSSERSSFLEQPPNLELAGTQPAFSAGPPADDSSSTSSGEWYQNFQPPPQPPSEEQFGCPGSPSPQPDSTDNDDYDDISAA

SEQ ID NO: 2398 - protein, 601 aa, Homo Sapiens
MWLFFGITGLLTAALSGHPSPAPPDQLNTSSAESELWEPGERLPVRLTNGSSSCSGTVEVRLEASWEPACGALWDSRAAEAVCRALGCGGAEAASQLAPPTPELPPPPAAGNTSVAANATLAGAPALLCSGAEWRLCEVVEHACRSDGRRARVTCAENRALRLVDGGGACAGRVEMLEHGEWGSVCDDTWDLEDAHVVCRQLGCGWAVQALPGLHFTPGRGPIHRDQVNCSGAEAYLWDCPGLPGQHYCGHKEDAGAVCSEHQSWRLTGGADRCEGQVEVHFRGVWNTVCDSEWYPSEAKVLCQSLGCGTAVERPKGLPHSLSGRMYYSCNGEELTLSNCSWRFNNSNLCSQSLAARVLCSASRSLHNLSTPEVPASVQTVTIESSVTVKIENKESRELMLLIPSIVLGILLLGSLIFIAFILLRIKGKYVFMLPIQVQAPPPEDSDSGSDSDYEHYDFSAQPPVALTTFYNSQRHRVTDEEVQQSRFQMPPLEEGLEELHASHIPTANPGHCITDPPSLGPQYHPRSNSESSTSSGEDYCNSPKSKLPPWNPQVFSSERSSFLEQPPNLELAGTQPAFSGSPSPQPDSTDNDDYDDISAA

SEQ ID NO: 2399 - protein, 592 aa, Homo Sapiens
MWLFFGITGLLTAALSGHPSPAPPDQLNTSSAESELWEPGERLPVRLTNGSSSCSGTVEVRLEASWEPACGALWDSRAAEAVCRALGCGGAEAASQLAPPTPELPPPPAAGNTSVAANATLAGAPALLCSGAEWRLCEVVEHACRSDGRRARVTCAENRALRLVDGGGACAGRVEMLEHGEWGSVCDDTWDLEDAHVVCRQLGCGWAVQALPGLHFTPGRGPIHRDQVNCSGAEAYLWDCPGLPGQHYCGHKEDAGAVCSEHQSWRLTGGADRCEGQVEVHFRGVWNTVCDSEWYPSEAKVLCQSLGCGTAVERPKGLPHSLSGRMYYSCNGEELTLSNCSWRFNNSNLCSQSLAARVLCSASRSLHNLSTPEVPASVQTVTIESSVTVKIENKESRELMLLIPSIVLGILLLGSLIFIAFILLRIKGKYALPVMVNHQHLPTTIPAGSNSYQPVPITIPKEDSQRHRVTDEEVQQSRFQMPPLEEGLEELHASHIPTANPGHCITDPPSLGPQYHPRSNSESSTSSGEDYCNSPKSKLPPWNPQVFSSERSSFLEQPPNLELAGTQPAFSGSPSPQPDSTDNDDYDDISAA

SEQ ID NO: 2400 - protein, 422 aa, Homo Sapiens
MWLFFGITGLLTAALSGHPSPAPPDQLNTSSAESELWEPGERLPVRLTNGSSSCSGTVEVRLEASWEPACGALWDSRAAEAVCRALGCGGAEAASQLAPPTPELPPPPAAGNTSVAANATLAGAPALLCSGAEWRLCEVVEHACRSDGRRARVTCAENRALRLVDGGGACAGRVEMLEHGEWGSVCDDTWDLEDAHVVCRQLGCGWAVQALPGLHFTPGRGPIHRDQVNCSGAEAYLWDCPGLPGQHYCGHKEDAGAVCSASRSLHNLSTPEVPASVQTVTIESSVTVKIENKESRELMLLIPSIVLGILLLGSLIFIAFILLRIKGKYVFMLPIQVQAPPPEDSDSGSDSDYEHYDFSAQPPVALTTFYNSQRHRVTDEEVQQSRFQMPPLEEGLEELHASHIPTANPGHCITDPPSLGPQ

SEQ ID NO: 2401 - protein, 278 aa, Homo Sapiens
MWLFFGITGLLTAALSGHPSPAPPDQLNTSSAESELWEPGERLPVRLTNGSSSCSGTVEVRLEASWEPACGALWDSRAAEAVCRALGCGGAEAASQLAPPTPELPPPPAAGNTSVAANATLAGAPALLCSGAEWRLCEVVEHACRSDGRRARVTCAENRALRLVDGGGACAGRVEMLEHGEWGSVCDDTWDLEDAHVVCRQLGCGWAVQALPGLHFTPGRGPIHRDQVNCSGAEAYLWDCPGLPGQHYCGHKEDAGAVCSESSVTVKIENKESRELML

SEQ ID NO: 2402 - protein, 186 aa, Homo Sapiens
  misc_feature (1)..(1): Xaa can be any naturally occurring amino acid
XNRALRLVDGGGACAGRVEMLEHGEWGSVCDDTWDLEDAHVVCRQLGCGWAVQALPGLHFTPGRGPIHRDQVNCSGAEAYLWDCPGLPGQHYCGHKEDAGAVCSASRSLHNLSTPEVPASVQTVTIESSVTVKIENKESRELMLLIPSIVLGILLLGSLIFIAFILLRIKGKYALPVMVNHQHLPT

SEQ ID NO: 2403 - protein, 354 aa, Homo Sapiens
MRLAVLFSGALLGLLAAQGTGNDCPHKKSATLLPSFTVTPTVTESTGTTSHRTTKSHKTTTHRTTTTGTTSHGPTTATHNPTTTSHGNVTVHPTSNSTATSQGPSTATHSPATTSHGNATVHPTSNSTATSPGFTSSAHPEPPPPSPSPSPTSKETIGDYTWTNGSQPCVHLQAQIQIRVMYTTQGGGEAWGISVLNPNKTKVQGSCEGAHPHLLLSFPYGHLSFGFMQDLQQKVVYLSYMAVEYNVSFPHAAQWTFSAQNASLRDLQAPLGQSFSCSNSSIILSPAVHLDLLSLRLQAAQLPHTGVFGQSFSCPSDRSILLPLIIGLILLGLLALVLIAFCIIRRRPSAYQAL

SEQ ID NO: 2404 - protein, 181 aa, Homo Sapiens [sequence omitted]

SEQ ID NO: 2405 - protein, 327 aa, Homo Sapiens
MRLAVLFSGALLGLLAESTGTTSHRTTKSHKTTTHRTTTTGTTSHGPTTATHNPTTTSHGNVTVHPTSNSTATSQGPSTATHSPATTSHGNATVHPTSNSTATSPGFTSSAHPEPPPPSPSPSPTSKETIGDYTWTNGSQPCVHLQAQIQIRVMYTTQGGGEAWGISVLNPNKTKVQGSCEGAHPHLLLSFPYGHLSFGFMQDLQQKVVYLSYMAVEYNVSFPHAAQWTFSAQNASLRDLQAPLGQSFSCSNSSIILSPAVHLDLLSLRLQAAQLPHTGVFGQSFSCPSDRSILLPLIIGLILLGLLALVLIAFCIIRRRPSAYQAL

SEQ ID NO: 2406 - protein, 121 aa, Homo Sapiens
  misc_feature (1)..(1): Xaa can be any naturally occurring amino acid
XKTKVQGSCEGAHPHLLLSFPYGHLSFGFMQDLQQKVVYLSYMAVEYNVSFPHAAQWTFSAQNASLRDLQAPLGQSFSCSNSSIILSPAVHLDLLSLRLQAAQLPHTGVFGQSKTYLLLPS

SEQ ID NO: 2407 - protein, 35 aa, Homo Sapiens
MAGPPRLLLLPLLLALARGLPGALAAQAGACVGST

SEQ ID NO: 2408 - protein, 240 aa, Homo Sapiens
MAGPPRLLLLPLLLALARGLPGALAAQEVQQSPHCTTVPVGASVNITCSTSGGLRGIYLRQLGPQPQDIIYYEDGVVPTTDRRFRGRIDFSGSQDNLTITMHRLQLSDTGTYTCQAITEVNVYGSGTLVLVTEEQSQGWHRCSDAPPRASALPAPPTGSALPDPQTASALPDPPAASALPAALAVISFLLGLGLGVACVLARTQIKKLCSWRDKNSAACVVYEDMSHSRCNTLSSPNQYQ

SEQ ID NO: 2409 - protein, 221 aa, Homo Sapiens
MAGPPRLLLLPLLLALARGLPGALAAQEVQQSPHCTTVPVGASVNITCSTSGGLRGIYLRQLGPQPQDIIYYEDGVVPTTDRRFRGRIDFSGSQDNLTITMHRLQLSDTGTYTCQAITEVNVYGSGTLVLVTEEQSQGWHRCSDAPPRASALPAPPTGSALPDPQTASALPDPPAASALPAALAVISFLLGLGLGVACVLARTQVSVSPSCHLHPKDCSLS

SEQ ID NO: 2410 - protein, 160 aa, Homo Sapiens
MAGPPRLLLLPLLLALARGLPGALAAQGRTFSVLLARLMVTAQVLPRGAAVSPLHDCPRGSLRQHHLLHQRGPAWDLPEAARATAPRHHLLRGRGGAHYGQTVPGPHRLLRVPGQPDYHHAPPAAVGHWHLHLPGHHGGQCLRLRHPGPGDRGTVPRMAQ

SEQ ID NO: 2411 - protein, 140 aa, Homo Sapiens
MHRLQLSDTGTYTCQAITEVNVYGSGTLVLVTEEQSQGWHRCSDAPPRASALPAPPTGSALPDPQTASALPDPPAASALPAALAVISFLLGLGLGVACVLARTQIKKLCSWRDKNSAACVVYEDMSHSRCNTLSSPNQYQ

SEQ ID NO: 2412 - protein, 121 aa, Homo Sapiens
MHRLQLSDTGTYTCQAITEVNVYGSGTLVLVTEEQSQGWHRCSDAPPRASALPAPPTGSALPDPQTASALPDPPAASALPAALAVISFLLGLGLGVACVLARTQVSVSPSCHLHPKDCSLS

SEQ ID NO: 2413 - protein, 188 aa, Homo Sapiens
MPGGPGVLQALPATIFLLFLLSAVYLGPGCQALWMHKVPASLMVSLGEDAHFQCPHNSSNNANVTWWRVLHGNYTWPPEFLGPGEDPNEPPPRPFLDMGEGTKNRIITAEGIILLFCAVVPGTLLLFRKRWQNEKLGLDAGDEYEDENLYEGLNLDDCSMYEDISRGLQGTYQDVGSLNIGDVQLEKP

SEQ ID NO: 2414 - protein, 226 aa, Homo Sapiens
MPGGPGVLQALPATIFLLFLLSAVYLGPGCQALWMHKVPASLMVSLGEDAHFQCPHNSSNNANVTWWRVLHGNYTWPPEFLGPGEDPNGTLIIQNVNKSHGGIYVCRVQEGNESYQQSCGTYLRVRQPPPRPFLDMGEGTKNRIITAEGIILLFCAVVPGTLLLFRKRWQNEKLGLDAGDEYEDENLYEGLNLDDCSMYEDISRGLQGTYQDVGSLNIGDVQLEKP

SEQ ID NO: 2415 - protein, 258 aa, Homo Sapiens
MPGGPGVLQALPATIFLLFLLSAVYLGPGCQALWMHKVPASLMVSLGEDAHFQCPHNSSNNANVTWWRVLHGNYTWPPEFLGPGEDPNGTLIIQNVNKSHGGIYVCRVQEGNESYQQSCGTYLRVRREWPSPGPYSHCPAGDTRFIFEVGIEPVPSMWVSNRLGQRDGHSPLQSGVSGGSGALQEVGGARRLGRARGARALSHTTSLQSRPPGPSWTWGRAPRTESSQPRGSSSCSARWCLGRCCCSGNDGRTRSSGW

SEQ ID NO: 2416 - protein, 256 aa, Homo Sapiens
MGHTRRQGTSPSKCPYLNFFQLLVLAGLSHFCSGVIHVTKEVKEVATLSCGHNVSVEELAQTRIYWQKEKKMVLTMMSGDMNIWPEYKNRTIFDITNNLSIVILALRPSDEGTYECVVLKYEKDAFKREHLAEVTLSVKADFPTPSISDFEIPTSNIRRIICSTSGGFPEPHLSWLENGEELNAINTTVSQDPETELYAVSSKLDFNMTTNHSFMCLIKYGHLRVNQTFNWNTSFAPRCRERRRNERLRRESVRPV

SEQ ID NO: 2417 - protein, 288 aa, Homo Sapiens
MGHTRRQGTSPSKCPYLNFFQLLVLAGLSHFCSGVIHVTKEVKEVATLSCGHNVSVEELAQTRIYWQKEKKMVLTMMSGDMNIWPEYKNRTIFDITNNLSIVILALRPSDEGTYECVVLKYEKDAFKREHLAEVTLSVKADFPTPSISDFEIPTSNIRRIICSTSGGFPEPHLSWLENGEELNAINTTVSQDPETELYAVSSKLDFNMTTNHSFMCLIKYGHLRVNQTFNWNTTKQEHFPDNLLPSWAITLISVNGIFVICCLTYCFAPRCRERRRNERLRRESVRPV

SEQ ID NO: 2418 - protein, 288 aa, Homo Sapiens; identical to SEQ ID NO: 2417

SEQ ID NO: 2419 - protein, 217 aa, Homo Sapiens
MDPQCTMGLSNILFVMAFLLSANFSQPEIVPISNITENVYINLTCSSIHGYPEPKKMSVLLRTKNSTIEYDGVMQKSQDNVTELYDVSISLSVSFPDVTSNMTIFCILETDKTRLLSSPFSIELEDPQPPPDHIPWITAVLPTVIICVMVFCLILWKWKKKKRPRNSYKCGTNTMEREESEQTKKREKIHIPERSDEAQRVFKSSKTSSCDKSDTCF

SEQ ID NO: 2420 - protein, 329 aa, Homo Sapiens
MDPQCTMGLSNILFVMAFLLSGAAPLKIQAYFNETADLPCQFANSQNQSLSELVVFWQDQENLVLNEVYLGKEKFDSVHSKYMGRTSFDSDSWTLRLHNLQIKDKGLYQCIIHHKKPTGMIRIHQMNSELSVLANFSQPEIVPISNITENVYINLTCSSIHGYPEPKKMSVLLRTKNSTIEYDGVMQKSQDNVTELYDVSISLSVSFPDVTSNMTIFCILETDKTRLLSSPFSIELEDPQPPPDHIPWITAVLPTVIICVMVFCLILWKWKKKKRPRNSYKCGTNTMEREESEQTKKREKIHIPERSDEAQRVFKSSKTSSCDKSDTCF

SEQ ID NO: 2421 - protein, 167 aa, Homo Sapiens
MGLSNILFVMAFLLSGAAPLKIQAYFNETADLPCQFANSQNQSLSELVVFWQDQENLVLNEVYLGKEKFDSVHSKYMGRTSFDSDSWTLRLHNLQIKDKGLYQCIIHHKKPTGMIRIHQMNSELSVLANFSQPEIVPISNITENVYINLTCSSIHGYPEPKKMSVLL

SEQ ID NO: 2422 - protein, 323 aa, Homo Sapiens
MGLSNILFVMAFLLSGAAPLKIQAYFNETADLPCQFANSQNQSLSELVVFWQDQENLVLNEVYLGKEKFDSVHSKYMGRTSFDSDSWTLRLHNLQIKDKGLYQCIIHHKKPTGMIRIHQMNSELSVLANFSQPEIVPISNITENVYINLTCSSIHGYPEPKKMSVLLRTKNSTIEYDGVMQKSQDNVTELYDVSISLSVSFPDVTSNMTIFCILETDKTRLLSSPFSIELEDPQPPPDHIPWITAVLPTVIICVMVFCLILWKWKKKKRPRNSYKCGTNTMEREESEQTKKREKIHIPERSDEAQRVFKSSKTSSCDKSDTCF

SEQ ID NO: 2423 - protein, 275 aa, Homo Sapiens
MGLSNILFVMAFLLSGAAPLKIQAYFNETADLPCQFANSQNQSLSELVVFWQDQENLVLNEVYLGKEKFDSVHSKYMGRTSFDSDSWTLRLHNLQIKDKGLYQCIIHHKKPTGMIRIHQMNSELSVLANFSQPEIVPISNITENVYINLTCSSIHGYPEPKKMSVLLRTKNSTIEYDGVMQKSQDNVTELYDVSISLSVSFPDVTSNMTIFCILETDKTRLLSSPFSIGTNTMEREESEQTKKREKIHIPERSDEAQRVFKSSKTSSCDKSDTCF

SEQ ID NO: 2424 - protein, 247 aa, Homo Sapiens
MGRTSFDSDSWTLRLHNLQIKDKGLYQCIIHHKKPTGMIRIHQMNSELSVLANFSQPEIVPISNITENVYINLTCSSIHGYPEPKKMSVLLRTKNSTIEYDGVMQKSQDNVTELYDVSISLSVSFPDVTSNMTIFCILETDKTRLLSSPFSIELEDPQPPPDHIPWITAVLPTVIICVMVFCLILWKWKKKKRPRNSYKCGTNTMEREESEQTKKREKIHIPERSDEAQRVFKSSKTSSCDKSDTCF

SEQ ID NO: 2425 - protein, 277 aa, Homo Sapiens
  misc_feature (1)..(1): Xaa can be any naturally occurring amino acid
XTMGLSNILFVMAFLLSGAAPLKIQAYFNETADLPCQFANSQNQSLSELVVFWQDQENLVLNEVYLGKEKFDSVHSKYMGRTSFDSDSWTLRLHNLQIKDKGLYQCIIHHKKPTGMIRIHQMNSELSVLANFSQPEIVPISNITENVYINLTCSSIHGYPEPKKMSVLLRTKNSTIEYDGVMQKSQDNVTELYDVSISLSVSFPDVTSNMTIFCILETDKTRLLSSPFSIGTNTMEREESEQTKKREKIHIPERSDEAQRVFKSSKTSSCDKSDTCF

SEQ ID NO: 2426 - protein, 198 aa, Homo Sapiens
MALPVTALLLPLALLLHAARPSQFRVSPLDRTWNLGETVELKCQVLLSNPTSGCSWLFQPRGAAASPTFLLYLSQNKPKAAEGLDTQRFSGKRLGDTFVLTLSDFRRENEGYYFCSALSNSIMYFSHFVPVFLPAKPTTTPAPRPPTPAPTIASQPLSLRPEACRPAAGGAGNRRRVCKCPRPVVKSGDKPSLSARYV

SEQ ID NO: 2427 - protein, 235 aa, Homo Sapiens
MALPVTALLLPLALLLHAARPSQFRVSPLDRTWNLGETVELKCQVLLSNPTSGCSWLFQPRGAAASPTFLLYLSQNKPKAAEGLDTQRFSGKRLGDTFVLTLSDFRRENEGYYFCSALSNSIMYFSHFVPVFLPAKPTTTPAPRPPTPAPTIASQPLSLRPEACRPAAGGAVHTRGLDFACDIYIWAPLAGTCGVLLLSLVITLYCNHRNRRRVCKCPRPVVKSGDKPSLSARYV

SEQ ID NO: 2428 - protein, 235 aa, Homo Sapiens; identical to SEQ ID NO: 2427

SEQ ID NO: 2429 - protein, 198 aa, Homo Sapiens
MALPVTALLLPLALLLHAARPSQFRVSPLDRTWNLGETVELKCQVLLSNPTSGCSWLFQPRGAAASPTFLLYLSQNKPKAAEGLDTQRFSGKRLGDTFVLTLSDFRRENEGYYFCSALSNSIMYFSHFVPVFLPVHTRGLDFACDIYIWAPLAGTCGVLLLSLVITLYCNHRNRRRVCKCPRPVVKSGDKPSLSARYV

SEQ ID NO: 2430 - protein, 198 aa, Homo Sapiens
MRPRLWLLLAAQLTVLHGNSVLQQTPAYIKVQTNKMVMLSCEAKISLSNMRIYWLRQRQAPSSDSHHEFLALWDSAKGTIHGEEVEQEKIAVFRDASRFILNLTSVKPEDSGIYFCMIVGSPELTFGKGTQLSVVDFLPTTAQPTKKSTLKKRVCRLPRPETQKGLKGKVYQEPLSPNACMDTTAILQPHRSCLTHGS

SEQ ID NO: 2431 - protein, 210 aa, Homo Sapiens
MRPRLWLLLAAQLTVLHGNSVLQQTPAYIKVQTNKMVMLSCEAKISLSNMRIYWLRQRQAPSSDSHHEFLALWDSAKGTIHGEEVEQEKIAVFRDASRFILNLTSVKPEDSGIYFCMIVGSPELTFGKGTQLSVVDFLPTTAQPTKKSTLKKRVCRLPRPETQKGPLCSPITLGLLVAGVLVLLVSLGVAIHLCCRRRRARLRFMKQFYK

SEQ ID NO: 2432 - protein, 221 aa, Homo Sapiens
MRPRLWLLLAAQLTVLHGNSVLQQTPAYIKVQTNKMVMLSCEAKISLSNMRIYWLRQRQAPSSDSHHEFLALWDSAKGTIHGEEVEQEKIAVFRDASRFILNLTSVKPEDSGIYFCMIVGSPELTFGKGTQLSVVDFLPTTAQPTKKSTLKKRVCRLPRPETQKGPLCSPITLGLLVAGVLVLLVSLGVAIHLCCRRRRARLRFMKQLRLHPLEKCSRMDY

SEQ ID NO: 2433 - protein, 210 aa, Homo Sapiens
MRPRLWLLLAAQLTVLHGNSVLQQTPAYIKVQTNKMVMLSCEAKISLSNMRIYWLRQRQAPSSDSHHEFLALWDSAKGTIHGEEVEQEKIAVFRDASRFILNLTSVKPEDSGIYFCMIVGSPELTFGKGTQLSVVDFLPTTAQPTKKSTLKKRVCRLPRPETQKGPLCSPITLGLLVAGVLVLLVSLGVAIHLCCRRRRARLRFMKQLYK

SEQ ID NO: 2434 - protein, 243 aa, Homo Sapiens
MRPRLWLLLAAQLTVLHGNSVLQQTPAYIKVQTNKMVMLSCEAKISLSNMRIYWLRQRQAPSSDSHHEFLALWDSAKGTIHGEEVEQEKIAVFRDASRFILNLTSVKPEDSGIYFCMIVGSPELTFGKGTQLSVVDFLPTTAQPTKKSTLKKRVCRLPRPETQKGPLCSPITLGLLVAGVLVLLVSLGVAIHLCCRRRRARLRFMKQPQGEGISGTFVPQCLHGYYSNTTTSQKLLNPWILKT

SEQ ID NO: 2435 - protein, 213 aa, Homo Sapiens
MRPRLWLLLAAQLTVLHGNSVLQQTPAYIKVQTNKMVMLSCEAKISLSNMRIYWLRQRQAPSSDSHHEFLALWDSAKGTIHGEEVEQEKIAVFRDASRFILNLTSVKPEDSGIYFCMIVGSPELTFGKGTQLSVVDFLPTTAQPTKKSTLKKRVCRLPRPETQKGRRRRARLRFMKQPQGEGISGTFVPQCLHGYYSNTTTSQKLLNPWILKT

SEQ ID NO: 2436 - protein, 185 aa, Homo Sapiens
MARGAALALLLFGLLGVLVAAPDGGFDLSDALPDNENKKPTAIPKKPSAGDDFDLGDAVVDGENDDPRPPNPPKPMPNPNPNHPSSSGSFSDADLADGVSGGEGKGGSDGGGSHRKEGEEADAPGVIPGIVGAVVVAVAGAISSFIAYQKKKLCFKENAEQGEVDMESHRNANAEPAVQRTLLEK

SEQ ID NO: 2437 - protein, 160 aa, Homo Sapiens
MARGAALALLLFGLLGVLVAAPDGGFDLSDALPDNENKKPTAIPKKPSAGDDFDLGDAVVDGENDDPRPPNPPKPMPNPNPNHPSSSGSFSDADLADGVSGGEGKGGSDGGGSHRKEGEEADAPGVIPGIVGAVVVAVAGAISSFIAYQKKKLCFKENDG

SEQ ID NO: 2438 - protein, 160 aa, Homo Sapiens; identical to SEQ ID NO: 2437

SEQ ID NO: 2439 - protein, 160 aa, Homo Sapiens; identical to SEQ ID NO: 2437

SEQ ID NO: 2440 - protein, 184 aa, Homo Sapiens
MARGAALALLLFGLLGVLVAAPDGGFDLSDALPDNENKKPTAIPKKPSAGDDFDLGDAVVDGENDDPRPPNPPKPMPNPNPNHPSSSGSFSDADLADGVSGGEGKGGSDGGGSHRKEGEEADAPGVIPGIVGAVVVAVAGAISSFIAYQKKKLCFKENEQGEVDMESHRNANAEPAVQRTLLEK

SEQ ID NO: 2441 - protein, 177 aa, Homo Sapiens
MARGAALALLLFGLLGVLVAAPDGGFDLSDALPDNENKKPTAIPKKPSAGDDFDLGDAVVDGENDDPRPPNPPKPMPNPNPNHPSSSGSFSDADLADGVSGGEGKGGSDGGGSHRKEGEEADAPGVIPGIVGAVVVAVAGAISSFIAYQKKKLCFKENGQLAGSLGPCIGIRREADG

SEQ ID NO: 2442 - protein, 169 aa, Homo Sapiens
MARGAALALLLFGLLGVLVAAPDGGFDLSDALPGDDFDLGDAVVDGENDDPRPPNPPKPMPNPNPNHPSSSGSFSDADLADGVSGGEGKGGSDGGGSHRKEGEEADAPGVIPGIVGAVVVAVAGAISSFIAYQKKKLCFKENAEQGEVDMESHRNANAEPAVQRTLLEK

SEQ ID NO: 2443 - protein, 76 aa, Homo Sapiens
MARGAALALLLFGLLGVLVAAPGFGDLRLQAARGGRPGVACHSHALRPGPKFGIARSLRPGWWGEGKEKLEKNFEP

SEQ ID NO: 2444 - protein, 22 aa, Homo Sapiens
  misc_feature (1)..(1): Xaa can be any naturally occurring amino acid
XQKKKLCFKENERASMCVFLSV

SEQ ID NO: 2445 - protein, 109 aa, Homo Sapiens
MAASTSMVPVAVTAAVAPVLSINSDFSDLREIKKQLLLIAGLTRERGLLHSSKWKMPRIWMPIPWPRPTLTLKSMIGQHISCMAAIARKPIFCICIPDIWPPGKRTSEK

SEQ ID NO: 2446 - protein, 597 aa, Homo Sapiens
MAASTSMVPVAVTAAVAPVLSINSDFSDLREIKKQLLLIAGLTRERGLLHSSKWSAELAFSLPALPLAELQPPPPITEEDAQDMDAYTLAKAYFDVKEYDRAAHFLHGCNSKKAYFLYMYSRYLSGEKKKDDETVDSLGPLEKGQVKNEALRELRVELSKKHQARELDGFGLYLYGVVLRKLDLVKEAIDVFVEATHVLPLHWGAWLELCNLITDKEMLKFLSLPDTWMKEFFLAHIYTELQLIEEALQKYQNLIDVGFSKSSYIVSQIAVAYHNIRDIDKALSIFNELRKQDPYRIENMDTFSNLLYVRSMKSELSYLAHNLCEIDKYRVETCCVIGNYYSLRSQHEKAALYFQRALKLNPRYLGAWTLMGHEYMEMKNTSAAIQAYRHAIEVNKRDYRAWYGLGQTYEILKMPFYCLYYYRRAHQLRPNDSRMLVALGECYEKLNQLVEAKKCYWRAYAVGDVEKMALVKLAKLHEQLTESEQAAQCYIKYIQDIYSCGEIVEHLEESTAFRYLAQYYFKCKLWDEASTCAQKCCAFNDTREEGKALLRQILQLRNQGETPTTEVPAPFFLPASLSANNTPTRRVSPLNLSSVTP

SEQ ID NO: 2447 - protein, 151 aa, Homo Sapiens
MAASTSMVPVAVTAAVAPVLSINSDFSDLREIKKQLLLIAGLTRERGLLHSSKWSAELAFSLPALPLAELQPPPPITEEDAQDMDAYTLAKAYFDVKEYDRAAHFLHGCNSKKAYFLYMYSRYLVRAILKCHSAFSETSIFRTNGKVKSFK

SEQ ID NO: 2448 - protein, 123 aa, Homo Sapiens
MAASTSMVPVAVTAAVAPVLSINSDFSDLREIKKQLLLIAGLTRERGLLHSSKWSAELAFSLPALPLAELQPPPPITEMPRIWMPIPWPRPTLTLKSMIGQHISCMAAIARKPIFCICIPDIW

SEQ ID NO: 2449 - protein, 134 aa, Homo Sapiens
  misc_feature (1)..(1): Xaa can be any naturally occurring amino acid
XSTSMVPVAVTAAVAPVLSINSDFSDLREIKKQLLLIAGLTRERGLLHSSKWSAELAFSLPALPLAELQPPPPITEMPRIWMPIPWPRPTLTLKSMIGQHISCMAAIARKPIFCICIPDICLEKKRRTMKQLIA

SEQ ID NO: 2450 - protein, 579 aa, Homo Sapiens
MSAAIAALAASYGSGSGSESDSDSESSRCPLPAADSLMHLTKSPSSKPSLAVAVDSAPEVAVKEDLETGVHLDPAVKEVQYNPTYETMFAPEFGPENPFRTQQMAAPRNMLSGYAEPAHINDFMFEQQRRTFATYGYALDPSLDNHQVSAKYIGSVEEAEKNQGLTVFETGQKKTEKRKKFKENDASNIDGFLGPWAKYVDEKDVAKPSEEEQKELDEITAKRQKKGKQEEEKPGEEKTILHVKEMYDYQGRSYLHIPQDVGVNLRSTMPPEKCYLPKKQIHVWSGHTKGVSAVRLFPLSGHLLLSCSMDCKIKLWEVYGERRCLRTFIGHSKAVRDICFNTAGTQFLSAAYDRYLKLWDTETGQCISRFTNRKVPYCVKFNPDEDKQNLFVAGMSDKKIVQWDIRSGEIVQEYDRHLGAVNTIVFVDENRRFVSTSDDKSLRVWEWDIPVDFKYIAEPSMHSMPAVTLSPNGKWLACQSMDNQILIFGAQNRFRLNKKKIFKGHMVAGYACQVDFSPDMSYVISGDGNGKLNIWDWKTTKLYSRFKAHDKVCIGAVWHPHETSKVITCGWDGLIKLWD

SEQ ID NO: 2451 - protein, 539 aa, Homo Sapiens
MSAAIAALAASYGSGSGSESDSDSESSRCPLPAADSLMHLTKSPSSKPSLAVAVDSAPEVAVKEDLETGVHLDPAVKEVQYNPTYETMFAPEFGPENPFRTQQMAAPRNMLSGYAEPAHINDFMFEQQRRTFATYGYALDPSLDNHQVSAKYIGSVEEAEKNQGLTVFETGQKKTEKRKKFKENDASNIDGFLGPWAKYVDEKDVAKPSEEEQKELDEITAKRQKKGKQEEEKPGEEKTILHVKEMYDYQGRSYLHIPQDVGVNLRSTMPPEKCYLPKKQIHVWSGHTKGVSAVRLFPLSGHLLLSCSMDCKIKLWEVYGERRCLRTFIGHSKAVRDICFNTAGTQFLSAAYDRYLKLWDTETGQCISRFTNRKVPYCVKFNPDEDKQNLFVAGMSDKKIVQWDIRSGEIVQEYDRHLGAVNTIVFVDENRRFVSTSDDKSLRVWEWDIPVDFKYIAEPSMHSMPAVTLSPNGKWLACQSMDNQILIFGAQNRFRLNKKKIFKGHMVAGYACQVDFSPDMRVPQSFQNLKEVTAGPQEG

SEQ ID NO: 2452 - protein, 579 aa, Homo Sapiens; identical to SEQ ID NO: 2450

SEQ ID NO: 2453 - protein, 112 aa, Homo Sapiens
MFVSDFRKEFYEVVQSQRVLLFVASDVDALCACKILQALFQCDHVQYTLVPVSGWQELETAFLEHKEQFHYFILINCGANVDLLDILQPDEDTIFFVCDTHRPVNVVNVYND

SEQ ID NO: 2454 - protein, 566 aa, Homo Sapiens
MFVSDFRKEFYEVVQSQRVLLFVASDVDALCACKILQALFQCDHVQYTLVPVSGWQELETAFLEHKEQFHYFILINCGANVDLLDILQPDEDTIFFVCDTHRPVNVVNVYNDTQIKLLIKQDDDLEVPAYEDIFRDEEEDEEHSGNDSDGSEPSEKRTRLEEEIVEQTMRRRQRREWEARRRDILFDYEQYEYHGTSSAMVMFELAWMLSKDLNDMLWWAIVGLTDQWVQDKITQMKYVTDVGVLQRHVSRHNHRNEDEENTLSVDCTRISFEYDLRLVLYQHWSLHDSLCNTSYTAARFKLWSVHGQKRLQEFLADMGLPLKQVKQKFQAMDISLKENLREMIEESANKFGMKDMRVQTFSIHFGFKHKFLASDVVFATMSLMESPEKDGSGTDHFIQALDSLSRSNLDKLYHGLELAKKQLRATQQTIASCLCTNLVISQGPFLYCSLMEGTPDVMLFSRPASLSLLSKHLLKSFVCSTKNRRCKLLPLVMAAPLSMEHGTVTVVGIPPETDSSDRKNFFGRAFEKAAESTSSRMLHNHFDLSVIELKAEDRSKFLDALISLLS

SEQ ID NO: 2455 - protein, 566 aa, Homo Sapiens; identical to SEQ ID NO: 2454

SEQ ID NO: 2456 - protein, 598 aa, Homo Sapiens
MFVSDFRKEFYEVVQSQRVLLFVASDVDALCACKILQALFQCDHVQYTLVPVSGWQELETAFLEHKEQFHYFILINCGANVDLLDILQPDEDTIFFVCDTHRPVNVVNVYNDTQIKLLIKQDDDLEVPAYEDIFRDEEEDEEHSGNDSDGSEPSEKRTRLEEEIVEQTMRRRQRREWEARSGSGSEPVAAALEKSSRLFAGPMSDRTAPRSPRRDILFDYEQYEYHGTSSAMVMFELAWMLSKDLNDMLWWAIVGLTDQWVQDKITQMKYVTDVGVLQRHVSRHNHRNEDEENTLSVDCTRISFEYDLRLVLYQHWSLHDSLCNTSYTAARFKLWSVHGQKRLQEFLADMGLPLKQVKQKFQAMDISLKENLREMIEESANKFGMKDMRVQTFSIHFGFKHKFLASDVVFATMSLMESPEKDGSGTDHFIQALDSLSRSNLDKLYHGLELAKKQLRATQQTIASCLCTNLVISQGPFLYCSLMEGTPDVMLFSRPASLSLLSKHLLKSFVCSTKNRRCKLLPLVMAAPLSMEHGTVTVVGIPPETDSSDRKNFFGRAFEKAAESTSSRMLHNHFDLSVIELKAEDRSKFLDALISLLS

SEQ ID NO: 2457 - protein, 520 aa, Homo Sapiens
MFVSDFRKEFYEVVQSQRVLLFVASDVDALCACKILQALFQCDHVQYTLVPVSGWQELETAFLEHKEQIKLLIKQDDDLEVPAYEDIFRDEEEDEEHSGNDSDGSEPSEKRTRLEEEIVEQTMRRRQRREWEARRRDILFDYEQYEYHGTSSAMVMFELAWMLSKDLNDMLWWAIVGLTDQWVQDKITQMKYVTDVGVLQRHVSRHNHRNEDEENTLSVDCTRISFEYDLRLVLYQHWSLHDSLCNTSYTAARFKLWSVHGQKRLQEFLADMGLPLKQVKQKFQAMDISLKENLREMIEESANKFGMKDMRVQTFSIHFGFKHKFLASDVVFATMSLMESPEKDGSGTDHFIQALDSLSRSNLDKLYHGLELAKKQLRATQQTIASCLCTNLVISQGPFLYCSLMEGTPDVMLFSRPASLSLLSKHLLKSFVCSTKNRRCKLLPLVMAAPLSMEHGTVTVVGIPPETDSSDRKNFFGRAFEKAAESTSSRMLHNHFDLSVIELKAEDRSKFLDALISLLS

SEQ ID NO: 2458 - protein, 159 aa, Homo Sapiens
MLPHWRVLLFVASDVDALCACKILQALFQCDHVQYTLVPVSGWQELETAFLEHKEQFHYFILINCGANVDLLDILQPDEDTIFFVCDTHRPVNVVNVYNDTQIKLLIKQDDDLEVPAYEDIFRDEEEDEEHSGNDSDGSEPSEKRTRLEEEIVEQTMRR

SEQ ID NO: 2459 - protein, 96 aa, Homo Sapiens
  misc_feature (1)..(1): Xaa can be any naturally occurring amino acid
XDEDTIFFVCDTHRPVNVVNVYNDTQIKLLIKQDDDLEVPAYEDIFRDEEEDEEHSGNDSDGSEPSEKRTRLEEEIVEQTMRRRQRREWEARRIIY

SEQ ID NO: 2460 - protein, 836 aa, Homo Sapiens
MAGLNCGVSIALLGVLLLGAARLPRGAEAFEIALPRESNITVLIKLGTPTLLAKPCYIVISKRHITMLSIKSGERIVFTFSCQSPENHFVIEIQKNIDCMSGPCPFGEVQLQPSTSLLPTLNRTFIWDVKAHKSIGLELQFSIPRLRQIGPGESCPDGVTHSISGRIDATVVRIGTFCSNGTVSRIKMQEGVKMALHLPWFHPRNVSGFSIANRSSIKRLCIIESVFEGEGSATLMSANYPEGFPEDELMTWQFVVPAHLRASVSFLNFNLSNCERKEERVEYYIPGSTTNPEVFKLEDKQPGNMAGNFNLSLQGCDQDAQSPGILRLQFQVLVQHPQNESNKIYVVDLSNERAMSLTIEPRPVKQSRKFVPGCFVCLESRTCSSNLTLTSGSKHKISFLCDDLTRLWMNVEKTISCTDHRYCQRKSYSLQVPSDILHLPVELHDFSWKLLVPKDRLSLVLVPAQKLQQHTHEKPCNTSFSYLVASAIPSQDLYFGSFCPGGSIKQIQVKQNISVTLRTFAPSFQQEASRQGLTVSFIPYFKEEGVFTVTPDTKSKVYLRTPNWDRGLPSLTSVSWNISVPRDQVACLTFFKERSGVVCQTGRAFMIIQEQRTRAEEIFSLDEDVLPKPSFHHHSFWVNISNCSPTSGKQLDLLFSVTLTPRTVDLTVILIAAVGGGVLLLSALGLIICCVKKKKKKTNKGPAVGIYNDNINTEMPRQPKKFQKGRKDNDSHVYAVIEDTMVYGHLLQDSSGSFLQPEVDTYRPFQGTMGVCPPSPPTICSRAPTAKLATEEPPPRSPPESESEPYTFSHPNNGDVSSKDTDIPLLNTQEPMEPAE

SEQ ID NO: 2461 - protein, 343 aa, Homo Sapiens
MAGLNCGVSIALLGVLLLGAARLPRGAEAFEIALPRESNITVLIKLGTPTLLAKPCYIVISKRHITMLSIKSGERIVFTFSCQSPENHFVIEIQKNIDCMSGPCPFGEVQLQPSTSLLPTLNRTFIWDVKAHKSIGLELQFSIPRLRQIGPGESCPDGVTHSISGRIDATVVRIGTFCSNGTVSRIKMQEGVKMALHLPWFHPRNVSGFSIANRSSIKRLCIIESVFEGEGSATLMSANYPEGFPEDELMTWQFVVPAHLRASVSFLNFNLSNCERKEERVEYYIPGSTTNPEVFKLEDKQPGNMAGNFNLSLQGCDQDAQSPGILRLQFQVLVQHPQNESSE

SEQ ID NO: 2462 - protein, 449 aa, Homo Sapiens
MLAEWGACLLLAVALLGPGLQAQAMEGVKCGGVLSAPSGNFSSPNFPRLYPYNTECSWLIVVAEGSSVLLTFHAFDLEYHDTCSFDFLEIYNGASPDKGNLLGRFCGKVPPPPFTSSWHVMSVIFHSDKHVASHGFSAGYQKDVCGGVLTGLSGVLTSPEYPNNYPNSMECHWVIRAAGPAHVKLVFVDFQVEGNEECTYDYVAVLGGPGPTRGHHYCGSTRPPTLVSLGHELQVVFKSDFNIGGRGFKAYYFSGECQEVYMAMRGNFSSPQYPSSYPNNIRCHWTIRLPPGYQVKVFFLDLDLEEPNSLTKTCDFDHLAAFDGASEEAPLLGNWCGHHLPPPVTSSHNQLLLLLHTDRSTTRRGFSVAYIGGQLGCGSGSTEGEGEALQPQSLQSPSSIPPVCPAPPMNGLLQLLLHWLHPCPLSGPLRLDGTAPACFHYCRASFPSF

SEQ ID NO: 2463 - protein, 540 aa, Homo Sapiens
MLAEWGACLLLAVALLGPGLQAQAMEGVKCGGVLSAPSGNFSSPNFPRLYPYNTECSWLIVVAEGSSVLLTFHAFDLEYHDTCSFDFLEIYNGASPDKGNLLGRFCGKVPPPPFTSSWHVMSVIFHSDKHVASHGFSAGYQKDVCGGVLTGLSGVLTSPEYPNNYPNSMECHWVIRAAGPAHVKLVFVDFQVEGNEECTYDYVAVLGGPGPTRGHHYCGSTRPPTLVSLGHELQVVFKSDFNIGGRGFKAYYFSGECQEVYMAMRGNFSSPQYPSSYPNNIRCHWTIRLPPGYQVKVFFLDLDLEEPNSLTKTCDFDHLAAFDGASEEAPLLGNWCGHHLPPPVTSSHNQLLLLLHTDRSTTRRGFSVAYIGVVPMNVSCSRTDFQILISTQALAPLERTKVYLGSRSCAAQEVGGNLRIQARFDTCGTESQRRNNTSVIVSVLYIDFSAAGREDIHEYEVRCEPRRKEASVHLLSGSHWLGPYAATAEHLQEAPPMDEAEALEGPVSMVAQDTSDIVFLGLCILAGILMVIAIVVLMLL

SEQ ID NO: 2464 - protein, 882 aa, Homo Sapiens
MGPWSRSLSALLLLLQVSSWLCQEPEPCHPGFDAESYTFTVPRRHLERGRVLGRVNFEDCTGRQRTAYFSLDTRFKVGTDGVITVKRPLRFHNPQIHFLVYAWDSTYRKFSTKVTLNTVGHHHRPPPHQASVSGIQAELLTFPNSSPGLRRQKRDWVIPPISCPENEKGPFPKNLVQIKSNKDKEGKVFYSITGQGADTPPVGVFIIERETGWLKVTEPLDRERIATYTLFSHAVSSNGNAVEDPMEILITVTDQNDNKPEFTQEVFKGSVMEGALPGTSVMEVTATDADDDVNTYNAAIAYTILSQDPELPDKNMFTINRNTGVISVVTTGLDRESFPTYTLVVQAADLQGEGLSTTATAVITVTDTNDNPPIFNPTTYKGQVPENEANVVITTLKVTDADAPNTPAWEAVYTILNDDGGQFVVTTNPVNNDGILKTAKGLDFEAKQQYILHVAVTNVVPFEVSLTTSTATVTVDVLDVNEAPIFVPPEKRVEVSEDFGVGQEITSYTAQEPDTFMEQKITYRIWRDTANWLEINPDTGAISTRAELDREDFEHVKNSTYTALIIATDNGSPVATGTGTLLLILSDVNDNAPIPEPRTIFFCERNPKPQVINIIDADLPPNTSPFTAELTHGASANWTIQYNDPTQESIILKPKMALEVGDYKINLKLMDNQNKDQVTTLEVSVCDCEGAAGVCRKAQPVEAGLQIPAILGILGGILALLILILLLLLFLRRRAVVKEPLLPPEDDTRDNVYYYDEEGGGEEDQDFDLSQLHRGLDARPEVTRNDVAPTLMSVPRYLPRPANPDEIGNFIDENLKAADTDPTAPPYDSLLVFDYEGSGSEAASLSSLNSSESDKDQDYDYLNEWGNRFKKLADMYGGGEDD

SEQ ID NO: 2465 - protein, 821 aa, Homo Sapiens
MGPWSRSLSALLLLLQVSSWLCQEPEPCHPGFDAESYTFTVPRRHLERGRVLGRVNFEDCTGRQRTAYFSLDTRFKVGTDGVITVKRPLRFHNPQIHFLVYAWDSTYRKFSTKVTLNTVGHHHRPPPHQASVSGIQAELLTFPNSSPGLRRQKRDWVIPPISCPENEKGPFPKNLVQIKSNKDKEGKVFYSITGQGADTPPVGVFIIERETGWLKVTEPLDRERIATYTLFSHAVSSNGNAVEDPMEILITVTDQNDNKPEFTQEVFKGSVMEGALPGTSVMEVTATDADDDVNTYNAAIAYTILSQDPELPDKNMFTINRNTGVISVVTTGLDRESFPTYTLVVQAADLQGEGLSTTATAVITVTDTNDNPPIFNPTTGLDFEAKQQYILHVAVTNVVPFEVSLTTSTATVTVDVLDVNEAPIFVPPEKRVEVSEDFGVGQEITSYTAQEPDTFMEQKITYRIWRDTANWLEINPDTGAISTRAELDREDFEHVKNSTYTALIIATDNGSPVATGTGTLLLILSDVNDNAPIPEPRTIFFCERNPKPQVINIIDADLPPNTSPFTAELTHGASANWTIQYNDPTQESIILKPKMALEVGDYKINLKLMDNQNKDQVTTLEVSVCDCEGAAGVCRKAQPVEAGLQIPAILGILGGILALLILILLLLLFLRRRAVVKEPLLPPEDDTRDNVYYYDEEGGGEEDQDFDLSQLHRGLDARPEVTRNDVAPTLMSVPRYLPRPANPDEIGNFIDENLKAADTDPTAPPYDSLLVFDYEGSGSEAASLSSLNSSESDKDQDYDYLNEWGNRFKKLADMYGGGEDD

SEQ ID NO: 2466 - protein, 537 aa, Homo Sapiens
MGPWSRSLSALLLLLQVSSWLCQEPEPCHPGFDAESYTFTVPRRHLERGRVLGRVNFEDCTGRQRTAYFSLDTRFKVGTDGVITVKRPLRFHNPQIHFLVYAWDSTYRKFSTKVTLNTVGHHHRPPPHQASVSGIQAELLTFPNSSPGLRRQKRDWVIPPISCPENEKGPFPKNLVQIKSNKDKEGKVFYSITGQGADTPPVGVFIIERETGWLKVTEPLDRERIATYTLFSHAVSSNGNAVEDPMEILITVTDQNDNKPEFTQEVFKGSVMEGALPGTSVMEVTATDADDDVNTYNAAIAYTILSQDPELPDKNMFTINRNTGVISVVTTGLDRESFPTYTLVVQAADLQGEGLSTTATAVITVTDTNDNPPIFNPTTYKGQVPENEANVVITTLKVTDADAPNTPAWEAVYTILNDDGGQFVVTTNPVNNDGILKTAKGLDFEAKQQYILHVAVTNVVPFEVSLTTSTATVTVDVLDVNEAPIFVPPEKRVEVSEDFGVGQEITSYTAQEPDTFMEQKITFSSCYWNRDTSADPV

SEQ ID NO: 2467 - protein, 647 aa, Homo Sapiens
MGPWSRSLSALLLLLQVSSWLCQEPEPCHPGFDAESYTFTVPRRHLERGRVLGRVNFEDCTGRQRTAYFSLDTRFKVGTDGVITVKRPLRFHNPQIHFLVYAWDSTYRKFSTKVTLNTVGHHHRPPPHQASVSGIQAELLTFPNSSPGLRRQKRDWVIPPISCPENEKGPFPKNLVQIKSNKDKEGKVFYSITGQGADTPPVGVFIIERETGWLKVTEPLDRERIATYTLFSHAVSSNGNAVEDPMEILITVTDQNDNKPEFTQEVFKGSVMEGALPGTSVMEVTATDADDDVNTYNAAIAYTILSQDPELPDKNMFTINRNTGVISVVTTGLDRESFPTYTLVVQAADLQGEGLSTTATAVITVTDTNDNPPIFNPTTYKGQVPENEANVVITTLKVTDADAPNTPAWEAVYTILNDDGGQFVVTTNPVNNDGILKTAKGLDFEAKQQYILHVAVTNVVPFEVSLTTSTATVTVDVLDVNEAPIFVPPEKRVEVSEDFGVGQEITSYTAQEPDTFMEQKITYRIWRDTANWLEINPDTGAISTRAELDREDFEHVKNSTYTALIIATDNGSPVATGTGTLLLILSDVNDNAPIPEPRTIFFCERNPKPQVINIIDADLPPNLASQSIGITDMSHCTCPAPQLPAIF

SEQ ID NO: 2468 - protein, 903 aa, Homo Sapiens
MGPWSRSLSALLLLLQVSSWLCQEPEPCHPGFDAESYTFTVPRRHLERGRVLGRVNFEDCTGRQRTAYFSLDTRFKVGTDGVITVKRPLRFHNPQIHFLVYAWDSTYRKFSTKVTLNTVGHHHRPPPHQASVSGIQAELLTFPNSSPGLRRQKRDWVIPPISCPENEKGPFPKNLVQIKSNKDKEGKVFYSITGQGADTPPVGVFIIERETGWLKVTEPLDRERIATYTLFSHAVSSNGNAVEDPMEILITVTDQNDNKPEFTQEVFKGSVMEGALPGTSVMEVTATDADDDVNTYNAAIAYTILSQDPELPDKNMFTINRNTGVISVVTTGLDRESFPTYTLVVQAADLQGEGLSTTATAVITVTDTNDNPPIFNPTTYKGQVPENEANVVITTLKVTDADAPNTPAWEAVYTILNDDGGQFVVTTNPVNNDGILKTAKVWYLARCRNWHPHSCSYPCPLGLDFEAKQQYILHVAVTNVVPFEVSLTTSTATVTVDVLDVNEAPIFVPPEKRVEVSEDFGVGQEITSYTAQEPDTFMEQKITYRIWRDTANWLEINPDTGAISTRAELDREDFEHVKNSTYTALIIATDNGSPVATGTGTLLLILSDVNDNAPIPEPRTIFFCERNPKPQVINIIDADLPPNTSPFTAELTHGASANWTIQYNDPTQESIILKPKMALEVGDYKINLKLMDNQNKDQVTTLEVSVCDCEGAAGVCRKAQPVEAGLQIPAILGILGGILALLILILLLLLFLRRRAVVKEPLLPPEDDTRDNVYYYDEEGGGEEDQDFDLSQLHRGLDARPEVTRNDVAPTLMSVPRYLPRPANPDEIGNFIDENLKAADTDPTAPPYDSLLVFDYEGSGSEAASLSSLNSSESDKDQDYDYLNEWGNRFKKLADMYGGGEDD

SEQ ID NO: 2469 - protein, 647 aa, Homo Sapiens [sequence omitted]

SEQ ID NO: 2470 - protein, 414 aa, Homo Sapiens
MGPWSRSLSALLLLLQVSSWLCQEPEPCHPGFDAESYTFTVPRRHLERGRVLGRVNFEDCTGRQRTAYFSLDTRFKVGTDGVITVKRPLRFHNPQIHFLVYAWDSTYRKFSTKVTLNTVGHHHRPPPHQASVSGIQAELLTFPNSSPGLRRQKRDWVIPPISCPENEKGPFPKNLVQLFSHAVSSNGNAVEDPMEILITVTDQNDNKPEFTQEVFKGSVMEGALPGTSVMEVTATDADDDVNTYNAAIAYTILSQDPELPDKNMFTINRNTGVISVVTTGLDRESFPTYTLVVQAADLQGEGLSTTATAVITVTDTNDNPPIFNPTTYKGQVPENEANVVITTLKVTDADAPNTPAWEAVYTILNDDGGQFVVTTNPVNNDGILKTAKVCMVPGKMQKLASSQLFIPLSPGLGF

SEQ ID NO: 2471 - protein, 155 aa, Homo Sapiens
  misc_feature (1)..(1): Xaa can be any naturally occurring amino acid
XTDGVITVKRPLRFHNPQIHFLVYAWDSTYRKFSTKVTLNTVGHHHRPPPHQASVSGIQAELLTFPNSSPGLRRQKRDWVIPPISCPENEKGPFPKNLVQIKSNKDKEGKVFYSITGQGADTPPVGVFIIERETGWLKVTEPLDRERIATYTEPL

SEQ ID NO: 2472 - protein, 670 aa, Homo Sapiens
MAQAVDRDTNRPLEPPSEFIVKVQDINDNPPEFLHETYHANVPERSNVGTSVIQVTASDADDPTYGNSAKLVYSILEGQPYFSVEAQTGIIRTALPNMDREAKEEYHVVIQAKDMGGHMGGLSGTTKVTITLTDVNDNPPKFPQSVYQMSVSEAAVPGEEVGRVKAKDPDIGENGLVTYNIVDGDGMESFEITTDYETQEGVIKLKKPVDFETKRAYSLKVEAANVHIDPKFISNGPFKDTVTVKISVEDADEPPMFLAPSYIHEVQENAAAGTVVGRVHAKDPDAANSPIRYSIDRHTDLDRFFTINPEDGFIKTTKPLDREETAWLNITVFAAEIHNRHQEAKVPVAIRVLDVNDNAPKFAAPYEGFICESDQTKPLSNQPIVTISADDKDDTANGPRFIFSLPPEIIHNPNFTVRDNRDNTAGVYARRGGFSRQKQDLYLLPIVISDGGIPPMSSTNTLTIKVCGCDVNGALLSCNAEAYILNAGLSTGALIAILACIVILLVIVVLFVTLRRQKKEPLIVFEEEDVRENIITYDDEGGGEEDTEAFDIATLQNPDGINGFIPRKDIKPEYQYMPRPGLRPAPNSVDVDDFINTRIQEADNDPTAPPYDSIQIYGYEGRGSVAGSLSSLESATTDSDLDYDYLQNWGPRFKKLADLYGSKDTFDDDS

SEQ ID NO: 2473 - protein, 22 aa, Homo Sapiens
MKENYCLQAALVCLGMLCHSHA

SEQ ID NO: 2474 - protein, 34 aa, Homo Sapiens
MKENYCLQAALVCLGMLCHSHAFAPERRGHLRPS

SEQ ID NO: 2475 - protein, 54 aa, Homo Sapiens
MKENYCLQAALVCLGMLCHSHAFAPERRGHLRPSFHGHHEKGKEGQVLQRSKRG

SEQ ID NO: 2476 - protein, 65 aa, Homo Sapiens
MKENYCLQAALVCLGMLCHSHAFAPERRGHLRPSFHGHHEKGKEGQVLQRSKRGWVWNQFFVIEE

SEQ ID NO: 2477 - protein, 70 aa, Homo Sapiens
MKENYCLQAALVCLGMLCHSHAFAPERRGHLRPSFHGHHEKGKEGQVLQRSKRGWVWNQFFVIEEYTGPD

SEQ ID NO: 2478 - protein, 222 aa, Homo Sapiens
MKENYCLQAALVCLGMLCHSHAFAPERRGHLRPSFHGHHEKGKEGQVLQRSKRGWVWNQFFVIEEYTGPDPVLVGRLHSDIDSGDGNIKYILSGEGAGTIFVIDDKSGNIHATKTLDREERAQYTLMAQAVDRDTNRPLEPPSEFIVKVQDINDNPPEFLHETYHANVPERSNVGTSVIQVTASDADDPTYGNSAKLVYSILEGQPYFSVEAQTGIIRTALP

SEQ ID NO: 2479 - protein, 796 aa, Homo Sapiens
MKENYCLQAALVCLGMLCHSHAFAPERRGHLRPSFHGHHEKGKEGQVLQRSKRGWVWNQFFVIEEYTGPDPVLVGRLHSDIDSGDGNIKYILSGEGAGTIFVIDDKSGNIHATKTLDREERAQYTLMAQAVDRDTNRPLEPPSEFIVKVQDINDNPPEFLHETYHANVPERSNVGTSVIQVTASDADDPTYGNSAKLVYSILEGQPYFSVEAQTGIIRTALPNMDREAKEEYHVVIQAKDMGGHMGGLSGTTKVTITLTDVNDNPPKFPQSVYQMSVSEAAVPGEEVGRVKAKDPDIGENGLVTYNIVDGDGMESFEITTDYETQEGVIKLKKPVDFETKRAYSLKVEAANVHIDPKFISNGPFKDTVTVKISVEDADEPPMFLAPSYIHEVQENAAAGTVVGRVHAKDPDAANSPIRYSIDRHTDLDRFFTINPEDGFIKTTKPLDREETAWLNITVFAAEIHNRHQEAKVPVAIRVLDVNDNAPKFAAPYEGFICESDQTKPLSNQPIVTISADDKDDTANGPRFIFSLPPEIIHNPNFTVRDNRDNTAGVYARRGGFSRQKQDLYLLPIVISDGGIPPMSSTNTLTIKVCGCDVNGALLSCNAEAYILNAGLSTGALIAILACIVILLVIVVLFVTLRRQKKEPLIVFEEEDVRENIITYDDEGGGEEDTEAFDIATLQNPDGINGFIPRKDIKPEYQYMPRPGLRPAPNSVDVDDFINTRIQEADNDPTAPPYDSIQIYGYEGRGSVAGSLSSLESATTDSDLDYDYLQNWGPRFKKLADLYGSKDTFDDDS

SEQ ID NO: 2480 - protein, 693 aa, Homo Sapiens
MKENYCLQAALVCLGMLCHSHAFAPERRGHLRPSFHGHHEKGKEGQVLQRSKRGWVWNQFFVIEEYTGPDPVLVGRLHSDIDSGDGNIKYILSGEGAGTIFVIDDKSGNIHATKTLDREERAQYTLMAQAVDRDTNRPLEPPSEFIVKVQDINDNPPEFLHETYHANVPERSNVGTSVIQVTASDADDPTYGNSAKLVYSILEGQPYFSVEAQTGIIRTALPNMDREAKEEYHVVIQAKDMGGHMGGLSGTTKVTITLTDVNDNPPKFPQSVYQMSVSEAAVPGEEVGRVKAKDPDIGENGLVTYNIVDGDGMESFEITTDYETQEGVIKLKKPVDFETKRAYSLKVEAANVHIDPKFISNGPFKDTVTVKISVEDADEPPMFLAPSYIHEVQENAAAGTVVGRVHAKDPDAANSPIRYSIDRHTDLDRFFTINPEDGFIKTTKPLDREETAWLNITVFAAEIHNRHQEAKVPVAIRVLDVNDNAPKFAAPYEGFICESDQTKPLSNQPIVTISADDKDDTANGPRFIFSLPPEIIHNPNFTVRDNRDNTAGVYARRGGFSRQKQDLYLLPIVISDGGIPPMSSTNTLTIKVCGCDVNGALLSCNAEAYILNAGLSTGALIAILACIVILLGCPSLMEPPSPREDMRLLYLGFQLMLFSYVKVNRRFCLLGVFIKLPFLYVVATESPTTLTSL

SEQ ID NO: 2481 - protein, 62 aa, Homo Sapiens
  misc_feature (1)..(1): Xaa can be any naturally occurring amino acid
XMSVSEAAVPGEEVGRVKAKDPDIGENGLVTYNIVDGDGMESFEITTDYETQEGVIKLKKVS

SEQ ID NO: 2482 - protein, 760 aa, Homo Sapiens
MKTPPGASSRTKCSRELRSFCAFSCPRAKQPTCTAWFPQQEHPSENGPQMPGRDPPAASTMQVLLLTSAEDLDCTPGFQQKVFHINQPAEFIEDQSILNLTFSDCKGNDKLRYEVSSPYFKVNSDGGLVALRNITAVGKTLFVHARTPHAEDMAELVIVGGKDIQGSLQDIFKFARTSPVPRQKRSIVVSPILIPENQRQPFPRDVGKVVDSDRPERSKFRLTGKGVDQEPKGIFRINENTGSVSVTRTLDREVIAVYQLFVETTDVNGKTLEGPVPLEVIVIDQNDNRPIFREGPYIGHVMEGSPTGTTVMRMTAFDADDPATDNALLRYNIRQQTPDKPSPNMFYIDPEKGDIVTVVSPALLDRETLENPKYELIIEAQDMAGLDVGLTGTATATIMIDDKNDHSPKFTKKEFQATVEEGAVGVIVNLTVEDKDDPTTGAWRAAYTIINGNPGQSFEIHTNPQTNEGMLSVVKPLDYEISAFHTLLIKVENEDPLVPDVSYGPSSTATVHITVLDVNEGPVFYPDPMMVTRQEDLSVGSVLLTVNATDPDSLQHQTIRYSVYKDPAGWLNINPINGTVDTTAVLDRESPFVDNSVYTALFLAIDSGNPPATGTGTLLITLEDVNDNAPFIYPTVAEVCDDAKNLSVVILGASDKDLHPNTDPFKFEIHKQAVPDKVWKISKINNTHALVSLLQNLNKANYNLPIMVTDSGKPPMTNITDLRVQVCSCRNSKVDCNAAGALRFSLPSVLLLSLFSLACL

SEQ ID NO: 2483 - protein, 37 aa, Homo Sapiens
MQPRTPLVLCVLLSQSGGPVCKSQFQALPLAVQWLGV

SEQ ID NO: 2484 - protein, 67 aa, Homo Sapiens
MQPRTPLVLCVLLSQTPVRPTIYLCQNLQFIKNKARDSNSLADHKGKRIQVNRLLPGLLFHDELSGI

SEQ ID NO: 2485 - protein, 52 aa, Homo Sapiens
MQPRTPLVLCVLLSQVLLLTSAEDLDCTPGFQQKVFHINQPAEFIEDQSILN

SEQ ID NO: 2486 - protein, 67 aa, Homo Sapiens
MQPRTPLVLCVLLSQVLLLTSAEDLDCTPGFQQKVFHINQPAEFIEDQSILNCKQCHSKMLLDSSHI

SEQ ID NO: 2487 - protein, 175 aa, Homo Sapiens
MQPRTPLVLCVLLSQVLLLTSAEDLDCTPGFQQKVFHINQPAEFIEDQSILNLTFSDCKGNDKLRYEVSSPYFKVNSDGGLVALRNITAVGKTLFVHARTPHAEDMAELVIVGGKDIQGSLQDIFKFARTSPVPRQKRSIVVSPILIPENQRQPFPRDVGKMKIWQVLCLARWLT

SEQ ID NO: 2488 - protein, 190 aa, Homo Sapiens
MQPRTPLVLCVLLSQVLLLTSAEDLDCTPGFQQKVFHINQPAEFIEDQSILNLTFSDCKGNDKLRYEVSSPYFKVNSDGGLVALRNITAVGKTLFVHARTPHAEDMAELVIVGGKDIQGSLQDIFKFARTSPVPRQKRSIVVSPILIPENQRQPFPRDVGKRTHNPINSELLLNEGITADLNPCITILAI

SEQ ID NO: 2489 - protein, 713 aa, Homo Sapiens
MQPRTPLVLCVLLSQVLLLTSAEDLDCTPGFQQKVFHINQPAEFIEDQSILNLTFSDCKGNDKLRYEVSSPYFKVNSDGGLVALRNITAVGKTLFVHARTPHAEDMAELVIVGGKDIQGSLQDIFKFARTSPVPRQKRSIVVSPILIPENQRQPFPRDVGKVVDSDRPERSKFRLTGKGVDQEPKGIFRINENTGSVSVTRTLDREVIAVYQLFVETTDVNGKTLEGPVPLEVIVIDQNDNRPIFREGPYIGHVMEGSPTGTTVMRMTAFDADDPATDNALLRYNIRQQTPDKPSPNMFYIDPEKGDIVTVVSPALLDRETLENPKYELIIEAQDMAGLDVGLTGTATATIMIDDKNDHSPKFTKKEFQATVEEGAVGVIVNLTVEDKDDPTTGAWRAAYTIINGNPGQSFEIHTNPQTNEGMLSVVKPLDYEISAFHTLLIKVENEDPLVPDVSYGPSSTATVHITVLDVNEGPVFYPDPMMVTRQEDLSVGSVLLTVNATDPDSLQHQTIRYSVYKDPAGWLNINPINGTVDTTAVLDRESPFVDNSVYTALFLAIDSGNPPATGTGTLLITLEDVNDNAPFIYPTVAEVCDDAKNLSVVILGASDKDLHPNTDPFKFEIHKQAVPDKVWKISKINNTHALVSLLQNLNKANYNLPIMVTDSGKPPMTNITDLRVQVCSCRNSKVDCNAAGALRFSLPSVLLLSLFSLACL

SEQ ID NO: 2490 - protein, 674 aa, Homo Sapiens
MQPRTPLVLCVLLSQVLLLTSAEDLDCTPGFQQKVFHINQPAEFIEDQSILNLTFSDCKGNDKLRYEVSSPYFKVNSDGGLVALRNITAVGKTLFVHARTPHAEDMAELVIVGGKDIQGSLQVVDSDRPERSKFRLTGKGVDQEPKGIFRINENTGSVSVTRTLDREVIAVYQLFVETTDVNGKTLEGPVPLEVIVIDQNDNRPIFREGPYIGHVMEGSPTGTTVMRMTAFDADDPATDNALLRYNIRQQTPDKPSPNMFYIDPEKGDIVTVVSPALLDRETLENPKYELIIEAQDMAGLDVGLTGTATATIMIDDKNDHSPKFTKKEFQATVEEGAVGVIVNLTVEDKDDPTTGAWRAAYTIINGNPGQSFEIHTNPQTNEGMLSVVKPLDYEISAFHTLLIKVENEDPLVPDVSYGPSSTATVHITVLDVNEGPVFYPDPMMVTRQEDLSVGSVLLTVNATDPDSLQHQTIRYSVYKDPAGWLNINPINGTVDTTAVLDRESPFVDNSVYTALFLAIDSGNPPATGTGTLLITLEDVNDNAPFIYPTVAEVCDDAKNLSVVILGASDKDLHPNTDPFKFEIHKQAVPDKVWKISKINNTHALVSLLQNLNKANYNLPIMVTDSGKPPMTNITDLRVQVCSCRNSKVDCNAAGALRFSLPSVLLLSLFSLACL

SEQ ID NO: 2491 - protein, 56 aa, Homo Sapiens
MQPRTPLVLCVLLSQVLLLTSAEDLDCTPGFQQKVFHINQPAEFIEDQSILNYVFY

SEQ ID NO: 2492 - protein, 147 aa, Homo Sapiens
MILQAHLHSLCLLMLYLATGYGQEGKFSGPLKPMTFSIYEGQEPSQIIFQFKANPPAVTFELTGETDNIFVIEREGLLYYNRALDRETRSTHNLQVAALDANGIIVEGPVPITIKVKDINDNRPTFLQSKYEGSVRQNSRPGKPFLY

SEQ ID NO: 2493 - protein, 832 aa, Homo Sapiens
MILQAHLHSLCLLMLYLATGYGQEGKFSGPLKPMTFSIYEGQEPSQIIFQFKANPPAVTFELTGETDNIFVIEREGLLYYNRALDRETRSTHNLQVAALDANGIIVEGPVPITIKVKDINDNRPTFLQSKYEGSVRQNSRPGKPFLYVNATDLDDPATPNGQLYYQIVIQLPMINNVMYFQINNKTGAISLTREGSQELNPAKNPSYNLVISVKDMGGQSENSFSDTTSVDIIVTENIWKAPKPVEMVENSTDPHPIKITQVRWNDPGAQYSLVDKEKLPRFPFSIDQEGDIYVTQPLDREEKDAYVFYAVAKDEYGKPLSYPLEIHVKVKDINDNPPTCPSPVTVFEVQENERLGNSIGTLTAHDRDEENTANSFLNYRIVEQTPKLPMDGLFLIQTYAGMLQLAKQSLKKQDTPQYNLTIEVSDKDFKTLCFVQINVIDINDQIPIFEKSDYGNLTLAEDTNIGSTILTIQATDADEPFTGSSKILYHIIKGDSEGRLGVDTDPHTNTGYVIIKKPLDFETAAVSNIVFKAENPEPLVFGVKYNASSFAKFTLIVTDVNEAPQFSQHVFQAKVSEDVAIGTKVGNVTAKDPEGLDISYSLRGDTRGWLKIDHVTGEIFSVAPLDREAGSPYRVQVVATEVGGSSLSSVSEFHLILMDVNDNPPRLAKDYTGLFFCHPLSAPGSLIFEATDDDQHLFRGPHFTFSLGSGSLQNDWEVSKINGTHARLSTRHTEFEEREYVVLIRINDGGRPPLEGIVSLPVTFCSCVEGSCFRPAGHQTGIPTVGMAVGILLTTLLVIGIILAVVFIRIKKDKGKDNVESAQASEVKPLRS

SEQ ID NO: 2494 - protein, 832 aa, Homo Sapiens; identical to SEQ ID NO: 2493

SEQ ID NO: 2495 - protein, 580 aa, Homo Sapiens
MILQAHLHSLCLLMLYLATGYGQEGKFSGPLKPMTFSIYEGQEPSQIIFQFKANPPAVTFELTGETDNIFVIEREGLLYYNRALDRETRSTHNLQVAALDANGIIVEGPVPITIKVKDINDNRPTFLQSKYEGSVRQNSRPGNSIGTLTAHDRDEENTANSFLNYRIVEQTPKLPMDGLFLIQTYAGMLQLAKQSLKKQDTPQYNLTIEVSDKDFKTLCFVQINVIDINDQIPIFEKSDYGNLTLAEDTNIGSTILTIQATDADEPFTGSSKILYHIIKGDSEGRLGVDTDPHTNTGYVIIKKPLDFETAAVSNIVFKAENPEPLVFGVKYNASSFAKFTLIVTDVNEAPQFSQHVFQAKVSEDVAIGTKVGNVTAKDPEGLDISYSLRGDTRGWLKIDHVTGEIFSVAPLDREAGSPYRVQVVATEVGGSSLSSVSEFHLILMDVNDNPPRLAKDYTGLFFCHPLSAPGSLIFEATDDDQHLFRGPHFTFSLGSGSLQNDWEVSKINGTHARLSTRHTEFEEREYVVLIRINDGGRPPLEGIVSLPGIILAVVFIRIKKDKGKDNVESAQASEVKPLRS

SEQ ID NO: 2496 - protein, 90 aa, Homo Sapiens
  misc_feature (1)..(1): Xaa can be any naturally occurring amino acid
XIDINDQIPIFEKSDYGNLTLAEDTNIGSTILTIQATDADEPFTGSSKILYHIIKGDSEGRLGVDTDPHTNTGYVIIKKLFTEGRHKRLA

SEQ ID NO: 2497 - protein, 790 aa, Homo Sapiens
MKITSTSCICPVLVCLCFVQRCYGTAHHSSIKVMRNQTKHIEGETEVHHRPKRGWVWNQFFVLEEHMGPDPQYVGKLHSNSDKGDGSVKYILTGEGAGTIFIIDDTTGDIHSTKSLDREQKTHYVLHAQAIDRRTNKPLEPESEFIIKVQDINDNAPKFTDGPYIVTVPEMSDMGTSVLQVTATDADDPTYGNSARVVYSILQGQPYFSVDPKTGVIRTALHNMDREAREHYSVVIQAKDMAGQVGGLSGSTTVNITLTDVNDNPPRFPQKHYQLYVPESAQVGSAVGKIKANDADTGSNADMTYSIINGDGMGIFSISTDKETREGILSLKKPLNYEKKKSYTLNIEGANTHLDFRFSHLGPFKDATMLKIIVGDVDEPPLFSMPSYLMEVYENAKIGTVVGTVLAQDPDSTNSLVRYFINYNVEDDRFFNIDANTGTIRTTKVLDREETPWYNITVTASEIDNPDLLSHVTVGIRVLDVNDNPPELAREYDIIVCENSKPGQVIHTISATDKDDFANGPRFNFFLDERLPVNPNFTLKDNEDNTASILTRRRRFSRTVQDVYYLPIMISDGGIPSLSSSSTLTIRVCACERDGRVRTCHAEAFLSSAGLSTGALIAILLCVLILLAIVVLFITLRRSKKEPLIISEEDVRENVVTYDDEGGGEEDTEAFDITALRNPSAAEELKYRRDIRPEVKLTPRHQTSSTLESIDVQEFIKQRLAEADLDPSVPPYDSLQTYAYEGQRSEAGSISSLDSATTQSDQDYHYLGDWGPEFKKLAELYGEIESERTT

SEQ ID NO: 2498 - protein, 790 aa, Homo Sapiens; identical to SEQ ID NO: 2497

SEQ ID NO: 2499 - protein, 590 aa, Homo Sapiens
MKITSTSCICPVLVCLCFVQRCYGTAHHSSIKVMRNQTKHIEGETEVHHRPKRGWVWNQFFVLEEHMGPDPQYVGKLHSNSDKGDGSVKYILTGEGAGTIFIIDDTTGDIHSTKSLDREQKTHYVLHAQAIDRRTNKPLEPESEFIIKVQDINDNAPKFTDGPYIVTVPEMSDMGTSVLQVTATDADDPTYGNSARVVYSILQGQPYFSVDPKTGVIRTALHNMDREAREHYSVVIQAKDMAGQVGGLSGSTTVNITLTDVNDNPPRFPQKHYQLYVPESAQVGSAVGKIKANDADTGSNADMTYSIINGDGMGIFSISTDKETREGILSLKKPLNYEKKKSYTLNIEGANTHLDFRFSHLGPFKDATMLKIIVGDVDEPPLFSMPSYLMEVYENAKIGTVVGTVLAQDPDSTNSLVRYFINYNVEDDRFFNIDANTGTIRTTKVLDREETPWYNITVTASEIDNPDLLSHVTVGIRVLDVNDNPPELAREYDIIVCENSKPGQVIHTISATDKDDFANGPRFNFFLDERLPVNPNFTLKDNEGEHIYTYLFIYVVSALTLYVIGFILIYTQTSCKSAFKVSLMLLCYDL

SEQ ID NO: 2500 - protein, 575 aa, Homo Sapiens
MKITSTSCICPVLVCLCFVQRCYGTAHHSSIKVMRNQTKHIEGETEVHHRPKRGWVWNQFFVLEEHMGPDPQYVGKLHSNSDKGDGSVKYILTGEGAGTIFIIDDTTGDIHSTKSLDREQKTHYVLHAQAIDRRTNKPLEPESEFIIKVQDINDNAPKFTDGPYIVTVPEMSDMGTSVLQVTATDADDPTYGNSARVVYSILQGQPYFSVDPKTGVIRTALHNMDREAREHYSVVIQAKDMAGQVGGLSGSTTVNITLTDVNDNPPRFPQKHYQLYVPESAQVGSAVGKIKANDADTGSNADMTYSIINGDGMGIFSISTDKETREGILSLKKPLNYEKKKSYTLNIEGANTHLDFRFSHLGPFKDATMLKIIVGDVDEPPLFSMPSYLMEVYENAKIGTVVGTVLAQDPDSTNSLVRYFINYNVEDDRFFNIDANTGTIRTTKVLDREETPWYNITVTASEIDNPDLLSHVTVGIRVLDVNDNPPELAREYDIIVCENSKPGQVIHTISATDKDDFANGPRFNFFLDERLPVNPNFTLKDNEAAAAPSPSGFVHAREMGVCGPAMQKPSCPRLV

SEQ ID NO: 2501 - protein, 790 aa, Homo Sapiens; identical to SEQ ID NO: 2497

SEQ ID NO: 2502 - protein, 574 aa, Homo Sapiens
MKITSTSCICPVLVCLCFVQRCYGTAHHSSIKVMRNQTKHIEGETEVHHRPKRGWVWNQFFVLEEHMGPDPQYVGKLHSNSDKGDGSVKYILTGEGAGTIFIIDDTTGDIHSTKSLDREQKTHYVLHAQAIDRRTNKPLEPESEFIIKVQDINDNAPKFTDGPYIVTVPEMSDMGTSVLQVTATDADDPTYGNSARVVYSILQGQPYFSVDPKTGVIRTALHNMDREAREHYSVVIQAKDMAGQVGGLSGSTTVNITLTDVNDNPPRFPQKHYQLYVPESAQVGSAVGKIKANDADTGSNADMTYSIINGDGMGIFSISTDKETREGILSLKKPLNYEKKKSYTLNIEGANTHLDFRFSHLGPFKDATMLKIIVGDVDEPPLFSMPSYLMEVYENAKIGTVVGTVLAQDPDSTNSLVRYFINYNVEDDRFFNIDANTGTIRTTKVLDREETPWYNITVTASEIDNPDLLSHVTVGIRVLDVNDNPPELAREYDIIVCENSKPGQVIHTISATDKDDFANGPRFNFFLDERLPVNPNFTLKDNEAAAPSPSGFVHAREMGVCGPAMQKPSCPRLV

SEQ ID NO: 2503 - protein, 441 aa, Homo Sapiens
WVWNQFFVLEEHMGPDPQYVGKLHSNSDKGDGSVKYILTGEGAGTIFIIDDTTGDIHSTKSLDREQKTHYVLHAQAIDRRTNKPLEPESEFIIKVQDINDNAPKFTDGPYIVTVPEMSDMGTSVLQVTATDADDPTYGNSARVVYSILQGQPYFSVDPKTGVIRTALHNMDREAREHYSVVIQAKDMAGQVGGLSGSTTVNITLTDVNDNPPRFPQKHYQLYVPESAQVGSAVGKIKANDADTGSNADMTYSIINGDGMGIFSISTDKETREGILSLKKPLNYEKKKSYTLNIEGANTHLDFRFSHLGPFKDATMLKIIVGDVDEPPLFSMPSYLMEVYENAKIGTVVGTVLAQDPDSTNSLVRYFINYNVEDDRFFNIDANTGTIRTTKVLDREETPWYNITVTASEIAAAAPSPSGFVHAREMGVCGPAMQKPSCPRLV

SEQ ID NO: 2504 - protein, 434 aa, Homo Sapiens
GIPLLWPCLGATENSQTKKVKQPVRSHLRVKRGWVWNQFFVPEEMNTTSHHIGQLRSDLDNGNNSFQYKLLGAGAGSTFIIDERTGDIYAIQKLDREERSLYILRAQVIDIATGRAVEPESEFVIKVSDINDNEPKFLDEPYEAIVPEMSPEGTLVIQVTASDADDPSSGNNARLLYSLLQGQPYFSVEPTTGVIRISSKMDRELQDEYWVIIQAKDMIGQPGALSGTTSVLIKLSDVNDNKPIFKESLYRLTVSESAPTGTSIGTIMAYDNDIGENAEMDYSIEEDDSQTFDIITNHETQEGIVILKKKVDFEHQNHYGIRAKVKNHHVPEQLMKYHTEASTTFIKIQVEDVDEPPLFLLPYYVFEVFEETPQGSFVGVVSATDPDNRKSPIRYSITRSKVFNINDNGTITTSNSLDREISAWYNLSITATEK

SEQ ID NO: 2505 - protein, 65 aa, Homo Sapiens
MNCYLLLRFMLGIPLLWPCLGATENSQTKKVKQPVRSHLRVKRGWVWNQFFVPEEMNTTSHHIGQ

SEQ ID NO: 2506 - protein, 772 aa, Homo Sapiens
MNCYLLLRFMLGIPLLWPCLGATENSQTKKVKQPVRSHLRVKRGWVWNQFFVPEEMNTTSHHIGQLRSDLDNGNNSFQYKLLGAGAGSTFIIDERTGDIYAIQKLDREERSLYILRAQVIDIATGRAVEPESEFVIKVSDINDNEPKFLDEPYEAIVPEMSPEGTLVIQVTASDADDPSSGNNARLLYSLLQGQPYFSVEPTTGVIRISSKMDRELQDEYWVIIQAKDMIGQPGALSGTTSVLIKLSDVNDNKPIFKESLYRLTVSESAPTGTSIGTIMAYDNDIGENAEMDYSIEEDDSQTFDIITNHETQEGIVILKKKVDFEHQNHYGIRAKVKNHHVPEQLMKYHTEASTTFIKIQVEDVDEPPLFLLPYYVFEVFEETPQGSFVGVVSATDPDNRKSPIRYSITRSKVFNINDNGTITTSNSLDREISAWYNLSITATEKYNIEQISSIPLYVQVLNINDHAPEFSQYYETYVCENAGSGQVIQTISAVDRDESIEEHHFYFNLSVEDTNNSSFTIIDNQDNTAVILTNRTGFNLQEEPVFYISILIADNGIPSLTSTNTLTIHVCDCGDSGSTQTCQYQELVLSMGFKTEVIIAILICIMIIFGFIFLTLGLKQRRKQILFPEKSEDFRENIFQYDDEGGGEEDTEAFDIAELRSSTIMRERKTRKTTSAEIRSLYRQSLQVGPDSAIFRKFILEKLEEANTDPCAPPFDSLQTYAFEGTGSLAGSLSSLESAVSDQDESYDYLNELGPRFKRLACMFGSAVQSNN

SEQ ID NO: 2507 - protein, 490 aa, Homo Sapiens
MNCYLLLRFMLGIPLLWPCLGATENSQTKKVKQPVRSHLRVKRGWVWNQFFVPEEMNTTSHHIGQLRSDLDNGNNSFQYKLLGAGAGSTFIIDERTGDIYAIQKLDREERSLYILRAQVIDIATGRAVEPESEFVIKVSDINDNEPKFLDEPYEAIVPEMSPEGTLVIQVTASDADDPSSGNNARLLYSLLQGQPYFSVEPTTGVIRISSKMDRELQDEYWVIIQAKDMIGQPGALSGTTSVLIKLSDVNDNKPIFKESLYRLTVSESAPTGTSIGTIMAYDNDIGENAEMDYSIEEDDSQTFDIITNHETQEGIVILKKKVDFEHQNHYGIRAKVKNHHVPEQLMKYHTEASTTFIKIQVEDVDEPPLFLLPYYVFEVFEETPQGSFVGVVSATDPDNRKSPIRYSITRSKVFNINDNGTITTSNSLDREISAWYNLSITATEKYNIEQISSIPLYVQVLNINDHAPEFSQYYETYVCENAGSGQGLFF

SEQ ID NO: 2508 - protein, 541 aa, Homo Sapiens
MNCYLLLRFMLGIPLLWPCLGATENSQTKKVKQPVRSHLRVKRGWVWNQFFVPEEMNTTSHHIGQLRSDLDNGNNSFQYKLLGAGAGSTFIIDERTGDIYAIQKLDREERSLYILRAQVIDIATGRAVEPESEFVIKVSDINDNEPKFLDEPYEAIVPEMSPEGTLVIQVTASDADDPSSGNNARLLYSLLQGQPYFSVEPTTGVIRISSKMDRELQDEYWVIIQAKDMIGQPGALSGTTSVLIKLSDVNDNKPIFKESLYRLTVSESAPTGTSIGTIMAYDNDIGENAEMDYSIEEDDSQTFDIITNHETQEGIVILKKKVDFEHQNHYGIRAKVKNHHVPEQLMKYHTEASTTFIKIQVEDVDEPPLFLLPYYVFEVFEETPQGSFVGVVSATDPDNRKSPIRYSITRSKVFNINDNGTITTSNSLDREISAWYNLSITATEKYNIEQISSIPLYVQVLNINDHAPEFSQYYETYVCENAGSGQVIQTISAVDRDESIEEHHFYFNLSVEDTNNSSFTIIDNQELVLTFKKNLSSTSPS

SEQ ID NO: 2509 - protein, 445 aa, Homo Sapiens
MDNDPLVFGVSGEEASRFFAVEPDTGVVWLRQPLDRETKSEFTVEFSVSDHQGVITRKVNIQVGDVNDNAPTFHNQPYSVRIPENTPVGTPIFIVNATDPDLGAGGSVLYSFQPPSQFFAIDSARGIVTVIRELDYETTQAYQLTVNALAIIITNLPYSTNIYEHSPPGTTVRIITAIDQDKGRPRGIGYTIVSGNTNSIFALDYISGVLTLNGLLDRENPLYSHGFILTVKGTELNDDRTPSDATVTTTFNILVIDINDNAPEFNSSEYSVAITELAQVGFALPLFIQVVDKDEGLNSMFEVYLVGNNSHHFIISPTSVQGKADIRIRVAIPLDYETVDRYDFDLFANESVPDHVGYAKVKITLINENDNRPIFSQPLYNISLYENVTVGTSVLTVLVSPRFTAGPLSSPGPTVVRHPEGFCPRDLSNQGRRHPQIPELCLLVY

SEQ ID NO: 2510 - protein, 3354 aa, Homo Sapiens
MGRHVATSCHVAWLLVLISGCWGQVNRLPFFTNHFFDTYLLISEDTPVGSSVTQLLAQDMDNDPLVFGVSGEEASRFFAVEPDTGVVWLRQPLDRETKSEFTVEFSVSDHQGVITRKVNIQVGDVNDNAPTFHNQPYSVRIPENTPVGTPIFIVNATDPDLGAGGSVLYSFQPPSQFFAIDSARGIVTVIRELDYETTQAYQLTVNATDQDKTRPLSTLANLAIIITDVQDMDPIFINLPYSTNIYEHSPPGTTVRIITAIDQDKGRPRGIGYTIVSGNTNSIFALDYISGVLTLNGLLDRENPLYSHGFILTVKGTELNDDRTPSDATVTTTFNILVIDINDNAPEFNSSEYSVAITELAQVGFALPLFIQVVDKDENLGLNSMFEVYLVGNNSHHFIISPTSVQGKADIRIRVAIPLDYETVDRYDFDLFANESVPDHVGYAKVKITLINENDNRPIFSQPLYNISLYENVTVGTSVLTVLATDNDAGTFGEVSYFFSDDPDRFSLDKDTGLIMLIARLDYELIQRFTLTIIARDGGGEETTGRVRINVLDVNDNVPTFQKDAYVGALRENEPSVTQLVRLRATDEDSPPNNQITYSIVSASAFGSYFDISLYEGYGVISVSRPLDYEQISNGLIYLTVMAMDAGNPPLNSTVPVTIEVFDENDNPPTFSKPAYFVSVVENIMAGATVLFLNATDLDRSREYGQESIIYSLEGSTQFRINARSGEITTTSLLDRETKSEYILIVRAVDGGVGHNQKTGIATVNITLLDINDNHPTWKDAPYYINLVEMTPPDSDVTTVVAVDPDLGENGTLVYSIQPPNKFYSLNSTTGKIRTTHAMLDRENPDPHEAELMRKIVVSVTDCGRPPLKATSSATVFVNLLDLNDNDPTFQNLPFVAEVLEGIPAGVSIYQVVAIDLDEGLNGLVSYRMPVGMPRMDFLINSSSGVVVTTTELDRERIAEYQLRVVASDAGTPTKSSTSTLTIHVLDVNDETPTFFPAVYNVSVSEDVPREFRVVWLNCTDNDVGLNAELSYFITGGNVDGKFSVGYRDAVVRTVVGLDRETTAAYMLILEAIDNGPVGKRHTGTATVFVTVLDVNDNRPIFLQSSYEASVPEDIPEGHSILQLKATDADEGEFGRVWYRILHGNHGNNFRIHVSNGLLMRGPRPLDRERNSSHVLIVEAYNHDLGPMRSSVRVIVYVEDINDEAPVFTQQQYSRLGLRETAGIGTSVIVVQATDRDSGDGGLVNYRILSGAEGKFEIDESTGLIITVNYLDYETKTSYMMNVSATDQAPPFNQGFCSVYITLLNELDEAVQFSNASYEAAILENLALGTEIVRVQAYSIDNLNQITYRFNAYTSTQAKALFKIDAITGVITVQGLVDREKGDFYTLTVVADDGGPKVDSTVKVYITVLDENDNSPRFDFTSDSAVSIPEDCPVGQRVATVKAWDPDAGSNGQVVFSLASGNIAGAFEIVTTNDSIGEVFVARPLDREELDHYILQVVASDRGTPPRKKDHILQVTILDINDNPPVIESPFGYNVSVNENVGGGTAVVQVRATDRDIGINSVLSYYITEGNKDMAFRMDRISGEIATRPAPPDRERQSFYHLVATVEDEGTPTLSATTHVYVTIVDENDNAPMFQQPHYEVLLDEGPDTLNTSLITIQALDLDEGPNGTVTYAIVAGNIVNTFRIDRHMGVITAAKELDYEISHGRYTLIVTATDQCPILSHRLTSTTTVLVNVNDINDNVPTFPRDYEGPFEVTEGQPGPRVWTFLAHDRDSGPNGQVEYSIMDGDPLGEFVISPVEGVLRVRKDVELDRETIAFYNLTICARDRGMPPLSSTMLVGIRVLDINDNDPVLLNLPMNITISENSPVSSFVAHVLASDADSGCNARLTFNITAGNRERAFFINATTGIVTVNRPLDRERIPEYKLTISVKDNPENPRIARRDYDLLLIFLSDENDNHPLFTKSTYQAEVMENSPAGTPLTVLNGPILALDADQDIYAVVTYQLLGAQSGLFDINSSTGVVTVRSGVIIDREAFSPPILELLLLAEDIGLLNSTAHLLITILDDNDNRPTFSPATLTVHLLENCPPGFSVLQVTATDEDSGLNGELVYRIEAGAQDRFLIHLVTGVIRVGNATIDREEQESYRLTVVATDRGTVPLSGTAIVTILIDDINDSRPEFLNPIQTVSVLESAEPGTVIANITAIDHDLNPKLEYHIVGIVAKDDTDRLVPNQEDAFAVNINTGSVMVKSPMNRELVATYEVTLSVIDNASDLPERSVSVPNAKLTVNVLDVNDNTPQFKPFGITYYMERILEGATPGTTLIAVAAVDPDKGLNGLVTYTLLDLVPPGYVQLEDSSAGKVIANRTVDYEEVHWLNFTVRASDNGSPPRAAEIPVYLEIVDINDNNPIFDQPSYQEAVFEDVPVGTIILTVTATDADSGNFALIEYSLGDGESKFAINPTTGDIYVLSSLDREKKDHYILTALAKDNPGDVASNRRENSVQVVIQVLDVNDCRPQFSKPQFSTSVYENEPAGTSVITMMATDQDEGPNGELTYSLEGPGVEAFHVDMDSGLVTTQRPLQSYEKFSLTVVATDGGEPPLWGTTMLLVEVIDVNDNRPVFVRPPNGTILHIREEIPLRSNVYEVYATDKDEGLNGAVRYSFLKTAGNRDWEFFIIDPISGLIQTAQRLDRESQAVYSLILVASDLGQPVPYETMQPLQVALEDIDDNEPLFVRPPKGSPQYQLLTVPEHSPRGTLVGNVTGAVDADEGPNAIVYYFIAAGNEEKNFHLQPDGCLLVLRDLDREREAIFSFIVKASSNRSWTPPRGPSPTLDLVADLTLQEVRVVLEDINDQPPRFTKAEYTAGVATDAKVGSELIQVLALDADIGNNSLVFYSILAIHYFRALANDSEDVGQVFTMGSMDGILRTFDLFMAYSPGYFVVDIVARDLAGHNDTAIIGIYILRDDQRVKIVINEIPDRVRGFEEEFIHLLSNITGAIVNTDNVQFHVDKKGRVNFAQTELLIHVVNRDTNRILDVDRVIQMIDENKEQLRNLFRNYNVLDVQPAISVRLPDDMSALQMAIIVLAILLFLAAMLFVLMNWYYRTVHKRKLKAIVAGSAGNRGFIDIMDMPNTNKYSFDGANPVWLDPFCRNLELAAQAEHEDDLPENLSEIADLWNSPTRTHGTFGREPAAVKPDDDRYLRAAIQEYDNIAKLGQIIREGPIKGSLLKVVLEDYLRLKKLFAQRMVQKASSCHSSISELIQTELDEEPGDHSPGQGSLRFRHKPPVELKGPDGIHVVHGSTGTLLATDLNSLPEEDQKGLGRSLETLTAAEATAFERNARTESAKSTPLHKLRDVIMETPLEITEL

SEQ ID NO: 2511 - protein, 1061 aa, Homo Sapiens
MGRHVATSCHVAWLLVLISGCWGQVNRLPFFTNHFFDTYLLISEDTPVGSSVTQLLAQDMDNDPLVFGVSGEEASRFFAVEPDTGVVWLRQPLDRETKSEFTVEFSVSDHQGVITRKVNIQVGDVNDNAPTFHNQPYSVRIPENTPVGTPIFIVNATDPDLGAGGSVLYSFQPPSQFFAIDSARGIVTVIRELDYETTQAYQLTVNATDQDKTRPLSTLANLAIIITDVQDMDPIFINLPYSTNIYEHSPPGTTVRIITAIDQDKGRPRGIGYTIVSGNTNSIFALDYISGVLTLNGLLDRENPLYSHGFILTVKGTELNDDRTPSDATVTTTFNILVIDINDNAPEFNSSEYSVAITELAQVGFALPLFIQVVDKDENLGLNSMFEVYLVGNNSHHFIISPTSVQGKADIRIRVAIPLDYETVDRYDFDLFANESVPDHVGYAKVKITLINENDNRPIFSQPLYNISLYENVTVGTSVLTVLATDNDAGTFGEVSYFFSDDPDRFSLDKDTGLIMLIARLDYELIQRFTLTIIARDGGGEETTGRVRINVLDVNDNVPTFQKDAYVGALRENEPSVTQLVRLRATDEDSPPNNQITYSIVSASAFGSYFDISLYEGYGVISVSRPLDYEQISNGLIYLTVMAMDAGNPPLNSTVPVTIEVFDENDNPPTFSKPAYFVSVVENIMAGATVLFLNATDLDRSREYGQESIIYSLEGSTQFRINARSGEITTTSLLDRETKSEYILIVRAVDGGVGHNQKTGIATVNITLLDINDNHPTWKDAPYYINLVEMTPPDSDVTTVVAVDPDLGENGTLVYSIQPPNKFYSLNSTTGKIRTTHAMLDRENPDPHEAELMRKIVVSVTDCGRPPLKATSSATVFVNLLDLNDNDPTFQNLPFVAEVLEGIPAGVSIYQVVAIDLDEGLNGLVSYRMPVGMPRMDFLINSSSGVVVTTTELDRERIAEYQLRVVASDAGTPTKSSTSTLTIHVLDVNDETPTFFPAVYNVSVSEDVPREFRVVWLNCTDNDVGLNAELSYFITGAAPASAHLCRPPGALPPPLPDGQPD

SEQ ID NO: 2512 - protein, 1380 aa, Homo Sapiens
MGRHVATSCHVAWLLVLISGCWGQVNRLPFFTNHFFDTYLLISEDTPVGSSVTQLLAQDMDNDPLVFGVSGEEASRFFAVEPDTGVVWLRQPLDRETKSEFTVEFSVSDHQGVITRKVNIQVGDVNDNAPTFHNQPYSVRIPENTPVGTPIFIVNATDPDLGAGGSVLYSFQPPSQFFAIDSARGIVTVIRELDYETTQAYQLTVNATDQDKTRPLSTLANLAIIITDVQDMDPIFINLPYSTNIYEHSPPGTTVRIITAIDQDKGRPRGIGYTIVSGNTNSIFALDYISGVLTLNGLLDRENPLYSHGFILTVKGTELNDDRTPSDATVTTTFNILVIDINDNAPEFNSSEYSVAITELAQVGFALPLFIQVVDKDENLGLNSMFEVYLVGNNSHHFIISPTSVQGKADIRIRVAIPLDYETVDRYDFDLFANESVPDHVGYAKVKITLINENDNRPIFSQPLYNISLYENVTVGTSVLTVLATDNDAGTFGEVSYFFSDDPDRFSLDKDTGLIMLIARLDYELIQRFTLTIIARDGGGEETTGRVRINVLDVNDNVPTFQKDAYVGALRENEPSVTQLVRLRATDEDSPPNNQITYSIVSASAFGSYFDISLYEGYGVISVSRPLDYEQISNGLIYLTVMAMDAGNPPLNSTVPVTIEVFDENDNPPTFSKPAYFVSVVENIMAGATVLFLNATDLDRSREYGQESIIYSLEGSTQFRINARSGEITTTSLLDRETKSEYILIVRAVDGGVGHNQKTGIATVNITLLDINDNHPTWKDAPYYINLVEMTPPDSDVTTVVAVDPDLGENGTLVYSIQPPNKFYSLNSTTGKIRTTHAMLDRENPDPHEAELMRKIVVSVTDCGRPPLKATSSATVFVNLLDLNDNDPTFQNLPFVAEVLEGIPAGVSIYQVVAIDLDEGLNGLVSYRMPVGMPRMDFLINSSSGVVVTTTELDRERIAEYQLRVVASDAGTPTKSSTSTLTIHVLDVNDETPTFFPAVYNVSVSEDVPREFRVVWLNCTDNDVGLNAELSYFITGGNVDGKFSVGYRDAVVRTVVGLDRETTAAYMLILEAIDNGPVGKRHTGTATVFVTVLDVNDNRPIFLQSSYEASVPEDIPEGHSILQAATDADEGEFGRVWYRILHGNHGNNFRIHVSNGLLMRGPRPLDRERNSSHVLIVEAYNHDLGPMRSSVRVIVYVEDINDEAPVFTQQQYSRLGLRETAGIGTSVIVVQATDRDSGDGGLVNYRILSGAEGKFEIDESTGLIITVNYLDYETKTSYMMNVSATDQAPPFNQGFCSVYITLLNELDEAVQFSNASYEAAILENLALGTEIVRVQAYSIDNLNQITYRFNAYTSTQAKALFKIDAITVRGWGQGAPFLPI

SEQ ID NO: 2513 - protein, 1211 aa, Homo Sapiens
MGRHVATSCHVAWLLVLISGCWGQVNRLPFFTNHFFDTYLLISEDTPVGSSVTQLLAQDMDNDPLVFGVSGEEASRFFAVEPDTGVVWLRQPLDRETKSEFTVEFSVSDHQGVITRKVNIQVGDVNDNAPTFHNQPYSVRIPENTPVGTPIFIVNATDPDLGAGGSVLYSFQPPSQFFAIDSARGIVTVIRELDYETTQAYQLTVNATDQDKTRPLSTLANLAIIITDVQDMDPIFINLPYSTNIYEHSPPGTTVRIITAIDQDKGRPRGIGYTIVSGNTNSIFALDYISGVLTLNGLLDRENPLYSHGFILTVKGTELNDDRTPSDATVTTTFNILVIDINDNAPEFNSSEYSVAITELAQVGFALPLFIQVVDKDENLGLNSMFEVYLVGNNSHHFIISPTSVQGKADIRIRVAIPLDYETVDRYDFDLFANESVPDHVGYAKVKITLINENDNRPIFSQPLYNISLYENVTVGTSVLTVLATDNDAGTFGEVSYFFSDDPDRFSLDKDTGLIMLIARLDYELIQRFTLTIIARDGGGEETTGRVRINVLDVNDNVPTFQKDAYVGALRENEPSVTQLVRLRATDEDSPPNNQITYSIVSASAFGSYFDISLYEGYGVISVSRPLDYEQISNGLIYLTVMAMDAGNPPLNSTVPVTIEVFDENDNPPTFSKPAYFVSVVENIMAGATVLFLNATDLDRSREYGQESIIYSLEGSTQFRINARSGEITTTSLLDRETKSEYILIVRAVDGGVGHNQKTGIATVNITLLDINDNHPTWKDAPYYINLVEMTPPDSDVTTVVAVDPDLGENGTLVYSIQPPNKFYSLNSTTGKIRTTHAMLDRENPDPHEAELMRKIVVSVTDCGRPPLKATSSATVFVNLLDLNDNDPTFQNLPFVAEVLEGIPAGVSIYQVVAIDLDEGLNGLVSYRMPVGMPRMDFLINSSSGVVVTTTELDRERIAEYQLRVVASDAGTPTKSSTSTLTIHVLDVNDETPTFFPAVYNVSVSEDVPREFRVVWLNCTDNDVGLNAELSYFITGGNVDGKFSVGYRDAVVRTVVGLDRETTAAYMLILEAIDNGPVGKRHTGTATVFVTVLDVNDNRPIFLQSSYEASVPEDIPEGHSILQEDLASPCISPAPPRRAFQSSGEKETSQFPGKELRREPGPSKAQNRAAFTEPLAEAPLLGSKQAQEERAPLPREQAQQLQGSEGEKGGP

SEQ ID NO: 2514 - protein, 530 aa, Homo Sapiens
MGRHVATSCHVAWLLVLISGCWGQVNRLPFFTNHFFDTYLLISEDTPVGSSVTQLLAQDMDNDPLVFGVSGEEASRFFAVEPDTGVVWLRQPLDRETKSEFTVEFSVSDHQGVITRKVNIQVGDVNDNAPTFHNQPYSVRIPENTPVGTPIFIVNATDPDLGAGGSVLYSFQPPSQFFAIDSARGIVTVIRELDYETTQAYQLTVNATDQDKTRPLSTLANLAIIITDVQDMDPIFINLPYSTNIYEHSPPGTTVRIITAIDQDKGRPRGIGYTIVSGNTNSIFALDYISGVLTLNGLLDRENPLYSHGFILTVKGTELNDDRTPSDATVTTTFNILVIDINDNAPEFNSSEYSVAITELAQVGFALPLFIQVVDKDENLGLNSMFEVYLVGNNSHHFIISPTSVQGKADIRIRVAIPLDYETVDRYDFDLFANESVPDHVGYAKVKITLINENDNRPIFSQPLYNISLYENVTVGTSVLTVLVSPRFTAGPLSSPGPTVVRHPEGFCPRDLSNQGRRHPQIPELCLLVY

SEQ ID NO: 2515 - protein, 3354 aa, Homo Sapiens
MGRHVATSCHVAWLLVLISGCWGQVNRLPFFTNHFFDTYLLISEDTPVGSSVTQLLAQDMDNDPLVFGVSGEEASRFFAVEPDTGVVWLRQPLDRETKSEFTVEFSVSDHQGVITRKVNIQVGDVNDNAPTFHNQPYSVRIPENTPVGTPIFIVNATDPDLGAGGSVLYSFQPPSQFFAIDSARGIVTVIRELDYETTQAYQLTVNATDQDKTRPLSTLANLAIIITDVQDMDPIFINLPYSTNIYEHSPPGTTVRIITAIDQDKGRPRGIGYTIVSGNTNSIFALDYISGVLTLNGLLDRENPLYSHGFILTVKGTELNDDRTPSDATVTTTFNILVIDINDNAPEFNSSEYSVAITELAQVGFALPLFIQVVDKDETQGLNSMFEVYLVGNNSHHFIISPTSVQGKADIRIRVAIPLDYETVDRYDFDLFANESVPDHVGYAKVKITLINENDNRPIFSQPLYNISLYENVTVGTSVLTVLATDNDAGTFGEVSYFFSDDPDRFSLDKDTGLIMLIARLDYELIQRFTLTIIARDGGGEETTGRVRINVLDVNDNVPTFQKDAYVGALRENEPSVTQLVRLRATDEDSPPNNQITYSIVSASAFGSYFDISLYEGYGVISVSRPLDYEQISNGLIYLTVMAMDAGNPPLNSTVPVTIEVFDENDNPPTFSKPAYFVSVVENIMAGATVLFLNATDLDRSREYGQESIIYSLEGSTQFRINARSGEITTTSLLDRETKSEYILIVRAVDGGVGHNQKTGIATVNITLLDINDNHPTWKDAPYYINLVEMTPPDSDVTTVVAVDPDLGENGTLVYSIQPPNKFYSLNSTTGKIRTTHAMLDRENPDPHEAELMRKIVVSVTDCGRPPLKATSSATVFVNLLDLNDNDPTFQNLPFVAEVLEGIPAGVSIYQVVAIDLDEGLNGLVSYRMPVGMPRMDFLINSSSGVVVTTTELDRERIAEYQLRVVASDAGTPTKSSTSTLTIHVLDVNDETPTFFPAVYNVSVSEDVPREFRVVWLNCTDNDVGLNAELSYFITGGNVDGKFSVGYRDAVVRTVVGLDRETTAAYMLILEAIDNGPVGKRHTGTATVFVTVLDVNDNRPIFLQSSYEASVPEDIPEGHSILQLKATDADEGEFGRVWYRILHGNHGNNFRIHVSNGLLMRGPRPLDRERNSSHVLIVEAYNHDLGPMRSSVRVIVYVEDINDEAPVFTQQQYSRLGLRETAGIGTSVIVVQATDRDSGDGGLVNYRILSGAEGKFEIDESTGLIITVNYLDYETKTSYMMNVSATDQAPPFNQGFCSVYITLLNELDEAVQFSNASYEAAILENLALGTEIVRVQAYSIDNLNQITYRFNAYTSTQAKALFKIDAITGVITVQGLVDREKGDFYTLTVVADDGGPKVDSTVQVYITVLDENDNSPRFDFTSDSAVSIPEDCPVGQRVATVKAWDPDAGSNGQVVFSLASGNIAGAFEIVTTNDSIGEVFVARPLDREELDHYILQVVASDRGTPPRKKDHILQVTILDINDNPPVIESPFGYNVSVNENVGGGTAVVQVRATDRDIGINSVLSYYITEGNKDMAFRMDRISGEIATRPAPPDRERQSFYHLVATVEDEGTPTLSATTHVYVTIVDENDNAPMFQQPHYEVLLDEGPDTLNTSLITIQALDLDEGPNGTVTYAIVAGNIVNTFRIDRHMGVITAAKELDYEISHGRYTLIVTATDQCPILSHRLTSTTTVLVNVNDINDNVPTFPRDYEGPFEVTEGQPGPRVWTFLAHDRDSGPNGQVEYSIMDGDPLGEFVISPVEGVLRVRKDVELDRETIAFYNLTICARDRGMPPLSSTMLVGIRVLDINDNDPVLLNLPMNITISENSPVSSFVAHVLASDADSGCNARLTFNITAGNRERAFFINATTGIVTVNRPLDRERIPEYKLTISVKDNPENPRIARRDYDLLLIFLSDENDNHPLFTKSTYQAEVMENSPAGTPLTVLNGPILALDADQDIYAVVTYQLLGAQSGLFDINSSTGVVTVRSGVIIDREAFSPPILELLLLAEDIGLLNSTAHLLITILDDNDNRPTFSPATLTVHLLENCPPGFSVLQVTATDEDSGLNGELVYRIEAGAQDRFLIHLVTGVIRVGNATIDREEQESYRLTVVATDRGTVPLSGTAIVTILIDDINDSRPEFLNPIQTVSVLESAEPGTVIANITAIDHDLNPKLEYHIVGIVAKDDTDRLVPNQEDAFAVNINTGSVMVKSPMNRELVATYEVTLSVIDNASDLPERSVSVPNAKLTVNVLDVNDNTPQFKPFGITYYMERILEGATPGTTLIAVAAVDPDKGLNGLVTYTLLDLVPPGYVQLEDSSAGKVIANRTVDYEEVHWLNFTVRASDNGSPPRAAEIPVYLEIVDINDNNPIFDQPSYQEAVFEDVPVGTIILTVTATDADSGNFALIEYSLGDGESKFAINPTTGDIYVLSSLDREKKDHYILTALAKDNPGDVASNRRENSVQVVIQVLDVNDCRPQFSKPQFSTSVYENEPAGTSVITMMATDQDEGPNGELTYSLEGPGVEAFHVDMDSGLVTTQRPLQSYEKFSLTVVATDGGEPPLWGTTMLLVEVIDVNDNRPVFVRPPNGTILHIREEIPLRSNVYEVYATDKDEGLNGAVRYSFLKTAGNRDWEFFIIDPISGLIQTAQRLDRESQAVYSLILVASDLGQPVPYETMQPLQVALEDIDDNEPLFVRPPKGSPQYQLLTVPEHSPRGTLVGNVTGAVDADEGPNAIVYYFIAAGNEEKNFHLQPDGCLLVLRDLDREREAIFSFIVKASSNRSWTPPRGPSPTLDLVADLTLQEVRVVLEDINDQPPRFTKAEYTAGVATDAKVGSELIQVLALDADIGNNSLVFYSILAIHYFRALANDSEDVGQVFTMGSMDGILRTFDLFMAYSPGYFVVDIVARDLAGHNDTAIIGIYILRDDQRVKIVINEIPDRVRGFEEEFIHLLSNITGAIVNTDNVQFHVDKKGRVNFAQTELLIHVVNRDTNRILDVDRVIQMIDENKEQLRNLFRNYNVLDVQPAISVRLPDDMSALQMAIIVLAILLFLAAMLFVLMNWYYRTVHKRKLKAIVAGSAGNRGFIDIMDMPNTNKYSFDGANPVWLDPFCRNLELAAQAEHEDDLPENLSEIADLWNSPTRTHGTFGREPAAVKPDDDRYLRAAIQEYDNIAKLGQIIREGPIKGSLLKVVLEDYLRLKKLFAQRMVQKASSCHSSISELIQTELDEEPGDHSPGQGSLRFRHKPPVELKGPDGIHVVHGSTGTLLATDLNSLPEEDQKGLGRSLETLTAAEATAFERNARTESAKSTPLHKLRDVIMETPLEITEL

SEQ ID NO: 2516 - protein, 1381 aa, Homo Sapiens
MGRHVATSCHVAWLLVLISGCWGQVNRLPFFTNHFFDTYLLISEDTPVGSSVTQLLAQDMDNDPLVFGVSGEEASRFFAVEPDTGVVWLRQPLDRETKSEFTVEFSVSDHQGVITRKVNIQVGDVNDNAPTFHNQPYSVRIPENTPVGTPIFIVNATDPDLGAGGSVLYSFQPPSQFFAIDSARGIVTVIRELDYETTQAYQLTVNATDQDKTRPLSTLANLAIIITDVQDMDPIFINLPYSTNIYEHSPPGTTVRIITAIDQDKGRPRGIGYTIVSGNTNSIFALDYISGVLTLNGLLDRENPLYSHGFILTVKGTELNDDRTPSDATVTTTFNILVIDINDNAPEFNSSEYSVAITELAQVGFALPLFIQVVDKDENLGLNSMFEVYLVGNNSHHFIISPTSVQGKADIRIRVAIPLDYETVDRYDFDLFANESVPDHVGYAKVKITLINENDNRPIFSQPLYNISLYENVTVGTSVLTVLATDNDAGTFGEVSYFFSDDPDRFSLDKDTGLIMLIARLDYELIQRFTLTIIARDGGGEETTGRVRINVLDVNDNVPTFQKDAYVGALRENEPSVTQLVRLRATDEDSPPNNQITYSIVSASAFGSYFDISLYEGYGVISVSRPLDYEQISNGLIYLTVMAMDAGNPPLNSTVPVTIEVFDENDNPPTFSKPAYFVSVVENIMAGATVLFLNATDLDRSREYGQESIIYSLEGSTQFRINARSGEITTTSLLDRETKSEYILIVRAVDGGVGHNQKTGIATVNITLLDINDNHPTWKDAPYYINLVEMTPPDSDVTTVVAVDPDLGENGTLVYSIQPPNKFYSLNSTTGKIRTTHAMLDRENPDPHEAELMRKIVVSVTDCGRPPLKATSSATVFVNLLDLNDNDPTFQNLPFVAEVLEGIPAGVSIYQVVAIDLDEGLNGLVSYRMPVGMPRMDFLINSSSGVVVTTTELDRERIAEYQLRVVASDAGTPTKSSTSTLTIHVLDVNDETPTFFPAVYNVSVSEDVPREFRVVWLNCTDNDVGLNAELSYFITGGNVDGKFSVGYRDAVVRTVVGLDRETTAAYMLILEAIDNGPVGKRHTGTATVFVTVLDVNDNRPIFLQSSYEASVPEDIPEGHSILQLKATDADEGEFGRVWYRILHGNHGNNFRIHVSNGLLMRGPRPLDRERNSSHVLIVEAYNHDLGPMRSSVRVIVYVEDINDEAPVFTQQQYSRLGLRETAGIGTSVIVVQATDRDSGDGGLVNYRILSGAEGKFEIDESTGLIITVNYLDYETKTSYMMNVSATDQAPPFNQGFCSVYITLLNELDEAVQFSNASYEAAILENLALGTEIVRVQAYSIDNLNQITYRFNAYTSTQAKALFKIDAITVRGWGQGAPFLPI

SEQ ID NO: 2517 - protein, 115 aa, Homo Sapiens
MSLRAGGKTRRWPGPEQAARGGRSGGEQSPRRGEARRRCTHAHGSSVTQLLAQDMDNDPLVFGVSGEEASRFFAVEPDTGVVWLRQPLDRETKSEFTVEFSVSDHQGVITRKVNI

SEQ ID NO: 2518 - protein, 1114 aa, Homo Sapiens
MVKSPMNRELVATYEVTLSVIDNASDLPERSVSVPNAKLTVNVLDVNDNTPQFKPFGITYYMERILEGATPGTTLIAVAAVDPDKGLNGLVTYTLLDLVPPGYVQLEDSSAGKVIANRTVDYEEVHWLNFTVRASDNGSPPRAAEIPVYLEIVDINDNNPIFDQPSYQEAVFEDVPVGTIILTVTATDADSGNFALIEYSLGDGESKFAINPTTGDIYVLSSLDREKKDHYILTALAKDNPGDVASNRRENSVQVVIQVLDVNDCRPQFSKPQFSTSVYENEPAGTSVITMMATDQDEGPNGELTYSLEGPGVEAFHVDMDSGLVTTQRPLQSYEKFSLTVVATDGGEPPLWGTTMLLVEVIDVNDNRPVFVRPPNGTILHIREEIPLRSNVYEVYATDKDEGLNGAVRYSFLKTAGNRDWEFFIIDPISGLIQTAQRLDRESQAVYSLILVASDLGQPVPYETMQPLQVALEDIDDNEPLFVRPPKGSPQYQLLTVPEHSPRGTLVGNVTGAVDADEGPNAIVYYFIAAGNEEKNFHLQPDGCLLVLRDLDREREAIFSFIVKASSNRSWTPPRGPSPTLDLVADLTLQEVRVVLEDINDQPPRFTKAEYTAGVATDAKVGSELIQVLALDADIGNNSLVFYSILAIHYFRALANDSEDVGQVFTMGSMDGILRTFDLFMAYSPGYFVVDIVARDLAGHNDTAIIGIYILRDDQRVKIVINEIPDRVRGFEEEFIHLLSNITGAIVNTDNVQFHVDKKGRVNFAQTELLIHVVNRDTNRILDVDRVIQMIDENKEQLRNLFRNYNVLDVQPAISVRLPDDMSALQMAIIVLAILLFLAAMLFVLMNWYYRTVHKRKLKAIVAGSAGNRGFIDIMDMPNTNKYSFDGANPVWLDPFCRNLELAAQAEHEDDLPENLSEIADLWNSPTRTHGTFGREPAAVKPDDDRYLRAAIQEYDNIAKLGQIIREGPIKGSLLKVVLEDYLRLKKLFAQRMVQKASSCHSSISELIQTELDEEPGDHSPGQGSLRFRHKPPVELKGPDGIHVVHGSTGTLLATDLNSLPEEDQKGLGRSLETLTAAEATAFERNARTESAKSTPLHKLRDVIMETPLEITEL

SEQ ID NO: 2519 - protein, 1079 aa, Homo Sapiens
MVKSPMNRELVATYEVTLSVIDNASDLPERSVSVPNAKLTVNVLDVNDNTPQFKPFGITYYMERILEGATPGTTLIAVAAVDPDKGLNGLVTYTLLDLVPPGYVQLEDSSAGKVIANRTVDYEEVHWLNFTVRASDNGSPPRAAEIPVYLEIVDINDNNPIFDQPSYQEAVFEDVPVGTIILTVTATDADSGNFALIEYSLGDGESKFAINPTTGDIYVLSSLDREKKDHYILTALAKDNPGDVASNRRENSVQVVIQVLDVNDCRPQFSKPQFSTSVYENEPAGTSVITMMATDQDEGPNGELTYSLEGPGVEAFHVDMDSGLVTTQRPLQSYEKFSLTVVATDGGEPPLWGTTMLLVEVIDVNDNRPVFVRPPNGTILHIREEIPLRSNVYEVYATDKDEGLNGAVRYSFLKTAGNRDWEFFIIDPISGLIQTAQRLDRESQAVYSLILVASDLGQPVPYETMQPLQVALEDIDDNEPLFVRPPKGSPQYQLLTVPEHSPRGTLVGNVTGAVDADEGPNAIVYYFIAAGNEEKNFHLQPDGCLLVLRDLDREREAIFSFIVKASSNRSWTPPRGPSPTLDLVADLTLQEVRVVLEDINDQPPRFTKAEYTAGVATDAKVGSELIQVLALDADIGNNSLVFYSILAIHYFRALANDSEDVGQVFTMGSMDGILRTFDLFMAYSPGYFVVDIVARDLAGHNDTAIIGIYILRDDQRVKIVINEIPDRVRGFEEEFIHLLSNITGAIVNTDNVQFHVDKKGRVNFAQTELLIHVVNRDTNRILDVDRVIQMIDENKEQLRNLFRNYNVLDVQPAISVRLPDDMSALQMAIIVLAILLFLAAMLFVLMNWYYRTVHKRKLKAIVAGSAGNRGFIDIMDMPNTNKYSFDGANPVWLDPFCRNLELAAQAEHEDDLPENLSEIADLWNSPTRTHGTFGREPAAVKPDDDRYLRAAIQEYDNIAKLGQIIREGPIKLIQTELDEEPGDHSPGQGSLRFRHKPPVELKGPDGIHVVHGSTGTLLATDLNSLPEEDQKGLGRSLETLTAAEATAFERNARTESAKSTPLHKLRDVIMETPLEITEL

SEQ ID NO: 2520 - protein, 6 aa, Homo Sapiens
PCCTLN

SEQ ID NO: 2521 - protein, 29 aa, Homo Sapiens
TGKGHGADTCTSWKAQRNDRRINMAVTKH

SEQ ID NO: 2522 - protein, 396 aa, Homo Sapiens
VITRKVNIQVGDVNDNAPTFHNQPYSVRIPENTPVGTPIFIVNATDPDLGAGGSVLYSFQPPSQFFAIDSARGIVTVIRELDYETTQAYQLTVNATDQDKTRPLSTLANLAIIITDVQDMDPIFINLPYSTNIYEHSPPGTTVRIITAIDQDKGRPRGIGYTIVSGNTNSIFALDYISGVLTLNGLLDRENPLYSHGFILTVKGTELNDDRTPSDATVTTTFNILVIDINDNAPEFNSSEYSVAITELAQVGFALPLFIQVVDKDENLGLNSMFEVYLVGNNSHHFIISPTSVQGKADIRIRVAIPLDYETVDRYDFDLFANESVPDHVGYAKVKITLINENDNRPIFSQPLYNISLYENVTVGTSVLTVLWEKFFCSNSSRFSSAQLVVSSWNQL

SEQ ID NO: 2523 - protein, 1035 aa, Homo Sapiens
  misc_feature (1)..(1): Xaa can be any naturally occurring amino acid
XDKTRPLSTLANLAIIITDVQDMDPIFINLPYSTNIYEHSPPGTTVRIITAIDQDKGRPRGIGYTIVSGNTNSIFALDYISGVLTLNGLLDRENPLYSHGFILTVKGTELNDDRTPSDATVTTTFNILVIDINDNAPEFNSSEYSVAITELAQVGFALPLFIQVVDKDEENGGWLQGRPEGVGEGLHVQNLGLNSMFEVYLVGNNSHHFIISPTSVQGKADIRIRVAIPLDYETVDRYDFDLFANESVPDHVGYAKVKITLINENDNRPIFSQPLYNISLYENVTVGTSVLTVLATDNDAGTFGEVSYFFSDDPDRFSLDKDTGLIMLIARLDYELIQRFTLTIIARDGGGEETTGRVRINVLDVNDNVPTFQKDAYVGALRENEPSVTQLVRLRATDEDSPPNNQITYSIVSASAFGSYFDISLYEGYGVISVSRPLDYEQISNGLIYLTVMAMDAGNPPLNSTVPVTIEVFDENDNPPTFSKPAYFVSVVENIMAGATVLFLNATDLDRSREYGQESIIYSLEGSTQFRINARSGEITTTSLLDRETKSEYILIVRAVDGGVGHNQKTGIATVNITLLDINDNHPTWKDAPYYINLVEMTPPDSDVTTVVAVDPDLGENGTLVYSIQPPNKFYSLNSTTGKIRTTHAMLDRENPDPHEAELMRKIVVSVTDCGRPPLKATSSATVFVNLLDLNDNDPTFQNLPFVAEVLEGIPAGVSIYQVVAIDLDEGLNGLVSYRMPVGMPRMDFLINSSSGVVVTTTELDRERIAEYQLRVVASDAGTPTKSSTSTLTIHVLDVNDETPTFFPAVYNVSVSEDVPREFRVVWLNCTDNDVGLNAELSYFITGGNVDGKFSVGYRDAVVRTVVGLDRETTAAYMLILEAIDNGPVGKRHTGTATVFVTVLDVNDNRPIFLQSSYEASVPEDIPEGHSILQHPPWPLKGASSIIFNPFLIDPNVGALKRGHQDGCQDHAWRALFAPPPSWHPGICSTRREAAAPTGHQADAGSTRETQGREPRGFAPALGQHRCQDSVLAPV

SEQ ID NO: 2524 - protein, 165 aa, Homo Sapiens
  misc_feature (1)..(1): Xaa can be any naturally occurring amino acid
XDNAPEFNSSEYSVAITELAQVGFALPLFIQVVDKDEGLNSMFEVYLVGNNSHHFIISPTSVQGKADIRIRVAIPLDYETVDRYDFDLFANESVPDHVGYAKVKITLINENDNRPIFSQPLYNISLYENVTVGTSVLTVLWEKFFCSNSSRFSSAQLVVSSWNQL

SEQ ID NO: 2525 - protein, 223 aa, Homo Sapiens
MPSRTGTSTLTVAVCKCNEQGEFTFCEDMAAQVGVSIQAVVAILLCILTITVITLLIFLRRRLRKQARAHGKSVPEIHEQLVTYDEEGGGEMDTTSYDVSVLNSVRRGGAKPPRPALDARPSLYAQVQKPPRHAPGAHGGPGEMAAMIEVKKDEADHDGDGPPYDTLHIYGYEGSESIAESLSSLGTDSSDSDVDYDFLNDWGPRFKMLAELYGSDPREELLY

SEQ ID NO: 2526 - protein, 17 aa, Homo Sapiens
MQRLMMLLATSGACLGL

SEQ ID NO: 2527 - protein, 76 aa, Homo Sapiens
MQRLMMLLATSGACLGLLAVAAVAAAGANPAQRDTHSLLPTHRRQKRDWIWNQMHIDEEKNTSLPHHVGKIKSSVS

SEQ ID NO: 2528 - protein, 131 aa, Homo Sapiens
MQRLMMLLATSGACLGLLAVAAVAAAGANPAQRDTHSLLPTHRRQKRDWIWNQMHIDEEKNTSLPHHVGKIKSSVSRKNAKYLLKGEYVGKVFRVDAETGDVFAIERLDRENISEYHLTAVIVDKDTGENL

SEQ ID NO: 2529 - protein, 784 aa, Homo Sapiens
MQRLMMLLATSGACLGLLAVAAVAAAGANPAQRDTHSLLPTHRRQKRDWIWNQMHIDEEKNTSLPHHVGKIKSSVSRKNAKYLLKGEYVGKVFRVDAETGDVFAIERLDRENISEYHLTAVIVDKDTGENLETPSSFTIKVHDVNDNWPVFTHRLFNASVPESSAVGTSVISVTAVDADDPTVGDHASVMYQILKGKEYFAIDNSGRIITITKSLDREKQARYEIVVEARDAQGLRGDSGTATVLVTLQDINDNFPFFTQTKYTFVVPEDTRVGTSVGSLFVEDPDEPQNRMTKYSILRGDYQDAFTIETNPAHNEGIIKPMKPLDYEYIQQYSFIVEATDPTIDLRYMSPPAGNRAQVIINITDVDEPPIFQQPFYHFQLKENQKKPLIGTVLAMDPDAARHSIGYSIRRTSDKGQFFRVTKKGDIYNEKELDREVYPWYNLTVEAKELDSTGTPTGKESIVQVHIEVLDENDNAPEFAKPYQPKVCENAVHGQLVLQISAIDKDITPRNVKFKFILNTENNFTLTDNHDNTANITVKYGQFDREHTKVHFLPVVISDNGMPSRTGTSTLTVAVCKCNEQGEFTFCEDMAAQVGVSIQAVVAILLCILTITVITLLIFLRRRLRKQARAHGKSVPEIHEQLVTYDEEGGGEMDTTSYDVSVLNSVRRGGAKPPRPALDARPSLYAQVQKPPRHAPGAHGGPGEMAAMIEVKKDEADHDGDGPPYDTLHIYGYEGSESIAESLSSLGTDSSDSDVDYDFLNDWGPRFKMLAELYGSDPREELLY

SEQ ID NO: 2530 - protein, 406 aa, Homo Sapiens
MQRLMMLLATSGACLGLLAVAAVAAAGANPAQRDTHSLLPTHRRQKRDWIWNQMHIDEEKNTSLPHHVGKIKSSVSRKNAKYLLKGEYVGKVFRVDAETGDVFAIERLDRENISEYHLTAVIVDKDTGENLETPSSFTIKVHDVNDNWPVFTHRLFNASVPESSAVGTSVISVTAVDADDPTVGDHASVMYQILKGKEYFAIDNSGRIITITKSLDREKQARYEIVVEARDAQGLRGDSGTATVLVTLQDINDNFPFFTQTKYTFVVPEDTRVGTSVGSLFVEDPDEPQNRMTKYSILRGDYQDAFTIETNPAHNEGIIKPMKPLDYEYIQQYSFIVEATDPTIDLRYMSPPAGNRAQVIINITDVDEPPIFQQPFYHFQLKENQKKPLIGTVLAMDPDAARHSIG

SEQ ID NO: 2531 - protein, 669 aa, Homo Sapiens
MQRLMMLLATSGACLGLLAVAAVAAAGANPAQRDTHSLLPTHRRQKRDWIWNQMHIDEEKNTSLPHHVGKIKSSVSRKNAKYLLKGEYVGKVFRVDAETGDVFAIERLDRENISEYHLTAVIVDKDTGENLETPSSFTIKVHDVNDNWPVFTHRLFNASVPESSAVGTSVISVTAVDADDPTVGDHASVMYQILKGKEYFAIDNSGRIITITKSLDREKQARYEIVVEARDAQGLRGDSGTATVLVTLQDINDNFPFFTQTKYTFVVPEDTRVGTSVGSLFVEDPDEPQNRMTKYSILRGDYQDAFTIETNPAHNEGIIKPMKPLDYEYIQQYSFIVEATDPTIDLRYMSPPAGNRAQVIINITDVDEPPIFQQPFYHFQLVLQISAIDKDITPRNVKFKFILNTENNFTLTDNHDNTANITVKYGQFDREHTKVHFLPVVISDNGMPSRTGTSTLTVAVCKCNEQGEFTFCEDMAAQVGVSIQAVVAILLCILTITVITLLIFLRRRLRKQARAHGKSVPEIHEQLVTYDEEGGGEMDTTSYDVSVLNSVRRGGAKPPRPALDARPSLYAQVQKPPRHAPGAHGGPGEMAAMIEVKKDEADHDGDGPPYDTLHIYGYEGSESIAESLSSLGTDSSDSDVDYDFLNDWGPRFKMLAELYGSDPREELLY

SEQ ID NO: 2532 - protein, 110 aa, Homo Sapiens
MQRLMMLLATSGACLGLLAVAAVAAAGANPAQRDTHSLLPTHRRQKRDWIWNQMHIDEEKNTSLPHHVGKIKSSVSRKNAKYLLKGEYVGKVFRVDAETGDVTQMSPRTG

SEQ ID NO: 2533 - protein, 745 aa, Homo Sapiens
MRRCRWAALALGLLRLCLAQANFAPHFFDNGVGSTNGNMALFSLPEDTPVGSHVYTLNGTDPEGDPISYHISFDPSTRSVFSVDPTFGNITLVEELDREREDEIEAIISISDGLNLVAEKVVILVTDANDEAPRFIQEPYVALVPEDIPAGSIIFKVHAVDRDTGSGGSVTYFLQNLHSPFAVDRHSGVLRLQAGATLDYERSRTHYITVVAKDGGGRLHGADVVFSATTTVTVNVEDVQDMAPVFVGTPYYGYVYEDTLPGSEVLKVVAMDGDRGKPNRILYSLVNGNDGAFEINETSGAISITQSPAQLQREVYELHVQVTEMSPAGSPAAQATVPVTIRIVDLNNHPPTFYGESGPQNRFELSMNEHPPQGEILRGLKITVNDSDQGANAKFNLQLVGPRGIFRVVPQTVLNEAQVTIIVENSAAIDFEKSKVLTFKLLAVEVNTPEKFSSTADVVIQLLDTNDNVPKFDSLYYVARIPENAPGGSSVVAVTAVDPDTGPWGEVKYSTYGTGADLFLIHPSTGLIYTQPWASLDAEATARYNFYVKAEDMEGKYSVAEVFITLLDVNDHPPQFGKSVQKKTMVLGTPVKIEAIDEDAEEPNNLVDYSITHAEPANVFDINSHTGEIWLKNSIRSLDALHNITPGRDCLWSLEVQAKDRGSPSFSTTALLKIDITDAEVRRLRYMKNSNFPGTTKSVRKPKFKPKKPHSSQGLFLHPHCEIALFNLSNVNLYSRVFQGAAQAS

SEQ ID NO: 2534 - protein, 859 aa, Homo Sapiens
MRRCRWAALALGLLRLCLAQANFAPHFFDNGVGSTNGNMALFSLPEDTPVGSHVYTLNGTDPEGDPISYHISFDPSTRSVFSVDPTFGNITLVEELDREREDEIEAIISISDGLNLVAEKVVILVTDANDEAPRFIQEPYVALVPEDIPAGSIIFKVHAVDRDTGSGGSVTYFLQNLHSPFAVDRHSGVLRLQAGATLDYERSRTHYITVVAKDGGGRLHGADVVFSATTTVTVNVEDVQDMAPVFVGTPYYGYVYEDTLPGSEVLKVVAMDGDRGKPNRILYSLVNGNDGAFEINETSGAISITQSPAQLQREVYELHVQVTEMSPAGSPAAQATVPVTIRIVDLNNHPPTFYGESGPQNRFELSMNEHPPQGEILRGLKITVNDSDQGANAKFNLQLVGPRGIFRVVPQTVLNEAQVTIIVENSAAIDFEKSKVLTFKLLAVEVNTPEKFSSTADVVIQLLDTNDNVPKFDSLYYVARIPENAPGGSSVVAVTAVDPDTGPWGEVKYSTYGTGADLFLIHPSTGLIYTQPWASLDAEATARYNFYVKAEDMEGKYSVAEVFITLLDVNDHPPQFGKSVQKKTMVLGTPVKIEAIDEDAEEPNNLVDYSITHAEPANVFDINSHTGEIWLKNSIRSLDALHNITPGRDCLWSLEVQAKDRGSPSFSTTALLKIDITDAETLSRSPMAAFLIQTKDNPMKAVGVLAGTMATVVAITVLISTATFWRNKKSNKVLPMRRVLRKRPSPAPRTIRIEWLKSKSTKAATKFMLKEKPPNENCNNNSPESSLLPRAPALPPPPSVAPSTGAAQWTVPTVSGSLTPQPTQPPPKPKTMGSPVQSTLISELKQKFEKKSVHNKAYF

SEQ ID NO: 2535 - protein, 135 aa, Homo Sapiens
  misc_feature (1)..(1): Xaa can be any naturally occurring amino acid
XENSAAIDFEKSKVLTFKLLAVEVNTPEKFSSTADVVIQLLDTNDNVPKFDSLYYVARIPENAPGGSSVVAVTAVDPDTGPWGEVKYSTYGTGADLFLIHPSTGLIYTQPWASLDAEATARYNFYVKAEDMEGKP

SEQ ID NO: 2536 - protein, 78 aa, Homo Sapiens
  misc_feature (1)..(1): Xaa can be any naturally occurring amino acid
XITHAEPANVFDINSHTGEIWLKNSIRSLDALHNITPGRDCLWSLEVQAKDRGSPSFSTTALLKIDITDAEVRRLRSN

SEQ ID NO: 2537 - protein, 598 aa, Homo Sapiens
  misc_feature (1)..(1): Xaa can be any naturally occurring amino acid
XITVVAKDGGGRLHGADVVFSATTTVTVNVEDVQDMAPVFVGTPYYGYVYEDTLPGSEVLKVVAMDGDRGKPNRILYSLVNGNDGAFEINETSGAISITQSPAQLQREVYELHVQVTEMSPAGSPAAQATVPVTIRIVDLNNHPPTFYGESGPQNRFELSMNEHPPQGEILRGLKITVNDSDQGANAKFNLQLVGPRGIFRVVPQTVLNEAQVTIIVENSAAIDFEKSKVLTFKAVDPDTGPWGEVKYSTYGTGADLFLIHPSTGLIYTQPWASLDAEATARYNFYVKAEDMEGKYSVAEVFITLLDVNDHPPQFGKSVQKKTMVLGTPVKIEAIDEDAEEPNNLVDYSITHAEPANVFDINSHTGEIWLKNSIRSLDALHNITPGRDCLWSLEVQAKDRGSPSFSTTALLKIDITDAETLSRSPMAAFLIQTKDNPMKAVGVLAGTMATVVAITVLISTATFWRNKKSNKVLPMRRVLRKRPSPAPRTIRIEWLKSKSTKAATKFMLKEKPPNENCNNNSPESSLLPRAPALPPPPSVAPSTGAAQWTVPTVSGSLTPQPTQPPPKPKTMGSPVQSTLISELKQKFEKKSVHNKAYF

SEQ ID NO: 2538 - protein, 48 aa, Homo Sapiens
  misc_feature (1)..(1): Xaa can be any naturally occurring amino acid
XMDGDRGKPNRILYSLVNDFPRQCRTILWHDSPAPPCGPVQNFRVHLP

SEQ ID NO: 2539 - protein, 788 aa, Homo Sapiens
MVLLRLLVFLFAPVVSDLCSLPCFINVSESQGPGTVLQFLSFNCSSYTPTPTLELLNVQPPTTFFNPPSLARWQGTYVGKLTLSSSAQLDALMVNHYKVQLKFTCGNHVMEGSLSVDVQRDLSHIQCAGQFASPAGEMIQVPETVTPGARLYTLLLPGLELHGAQMSIISAQDLPHFPGPFSINEQGWLQAPSQGLLGQAQKVFQLQISVSFGQRQSCQGMVIVKVLPVPSSQVSFLEQAQNITIPENLAPGSEVVQVQARGVDLRYEILSPVPSPLFSIGRADGVVRTTTPLELARTSGTAVSRLQVKAFEQGQLWASAKLNLTMNVQLVNLWPPRCLPALLVSQIPETAPVGTVLNTLTCEDPDSVGATLDYKLWFRSSSNPASLCLYDRVLEVNATLDCDTPGACFQHAASILVLDGGQPQMTTEVPVLVMVTPINEFSPACAPRTFRVQEDAAPHTLLGSVVGTDMDYPHDNIEYYTSGGPTTFAVDRLSGEVHLLGPLDYEQQRLYRLTVLVIDHGQDQNPNHHLSGSCTITIEVEDVNDHAPECEPPFQELTIYAPLGRSVEVTKMSCQIPQEPQRLIYSYSIVGGNSQNRFILQGAILVHSDLVLGPFWPEQPRTYELLICVADAGPSTPHLSTTATIIVHLVPRRASTVATSTHRTTVPSTMTPMLVTDTEAFWQPQPWFVVVLTATGALLLLALGWLLGRLLQGLAQLLQAPSKPAQALLLNSIQGTEGSIEGFLEAPKMEMSQAPSSVMSLHFDGRAQDSRTGRDYLFNTHTGARRWL

SEQ ID NO: 2540 - protein, 184 aa, Homo Sapiens
MVLLRLLVFLFAPVVSDLCSLPCFINVSESQGPGTVLQFLSFNCSSYTPTPTLELLNVQPPTTFFNPPSLARWQGTYVGKLTLSSSAQLDALMVNHYKVQLKFTCGNHVMEGSLSVDVQRDLSHIQCAGQFASPAGEMIQVPETVTPGARLYTLLLPGLELHGAQVSPEHGTVGDRMGVGGWRE

SEQ ID NO: 2541 - protein, 199 aa, Homo Sapiens
MVLLRLLVFLFAPVVSDLCSLPCFINVSESQGPGTVLQFLSFNCSSYTPTPTLELLNVQPPTTFFNPPSLARWQGTYVGKLTLSSSAQLDALMVNHYKVQLKFTCGNHVMEGSLSVDVQRDLSHIQCAGQFASPGEARGSRQGGGRHGLSRSSLTSTLASWGNDSGARDSHTWGSAVHSAPPRPRTPRSAGKPRTWDGG

SEQ ID NO: 2542 - protein, 134 aa, Homo Sapiens
QELTIYAPLGRSVEVTKMSCQIPQEPQRLIYSYSIVGGNSQNRFILQGAILVHSDLVLGPFWPEQPRTYELLICVADAGPSTPHLSTTATIIVHLVPRRASTVATSTHRTTVGPAAASTQQTSPGFAAKQHPGN

SEQ ID NO: 2543 - protein, 151 aa, Homo Sapiens
  misc_feature (1)..(1): Xaa can be any naturally occurring amino acid
XSTTATIIVHLVPRRASTVATSTHRTTVPSTMTPMLVTDTEAFWQPQPWFVVVLTATGALLLLALGWLLGRLLQGLAQLLQAPSKPAQALLLNSIQGTEGSIEGFLEAPKMEMSQAPSSVMSLQHFDGRAQDSRTGRDYLFNTHTGARRWL

SEQ ID NO: 2544 - protein, 190 aa, Homo Sapiens
MGSWALLWPPLLFTGLLVRPPGTMAQAQYCSVNKDIFEVEENTNVTEPLVDIHVPEGQEVTLGALSTPFAFRIQGNQLFLNVTPDYEEKSLLEAQLLCQSGGTLDTKVNSTVIPETQLQAEDRDKDDILFYTLQEMTAGASDYFSLVSVNRPALRLDRPLDFYERPNMTFWLLVRPSVAGHSGGECGTQP

SEQ ID NO: 2545 - protein, 166 aa, Homo Sapiens [sequence omitted]

SEQ ID NO: 2546 - protein, 651 aa, Homo Sapiens
MGSWALLWPPLLFTGLLVRPPGTMAQAQYCSVNKDIFEVEENTNVTEPLVDIHVPEGQEVTLGALSTPFAFRIQGNQLFLNVTPDYEEKSLLEAQLLCQSGGTLVTQLRVFVSVLDVNDNAPEFPFKTKEIRVEEDTKVNSTVIPETQLQAEDRDKDDILFYTLQEMTAGASDYFSLVSVNRPALRLDRPLDFYERPNMTFWLLVRDTPGENVEPSHTATATLVLNVVPADLRPPWFLPCTFSDGYVCIQAQYHGAVPTGHILPSPLVLRPGPIYAEDGDRGINQPIIYSIFRGNVNGTFIIHPDSGNLTVARSVPSPMTFLLLVKGQQADLARYSVTQVTVEAVAAAGSPPRFPQRLYRGTVARGAGAGVVVKDAAAPSQPLRIQAQDPEFSDLNSAITYRITNHSHFRMEGEVVLTTTTLAQAGAFYAEVEAHNTVTSGTATTVIEIQVSEQEPPSTGGGPSEDKRFSVVDMAALGGVLGALLLLALLGLAVLVHKHYGPRLKCCCGKAPEPQPQGFDNQAFLPDHKANWAPVPSPTHDPKPAEAPMPAEPAPPGPASPGGAPEPPAAARAGGSPTAVRSILTKERRPEGGYKAVWFGEDIGTEADVVVLNAPTLDVDGASDSGSGDEGEGAGRGGGPYDAPGGDDSYI

SEQ ID NO: 2547 - protein, 845 aa, Homo Sapiens
MGSWALLWPPLLFTGLLVRPPGTMAQAQYCSVNKDIFEVEENTNVTEPLVDIHVPEGQEVTLGALSTPFAFRIQGNQLFLNVTPDYEEKSLLEAQLLCQSGGTLVTQLRVFVSVLDVNDNAPEFPFKTKEIRVEEDTKVNSTVIPETQLQAEDRDKDDILFYTLQEMTAGASDYFSLVSVNRPALRLDRPLDFYERPNMTFWLLVRDTPGENVEPSHTATATLVLNVVPADLRPPWFLPCTFSDGYVCIQAQYHGAVPTGHILPSPLVLRPGPIYAEDGDRGINQPIIYSIFRGNVNGTFIIHPDSGNLTVARSVPSPMTFLLLVKGQQADLARYSVTQVTVEAVAAAGSPPRFPQRLYRGTVARGAGAGVVVKDAAAPSQPLRIQAQDPEFSDLNSAITYRITNHSHFRMEGEVVLTTTTLAQAGAFYAEVEAHNTVTSGTATTVIEIQVSEQEPPSTDVPPSPEAGGTTGPWTSTTSEVPRPPEPSQGPSTTSSGGGTGPHPPSGTTLRPPTSSTPGGPPGAENSTSHQPATPGGDTAQTPKPGTSQPMPPGVGTSTSHQPATPSGGTAQTPEPGTSQPMPPSMGTSTSHQPATPGGGTAQTPEAGTSQPMPPGMGTSTSHQPTTPGGGTAQTPEPGTSQPMPLSKSTPSSGGGPSEDKRFSVVDMAALGGVLGALLLLALLGLAVLVHKHYGPRLKCCCGKAPEPQPQGFDNQAFLPDHKANWAPVPSPTHDPKPAEAPMPAEPAPPGPASPGGAPEPPAAARAGGSPTAVRSILTKERRPEGGYKAVWFGEDIGTEADVVVLNAPTLDVDGASDSGSGDEGEGAGRGGGPYDAPGGDDSYI

SEQ ID NO: 2548 - protein, 845 aa, Homo Sapiens; identical to SEQ ID NO: 2547

SEQ ID NO: 2549 - protein, 106 aa, Homo Sapiens
MGSWALLWPPLLFTGLLVRPPGTMAQAQYCSVNKDIFEVEENTNVTEPLVDIHVPEGQEVTLGALSTPFAFRIQGNQLFLNVTPDYEKAGPFRDEAAWAHTLSTDH

SEQ ID NO: 2550 - protein, 15 aa, Homo Sapiens
MTAGASDYFSLVSVN

SEQ ID NO: 2551 - protein, 116 aa, Homo Sapiens
MEPAAGSSMEPSADWLATAAARGRVEEVRALLEAGALPNAPNSYGRRPIQVGRGSAAGAGDGGRLWRTKFAGELESGSASILRKKGRLPGEFSEGVCNHRPPPGDALGAWEAKEEE

SEQ ID NO: 2552 - protein, 138 aa, Homo Sapiens
MEPAAGSSMEPSADWLATAAARGRVEEVRALLEAGALPNAPNSYGRRPIQVMMMGSARVAELLLLHGAEPNCADPATLTRPVHDAAREGFLDTLVVLHRAGARLDVRDAWGRLPVDLAEELGHRDVARHPRLKEPERL

SEQ ID NO: 2553 - protein, 156 aa, Homo Sapiens
MEPAAGSSMEPSADWLATAAARGRVEEVRALLEAGALPNAPNSYGRRPIQVMMMGSARVAELLLLHGAEPNCADPATLTRPVHDAAREGFLDTLVVLHRAGARLDVRDAWGRLPVDLAEELGHRDVARYLRAAAGGTRGSNHARIDAAEGPSDIPD

SEQ ID NO: 2554 - protein, 167 aa, Homo Sapiens
MEPAAGSSMEPSADWLATAAARGRVEEVRALLEAGALPNAPNSYGRRPIQVMMMGSARVAELLLLHGAEPNCADPATLTRPVHDAAREGFLDTLVVLHRAGARLDVRDAWGRLPVDLAEELGHRDVARYLRAAAGGTRGSNHARIDAAEGPSEMIGNHLWVCRSRHA

SEQ ID NO: 2555 - protein, 105 aa, Homo Sapiens
MMMGSARVAELLLLHGAEPNCADPATLTRPVHDAAREGFLDTLVVLHRAGARLDVRDAWGRLPVDLAEELGHRDVARYLRAAAGGTRGSNHARIDAAEGPSDIPD

SEQ ID NO: 2556 - protein, 105 aa, Homo Sapiens; identical to SEQ ID NO: 2555

SEQ ID NO: 2557 - protein, 105 aa, Homo Sapiens; identical to SEQ ID NO: 2555

SEQ ID NO: 2558 - protein, 104 aa, Homo Sapiens
MMMGSARVAELLLLHGAEPNCADPATLTRPVHDAAREGFLDTLVVLHRAGARLDVRDAWGRLPVDLAEELGHRDVARYLRAAAGGTRGSNHARIDAAEGPSGED

SEQ ID NO: 2559 - protein, 121 aa, Homo Sapiens
MMMGSARVAELLLLHGAEPNCADPATLTRPVHDAAREGFLDTLVVLHRAGARLDVRDAWGRLPVDLAEELGHRDVARYLRAAAGGTRGSNHARIDAAEGPSVTASIQVPGGEEGDFGSSYS

SEQ ID NO: 2560 - protein, 132 aa, Homo Sapiens
MVRRFLVTLRIRRACGPPRVRVFVVHIPRLTGEWAAPGAPAAVALVLMLLRSQRLGQQPLPRRPGHDDGQRPSGGAAAAPRRGAQLRRPRHSHPTRARRCPGGLPGHAGGAAPGRGAAGRARCLGPSARGPG

SEQ ID NO: 2561 - protein, 132 aa, Homo Sapiens; identical to SEQ ID NO: 2560

SEQ ID NO: 2562 - protein, 85 aa, Homo Sapiens
MSVHMPAMKICEKLKKLDSQICELKYEKTLDLASVDLRKMRVAELKQILHSWGEECRACAEKTDYVNLIQELAPKYAATHPKTEL

SEQ ID NO: 2563 - protein, 187 aa, Homo Sapiens
MWCASPVAVVAFCAGLLVSHPVLTQGQEAGGRPGADCEVCKEFLNRFYKSLIDRGVNFSLDTIEKELISFCLDTKGKENRLCYYLGATKDAATKILSEVTRPMSVHMPAMKICEKLKKLDSQICELKYEKTLDLASVDLRKMRVAELKQILHSWGEECRACAEKTDYVNLIQELAPKYAATHPKTEL

SEQ ID NO: 2564 - protein, 111 aa, Homo Sapiens
MHPDLGPLCTLLYVTLTILCSSVSSDLAPYFTSEPLSAVQKLGGPVVLHCSAQPVTTRISWLHNGKTLDGNLEHVKIHQGTLTILSLNSSLLGYYQCLANNSIGAIVSGPA

SEQ ID NO: 2565 - protein, 143 aa, Homo Sapiens
MHPDLGPLCTLLYVTLTILCSSVSSDLAPYFTSEPLSAVQKLGGPVVLHCSAQPVTTRISWLHNGKTLDGNLEHVKIHQGTLTILSLNSSLLGYYQCLANNSIGAIVSGPATVSVAVLGDFGSSTKHVITAEEKSAGFIGCRV

SEQ ID NO: 2566 - protein, 165 aa, Homo Sapiens
MHPDLGPLCTLLYVTLTILCSSVSSDLAPYFTSEPLSAVQKLGGPVVLHCSAQPVTTRISWLHNGKTLDGNLEHVKIHQGTLTILSLNSSLLGYYQCLANNSIGAIVSGPATVSVAVLGDFGSSTKHVITAEEKSAGFIGCRVPESNPKAEVRYKIRGKWLEHST

SEQ ID NO: 2567 - protein, 1264 aa, Homo Sapiens
MHPDLGPLCTLLYVTLTILCSSVSSDLAPYFTSEPLSAVQKLGGPVVLHCSAQPVTTRISWLHNGKTLDGNLEHVKIHQGTLTILSLNSSLLGYYQCLANNSIGAIVSGPATVSVAVLGDFGSSTKHVITAEEKSAGFIGCRVPESNPKAEVRYKIRGKWLEHSTENYLILPSGNLQILNVSLEDKGSYKCAAYNPVTHQLKVEPIGRKLLVSRPSSDDVHILHPTHSQALAVLSRSPVTLECVVSGVPAPQVYWLKDGQDIAPGSNWRRLYSHLATDSVDPADSGNYSCMAGNKSGDVKYVTYMVNVLEHASISKGLQDQIVSLGATVHFTCDVHGNPAPNCTWFHNAQPIHPSARHLTAGNGLKISGVTVEDVGMYQCVADNGIGFMHSTGRLEIENDGGFKPVIITAPVSAKVADGDFVTLSCNASGLPVPVIRWYDSHGLITSHPSQVLRSKSRKSQLSRPEGLNLEPVYFVLSQAGASSLHIQAVTQEHAGKYICEAANEHGTTQAEASLMVVPFETNTKAETVTLPDAAQNDDRSKRDGSETGLLSSFPVKVHPSAVESAPEKNASGISVPDAPIILSPPQTHTPDTYNLVWRAGKDGGLPINAYFVKYRKLDDGVGMLGSWHTVRVPGSENELHLAELEPSSLYEVLMVARSAAGEGQPAMLTFRTSKEKTASSKNTQASSPPVGIPKYPVVSEAANNNFGVVLTDSSRHSGVPEAPDRPTISTASETSVYVTWIPRANGGSPITAFKVEYKRMRTSNWLVAAEDIPPSKLSVEVRSLEPGSTYKFRVIAINHYGESFRSSASRPYQVVGFPNRFSSRPITGPHIAYTEAVSDTQIMLKWTYIPSSNNNTPIQGFYIYYRPTDSDNDSDYKRDVVEGSKQWHMIGHLQPETSYDIKMQCFNEGGESEFSNVMICETKVKRVPGASEYPVKDLSTPPNSLGSGGNVGPATSPARSSDMLYLIVGCVLGVMVLILMVFIAMCLWKNRQQNTIQKYDPPGYLYQGSDMNGQMVDYTTLSGASQINGNVHGGFLTNGGLSSGYSHLHHKVPNAVNGIVNGSLNGGLYSGHSNSLTRTHVDFEHPHHLVNGGGMYTAVPQIDPLECVNCRNCRNNNRCFTKTNSTFSSSPPPVVPVVAPYPQDGLEMKPLSHVKVPVCLTSAVPDCGQLPEESVKDNVEPVPTQRTCCQDIVNDVSSDGSEDPAEFSRGDSCAHSETEINIVSWNALILPPVPEGCAEKTMWSPPGIPLDSPTEVLQQPRET

SEQ ID NO: 2568 - protein, 1287 aa, Homo Sapiens
MHPDLGPLCTLLYVTLTILCSSVSSDLAPYFTSEPLSAVQKLGGPVVLHCSAQPVTTRISWLHNGKTLDGNLEHVKIHQGTLTILSLNSSLLGYYQCLANNSIGAIVSGPATVSVAVLGDFGSSTKHVITAEEKSAGFIGCRVPESNPKAEVRYKIRGKWLEHSTENYLILPSGNLQILNVSLEDKGSYKCAAYNPVTHQLKVEPIGRKLLVSRPSSDDVHILHPTHSQALAVLSRSPVTLECVVSGVPAPQVYWLKDGQDIAPGSNWRRLYSHLATDSVDPADSGNYSCMAGNKSGDVKYVTYMVNVLEHASISKGLQDQIVSLGATVHFTCDVHGNPAPNCTWFHNAQPIHPSARHLTAGNGLKISGVTVEDVGMYQCVADNGIGFMHSTGRLEIENDGGFKPVIITAPVSAKVADGDFVTLSCNASGLPVPVIRWYDSHGLITSHPSQVLRSKSRKSQLSRPEGLNLEPVYFVLSQAGASSLHIQAVTQEHAGKYICEAANEHGTTQAEASLMVVPFETNTKAETVTLPDAAQNDDRSKRDGSETGLLSSFPVKVHPSAVESAPEKNASGISVPDAPIILSPPQTHTPDTYNLVWRAGKDGGLPINAYFVKYRKLDDGVGMLGSWHTVRVPGSENELHLAELEPSSLYEVLMVARSAAGEGQPAMLTFRTSKEKTASSKNTQASSPPVGIPKYPVVSEAANNNFGVVLTDSSRHSGVPEAPDRPTISTASETSVYVTWIPRANGGSPITAFKVEYKRMRTSNWLVAAEDIPPSKLSVEVRSLEPGSTYKFRVIAINHYGESFRSSASRPYQVVGFPNRFSSRPITGPHIAYTEAVSDTQIMLKWTYIPSSNNNTPIQGFYIYYRPTDSDNDSDYKRDVVEGSKQWHMIGHLQPETSYDIKMQCFNEGGESEFSNVMICETKVKRVPGASEYPVKDLSTPPNSLGSGGNVGPATSPARSSDMLYLIVGCVLGVMVLILMVFIAMCLWKNRQQNTIQKYDPPGYLYQGSDMNGQMVDYTTLSGASQINGNVHGGFLTNGGLSSGYSHLHHKVPNAVNGIVNGSLNGGLYSGHSNSLTRTHVDFEHPHHLVNGGGMYTAVPQIDPLECVNCRNCRNNNRCFTKTNSTFSSSPPPVVPVVAPYPQDGLEMKPLSHVKVPVCLTSAVPDCGQLPEESVKDNVEPVPTQRTCCQDIVNDVSSDGSEDPAEFSRGQEGMINLRIPDHLQLAKSCVWEGDSCAHSETEINIVSWNALILPPVPEGCAEKTMWSPPGIPLDSPTEVLQQPRET

SEQ ID NO: 2569 - protein, 641 aa, Homo Sapiens
MLGSWHTVRVPGSENELHLAELEPSSLYEVLMVARSAAGEGQPAMLTFRTSKEKTASSKNTQASSPPVGIPKYPVVSEAANNNFGVVLTDSSRHSGVPEAPDRPTISTASETSVYVTWIPRANGGSPITAFKVEYKRMRTSNWLVAAEDIPPSKLSVEVRSLEPGSTYKFRVIAINHYGESFRSSASRPYQVVGFPNRFSSRPITGPHIAYTEAVSDTQIMLKWTYIPSSNNNTPIQGFYIYYRPTDSDNDSDYKRDVVEGSKQWHMIGHLQPETSYDIKMQCFNEGGESEFSNVMICETKVKRVPGASEYPVKDLSTPPNSLGSGGNVGPATSPARSSDMLYLIVGCVLGVMVLILMVFIAMCLWKNRQQNTIQKYDPPGYLYQGSDMNGQMVDYTTLSGASQINGNVHGGFLTNGGLSSGYSHLHHKVPNAVNGIVNGSLNGGLYSGHSNSLTRTHVDFEHPHHLVNGGGMYTAVPQIDPLECVNCRNCRNNNRCFTKTNSTFSSSPPPVVPVVAPYPQDGLEMKPLSHVKVPVCLTSAVPDCGQLPEESVKDNVEPVPTQRTCCQDIVNDVSSDGSEDPAEFSRGDSCAHSETEINIVSWNALILPPVPEGCAEKTMWSPPGIPLDSPTEVLQQPRET

SEQ ID NO: 2570 - protein, 650 aa, Homo Sapiens
  misc_feature (1)..(1): Xaa can be any naturally occurring amino acid
XDLAPYFTSEPLSAVQKLGGPVVLHCSAQPVTTRISWLHNGKTLDGNLEHVKIHQGTLTILSLNSSLLGYYQCLANNSIGAIVSGPATVSVAVLGDFGSSTKHVITAEEKSAGFIGCRVPESNPKAEVRYKIRGKWLEHSTENYLILPSGNLQILNVSLEDKGSYKCAAYNPVTHQLKVEPIGRKLLVSRPSSDDVHILHPTHSQALAVLSRSPVTLECVVSGVPAPQVYWLKDGQDIAPGSNWRRLYSHLATDSVDPADSGNYSCMAGNKSGDVKYVTYMVNVLEHASISKGLQDQIVSLGATVHFTCDVHGNPAPNCTWFHNAQPIHPSARHLTAGNGLKISGVTVEDVGMYQCVADNGIGFMHSTGRLEIENDGGFKPVIITAPVSAKVADGDFVTLSCNASGLPVPVIRWYDSHGLITSHPSQVLRSKSRKSQLSRPEGLNLEPVYFVLSQAGASSLHIQAVTQEHAGKYICEAANEHGTTQAEASLMVVPFETNTKAETVTLPDAAQNDDRSKRDGSETGLLSSFPVKVHPSAVESAPEKNASGISVPDAPIILSPPQTHTPDTYNLVWRAGKDGGLPINAYFVKYRKLDDGVGMLGSWHTVRVPGSENELHLAELEPSSLYEVLMVARSAAGEGQPAMLTFRTS

SEQ ID NO: 2571 - protein, 243 aa, Homo Sapiens
  misc_feature (1)..(1): Xaa can be any naturally occurring amino acid
XNYLILPSGNLQILNVSLEDKGSYKCAAYNPVTHQLKVEPIGRKLLVSRPSSDDVHILHPTHSQALAVLSRSPVTLECVVSGVPAPQVYWLKDGQDIAPGSNWRRLYSHLATDSVDPADSGNYSCMAGNKSGDVKYVTYMVNVLEHASISKGLQDQIVSLGATVHFTCDVHGNPAPNCTWFHNAQPIHPSARHLTAGNGLKISGVTVEDVGMYQCVADNGIGFMHSTGRLEIENGQEIYVGNV

SEQ ID NO: 2572 - protein, 529 aa, Homo Sapiens
MGSSRAPWMGRVGGHGMMALLLAGLLLPGTLAKSIGTFSDPCKDPTRITSPNDPCLTGKGDSSGFSSYSGSSSSGSSISSARSSGGGSSGSSSGSSIAQGGSAGSFKPGTGYSQVSYSSGSGSSLQGASGSSQLGSSSSHSGNSGSHSGSSSSHSSSSSSFQFSSSSFQVGNGSALPTNDNSYRGILNPSQPGQSSSSSQTFGVSSSGQSVSSNQRPCSSDIPDSPCSGGPIVSHSGPYIPSSHSVSGGQRPVVVVVDQHGSGAPGVVQGPPCSNGGLPGKPCPPITSVDKSYGGYEVVGGSSDSYLVPGMTYSKGKIYPVGYFTKENPVKGSPGVPSFAAGPPISEGKYFSSNPIIPSQSAASSAIAFQPVGTGGVQLCGGGSTGSKGPCSPSSSRVPSSSSISSSSGLPYHPCGSASQSPCSPPGTGSFSSSSSSQSSGKIILQPCGSKSSSSGHPCMSVSSLTLTGGPDGSPHPDPSAGAKPCGSSSAGKIPCRSIRDILAQVKPLGPQLADPEVFLPQGELLNSP

SEQ ID NO: 2573 - protein, 425 aa, Homo Sapiens
MALTGYSWLLLSATFLNVGAEISITLEPAQPSEGDNVTLVVHGLSGELLAYSWYAGPTLSVSYLVASYIVSTGDETPGPAHTGREAVRPDGSLDIQGILPRHSGTYILQTFNRQLQTEVGYGHVQVHEILAQPTVLANSTALVERRDTLRLMCSSPSPTAEVRWFFNGGALPVALRLGLSPDGRVLARHGIRREEAGAYQCEVWNPVSVSRSEPINLTVYFGPERVAILQDSTTRTGCTIKVDFNTSLTLWCVSRSCPEPEYVWTFNGQALKNGQDHLNISSMTAAQEGTYTCIAKNTKTLLSGSASVVVKLSAAAVATMIVPVPTKPTEGQDVTLTVQGYPKDLLVYAWYRGPASEPNRLLSQLPSGTWIAGPAHTGREVGFPNCSLLVQKLNLTDTGRYTLKTVTVQGKTETLEVELQVAPLG

SEQ ID NO: 2574 - protein, 425 aa, Homo Sapiens; identical to SEQ ID NO: 2573

SEQ ID NO: 2575 - protein, 384 aa, Homo Sapiens
MDLSRPRWSLWRRVFLMASLLACGICQASGQIFITQTLGIKGYRTVVALDKVPEDVQEYSWYWGANDSAGNMIISHKPPSAQQPGPMYTGRERVNREGSLLIRPTALNDTGNYTVRVVAGNETQRATGWLEVLELGSNLGISVNASSLVENMDSVAADCLTNVTNITWYVNDVPTSSSDRMTISPDGKTLVILRVSRYDRTIQCMIESFPEIFQRSERISLTVAYGPDYVLLRSNPDDFNGIVTAEIGSQVEMECICYSFLDLKYHWIHNGSLLNFSDAKMNLSSLAWEQMGRYRCTVENPVTQLIMYMDVRIQAPHEDLTCCPQRFLHLRIHGDVPHHADSAGWRLHLWSPDPCSDQPLLNQDKSGSMSVHPRPEDKTRRASR

SEQ ID NO: 2576 - protein, 55 aa, Homo Sapiens
MEIPMGTQGCFSKSLLLSASILVLWMLQGSQAALYIQKIPEQPQKNQDLLLSVQG

SEQ ID NO: 2577 - protein, 56 aa, Homo Sapiens
MEIPMGTQGCFSKSLLLSASILVLWMLQGSQAALYIQKIPEQPQKNQDLLLSVQGV

SEQ ID NO: 2578 - protein, 56 aa, Homo Sapiens; identical to SEQ ID NO: 2577

SEQ ID NO: 2579 - protein, 56 aa, Homo Sapiens; identical to SEQ ID NO: 2577

SEQ ID NO: 2580 - protein, 56 aa, Homo Sapiens; identical to SEQ ID NO: 2577

SEQ ID NO: 2581 - protein, 299 aa, Homo Sapiens
MEIPMGTQGCFSKSLLLSASILVLWMLQGSQAALYIQKIPEQPQKNQDLLLSVQGVPDTFQDFNWYLGEETYGGTRLFTYIPGIQRPQRDGSAMGQRDIVGFPNGSMLLRRAQPTDSGTYQVAITINSEWTMKAKTEVQVAEKNKELPSTHLPTNAGILAATIIGSLAAGALLISCIAYLLVTRNWRGQSHRLPAPRGQGSLSILCSAVSPVPSVTPSTWMATTEKPELGPAHDAGDNNIYEVMPSPVLLVSPISDTRSINPARPLPTPPHLQAEPENHQYQDLLNPDPAPYCQLVPTS

SEQ ID NO: 2582 - protein, 300 aa, Homo Sapiens
MEIPMGTQGCFSKSLLLSASILVLWMLQGSQAALYIQKIPEQPQKNQDLLLSVQGVPDTFQDFNWYLGEETYGGTRLFTYIPGIQRPQRDGSAMGQRDIVGFPNGSMLLRRAQPTDSGTYQVAITINSEWTMKAKTEVQVAEKNKELPSTHLPTNAGILAATIIGSLAAGALLISCIAYLLVTRNWRGQSHRLPAPRGQGSLSILCSAVSPVPSVTPSTWMATTEKPELGPAHDAGDNNIYEVMPSPVLLVSPISDTRSINPARPLPTPPHLQAEPENHQYQQDLLNPDPAPYCQLVPTS

SEQ ID NO: 2583 - protein, 346 aa, Homo Sapiens
MESPSAPPHRWCIPWQRLLLTASLLTFWNPPTTAKLTIESTPFNVAEGKEVLLLVHNLPQHLFGYSWYKGERVDGNRQIIGYVIGTQQATPGPAYSGREIIYPNASLLIQNIIQNDTGFYTLHVIKSDLVNEEATGQFRVYPELPKPSISSNNSKPVEDKDAVAFTCEPETQDATYLWWVNNQSLPVSPRLQLSNGNRTLTLFNVTRNDARAYVCGIQNSVSANRSDPVTLDVLYGPDTPIISPPDSSYLSGANLNLSCHSASNPSPQYSWRINGIPQQHTQVLFIAKITPNNNGTYACFVSNLATGRNNSIVKSITVSASGTSPGLSAGATVGIMIGVLVGVALI

SEQ ID NO: 2584 - protein, 702 aa, Homo Sapiens
MESPSAPPHRWCIPWQRLLLTASLLTFWNPPTTAKLTIESTPFNVAEGKEVLLLVHNLPQHLFGYSWYKGERVDGNRQIIGYVIGTQQATPGPAYSGREIIYPNASLLIQNIIQNDTGFYTLHVIKSDLVNEEATGQFRVYPELPKPSISSNNSKPVEDKDAVAFTCEPETQDATYLWWVNNQSLPVSPRLQLSNGNRTLTLFNVTRNDTASYKCETQNPVSARRSDSVILNVLYGPDAPTISPLNTSYRSGENLNLSCHAASNPPAQYSWFVNGTFQQSTQELFIPNITVNNSGSYTCQAHNSDTGLNRTTVTTITVYAEPPKPFITSNNSNPVEDEDAVALTCEPEIQNTTYLWWVNNQSLPVSPRLQLSNDNRTLTLLSVTRNDVGPYECGIQNELSVDHSDPVILNVLYGPDDPTISPSYTYYRPGVNLSLSCHAASNPPAQYSWLIDGNIQQHTQELFISNITEKNSGLYTCQANNSASGHSRTTVKTITVSAELPKPSISSNNSKPVEDKDAVAFTCEPEAQNTTYLWWVNGQSLPVSPRLQLSNGNRTLTLFNVTRNDARAYVCGIQNSVSANRSDPVTLDVLYGPDTPIISPPDSSYLSGANLNLSCHSASNPSPQYSWRINGIPQQHTQVLFIAKITPNNNGTYACFVSNLATGRNNSIVKSITVSASGTSPGLSAGATVGIMIGVLVGVALI

SEQ ID NO: 2585 - protein, 701 aa, Homo Sapiens
MESPSAPPHRWCIPWQRLLLTASLLTFWNPPTTAKLTIESTPFNVAEGKEVLLLVHNLPQHLFGYSWYKGERVDGNRQIIGYVIGTQQATPGPAYSGREIIYPNASLLIQNIIQNDTGFYTLHVIKSDLVNEEATGQFRVYPELPKPSISSNNSKPVEDKDAVAFTCEPETQDATYLWWVNNQSLPVSPRLQLSNGNRTLTLFNVTRNDTASYKCETQNPVSARRSDSVILNVLYGPDAPTISPLNTSYRSGENLNLSCHAASNPPAQYSWFVNGTFQQSTQELFIPNITVNNSGSYTCQAHNSDTGLNRTTVTTITVYEPPKPFITSNNSNPVEDEDAVALTCEPEIQNTTYLWWVNNQSLPVSPRLQLSNDNRTLTLLSVTRNDVGPYECGIQNELSVDHSDPVILNVLYGPDDPTISPSYTYYRPGVNLSLSCHAASNPPAQYSWLIDGNIQQHTQELFISNITEKNSGLYTCQANNSASGHSRTTVKTITVSAELPKPSISSNNSKPVEDKDAVAFTCEPEAQNTTYLWWVNGQSLPVSPRLQLSNGNRTLTLFNVTRNDARAYVCGIQNSVSANRSDPVTLDVLYGPDTPIISPPDSSYLSGANLNLSCHSASNPSPQYSWRINGIPQQHTQVLFIAKITPNNNGTYACFVSNLATGRNNSIVKSITVSASGTSPGLSAGATVGIMIGVLVGVALI

SEQ ID NO: 2586 - protein, 702 aa, Homo Sapiens; identical to SEQ ID NO: 2584

SEQ ID NO: 2587 - protein, 702 aa, Homo Sapiens; identical to SEQ ID NO: 2584

SEQ ID NO: 2588 - protein, 524 aa, Homo Sapiens
MESPSAPPHRWCIPWQRLLLTASLLTFWNPPTTAKLTIESTPFNVAEGKEVLLLVHNLPQHLFGYSWYKGERVDGNRQIIGYVIGTQQATPGPAYSGREIIYPNASLLIQNIIQNDTGFYTLHVIKSDLVNEEATGQFRVYPEPPKPFITSNNSNPVEDEDAVALTCEPEIQNTTYLWWVNNQSLPVSPRLQLSNDNRTLTLLSVTRNDVGPYECGIQNELSVDHSDPVILNVLYGPDDPTISPSYTYYRPGVNLSLSCHAASNPPAQYSWLIDGNIQQHTQELFISNITEKNSGLYTCQANNSASGHSRTTVKTITVSAELPKPSISSNNSKPVEDKDAVAFTCEPEAQNTTYLWWVNGQSLPVSPRLQLSNGNRTLTLFNVTRNDARAYVCGIQNSVSANRSDPVTLDVLYGPDTPIISPPDSSYLSGANLNLSCHSASNPSPQYSWRINGIPQQHTQVLFIAKITPNNNGTYACFVSNLATGRNNSIVKSITVSASGTSPGLSAGATVGIMIGVLVGVALI

SEQ ID NO: 2589 - protein, 194 aa, Homo Sapiens
  misc_feature (1)..(1): Xaa can be any naturally occurring amino acid
XIYPNASLLIQNIIQNDTGFYTLHVIKSDLVNEEATGQFRVYPELPKPSISSNNSKPVEDKDAVAFTCEPETQDATYLWWVNNQSLPVSPRLQLSNGNRTLTLFNVTRNDTASYKCETQNPVSARRSDSVILNVLSEPPKPFITSNNSNPVEDEDAVALTCEPEIQNTTYLWWVNNQSLPVSPRLQLSNDNRTL

SEQ ID NO: 2590 - protein, 141 aa, Homo Sapiens
  misc_feature (1)..(1): Xaa can be any naturally occurring amino acid
XKLTIESTPFNVAEGKEVLLLVHNLPQHLFGYSWYKGERVDGNRQIIGYVIGTQQATPGPAYSGREIIYPNASLLIQNIIQNDTGFYTLHVIKSDLVNEEATGQFRVYPELPKPSISSNNSKPVEDKDAVAFTCEPEAQNT

SEQ ID NO: 2591 - protein, 265 aa, Homo Sapiens
MGSPSACPYRVCIPWQGLLLTASLLTFWNLPNSAQTNIDVVPFNVAEGKEVLLVVHNESQNLYGYNWYKGERVHANYRIIGYVKNISQENAPGPAHNGRETIYPNGTLLIQNVTHNDAGIYTLHVIKENLVNEEVTRQFYVFSEPPKPSITSNNFNPVENKDIVVLTCQPETQNTTYLWWVNNQSLLVSPRLLLSTDNRTLVLLSATKNDIGPYECEIQNPVGASRSDPVTLNVRYESVQASSPDLSAGTAVSIMIGVLAGMALI

SEQ ID NO: 2592 - protein, 265 aa, Homo Sapiens; identical to SEQ ID NO: 2591

SEQ ID NO: 2593 - protein, 172 aa, Homo Sapiens
MGSPSACPYRVCIPWQGLLLTASLLTFWNLPNSAQTNIDVVPFNVAEGKEVLLVVHNESQNLYGYNWYKGERVHANYRIIGYVKNISQENAPGPAHNGRETIYPNGTLLIQNVTHNDAGIYTLHVIKENLVNEEVTRQFYVFYESVQASSPDLSAGTAVSIMIGVLAGMALI

SEQ ID NO: 2594 - protein, 349 aa, Homo Sapiens
MGPISAPSCRWRIPWQGLLLTASLFTFWNPPTTAQLTIEAVPSNAAEGKEVLLLVHNLPQDPRGYNWYKGETVDANRRIIGYVISNQQITPGPAYSNRETIYPNASLLMRNVTRNDTGSYTLQVIKLNLMSEEVTGQFSVHPETPKPSISSNNSNPVEDKDAVAFTCEPETQNTTYLWWVNGQSLPVSPRLQLSNGNRTLTLLSVTRNDVGPYECEIQNPASANFSDPVTLNVLYGPDAPTISPSDTYYHAGVNLNLSCHAASNPPSQYSWSVNGTFQQYTQKLFIPNITTKNSGSYACHTTNSATGRNRTTVRMITVSDALVQGSSPGLSARATVSIMIGVLARVALI

SEQ ID NO: 2595 - protein, 51 aa, Homo Sapiens
MGPISAPSCRWRIPWQGLLLTDALVQGSSPGLSARATVSIMIGVLARVALI

SEQ ID NO: 2596 - protein, 756 aa, Homo Sapiens
MLTMGRLQLVVLGLTCCWAVASAAKLGAVYTEGGFVEGVNKKLGLLGDSVDIFKGIPFAAPTKALENPQPHPGWQGTLKAKNFKKRCLQATITQDSTYGDEDCLYLNIWVPQGRKQVSRDLPVMIWIYGGAFLMGSGHGANFLNNYLYDGEEIATRGNVIVVTFNYRVGPLGFLSTGDANLPGNYGLRDQHMAIAWVKRNIAAFGGDPNNITLFGESAGGASVSLQTLSPYNKGLIRRAISQSGVALSPWVIQKNPLFWAKKVAEKVGCPVGDAARMAQCLKVTDPRALTLAYKVPLAGLEYPMLHYVGFVPVIDGDFIPADPINLYANAADIDYIAGTNNMDGHIFASIDMPAINKGNKKVTEEDFYKLVSEFTITKGLRGAKTTFDVYTESWAQDPSQENKKKTVVDFETDVLFLVPTEIALAQHRANAKSAKTYAYLFSHPSRMPVYPKWVGADHADDIQYVFGKPFATPTGYRPQDRTVSKAMIAYWTNFAKTGDPNMGDSAVPTHWEPYTTENSGYLEITKKMGSSSMKRSLRTNFLRYWTLTYLALPTVTDQEATPVPPTGDSEATPVPPTGDSETAPVPPTGDSGAPPVPPTGDSGAPPVPPTGDSGAPPVPPTGDSGAPPVPPTGDSGAPPVPPTGDSGAPPVPPTGDSGAPPVPPTGDSGAPPVPPTGDAGPPPVPPTGDSGAPPVPPTGDSGAPPVTPTGDSETAPVPPTGDSGAPPVPPTGDSEAAPVPPTDDSKEAQMPAVIRF

SEQ ID NO: 2597 - protein, 269 aa, Homo Sapiens
MIRTLLLSTLVAGALSCGDPTYPPYVTRVVGGEEARPNSWPWQVSLQYSSNGKWYHTCGGSLIANSWVLTAAHCISSSRTYRVGLGRHNLYVAESGSLAVSVSKIVVHKDWNSNQISKGNDIALLKLANPVSLTDKIQLACLPPAGTILPNNYPCYVTGWGRLQTNGAVPDVLQQGRLLVVDYATCSSSAWWGSSVKTSMICAGGDGVISSCNGDSGGPLNCQASDGRWQVHGIVSFGSRLGCNYYHKPSVFTRVSNYIDWINSVIANN

SEQ ID NO: 2598 - protein, 126 aa, Homo Sapiens [sequence omitted]

SEQ ID NO: 2599 - protein, 269 aa, Homo Sapiens
MIRTLLLSTLVAGALSCGVSTYAPDMSRMLGGEEARPNSWPWQVSLQYSSNGQWYHTCGGSLIANSWVLTAAHCISSSGIYRVMLGQHNLYVAESGSLAVSVSKIVVHKDWNSDQVSKGNDIALLKLANPVSLTDKIQLACLPPAGTILPNNYPCYVTGWGRLQTNGALPDDLKQGQLLVVDYATCSSSGWWGSTVKTNMICAGGDGVICTCNGDSGGPLNCQASDGRWEVHGIGSLTSVLGCNYYYKPSIFTRVSNYNDWINSVIANN

SEQ ID NO: 2600 - protein, 121 aa, Homo Sapiens
MMLRLLSSLLLVAVASGYGPPSSHSSSRVVHGEDAVPYSWPWQVSLQYEKSGSFYHTCGGSLIAPDWVVTAGHCISRDLTYQVVLGEYNLAVKEGPEQVIPINSEELFVHPLWNRSCVACG

SEQ ID NO: 2601 - protein, 270 aa, Homo Sapiens
MMLRLLSSLLLVAVASGYGPPSSHSSSRVVHGEDAVPYSWPWQVSLQYEKSGSFYHTCGGSLIAPDWVVTAGHCISRDLTYQVVLGEYNLAVKEGPEQVIPINSEELFVHPLWNRSCVACGNDIALIKLSRSAQLGDAVQLASLPPAGDILPNKTPCYITGWGRLYTNGPLPDKLQQARLPVVDYKHCSRWNWWGSTVKKTMVCAGGYIRSGCNGDSGGPLNCPTEDGGWQVHGVTSFVSAFGCNFIWKPTVFTRVSAFIDWIEETIASH

SEQ ID NO: 2602 - protein, 75 aa, Homo Sapiens
WWGSTVKKTMVCAGGYIRSGCNGDSGGPLNCPTEDGGWQVHGVTSFVSAFGCNFIWKPTVFTRVSAFIDWIEEGG

SEQ ID NO: 2603 - protein, 270 aa, Homo Sapiens
MMLRLLSSLLLVAVASGYGPPSSRPSSRVVNGEDAVPYSWPWQVSLQYEKSGSFYHTCGGSLIAPDWVVTAGHCISSSRTYQVVLGEYDRAVKEGPEQVIPINSGDLFVHPLWNRSCVACGNDIALIKLSRSAQLGDAVQLASLPPAGDILPNETPCYITGWGRLYTNGPLPDKLQEALLPVVDYEHCSRWNWWGSSVKKTMVCAGGDIRSGCNGDSGGPLNCPTEDGGWQVHGVTSFVSAFGCNTRRKPTVFTRVSAFIDWIEETIASH

SEQ ID NO: 2604 - protein, 164 aa, Homo Sapiens
MRSCYVAQAGLKLPGSSDPPASASQSTRITASGYGPPSSRPSSRVVNGEDAVPYSWPWQVSLQYEKSGSFYHTCGGSLIAPDWVVTAGHCISSSRTYQVVLGEYDRAVKEGPEQVIPINSGDLFVHPLWNRSCVACGNDIALIKLSRSAQLGDAVQLASLPPAG

SEQ ID NO: 2605 - protein, 180 aa, Homo Sapiens
QVIPINSGDLFVHPLWNRSCVACGNDIALIKLSRSAQLGDAVQLASLPPAGDILPNETPCYITGWGRLYTNGPLPDKLQEALLPVVDYEHCSRWNWWGSSVKKTMVCAGGDIRSGCNGDSGGPLNCPTEDGGWQVHGVTSFVSAFGCNTRRKPTVFTRVSAFIDWIEEKLQGNKAPESRT

SEQ ID NO: 2606 - protein, 1361 aa, Homo Sapiens
MGAAGRQDFLFKAMLTISWLTLTCFPGATSTVAAGCPDQSPELQPWNPGHDQDHHVHIGQGKTLLLTSSATVYSIHISEGGKLVIKDHDEPIVLRTRHILIDNGGELHAGSALCPFQGNFTIILYGRADEGIQPDPYYGLKYIGVGKGGALELHGQKKLSWTFLNKTLHPGGMAEGGYFFERSWGHRGVIVHVIDPKSGTVIHSDRFDTYRSKKESERLVQYLNAVPDGRILSVAVNDEGSRNLDDMARKAMTKLGSKHFLHLGFRHPWSFLTVKGNPSSSVEDHIEYHGHRGSAAARVFKLFQTEHGEYFNVSLSSEWVQDVEWTEWFDHDKVSQTKGGEKISDLWKAHPGKICNRPIDIQATTMDGVNLSTEVVYKKGQDYRFACYDRGRACRSYRVRFLCGKPVRPKLTVTIDTNVNSTILNLEDNVQSWKPGDTLVIASTDYSMYQAEEFQVLPCRSCAPNQVKVAGKPMYLHIGEEIDGVDMRAEVGLLSRNIIVMGEMEDKCYPYRNHICNFFDFDTFGGHIKFALGFKAAHLEGTELKHMGQQLVGQYPIHFHLAGDVDERGGYDPPTYIRDLSIHHTFSRCVTVHGSNGLLIKDVVGYNSLGHCFFTEDGPEERNTFDHCLGLLVKSGTLLPSDRDSKMCKMITEDSYPGYIPKPRQDCNAVSTFWMANPNNNLINCAAAGSEETGFWFIFHHVPTGPSVGMYSPGYSEHIPLGKFYNNRAHSNYRAGMIIDNGVKTTEASAKDKRPFLSIISARYSPHQDADPLKPREPAIIRHFIAYKNQDHGAWLRGGDVWLDSCRFADNGIGLTLASGGTFPYDDGSKQEIKNSLFVGESGNVGTEMMDNRIWGPGGLDHSGRTLPIGQNFPIRGIQLYDGPINIQNCTFRKFVALEGRHTSALAFRLNNAWQSCPHNNVTGIAFEDVPITSRVFFGEPGPWFNQLDMDGDKTSVFHDVDGSVSEYPGSYLTKNDNWLVRHPDCINVPDWRGAICSGCYAQMYIQAYKTSNLRMKIIKNDFPSHPLYLEGALTRSTHYQQYQPVVTLQKGYTIHWDQTAPAELAIWLINFNKGDWIRVGLCYPRGTTFSILSDVHNRLLKQTSKTGVFVRTLQMDKVEQSYPGRSHYYWDEDSGLLFLKLKAQNEREKFAFCSMKGCERIKIKALIPKNAGVSDCTATAYPKFTERAVVDVPMPKKLFGSQLKTKDHFLEVKMESSKQHFFHLWNDFAYIEVDGKKYPSSEDGIQVVVIDGNQGRVVSHTSFRNSILQGIPWQLFNYVATIPDNSIVLMASKGRYVSRGPWTRVLEKLGADRGLKLKEQMAFVGFKGSFRPIWVTLDTEDHKAKIFQVVPIPVVKKKKL

SEQ ID NO: 2607 - protein, 1361 aa, Homo Sapiens; identical to SEQ ID NO: 2606

SEQ ID NO: 2608 - protein, 1361 aa, Homo Sapiens; identical to SEQ ID NO: 2606

SEQ ID NO: 2609 - protein, 76 aa, Homo Sapiens
  misc_feature (1)..(1): Xaa can be any naturally occurring amino acid
XINFNKGDWIRVGLCYPRGTTFSILSDVHNRLLKQTSKTGVFVRTLQMDKVEQSYPGRSHYYWDEDSGKQRTISWR

SEQ ID NO: 2610 - protein, 145 aa, Homo Sapiens
  misc_feature (1)..(1): Xaa can be any naturally occurring amino acid
XRGAICSGCYAQMYIQAYKTSNLRMKIIKNDFPSHPLYLEGALTRSTHYQQYQPVVTLQKGYTIHWDQTAPAELAIWLINFNKGDWIRVGLCYPRGTTFSILSDVHNRLLKQTSKTGVFVRTLQMDKVEQSYPGRSHYYWDEDSG

SEQ ID NO: 2611 - protein, 173 aa, Homo Sapiens
EQDSFIEPYATTSQLRPRPNWQSEMGRRSSLPSFETLDYGDEEDIETQLSSSGKELGDVSAREDRGGHSDDLYAVPHRNQVPLLHEVNSEDDENISHQDGFPGSPPAPQRTQQKDGKHPVLNLKDEKPPLCEKPPPSPGPTLLQDLWGVAFLVGNVCGASVPLPEFLSCVQEE

SEQ ID NO: 2612 - protein, 783 aa, Homo Sapiens
MLLGFRRGRRSHFKHIIHGLLPAASVAPKAAVPRTPPPRSPNPSPERPRSALAAAILATTLTGRTVAIPQPRQRSRSESDVSSVEQDSFIEPYATTSQLRPRPNWQSEMGRRSSLPSFETLDYGDEEDIETQLSSSGKELGDVSAREDRGGHSDDLYAVPHRNQVPLLHEVNSEDDENISHQDGFPGSPPAPQRTQQKDGKHPVLNLKDEKPPLCEKPPPSPDITGRARQRYTEITREKFEALKEENMDLNNMNQSLTLELNTMKQAMKELQLKLKGMEKEKRKLKEAEKASSQEVAAPELLYLRKQAQELVDENDGLKMTVHRLNVELSRYQTKFRHLSKEESLNIEGLPSKGPIPPWLLDIKYLSPLLLAYEDMMKEKDELNATLKEEMRMFRMRVQEVVKENEELHQELNKSSAVTSEEWRQLQTQAKLVLEENKLLLEQLEIQQRKAKDSHQERLQEVSKLTKQLMLLEAKTHGQEKELAENREQLEILRAKCQELKTHSDGKIAVEVHKSIVNELKSQLQKEEEKERAEMEELMEKLTVLQAQKKSLLLEKNSLTEQNKALEAELERAQKINRKSQKKIEVLKKQVEKAMGNEMSAHQYLANLVGLAENITQERDSLMCLAKCLESEKDGVLNKVIKSNIRLGKLEEKVKGYKKQAALKLGDISHRLLEQQEDFAGKTAQYRQEMRHLHQVLKDKQEVLDQALQQNREMEGELEVIWESTFRENRRIRELLQDTLTRTGVQDNPRALVAPSLNGVSQADLLDGCDVCSYDLKSHAPTC

SEQ ID NO: 2613 - protein, 428 aa, Homo Sapiens
MLLGFRRGRRSHFKHIIHGLLPAASVAPKAAVPRTPPPRSPNPSPERPRSALAAAILATTLTGRTVAIPQPRQRSRSESDVSSVEQDSFIEPYATTSQLRPRPNWQSEMGRRSSLPSFETLDYGDEEDIETQLSSSGKELGDVSAREDRGGHSDDLYAVPHRNQVPLLHEVNSEDDENISHQDGFPGSPPAPQRTQQKDGKHPVLNLKDEKPPLCEKPPPSPDITGRARQRYTEITREKFEALKEENMDLNNMNQSLTLELNTMKQAMKELQLKLKGMEKEKRKLKEAEKASSQEVAAPELLYLRKQAQELVDENDGLKMTVHRLNVELSRYQTKFRHLSKEESLNIEGLPSKGPIPPWLLDIKYLSPLLLAYEDMMKEKDELNATLKASASDSSKTGFRGKQVVAGAVGDSAKESQGQPPGAPPRSF

SEQ ID NO: 2614 - protein, 356 aa, Homo Sapiens
MLLGFRRGRRSHFKHIIHGLLPAASVAPKAAVPRTPPPRSPNPSPERPRSALAAAILATTLTGRTVAIPQPRQRSRSESDVSSVEQDSFIEPYATTSQLRPRPNWQSEMGRRSSLPSFETLDYGDEEDIETQLSSSGKELGDVSAREDRGGHSDDLYAVPHRNQVPLLHEVNSEDDENISHQDGFPGSPPAPQRTQQKDGKHPVLNLKDEKPPLCEKPPPSPDITGRARQRYTEITREKFEALKEENMDLNNMNQSLTLELNTMKQAMKELQLKLKGMEKEKRKLKEAEKASSQEVAAPELLYLRKQAQELVDENDGLKMTVHRLNVELSRYQTKFRHLSKEEVTFPIVKISFSDF

SEQ ID NO: 2615 - protein, 80 aa, Homo Sapiens
MLLGFRRGRRSHFKQGLALSPRLECSGAIIAHCILELLGSSDLPTPASRGAETTGARHYSRLIVQYFCGNRDLAMFLWWS

SEQ ID NO: 2616 - protein, 217 aa, Homo Sapiens
  misc_feature (1)..(1): Xaa can be any naturally occurring amino acid
XAAVPRTPPPRSPNPSPERPRSALAAAILATTLTGRTVAIPQPRQRSRSESDVSSVEQDSFIEPYATTSQLRPRPNWQSEMGRRSSLPSFETLDYGDEEDIETQLSSSGKELGDVSAREDRGGHSDDLYAVPHRNQVPLLHEVNSEDDENISHQDGFPGSPPAPQRTQQKDGKHPVLNLKDEKPPLCEKPPPSPGICLLNYIMIEKLVLENIQINFI

SEQ ID NO: 2617 - protein, 267 aa, Homo Sapiens
MHLLLFQLLVLLPLGKTTRHQDGRQNQSSLSPVLLPRNQRELPTGNHEEAEEKPDLFVAVPHLVATSPAGEGQRQREKMLSRFGRFWKKPEREMHPSRDSDSEPFPPGTQSLIQPIDGMKMEKSPLREEAKKFWHHFMFRKTPASQGVILPIKSHEVHWETCRTVPFSQTITHEGCEKVVVQNNLCFGKCGSVHFPGAAQHSHTSCSHCLPAKFTTMHLPLNCTELSSVIKVVMLVEECQCKVKTEHEDGHILHAGSQDSFIPGVSA

SEQ ID NO: 2618 - protein, 64 aa, Homo Sapiens
MLQEWLAAVGDDYAAVVWRPEGEPRFYPDEEGPKHWTKERHQFLMELKQEALTFARNWGADYIL

SEQ ID NO: 2619 - protein, 79 aa, Homo Sapiens
MLQEWLAAVGDDYAAVVWRPEGEPRFYPDEEGPKHWTKERHQFLMELKQEALTFARNWGADYILFADTDNILTNNQTLR

SEQ ID NO: 2620 - protein, 109 aa, Homo Sapiens
MLQEWLAAVGDDYAAVVWRPEGEPRFYPDEEGPKHWTKERHQFLMELKQEALTFARNWGADYILFADTDNILTNNQTLRLLMGQGLPVVAPMLDSQTYYSNFWCGITPQ

SEQ ID NO: 2621 - protein, 218 aa, Homo Sapiens
MLQEWLAAVGDDYAAVVWRPEGEPRFYPDEEGPKHWTKERHQFLMELKQEALTFARNWGADYILFADTDNILTNNQTLRLLMGQGLPVVAPMLDSQTYYSNFWCGITPQGYYRRTAEYFPTKNRQRRGCFRVPMVHSTFLASLRAEGADQLAFYPPHPNYTWPFDDIIVFAYACQAAGVSVHVCNEHRYGYMNVPVKSHQGLEDERVNFIHLILEALG

SEQ ID NO: 2622 - protein, 517 aa, Homo Sapiens
MLQEWLAAVGDDYAAVVWRPEGEPRFYPDEEGPKHWTKERHQFLMELKQEALTFARNWGADYILFADTDNILTNNQTLRLLMGQGLPVVAPMLDSQTYYSNFWCGITPQGYYRRTAEYFPTKNRQRRGCFRVPMVHSTFLASLRAEGADQLAFYPPHPNYTWPFDDIIVFAYACQAAGVSVHVCNEHRYGYMNVPVKSHQGLEDERVNFIHLILEALVDGPRMQASAHVTRPSKRPSKIGFDEVFVISLARRPDRRERMLASLWEMEISGRVVDAVDGWMLNSSAIRNLGVDLLPGYQDPYSGRTLTKGEVGCFLSHYSIWEEVVARGLARVLVFEDDVRFESNFRGRLERLMEDVEAEKLSWDLIYLGRKQVNPEKETAVEGLPGLVVAGYSYWTLAYALRLAGARKLLASQPLRRMLPVDEFLPIMFDQHPNEQYKAHFWPRDLVAFSAQPLLAAPTHYAGDAEWLSDTETSSPWDDDSGRLISWSGSQKTLRSPRLDLTGSSGHSLQPQPRDEL

SEQ ID NO: 2623 - protein, 517 aa, Homo Sapiens [sequence omitted]

SEQ ID NO: 2624 - protein, 595 aa, Homo Sapiens
MRAARAAPLLQLLLLLGPWLEAAGVAESPLPAVVLAILARNAEHSLPHYLGALERLDYPRARMALWCATDHNVDNTTEMLQEWLAAVGDDYAAVVWRPEGEPRFYPDEEGPKHWTKERHQFLMELKQEALTFARNWGADYILFADTDNILTNNQTLRLLMGQGLPVVAPMLDSQTYYSNFWCGITPQGYYRRTAEYFPTKNRQRRGCFRVPMVHSTFLASLRAEGADQLAFYPPHPNYTWPFDDIIVFAYACQAAGVSVHVCNEHRYGYMNVPVKSHQGLEDERVNFIHLILEALVDGPRMQASAHVTRPSKRPSKIGFDEVFVISLARRPDRRERMLASLWEMEISGRVVDAVDGWMLNSSAIRNLGVDLLPGYQDPYSGRTLTKGEVGCFLSHYSIWEEVVARGLARVLVFEDDVRFESNFRGRLERLMEDVEAEKLSWDLIYLGRKQVNPEKETAVEGLPGLVVAGYSYWTLAYALRLAGARKLLASQPLRRMLPVDEFLPIMFDQHPNEQYKAHFWPRDLVAFSAQPLLAAPTHYAGDAEWLSDTETSSPWDDDSGRLISWSGSQKTLRSPRLDLTGSSGHSLQPQPRDEL

SEQ ID NO: 2625 - protein, 155 aa, Homo Sapiens
MTAKQCPGAGHYCPESRGGGCWQGLQILSDLATTLGMATLPSGPVFHREKPLRDGSHSLKVSQQRSRTPRPLYPAWPDSGPCGPQLVSSWADPRIPSLPKDSAEGPLCPFYLHLSTLPQLDVWVSPAPSSLAGAKYREVKQDPCRHVAQHTVGPQ

SEQ ID NO: 2626 - protein, 337 aa, Homo Sapiens
MAAAGPAAGPTGPEPMPSYAQLVQRGWGSALAAARGCTDCGWGLARRGLAEHAHLAPPELLLLALGALGWTALRSAATARLFRPLAKRCCLQPRDAAKMPESAWKFLFYLGSWSYSAYLLFGTDYPFFHDPPSVFYDWTPGMAVPRDIAAAYLLQGSFYGHSIYATLYMDTWRKDSVVMLLHHVVTLILIVSSYAFRYHNVGILVLFLHDISDVQLEFTKLNIYFKSRGGSYHRLHALAADLGCLSFGFSWFWFRLYWFPLKVLYATSHCSLRTVPDIPFYFFFNALLLLLTLMNLYWFLYIVAFAAKVLTGQVHELKDLREYDTAEAQSLKPSKAE

SEQ ID NO: 2627 - protein, 350 aa, Homo Sapiens
MAAAGPAAGPTGPEPMPSYAQLVQRGWGSALAAARGCTDCGWGLARRGLAEHAHLAPPELLLLALGALGWTALRSAATARLFRPLAKRCCLQPRDAAKMPESAWKFLFYLGSWSYSAYLLFGTDYPFFHDPPSVFYDWTPGMAVPRDIAAAYLLQGSFYGHSIYATLYMDTWRKDSVVMLLHHVVTLILIVSSYAFRYHNVGILVLFLHDISDVQLEFTKLNIYFKSRGGSYHRLHALAADLGCLSFGFSWFWFRLYWFPLKVLYATSHCSLRTVPDIPFYFFFNALLLLLTLMNLYWFLYIVAFAAKVLTGQVHELKDLREYDTAEAQSLKPSKAEKPLRNGLVKDKRF

SEQ ID NO: 2628 - protein, 239 aa, Homo Sapiens
MPESAWKFLFYLGSWSYSAYLLFGTDYPFFHDPPSVFYDWTPGMAVPRDIAAAYLLQGSFYGHSIYATLYMDTWRKDSVVMLLHHVVTLILIVSSYAFRYHNVGILVLFLHDISDVQLEFTKLNIYFKSRGGSYHRLHALAADLGCLSFGFSWFWFRLYWFPLKVLYATSHCSLRTVPDIPFYFFFNALLLLLTLMNLYWFLYIVAFAAKVLTGQVHELKDLREYDTAEAQSLKPSKAE

SEQ ID NO: 2629 - protein, 372 aa, Homo Sapiens
MPPPQQGPCGHHLLLLLALLLPSLPLTRAPVPPGPAAALLQALGLRDEPQGAPRLRPVPPVMWRLFRRRDPQETRSGSRRTSPGVTLQPCHVEELGVAGNIVRHIPDRGAPTRASEPASAAGHCPEWTVVFDLSAVEPAERPSRARLELRFAAAAAAAPEGGWELSVAQAGQGAGADPGPVLLRQLVPALGPPVRAELLGAAWARNASWPRSLRLALALRPRAPAACARLAEASLLLVTLDPRLCHPLARPRRDAEPVLGGGPGGACRARRLYVSFREVGWHRWVIAPRGFLANYCQGQCALPVALSGSGGPPALNHAVLRALMHAAAPGAADLPCCVPARLSPISVLFFDNSDNVVLRQYEDMVVDECGCR

SEQ ID NO: 2630 - protein, 216 aa, Homo Sapiens
  misc_feature (1)..(1): Xaa can be any naturally occurring amino acid
XAAAYLLQGSFYGHSIYATLYMDTWRKDSVVMLLHHVVTLILIVSSYAFRYHNVGILVLFLHDISDVQLEFTKLNIYFKSRGGSYHRLHALAADLGCLSFGFSWFWFRLYWFPLKVLYATSHCSLRTVPDIPFYFFFNALLLLLTLMNLYWFLYIVAFAAKVLTGQVHELKDLREYDTAEAQSLKPSKAEEAVAQSSVTFFGTGGARCRHLTHPGL

SEQ ID NO: 2631 - protein, 44 aa, Homo Sapiens
ERNFHTVPYMVGINKQEFGWLIPMMLEHPPTCMSFSTVQASHQT

SEQ ID NO: 2632 - protein, 131 aa, Homo Sapiens
KELIPEATEKYLGGTDDTVKKKDLFLDLIADVMFGVPSVIVARNHREGASEEEIRLSKMVMKFWANFARNGNPNGEGLPHWPEYNQKEGYLQIGANTQAAQKLKDKEVAFWTNLFAKKAVEKPPQTEHIEL

SEQ ID NO: 2633 - protein, 568 aa, Homo Sapiens
MWLRAFILATLSASAAWAGHPSSPPVVDTVHGKVLGKFVSLEGFAQPVAIFLGIPFAKPPLGPLRFTPPQPAEPWSFVKNATSYPPMCTQDPKAGQLLSELFTNRKENIPLKLSEDCLYLNIYTPADLTKKNRLPVMVWIHGGGLMVGAASTYDGLALAAHENVVVVTIQYRLGIWGFFSTGDEHSRGNWGHLDQVAALRWVQDNIASFGGNPGSVTIFGESAGGESVSVLVLSPLAKNLFHRAISESGVALTSVLVKKGDVKPLAEQIAITAGCKTTTSAVMVHCLRQKTEEELLETTLKMKFLSLDLQGDPRESQPLLGTVIDGMLLLKTPEELQAERNFHTVPYMVGINKQEFGWLIPMQLMSYPLSEGQLDQKTAMSLLWKSYPLVCIAKELIPEATEKYLGGTDDTVKKKDLFLDLIADVMFGVPSVIVARNHRDAGAPTYMYEFQYRPSFSSDMKPKTVIGDHGDELFSVFGAPFLKEGASEEEIRLSKMVMKFWANFARNGNPNGEGLPHWPEYNQKEGYLQIGANTQAAQKLKDKEVAFWTNLFAKKAVEKPPQTEHIEL

SEQ ID NO: 2634 - protein, 567 aa, Homo Sapiens
MWLRAFILATLSASAAWGHPSSPPVVDTVHGKVLGKFVSLEGFAQPVAIFLGIPFAKPPLGPLRFTPPQPAEPWSFVKNATSYPPMCTQDPKAGQLLSELFTNRKENIPLKLSEDCLYLNIYTPADLTKKNRLPVMVWIHGGGLMVGAASTYDGLALAAHENVVVVTIQYRLGIWGFFSTGDEHSRGNWGHLDQVAALRWVQDNIASFGGNPGSVTIFGESAGGESVSVLVLSPLAKNLFHRAISESGVALTSVLVKKGDVKPLAEQIAITAGCKTTTSAVMVHCLRQKTEEELLETTLKMKFLSLDLQGDPRESQPLLGTVIDGMLLLKTPEELQAERNFHTVPYMVGINKQEFGWLIPMQLMSYPLSEGQLDQKTAMSLLWKSYPLVCIAKELIPEATEKYLGGTDDTVKKKDLFLDLIADVMFGVPSVIVARNHRDAGAPTYMYEFQYRPSFSSDMKPKTVIGDHGDELFSVFGAPFLKEGASEEEIRLSKMVMKFWANFARNGNPNGEGLPHWPEYNQKEGYLQIGANTQAAQKLKDKEVAFWTNLFAKKAVEKPPQTEHIEL

SEQ ID NO: 2635 - protein, 566 aa, Homo Sapiens
MWLRAFILATLSASAAWGHPSSPPVVDTVHGKVLGKFVSLEGFAQPVAIFLGIPFAKPPLGPLRFTPPQPAEPWSFVKNATSYPPMCTQDPKAGQLLSELFTNRKENIPLKLSEDCLYLNIYTPADLTKKNRLPVMVWIHGGGLMVGAASTYDGLALAAHENVVVVTIQYRLGIWGFFSTGDEHSRGNWGHLDQVAALRWVQDNIASFGGNPGSVTIFGESAGGESVSVLVLSPLAKNLFHRAISESGVALTSVLVKKGDVKPLAEQIAITAGCKTTTSAVMVHCLRQKTEEELLETTLKMKFLSLDLQGDPRESQPLLGTVIDGMLLLKTPEELQAERNFHTVPYMVGINKQEFGWLIPMLMSYPLSEGQLDQKTAMSLLWKSYPLVCIAKELIPEATEKYLGGTDDTVKKKDLFLDLIADVMFGVPSVIVARNHRDAGAPTYMYEFQYRPSFSSDMKPKTVIGDHGDELFSVFGAPFLKEGASEEEIRLSKMVMKFWANFARNGNPNGEGLPHWPEYNQKEGYLQIGANTQAAQKLKDKEVAFWTNLFAKKAVEKPPQTEHIEL

SEQ ID NO: 2636 - protein, 84 aa, Homo Sapiens
  misc_feature (1)..(1): Xaa can be any naturally occurring amino acid
XRQKTEEELLETTLKMKFLSLDLQGDPRESQPLLGTVIDGMLLLKTPEELQAERNFHTVPYMVGINKQEFGWLIPMGTADISVY

SEQ ID NO: 2637 - protein, 210 aa, Homo Sapiens
MEQMSREDMLAISTPVLTSLDVPPEMMPTVIDEYLGSNSDAQAKCQAFQEFMGDVFINVPTVSFSRYLRDSGSPVFFYEFQHRPSSFAKIKPAWVKADHGAEGAFVFGGPFLMDESSRLAFPEATEEEKQLSLTMMAQWTHFARTGDPNSKALPPWPQFNQAEQYLEINPVPRAGQKFREAWMQFWSETLPSKIQQWHQKQKNRKAQEDL

SEQ ID NO: 2638 - protein, 571 aa, Homo Sapiens
MERAVRVESGVLVGVVCLLLACPATATGPEVAQPEVDTTLGRVRGRQVGVKGTDRLVNVFLGIPFAQPPLGPDRFSAPHPAQPWEGVRDASTAPPMCLQDVESMNSSRFVLNGKQQIFSVSEDCLVLNVYSPAEVPAGSGRPVMVWVHGGALITGAATSYDGSALAAYGDVVVVTVQYRLGVLGFFSTGDEHAPGNQGFLDVVAALRWVQENIAPFGGDLNCVTVFGGSAGGSIISGLVLSPVAAGLFHRAITQSGVITTPGIIDSHPWPLAQKIANTLACSSSSPAEMVQCLQQKEGEELVLSKKLKNTIYPLTVDGTVFPKSPKELLKEKPFHSVPFLMGVNNHEFSWLIPRGWGLLDTMEQMSREDMLAISTPVLTSLDVPPEMMPTVIDEYLGSNSDAQAKCQAFQEFMGDVFINVPTVSFSRYLRDSGSPVFFYEFQHRPSSFAKIKPAWVKADHGAEGAFVFGGPFLMDESSRLAFPEATEEEKQLSLTMMAQWTHFARTGDPNSKALPPWPQFNQAEQYLEINPVPRAGQKFREAWMQFWSETLPSKIQQWHQKQKNRKAQEDL

SEQ ID NO: 2639 - protein, 568 aa, Homo Sapiens
MERAVRVESGVLVGVVCLLLACPATATGPEVAQPEVDTTLGRVRGRQVGVKGTDRLVNVFLGIPFAQPPLGPDRFSAPHPAQPWEGVRDASTAPPMCLQDVESMNSSRFVLNGKQQIFSVSEDCLVLNVYSPAEVPAGSGRPVMVWVHGGALITGAATSYDGSALAAYGDVVVVTVQYRLGVLGFFSTGDEHAPGNQGFLDVVAALRWVQENIAPFGGDLNCVTVFGGSAGGSIISGLVLSPVAAGLFHRAITQSGVITTPGIIDSHPWPLAQKIANTLACSSSSPAEMVQCLQQKEGEELVLSKKLKNTIYPLTVDGTVFPKSPKELLKEKPFHSVPFLMGVNNHEFSWLIPRGWGLLDTMEQMSREDMLAISTPVLTSLDVPPEMMPTVIDEYLGSNSDAQAKCQAFQEFMGDVFINVPTVSFSRYLRDSGSPVFFYEFQHRPSSFAKIKPAWVKADHGAEGAFVFGGPFLMDESSRLEATEEEKQLSLTMMAQWTHFARTGDPNSKALPPWPQFNQAEQYLEINPVPRAGQKFREAWMQFWSETLPSKIQQWHQKQKNRKAQEDL

SEQ ID NO: 2640 - protein, 379 aa, Homo Sapiens
MERAVRVESGVLVGVVCLLLACPATATGPEVAQPEVDTTLGRVRGRQVGVKGTDRLVNVFLGIPFAQPPLGPDRFSAPHPAQPWEGVRDASTAPPMCLQDVESMNSSRFVLNGKQQIFSVSEDCLVLNVYSPAEVPAGSGRPVMVWVHGGALITGAATSYDGSALAAYGDVVVVTVQYRLGVLGFFSTGDEHAPGNQGFLDVVAALRWVQENIAPFGGDLNCVTVFGGSAGGSIISGLVLSPVAAGLFHRAITQSGVITTPGIIDSHPWPLAQKIANTLACSSSSPAEMVQCLQQKEGEELVLSKKLKNTIYPLTVDGTVFPKSPKELLKEKPFHSVPFLMGVNNHEFSWLIPRILEALSFSMSSSIDPVLLRRSNLPG

SEQ ID NO: 2641 - protein, 40 aa, Homo Sapiens
MERAVRVESGVLVGVVCLLLACPATATGYQDAVWARSCSA

SEQ ID NO: 2642 - protein, 454 aa, Homo Sapiens
GKQMHVGKTPIQVFLGVPFSRPPLGILRFAPPEPPEPWKGIRDATTYPPGCLQESWGQLASMYVSTRERYKWLRFSEDCLYLNVYAPARAPGDPQLPVMVWFPGGAFIVGAASSYEGSDLAAREKVVLVFLQHRLGIFGFLSTDDSHARGNWGLLDQMAALRWVQENIAAFGGDPGNVTLFGQSAGAMSISGLMMSPLASGLFHRAISQSGTALFRLFITSNPLKVAKKVAHLAGCNHNSTQILVNCLRALSGTKVMRVSNKMRFLQLNFQRDPEEIIWSMSPVVDGVVIPDDPLVLLTQGKVSSVPYLLGVNNLEFNWLLPYNITKEQVPLVVEEYLDNVNEHDWKMLRNRMMDIVQDATFVYATLQTAHYHRGLSMGKEKALSLQMMKYWANFARTGNPNDGNLPCWPRYNKDEKYLQLDFTTRVGMKLKEKKMAFWMSLYQSQRPEKQRQF

SEQ ID NO: 2643 - protein, 468 aa, Homo Sapiens
MRWILCWSLTLCLMAQTALGALHTKRPQVVTKYGTLQGKQMHVGKTPIQVFLGVPFSRPPLGILRFAPPEPPEPWKGIRDATTYPPGCLQESWGQLASMYVSTRERYKWLRFSEDCLYLNVYAPARAPGDPQLPVMVWFPGGAFIVGAASSYEGSDLAAREKVVLVFLQHRLGIFGFLSTDDSHARGNWGLLDQMAALRWVQENIAAFGGDPGNVTLFGQSAGAMSISGLMMSPLASGLFHRAISQSGTALFRLFITSNPLKVAKKVAHLAGCNHNSTQILVNCLRALSGTKVMRVSNKMRFLQLNFQRDPEEIIWSMSPVVDGVVIPDDPLVLLTQGKVSSVPYLLGVNNLEFNWLLPYIMKFPLNRQAMRKETITKMLWSTRTLLNITKEQVPLVVEEYLDNVNEHDWKMLRNRMMDIVQDATFVYATLQTAHYHRETPMMGICPAGHATTRMKSTCSWILPQEWA

SEQ ID NO: 2644 - protein, 374 aa, Homo Sapiens
MYVSTRERYKWLRFSEDCLYLNVYAPARAPGDPQLPVMVWFPGGAFIVGAASSYEGSDLAAREKVVLVFLQHRLGIFGFLRWRGRTDDSHARGNWGLLDQMAALRWVQENIAAFGGDPGNVTLFGQSAGAMSISGLMMSPLASGLFHRAISQSGTALFRLFITSNPLKVAKKVAHLAGCNHNSTQILVNCLRALSGTKVMRVSNKMRFLQLNFQRDPEEIIWSMSPVVDGVVIPDDPLVLLTQGKVSSVPYLLGVNNLEFNWLLPYIMKFPLNRQAMRKETITKMLWSTRTLLNITKEQVPLVVEEYLDNVNEHDWKMLRNRMMDIVQDATFVYATLQTAHYHRETPMMGICPAGHATTRMKSTCSWILPQEWA

SEQ ID NO: 2645 - protein, 135 aa, Homo Sapiens
MYVSTRERYKWLRFSEDCLYLNVYAPARAPGDPQLPVMVWFPGGAFIVGAASSYEGSDLAAREKVVLVFLQHRLGIFGFLRWRGRYPLGPQLWPERRGLARTTATRAGTGGCWTRWRLCAGCRRTSQPSGETQEM

SEQ ID NO: 2646 - protein, 463 aa, Homo Sapiens
MYVSTRERYKWLRFSEDCLYLNVYAPARAPGDPQLPVMVWFPGGAFIVGAASSYEGSDLAAREKVVLVFLQHRLGIFGFLSTDDSHARGNWGLLDQMAALRWVQENIAAFGGDPGNVTLFGQSAGAMSISGLMMSPLASGLFHRAISQSGTALFRLFITSNPLKVAKKVAHLAGCNHNSTQILVNCLRALSGTKVMRVSNKMRFLQLNFQRDPEEIIWSMSPVVDGVVIPDDPLVLLTQGKVSSVPYLLGVNNLEFNWLLPYIMKFPLNRQAMRKETITKMLWSTRTLLNITKEQVPLVVEEYLDNVNEHDWKMLRNRMMDIVQDATFVYATLQTAHYHRDAGLPVYLYEFEHHARGIIVKPRTDGADHGDEMYFLFGGPFATGLSMGKEKALSLQMMKYWANFARTGNPNDGNLPCWPRYNKDEKYLQLDFTTRVGMKLKEKKMAFWMSLYQSQRPEKQRQF

SEQ ID NO: 2647 - protein, 177 aa, Homo Sapiens
  misc_feature (1)..(1): Xaa can be any naturally occurring amino acid
XALHTKRPQVVTKYGTLQGKQMHVGKTPIQVFLGVPFSRPPLGILRFAPPEPPEPWKGIRDATTYPPGWSLALSPGWSAVARSRLTATSASRVQASLLPQPLSIWGYRCLQESWGQLASMYVSTRERYKWLRFSEDCLYLNVYAPARAPGDPQLPVSDGLVPGRRLHRGRCFFVRGL

SEQ ID NO: 2648 - protein, 604 aa, Homo Sapiens
MAVLVCPASCHGLKEFRIRRGMWRLCLVYYFYPASSTLYVLRIDVLNYTSKDEGPSAEGPQRNTRLGWIQGKQVTVLGSPVPVNVFLGVPFAAPPLGSLRFTNPQPASPWDNLREATSYPNLCLQNSEWLLLDQHMLKVHYPKFGVSEDCLYLNIYAPAHADTGSKLPVLVWFPGGAFKTGSASIFDGSALAAYEDVLVVVVQYRLGIFGFFTTWDQHAPGNWAFKDQVAALSWVQKNIEFFGGDPSSVTIFGESAGAISVSSLILSPMAKGLFHKAIMESGVAIIPYLEAHDYEKSEDLQVVAHFCGNNASDSEALLRCLRTKPSKELLTLSQKTKSFTRVVDGAFFPNEPLDLLSQKAFKAIPSIIGVNNHECGFLLPMKEAPEILSGSNKSLALHLIQNILHIPPQYLHLVANEYFHDKHSLTEIRDSLLDLLGDVFFVVPALITARYHRDAGAPVYFYEFRHRPQCFEDTKPAFVKADHADEVRFVFGGAFLKGDIVMFEGATEEEKLLSRKMMKYWATFARTGNPNGNDLSLWPAYNLTEQYLQLDLNMSLGQRLKEPRVDFWTSTIPLILSASDMLHSPLSSLTFLSLLQPFFFFCAP

SEQ ID NO: 2649 - protein, 355 aa, Homo Sapiens
MEDDLSWRSWSLLCMEILSPMAKGLFHKAIMESGVAIIPYLEAHDYEKSEDLQVVAHFCGNNASDSEALLRCLRTKPSKELLTLSQKTKSFTRVVDGAFFPNEPLDLLSQKAFKAIPSIIGVNNHECGFLLPMEAPEILSGSNKSLALHLIQNILHIPPQYLHLVANEYFHDKHSLTEIRDSLLDLLGDVFFVVPALITARYHRDAGAPVYFYEFRHRPQCFEDTKPAFVKADHADEVRFVFGGAFLKGDIVMFEGATEEEKLLSRKMMKYWATFARTGNPNGNDLSLWPAYNLTEQYLQLDLNMSLGQRLKEPRVDFWTSTIPLILSASDMLHSPLSSLTFLSLLQPFFFFCAP

SEQ ID NO: 2650 - protein, 75 aa, Homo Sapiens
MLKVHYPKFGVSEDCLYLNIYAPAHADTGSKLPVLVWFPGGAFKTGSASIFDGSALAAYEDVLVVVVQYRLGIFG

SEQ ID NO: 2651 - protein, 78 aa, Homo Sapiens
MLKVHYPKFGVSEDCLYLNIYAPAHADTGSKLPVLVWFPGGAFKTGSASIFDGSALAAYEDVLVVVVQYRLGIFGFFT

SEQ ID NO: 2652 - protein, 469 aa, Homo Sapiens
MLKVHYPKFGVSEDCLYLNIYAPAHADTGSKLPVLVWFPGGAFKTGSASIFDGSALAAYEDVLVVVVQYRLGIFGFFTTWDQHAPGNWAFKDQVAALSWVQKNIEFFGGDPSSVTIFGESAGAISVSSLILSPMAKGLFHKAIMESGVAIIPYLEAHDYEKSEDLQVVAHFCGNNASDSEALLRCLRTKPSKELLTLSQKTKSFTRVVDGAFFPNEPLDLLSQKAFKAIPSIIGVNNHECGFLLPMKEAPEILSGSNKSLALHLIQNILHIPPQYLHLVANEYFHDKHSLTEIRDSLLDLLGDVFFVVPALITARYHRDAGAPVYFYEFRHRPQCFEDTKPAFVKADHADEVRFVFGGAFLKGDIVMFEGATEEEKLLSRKMMKYWATFARTGNPNGNDLSLWPAYNLTEQYLQLDLNMSLGQRLKEPRVDFWTSTIPLILSASDMLHSPLSSLTFLSLLQPFFFFCAP

SEQ ID NO: 2653 - protein, 575 aa, Homo Sapiens
MSGNWVHPGQILIWAIWVLAAPTKGPSAEGPQRNTRLGWIQGKQVTVLGSPVPVNVFLGVPFAAPPLGSLRFTNPQPASPWDNLREATSYPNLCLQNSEWLLLDQHMLKVHYPKFGVSEDCLYLNIYAPAHADTGSKLPVLVWFPGGAFKTGSASIFDGSALAAYEDVLVVVVQYRLGIFGFFTTWDQHAPGNWAFKDQVAALSWVQKNIEFFGGDPSSVTIFGESAGAISVSSLILSPMAKGLFHKAIMESGVAIIPYLEAHDYEKSEDLQVVAHFCGNNASDSEALLRCLRTKPSKELLTLSQKTKSFTRVVDGAFFPNEPLDLLSQKAFKAIPSIIGVNNHECGFLLPMKEAPEILSGSNKSLALHLIQNILHIPPQYLHLVANEYFHDKHSLTEIRDSLLDLLGDVFFVVPALITARYHRDAGAPVYFYEFRHRPQCFEDTKPAFVKADHADEVRFVFGGAFLKGDIVMFEGATEEEKLLSRKMMKYWATFARTGNPNGNDLSLWPAYNLTEQYLQLDLNMSLGQRLKEPRVDFWTSTIPLILSASDMLHSPLSSLTFLSLLQPFFFFCAP

SEQ ID NO: 2654 - protein, 525 aa, Homo Sapiens
MSGNWVHPGQILIWAIWVLAAPTKGPSAEGPQRNTRLGWIQGKQVTVLGSPVPVNVFLGVPFAAPPLGSLRFTNPQPASPWDNLREATSYPNLCLQNSEWLLLDQHMLKVHYPKFGVSEDCLYLNIYAPAHADTGSKLPVLVWFPGGAFKTGSASIFDGSALAAYEDVLVVVVQYRLGIFGFFTTWDQHAPGNWAFKDQVAALSWVQKNIEFFGGDPSSVTIFGESAGAISVSSLILSPMAKGLFHKAIMESGVAIIPYLEAHDYEKSEDLQVVAHFCGNNASDSEALLRCLRTKPSKELLTLSQKTKSFTRVVDGAFFPNEPLDLLSQKAFKAIPSIIGVNNHECGFLLPMKEAPEILSGSNKSLALHLIQNILHIPPQYLHLVANEYFHDKHSLTEIRDSLLDLLGDVFFVVPALITARYHREGATEEEKLLSRKMMKYWATFARTGNPNGNDLSLWPAYNLTEQYLQLDLNMSLGQRLKEPRVDFWTSTIPLILSASDMLHSPLSSLTFLSLLQPFFFFCAP

SEQ ID NO: 2655 - protein, 545 aa, Homo Sapiens
MSGNWVHPGQILIWAIWVLAAPTKGPSAEGPQRNTRLGWIQGKQVTVLGSPVPVNVFLGVPFAAPPLGSLRFTNPQPASPWDNLREATSYPNLCLQNSEWLLLDQHMLKVLVWFPGGAFKTGSASIFDGSALAAYEDVLVVVVQYRLGIFGFFTTWDQHAPGNWAFKDQVAALSWVQKNIEFFGGDPSSVTIFGESAGAISVSSLILSPMAKGLFHKAIMESGVAIIPYLEAHDYEKSEDLQVVAHFCGNNASDSEALLRCLRTKPSKELLTLSQKTKSFTRVVDGAFFPNEPLDLLSQKAFKAIPSIIGVNNHECGFLLPMKEAPEILSGSNKSLALHLIQNILHIPPQYLHLVANEYFHDKHSLTEIRDSLLDLLGDVFFVVPALITARYHRDAGAPVYFYEFRHRPQCFEDTKPAFVKADHADEVRFVFGGAFLKGDIVMFEGATEEEKLLSRKMMKYWATFARTGNPNGNDLSLWPAYNLTEQYLQLDLNMSLGQRLKEPRVDFWTSTIPLILSASDMLHSPLSSLTFLSLLQPFFFFCAP

SEQ ID NO: 2656 - protein, 433 aa, Homo Sapiens
MLAATVLTLALLGNAHACSKGTSHEAGIVCRITKPALLVLNHETAKVIQTAFQRASYPDITGEKAMMLLGQVKYGLHNIQISHLSIASSQVELVEAKSIDVSIQNVSVVFKGTLKYGYTTAWWLGIDQSIDFEIDSAIDLQINTQLTCDSGRVRTDAPDCYLSFHKLLLHLQGEREPGWIKQLFTNFISFTLKLVLKGQICKEINVISNIMADFVQTRAASILSDGDIGVDISLTGDPVITASYLESHHKAVLETWGFNTNQEIFQEVVGGFPSQAQVTVHCLKMPKISCQNKGVVVNSSVMVKFLFPRPDQQHSVAYTFEEDIVTTVQASYSKKKLFLSLLDFQITPKTVSNLTESSSESVQSFLQSMITAVGIPEVMSRLEVVFTALMNSKGVSLFDIINPEIITRDGFLLLQMDFGFPEHLLVDFLQSLS

SEQ ID NO: 2657 - protein, 493 aa, Homo Sapiens [sequence omitted]

SEQ ID NO: 2658 - protein, 428 aa, Homo Sapiens
MMLLGQVKYGLHNIQISHLSIASSQVELVEAKSIDVSIQNVSVVFKGTLKYGYTTAWWLGIDQSIDFEIDSAIDLQINTQLTCDSGRVRTDAPDCYLSFHKLLLHLQGEREPGWIKQLFTNFISFTLKLVLKGQICKEINVISNIMADFVQTRAASILSDGDIGVDISLTGDPVITASYLESHHKGHFIYKNVSEDLPLPTFSPTLLGDSRMLYFWFSERVFHSLAKVAFQDGRLMLSLMGDEFKAVLETWGFNTNQEIFQEVVGGFPSQAQVTVHCLKMPKISCQNKGVVVNSSVMVKFLFPRPDQQHSVAYTFEEDIVTTVQASYSKKKLFLSLLDFQITPKTVSNLTESSSESVQSFLQSMITAVGIPEVMSRLEVVFTALMNSKGVSLFDIINPEIITRDGFLLLQMDFGFPEHLLVDFLQSLS

SEQ ID NO: 2659 - protein, 784 aa, Homo Sapiens
METAIWRRSYISLISSERPVHNWRGKSVQKKQAESKSQIKLHTQSAPFGLCPKDMMLTQAPSSVVRSRNSRNHTVNSGGSCLSASTVAIPAINDSSAAMSACSTISAQPASSMDTQMHSPKKQERVNKRVIWGIEVAEELHWKGWELGKETTRNLVLKNRSLKLQKMKYRPPKTKFFFTVIPQPIFLSPGITLTLPIVFRPLEAKEYMDQLWFEKAEGMFCVGLRATLPCHRLICRPPSLQLPMCAVGDTTEAFFCLDNVGDLPTFFTWEFSSPFQMLPATGLLEPGQASQIKVTFQPLTAVIYEVQATCWYGAGSRQRSSIQLQAVAKCAQLLVSIKHKCPEDQDAEGFQKLLYFGSVAVGCTSERQIRLHNPSAVNAPFRIEISPDELAEDQAFSCPTAHGIVLPGEKKCVSVFFHPKTLDTRTVDYCSIMPSGCASKTLLKVVGFCRGPAVSLQHYCVNFSWVNLGERSEQPLWIENQSDCTAHFQFAIDCLESVFTIRPAFGTLVGKARMTLHCAFQPTHPIICFRRVACLIHHQDPLFLDLMGTCHSDSTKPAILKPQHLTWYRTHLARGLTLYPPDILDAMLKEKKLAQDQNGALMIPIQDLEDMPAPQYPYIPPMTEFFFDGTSDITIFPPPISVEPVEVDFGACPGPEAPNPVPLCLMNHTKGKIMVVWTRRSDCPFWVTPESCDVPPLKSMAMRLHFQPPHPNCLYTVELEAFAIYKVCARNEREECGVSARSLSGLVGWQEVTEGSFRLHPLRARLSLGWTVTPMSLSPPKLLA

SEQ ID NO: 2660 - protein, 234 aa, Homo Sapiens
METAIWRRSYISLISSERPVHNWRGKSVQKKQAESKSQIKLHTQSAPFGLCPKDMMLTQAPSSVVRSRNSRNHTVNSGGSCLSASTVAIPAINDSSAAMSACSTISAQPASSMDTQMHSPKKQERVNKRVIWGIEVAEELHWKGWELGKETTRNLVLKNRSLKLQKMKYRPPKTKFFFTVIPQPIFLSPGITLTLPIVFRPLEAPLTAVIYEVQATCWYGAGSRQRSSIQLQAV

SEQ ID NO: 2661 - protein, 1925 aa, Homo Sapiens
MFTLTGCRLVEKTQKVENPSVSFASSFPLIPLLLRGKSVQKKQAESKSQIKLHTQSAPFGLCPKDMMLTQAPSSVVRSRNSRNHTVNSGGSCLSASTVAIPAINDSSAAMSACSTISAQPASSMDTQMHSPKKQERVNKRVIWGIEVAEELHWKGWELGKETTRNLVLKNRSLKLQKMKYRPPKTKFFFTVIPQPIFLSPGITLTLPIVFRPLEAKEYMDQLWFEKAEGMFCVGLRATLPCHRLICRPPSLQLPMCAVGDTTEAFFCLDNVGDLPTFFTWEFSSPFQMLPATGLLEPGQASQIKVTFQPLTAVIYEVQATCWYGAGSRQRSSIQLQAVAKCAQLLVSIKHKCPEDQDAEGFQKLLYFGSVAVGCTSERQIRLHNPSAVNAPFRIEISPDELAEDQAFSCPTAHGIVLPGEKKCVSVFFHPKTLDTRTVDYCSIMPSGCASKTLLKVVGFCRGPAVSLQHYCVNFSWVNLGERSEQPLWIENQSDCTAHFQFAIDCLESVFTIRPAFGTLVGKARMTLHCAFQPTHPIICFRRVACLIHHQDPLFLDLMGTCHSDSTKPAILKPQHLTWYRTHLARGLTLYPPDILDAMLKEKKLAQDQNGALMIPIQDLEDMPAPQYPYIPPMTEFFFDGTSDITIFPPPISVEPVEVDFGACPGPEAPNPVPLCLMNHTKGKIMVVWTRRSDCPFWVTPESCDVPPLKSMAMRLHFQPPHPNCLYTVELEAFAIYKVLQSYSNIEEDCTMCPSWCLTVRARGHSYFAGFEHHIPQYSLDVPKLFPAVSSGEPTYRSLLLVNKDCKLLTFSLAPQRGSDVILRPTSGLVAPGAHQIILICTYPEGSSWKQHTFYLQCNASPQYLKEVSMYSREEPLQLKLDTHKSLYFKPTWVGCSSTSPFTFRNPSRLPLQFEWRVSEQHRKLLAVQPSRGLIQPNERLTLTWTFSPLEETKYLFQVGMWVWEAGLSPNANPAATTHYMLRLVGVGLTSSLSAKEKELAFGNVLVNSKQSRFLVLLNDGNCTLYYRLYLEQGSPEAVDNHPLALQLDRTEGSMPPRSQDTICLTACPKQRSQYSWTITYSLLSHRDNKAGEKQELCCVSLVAVYPLLSILDVSSMGSAEGITRKHLWRLFSLDLLNSYLERDPTPCELTYKVPTRHSMSQIPPVLTPLRLDFNFGAAPFKAPPSVVFLALKNSGVVSLDWAFLLPSDQRIDVELWAEQAELNSTELHQMRVQDNCLFSISPKAGSLSPGQEQMVELKYSHLFIGTDHLPVLFKVSHGREILLNFIGVTVKPEQKYVHFTSTTHQFIPIPIGDTLPPRQIYELYNGGSVPVTYEVQTDVLSQVQEKNFDHPIFCCLNPKGEIQPGSTARVLWIFSPIEAKTYTVDVPIHILGWNSALIHFQGVGYNPHMMGDTAPFHNISSWDNSSIHSRLVVPGQNVFLSQSHISLGNIPVQSKCSRLLFLNNISKNEEIAFSWQPSPLDFGEVSVSPMIGVVAPEETVPFVVTLRASVHASFYSADLVCKLYSQQLMRQYHKELQEWKDEKVRQEVEFTITDMKVKKRTCCTACEPARKYKTLPPIKNQQSVSRPASWKLQTPKEEVSWPCPQPPSPGMLCLGLTARAHATDYFLANFFSEFPCHFLHRELPKRKAPREESETSEEKSPNKWGPVSKQKKQLLVDILTTIIRGLLEDKNFHEAVDQSLVEQVPYFRQFWNEQSTKFMDQKNSLYLMPILPVPSSSWEDGKGKQPKEDRPEHYPGLGKKEEGEEEKGEEEEEELEEEEEEEEETEEEELGKEEIEEKEEERDEKEEKVSWAGIGPTPQPESQESMQWQWQQQLNVMVKEEQEQDEKEAIRRLPAFANLQEALLENMIQNILVEASRGEVVLTSRPRVIALPPFCVPRSLTPDTLLPTQQAEVLHPVVPLPTDLP

SEQ ID NO: 2662 - protein, 1925 aa, Homo Sapiens; identical to SEQ ID NO: 2661

SEQ ID NO: 2663 - protein, 114 aa, Homo Sapiens
MMLTQAPSSVVRSRNSRNHTVNSGGSCLSASTVAIPAINDSSAAMSACSTISAQPASSMDTQMHSPKKQERVNKRVIWGIEVAEELHWKGWELGKETTRNLVLKNRSLKLQKMK

SEQ ID NO: 2664 - protein, 117 aa, Homo Sapiens
MMLTQAPSSVVRSRNSRNHTVNSGGSCLSASTVAIPAINDSSAAMSACSTISAQPASSMDTQMHSPKKQERVNKRVIWGIEVAEELHWKGWELGKETTRNLVLKNRSLKLQKMKYRP

SEQ ID NO: 2665 - protein, 730 aa, Homo Sapiens
MMLTQAPSSVVRSRNSRNHTVNSGGSCLSASTVAIPAINDSSAAMSACSTISAQPASSMDTQMHSPKKQERVNKRVIWGIEVAEELHWKGWELGKETTRNLVLKNRSLKLQKMKYRPPKTKFFFTVIPQPIFLSPGITLTLPIVFRPLEAKEYMDQLWFEKAEGMFCVGLRATLPCHRLICRPPSLQLPMCAVGDTTEAFFCLDNVGDLPTFFTWEFSSPFQMLPATGLLEPGQASQIKVTFQPLTAVIYEVQATCWYGAGSRQRSSIQLQAVAKCAQLLVSIKHKCPEDQDAEGFQKLLYFGSVAVGCTSERQIRLHNPSAVNAPFRIEISPDELAEDQAFSCPTAHGIVLPGEKKCVSVFFHPKTLDTRTVDYCSIMPSGCASKTLLKVVGFCRGPAVSLQHYCVNFSWVNLGERSEQPLWIENQSDCTAHFQFAIDCLESVFTIRPAFGTLVGKARMTLHCAFQPTHPIICFRRVACLIHHQDPLFLDLMGTCHSDSTKPAILKPQHLTWYRTHLARGLTLYPPDILDAMLKEKKLAQDQNGALMIPIQDLEDMPAPQYPYIPPMTEFFFDGTSDITIFPPPISVEPVEVDFGACPGPEAPNPVPLCLMNHTKGKIMVVWTRRSDCPFWVTPESCDVPPLKSMAMRLHFQPPHPNCLYTVELEAFAIYKVCARNEREECGVSARSLSGLVGWQEVTEGSFRLHPLRARLSLGWTVTPMSLSPPKLLA

SEQ ID NO: 2666 - protein, 164 aa, Homo Sapiens
MMLTQAPSSVVRSRNSRNHTVNSGGSCLSASTVAIPAINDSSAAMSACSTISAQPASSMDTQMHSPKKQERVNKRVIWGIEVAEELHWKGWELGKETTRNLVLKNRSLKLQKMKYRYQYKGSRTQCHSLEPRKQALFKTKQNKQKKPLTCHIKASECLKYVQYE

SEQ ID NO: 2667 - protein, 271 aa, Homo Sapiens
MTLHCAFQPTHPIICFRRVACLIHHQDPLFLDLMGTCHSDSTKPAILKPQHLTWYRTHLARGLTLYPPDILDAMLKEKKLAQDQNGALMIPIQDLEDMPAPQYPYIPPMTEFFFDGTSDITIFPPPISVEPVEVDFGACPGPEAPNPVPLCLMNHTKGKIMVVWTRRSDCPFWVTPESCDVPPLKSMAMRLHFQPPHPNCLYTVELEAFAIYKVCARNEREECGVSARSLSGLVGWQEVTEGSFRLHPLRARLSLGWTVTPMSLSPPKLLA

SEQ ID NO: 2668 - protein, 127 aa, Homo Sapiens
  misc_feature (1)..(1): Xaa can be any naturally occurring amino acid
XKQELCCVSLVAVYPLLSILDVSSMGSAEGITRKHLWRLFSLDLLNSYLERDPTPCELTYKVPTRHSMSQIPPVLTPLRLDFNFGAAPFKAPPSVVFLALKNSGVVSLDWYGLKGATGGPGRQVPRG

SEQ ID NO: 2669 - protein, 144 aa, Homo Sapiens
MGSNLSPQLCLMPFILGLLSGGVTTTPWSLARPQGSCSLEGVEIKGGSFRLLQEGQALEYVCPSGFYPYPVQTRTCRSTGSWSTLKTQDQKTVRKAECRAIHCPRPHDFENGEYWPRSPYYNVSDEISFHCYDGYTLRGSANRT

SEQ ID NO: 2670 - protein, 764 aa, Homo Sapiens
MGSNLSPQLCLMPFILGLLSGGVTTTPWSLARPQGSCSLEGVEIKGGSFRLLQEGQALEYVCPSGFYPYPVQTRTCRSTGSWSTLKTQDQKTVRKAECRAIHCPRPHDFENGEYWPRSPYYNVSDEISFHCYDGYTLRGSANRTCQVNGRWSGQTAICDNGAGYCSNPGIPIGTRKVGSQYRLEDSVTYHCSRGLTLRGSQRRTCQEGGSWSGTEPSCQDSFMYDTPQEVAEAFLSSLTETIEGVDAEDGHGPGEQQKRKIVLDPSGSMNIYLVLDGSDSIGASNFTGAKKCLVNLIEKVASYGVKPRYGLVTYATYPKIWVKVSEADSSNADWVTKQLNEINYEDHKLKSGTNTKKALQAVYSMMSWPDDVPPEGWNRTRHVIILMTDGLHNMGGDPITVIDEIRDLLYIGKDRKNPREDYLDVYVFGVGPLVNQVNINALASKKDNEQHVFKVKDMENLEDVFYQMIDESQSLSLCGMVWEHRKGTDYHKQPWQAKISVIRPSKGHESCMGAVVSEYFVLTAAHCFTVDDKEHSIKVSVGGEKRDLEIEVVLFHPNYNINGKKEAGIPEFYDYDVALIKLKNKLKYGQTIRPICLPCTEGTTRALRLPPTTTCQQQKEELLPAQDIKALFVSEEEKKLTRKEVYIKNGDKKGSCERDAQYAPGYDKVKDISEVVTPRFLCTGGVSPYADPNTCRGDSGGPLIVHKRSRFIQVGVISWGVVDVCKNQKRQKQVPAHARDFHINLFQVLPWLKEKLQDEDLGFL

SEQ ID NO: 2671 - protein, 86 aa, Homo Sapiens
MGSNLSPQLCLMPFILGLLSGVRVSFWLLPVPCADTYLQIYGVLEHPEDSRPKDCQEGRVQSNPLSKTTRLRERGILAPVSLLQCE

SEQ ID NO: 2672 - protein, 305 aa, Homo Sapiens
  misc_feature (1)..(1): Xaa can be any naturally occurring amino acid
XDGLHNMGGDPITVIDEIRDLLYIGKDRKNPREDYLDVYVFGVGPLVNQVNINALASKKDNEQHVFKVKDMENLEDVFYQMIGGEKRDLEIEVVLFHPNYNINGKKEAGIPEFYDYDVALIKLKNKLKYGQTIRPICLPCTEGTTRALRLPPTTTCQQQKEELLPAQDIKALFVSEEEKKLTRKEVYIKNGDKKGSCERDAQYAPGYDKVKDISEVVTPRFLCTGGVSPYADPNTCRGDSGGPLIVHKRSRFIQVGVISWGVVDVCKNQKRQKQVPAHARDFHINLFQVLPWLKEKLQDEDLGFL

SEQ ID NO: 2673 - protein, 68 aa, Homo Sapiens
  misc_feature (1)..(1): Xaa can be any naturally occurring amino acid
XPRFLCTGGVSPYADPNTCRGDSGGPLIVHKRSRFIQVSPPFPIWGDAKWSAWAPKQESSMHVASNSR

SEQ ID NO: 2674 - protein, 148 aa, Homo Sapiens
MTWRHHVRLLFTVSLALQIINLGNSYQREKHNGGREEVTKVATQKHRQSPLNWTSSHFGEVTGSAEGWGPEEPLPYSRAFGEDPKDFLASHAHGPSAGGAPSLLLLLPCALLHRLLRPDAPAHPRSLVPSVLQRERRPCGRPGLGHRL

SEQ ID NO: 2675 - protein, 223 aa, Homo Sapiens
MTWRHHVRLLFTVSLALQIINLGNSYQREKHNGGREEVTKVATQKHRQSPLNWTSSHFGEVTGSAEGWGPEEPLPYSRAFGEGASARPRCCRNGGTCVLGSFCVCPAHFTGRYCEHDQRRSECGALEHGAWTLRACHLCRCIFGALHCLPLQTPDRCDPKDFLASHAHGPSAGGAPSLLLLLPCALLHRLLRPDAPAHPRSLVPSVLQRERRPCGRPGLGHRL

SEQ ID NO: 2676 - protein, 191 aa, Homo Sapiens
MTWRHHVRLLFTVSLALQIINLGNSYQREKHNGGREEVTKVATQKHRQSPLNWTSSHFGEVTGSAEGWGPEEPLPYSRAFGEVNAAPWSTEPGPSAPATSAGASSGPCTASPSRRLTAVTRKTSWPPTLTGRAPGARPACYSCCPAHSCTASCARMRPRTLGPWSLPSSSGSGAPAEGRDLGIAFNFLCCK

SEQ ID NO: 2677 - protein, 148 aa, Homo Sapiens
MTWRHHVRLLFTVSLALQIINLGNSYQREKHNGGREEVTKVATQKHRQSPLNWTSSHFGEVTGSAEGWGPEEPLPYSWAFGEDPKDFLASHAHGPSAGGAPSLLLLLPCALLHRLLRPDAPAHPRSLVPSVLQRERRPCGRPGLGHRL

SEQ ID NO: 2678 - protein, 223 aa, Homo Sapiens
MTWRHHVRLLFTVSLALQIINLGNSYQREKHNGGREEVTKVATQKHRQSPLNWTSSHFGEVTGSAEGWGPEEPLPYSWAFGEGASARPRCCRNGGTCVLGSFCVCPAHFTGRYCEHDQRRSECGALEHGAWTLRACHLCRCIFGALHCLPLQTPDRCDPKDFLASHAHGPSAGGAPSLLLLLPCALLHRLLRPDAPAHPRSLVPSVLQRERRPCGRPGLGHRL

SEQ ID NO: 2679 - protein, 191 aa, Homo Sapiens
MTWRHHVRLLFTVSLALQIINLGNSYQREKHNGGREEVTKVATQKHRQSPLNWTSSHFGEVTGSAEGWGPEEPLPYSWAFGEVNAAPWSTEPGPSAPATSAGASSGPCTASPSRRLTAVTRKTSWPPTLTGRAPGARPACYSCCPAHSCTASCARMRPRTLGPWSLPSSSGSGAPAEGRDLGIAFNFLCCK

SEQ ID NO: 2680 - protein, 253 aa, Homo Sapiens
MHSWERLAVLVLLGAAACAAPPRGRILGGREAEAHARPYMASVQLNGAHLCGGVLVAEQWVLSAAHCLEDAADGKVQVLLGAHSLSQPEPSKRLYDVLRAVPHPDSQPDTIDHDLLLLQLSEKATLGPAVRPLPWQRVDRDVAPGTLCDVAGWGIVNHAGRRPDSLQHVLLPVLDRATCNRRTHHDGAITERLMCAESNRRDSCKGDSGGPLVCGGVLEGVVTSGSRVCGNRKKPGIYTRVASYAAWIDSVLA

SEQ ID NO: 2681 - protein, 260 aa, Homo Sapiens
MHSWERLAVLVLLGAAACGEEAWAWAAPPRGRILGGREAEAHARPYMASVQLNGAHLCGGVLVAEQWVLSAAHCLEDAADGKVQVLLGAHSLSQPEPSKRLYDVLRAVPHPDSQPDTIDHDLLLLQLSEKATLGPAVRPLPWQRVDRDVAPGTLCDVAGWGIVNHAGRRPDSLQHVLLPVLDRATCNRRTHHDGAITERLMCAESNRRDSCKGDSGGPLVCGGVLEGVVTSGSRVCGNRKKPGIYTRVASYAAWIDSVLA

SEQ ID NO: 2682 - protein, 299 aa, Homo Sapiens
MEEFDSEDFSTSEEDEDYVPSGGEYSEDDVNELVKEDEVDGEEQTQKTQGKKRKAQSIPARKRRQGGLSLEEEEEEDANSESEGSSSEEEDDAAEQEKGIGSEDARKKKEDELWASFLNDVGPKSKVPPSTQVKKGEETEETSSSKLLVKAEELEKPKETEKVKITKVFDFAGEEVRVTKEVDATSKEAKSFFKQNEKEKPQANVPSALPSLPAGSGLKRSSGMSSLLGKIGAKKQKMSTLEKSKLDWESFKEEEGIGEELAIHNRGKEGYIERKAFLDRVDHRQFEIERDLRLSKMKP

SEQ ID NO: 2683 - protein, 50 aa, Homo Sapiens
MSRRPAYCSLQFLGSSDPPASASPVDGTTGGEYSEDDVNELVKEDEVDGE

SEQ ID NO: 2684 - protein, 19 aa, Homo Sapiens
QANVPSALPSLPAGSGCVI

SEQ ID NO: 2685 - protein, 17 aa, Homo Sapiens
  misc_feature (1)..(1): Xaa can be any naturally occurring amino acid
XALPSLPAGSGKKKFDA

SEQ ID NO: 2686 - protein, 385 aa, Homo Sapiens
MRLLAKIICLMLWAICVAEDCNELPPRRNTEILTGSWSDQTYPEGTQAIYKCRPGYRSLGNVIMVCRKGEWVALNPLRKCQKRPCGHPGDTPFGTFTLTGGNVFEYGVKAVYTCNEGYQLLGEINYRECDTDGWTNDIPICEEISCKSPDVINGSPISQKIIYKENERFQYKCNMGYEYSERGDAVCTESGWRPLPSCEEKSCDNPYIPNGDYSPLRIKHRTGDEITYQCRNGFYPATRGNTAKCTSTGWIPAPRCTLKPCDYPDIKHGGLYHENMRRPYFPVAVGKYYSYYCDEHFETPSGSYWDHIHCTQDGWSPAVPCLRKCYFPYLENGYNQNHGRKFVQGKSIDVACHPGYALPKAQTTVTCMENGWSPTPRCIRVSFTL

SEQ ID NO: 2687 - protein, 1231 aa, Homo Sapiens
MRLLAKIICLMLWAICVAEDCNELPPRRNTEILTGSWSDQTYPEGTQAIYKCRPGYRSLGNVIMVCRKGEWVALNPLRKCQKRPCGHPGDTPFGTFTLTGGNVFEYGVKAVYTCNEGYQLLGEINYRECDTDGWTNDIPICEVVKCLPVTAPENGKIVSSAMEPDREYHFGQAVRFVCNSGYKIEGDEEMHCSDDGFWSKEKPKCVEISCKSPDVINGSPISQKIIYKENERFQYKCNMGYEYSERGDAVCTESGWRPLPSCEEKSCDNPYIPNGDYSPLRIKHRTGDEITYQCRNGFYPATRGNTAKCTSTGWIPAPRCTLKPCDYPDIKHGGLYHENMRRPYFPVAVGKYYSYYCDEHFETPSGSYWDHIHCTQDGWSPAVPCLRKCYFPYLENGYNQNHGRKFVQGKSIDVACHPGYALPKAQTTVTCMENGWSPTPRCIRVKTCSKSSIDIENGFISESQYTYALKEKAKYQCKLGYVTADGETSGSITCGKDGWSAQPTCIKSCDIPVFMNARTKNDFTWFKLNDTLDYECHDGYESNTGSTTGSIVCGYNGWSDLPICYERECELPKIDVHLVPDRKKDQYKVGEVLKFSCKPGFTIVGPNSVQCYHFGLSPDLPICKEQVQSCGPPPELLNGNVKEKTKEEYGHSEVVEYYCNPRFLMKGPNKIQCVDGEWTTLPVCIVEESTCGDIPELEHGWAQLSSPPYYYGDSVEFNCSESFTMIGHRSITCIHGVWTQLPQCVAIDKLKKCKSSNLIILEEHLKNKKEFDHNSNIRYRCRGKEGWIHTVCINGRWDPEVNCSMAQIQLCPPPPQIPNSHNMTTTLNYRDGEKVSVLCQENYLIQEGEEITCKDGRWQSIPLCVEKIPCSQPPQIEHGTINSSRSSQESYAHGTKLSYTCEGGFRISEENETTCYMGKWSSPPQCEGLPCKSPPEISHGVVAHMSDSYQYGEEVTYKCFEGFGIDGPAIAKCLGEKWSHPPSCIKTDCLSLPSFENAIPMGEKKDVYKAGEQVTYTCATYYKMDGASNVTCINSRWTGRPTCRDTSCVNPPTVQNAYIVSRQMSKYPSGERVRYQCRSPYEMFGDEEVMCLNGNWTEPPQCKDSTGKCGPPPPIDNGDITSFPLSVYAPASSVEYQCQNLYQLEGNKRITCRNGQWSEPPKCLHPCVISREIMENYNIALRWTAKQKLYSRTGESVEFVCKRGYRLSSRSHTLRTTCWDGKLEYPTCAKR

SEQ ID NO: 2688 - protein, 449 aa, Homo Sapiens
MRLLAKIICLMLWAICVAEDCNELPPRRNTEILTGSWSDQTYPEGTQAIYKCRPGYRSLGNVIMVCRKGEWVALNPLRKCQKRPCGHPGDTPFGTFTLTGGNVFEYGVKAVYTCNEGYQLLGEINYRECDTDGWTNDIPICEVVKCLPVTAPENGKIVSSAMEPDREYHFGQAVRFVCNSGYKIEGDEEMHCSDDGFWSKEKPKCVEISCKSPDVINGSPISQKIIYKENERFQYKCNMGYEYSERGDAVCTESGWRPLPSCEEKSCDNPYIPNGDYSPLRIKHRTGDEITYQCRNGFYPATRGNTAKCTSTGWIPAPRCTLKPCDYPDIKHGGLYHENMRRPYFPVAVGKYYSYYCDEHFETPSGSYWDHIHCTQDGWSPAVPCLRKCYFPYLENGYNQNHGRKFVQGKSIDVACHPGYALPKAQTTVTCMENGWSPTPRCIRVSFTL

SEQ ID NO: 2689 - protein, 271 aa, Homo Sapiens
MWLLVSVILISRISSVGGEATFCDFPKINHGILYDEEKYKPFSQVPTGEVFYYSCEYNFVSPSKSFWTRITCTEEGWSPTPKCLRLCFFPFVENGHSESSGQTHLEGDTVQIICNTGYRLQNNENNISCVERGWSTPPKCRSTDSTGKCGPPPPIDNGDITSFPLSVYAPASSVEYQCQNLYQLEGNKRITCRNGQWSEPPKCLHPCVISREIMENYNIALRWTAKQKLYLRTGESAEFVCKRGYRLSSRSHTLRTTCWDGKLEYPTCAKR

SEQ ID NO: 2690 - protein, 330 aa, Homo Sapiens
MWLLVSVILISRISSVGGEATFCDFPKINHGILYDEEKYKPFSQVPTGEVFYYSCEYNFVSPSKSFWTRITCTEEGWSPTPKCLRLCFFPFVENGHSESSGQTHLEGDTVQIICNTGYRLQNNENNISCVERGWSTPPKCRSTDTSCVNPPTVQNAHILSRQMSKYPSGERVRYECRSPYEMFGDEEVMCLNGNWTEPPQCKDSTGKCGPPPPIDNGDITSFPLSVYAPASSVEYQCQNLYQLEGNKRITCRNGQWSEPPKCLHPCVISREIMENYNIALRWTAKQKLYLRTGESAEFVCKRGYRLSSRSHTLRTTCWDGKLEYPTCAKR

SEQ ID NO: 2691 - protein, 270 aa, Homo Sapiens; identical to SEQ ID NO: 1649

SEQ ID NO: 2692 - protein, 254 aa, Homo Sapiens
MWLLVSVILISRISSVGGEAMFCDFPKINHGILYDEEKYKPFSQVPTGEVFYYSCEYNFVSPSKSFWTRITCAEEGWSPTPKCLRQTHLEGDTVQIICNTGYRLQNNENNISCVERGWSTPPKCRSTISAEKCGPPPPIDNGDITSFLLSVYAPGSSVEYQCQNLYQLEGNNQITCRNGQWSEPPKCLDPCVISQEIMEKYNIKLKWTNQQKLYSRTGDIVEFVCKSGYHPTKSHSFRAMCQNGKLVYPSCEEK

SEQ ID NO: 2693 - protein, 269 aa, Homo Sapiens
MLLLINVILTLWVSCANGQVKPCDFPDIKHGGLFHENMRRPYFPVAVGKYYSYYCDEHFETPSGSYWDYIHCTQNGWSPAVPCLRKCYFPYLENGYNQNYGRKFVQGNSTEVACHPGYGLPKAQTTVTCTEKGWSPTPRCIRVNSSEKCGPPPPISNGDTTSFLLKVYVPQSRVEYQCQPYYELQGSNYVTCSNGEWSEPPRCIHPCIITEENMNKNNIKLKGRSDRKYYAKTGDTIEFMCKLGYNANTSILSFQAVCREGIVEYPRCE

SEQ ID NO: 2694 - protein, 195 aa, Homo Sapiens
MLLLINVILTLWVSCANGQVKPCDFPDIKHGGLFHENMRRPYFPVAVGKYYSYYCDEHFETPSGSYWDYIHCTQNGWSPAVPCLRKCYFPYLENGYNQNYGRKFVQGNSTEVACHPGYGLPKAQTTVTCTEKGWSPTPRCIRVRTCSKSDIEIENGFISESSSIYILNKEIQYKCKPGYATADGNSSDMVFCISY

SEQ ID NO: 2695 - protein, 330 aa, Homo Sapiens
MLLLINVILTLWVSCANGQVKPCDFPDIKHGGLFHENMRRPYFPVAVGKYYSYYCDEHFETPSGSYWDYIHCTQNGWSPAVPCLRKCYFPYLENGYNQNYGRKFVQGNSTEVACHPGYGLPKAQTTVTCTEKGWSPTPRCIRVRTCSKSDIEIENGFISESSSIYILNKEIQYKCKPGYATADGNSSGSITCLQNGWSAQPICINSSEKCGPPPPISNGDTTSFLLKVYVPQSRVEYQCQPYYELQGSNYVTCSNGEWSEPPRCIHPCIITEENMNKNNIKLKGRSDRKYYAKTGDTIEFMCKLGYNANTSILSFQAVCREGIVEYPRCE

SEQ ID NO: 2696 - protein, 232 aa, Homo Sapiens
MLLLINVILTLWVSCANGQVKPCDFPDIKHGGLFHENMRRPYFPVAVGKYYSYYCDEHFETPSGSYWDYIHCTQNGWSPAVPCLRKCYFPYLENGYNQNYGRKFVQGNSTEVACHPGYGLPKAQTTVTCTEKGWSPTPRCIRVRTCSKSDIEIENGFISESSSIYILNKEIQYKCKPGYATADGNSSGSITCLQNGWSAQPICITACIAFRAHAQKSCTCRGRNECLILNFC

SEQ ID NO: 2697 - protein, 232 aa, Homo Sapiens; identical to SEQ ID NO: 2696

SEQ ID NO: 2698 - protein, 201 aa, Homo Sapiens
MENGWSPPCRCIRVRTCSKSDIEIENGFISESSSIYILNKEIQYKCKPGYATADGNSSGSITCLQNGWSAQPICINSSEKCGPPPPISNGDTTSFLLKVYVPQSRVEYQCQSYYELQGSNYVTCSNGEWSEPPRCIHPCIITEENMNKNNIQLKGKSDIKYYAKTGDTIEFMCKLGYNANTSVLSFQAVCREGIVEYPRCE

SEQ ID NO: 2699 - protein, 331 aa, Homo Sapiens
MLLLINVILTLWVSCANGQEVKPCDFPEIQHGGLYYKSLRRLYFPAAAGQSYSYYCDQNFVTPSGSYWDYIHCTQDGWLPTVPCLRTCSKSDIEIENGFISESSSIYILNKEIQYKCKPGYATADGNSSGSITCLQNGWSAQPICIKFCDMPVFENSRAKSNGMRFKLHDTLDYECYDGYEISYGNTTGSIVCGEDGWSHFPTCYNSSEKCGPPPPISNGDTTSFLLKVYVPQSRVEYQCQSYYELQGSNYVTCSNGEWSEPPRCIHPCIITEENMNKNNIQLKGKSDIKYYAKTGDTIEFMCKLGYNANTSVLSFQAVCREGIVEYPRCE

SEQ ID NO: 2700 - protein, 331 aa, Homo Sapiens
MLLLINVILTLWVSCANGQEVKPCDFPEIQHGGLYYKSLRRLYFPAAAGQSYSYYCDQNFVTPSGSYWDYIHCTQDGWSPTVPCLRTCSKSDIEIENGFISESSSIYILNKEIQYKCKPGYATADGNSSGSITCLQNGWSAQPICIKFCDMPVFENSRAKSNGMRFKLHDTLDYECYDGYEISYGNTTGSIVCGEDGWSHFPTCYNSSEKCGPPPPISNGDTTSFLLKVYVPQSRVEYQCQSYYELQGSNYVTCSNGEWSEPPRCIHPCIITEENMNKNNIQLKGKSDIKYYAKTGDTIEFMCKLGYNANTSVLSFQAVCREGIVEYPRCE

SEQ ID NO: 2701 - protein, 577 aa, Homo Sapiens
MLLLINVILTLWVSCANGQVKPCDFPEIQHGGLYYKSLRRLYFPAAAGQSYSYYCDQNFVTPSGSYWDYIHCTQDGWSPTVPCLRTCSKSDVEIENGFISESSSIYILNEETQYNCKPGYATAEGNSSGSITCLQNGWSTQPICIKFCDMPVFENSRAKSNGMWFKLHDTLDYECYDGYESSYGNTTDSIVCGEDGWSHLPTCYNSSENCGPPPPISNGDTTSFPQKVYLPWSRVEYQCQSYYELQGSKYVTCSNGDWSEPPRCISMKPCEFPEIQHGHLYYENTRRPYFPVATGQSYSYYCDQNFVTPSGSYWDYIHCTQDGWLPTVPCLRTCSKSDIEIENGFISESSSIYILNKEIQYKCKPGYATADGNSSGSITCLQNGWSAQPICIKFCDMPVFENSRAKSNGMRFKLHDTLDYECYDGYEISYGNTTGSIVCGEDGWSHFPTCYNSSEKCGPPPPISNGDTTSFLLKVYVPQSRVEYQCQSYYELQGSNYVTCSNGEWSEPPRCIHPCIITEENMNKNNIQLKGKSDIKYYAKTGDTIEFMCKLGYNANTSVLSFQAVCREGIVEYPRCE

SEQ ID NO: 2702 - protein, 569 aa, Homo Sapiens
MLLLFSVILISWVSTVGGEGTLCDFPKIHHGFLYDEEDYNPFSQVPTGEVFYYSCEYNFVSPSKSFWTRITCTEEGWSPTPKCLRMCSFPFVKNGHSESSGLIHLEGDTVQIICNTGYSLQNNEKNISCVERGWSTPPICSFTKGECHVPILEANVDAQPKKESYKVGDVLKFSCRKNLIRVGSDSVQCYQFGWSPNFPTCKGQVRSCGPPPQLSNGEVKEIRKEEYGHNEVVEYDCNPNFIINGPKKIQCVDGEWTTLPTCVEQVKTCGYIPELEYGYVQPSVPPYQHGVSVEVNCRNEYAMIGNNMITCINGIWTELPMCVATHQLKRCKIAGVNIKTLLKLSGKEFNHNSRIRYRCSDIFRYRHSVCINGKWNPEVDCTEKREQFCPPPPQIPNAQNMTTTVNYQDGEKVAVLCKENYLLPEAKEIVCKDGRWQSLPRCVESTAYCGPPPSINNGDTTSFPLSVYPPGSTVTYRCQSFYKLQGSVTVTCRNKQWSEPPRCLDPCVVSEENMNKNNIQLKWRNDGKLYAKTGDAVEFQCKFPHKAMISSPPFRAICQEGKFEYPICE

SEQ ID NO: 2703 - protein, 161 aa, Homo Sapiens
MKLLHVFLLFLCFHLRFCKVTYTSQEDLVEKKCLAKKYTHLSCDKVFCQPWQRCIEGTCVCKLPYQCPKNGTAVCATNRRSFPTYCQQKSLECLHPGTKFLNNGTCTAEGKFSVSLKHGNTDSEGIVEVKLVDQDKTMFICKSSWSMREANVACLDLGFQQ

SEQ ID NO: 2704 - protein, 591 aa, Homo Sapiens
MKLLHVFLLFLCFHLRFCKVTYTSQEDLVEKKCLAKKYTHLSCDKVFCQPWQRCIEGTCVCKLPYQCPKNGTAVCATNRRSFPTYCQQKSLECLHPGTKFLNNGTCTAEGKFSVSLKHGNTDSEGIVEVKLVDQDKTMFICKSSWSMREANVACLDLGFQQGADTQRRFKLSDLSINSTECLHVHCRGLETSLAECTFTKRRTMGYQDFADVVCYTQKADSPMDDFFQCVNGKYISQMKACDGINDCGDQSDELCCKACQGKGFHCKSGVCIPSQYQCNGEVDCITGEDEVGCAAARHPTIQGFASVTQEETEILTADMDAERRRIKSLLPKLSCGVKNRMHIRRKRIVGGKRAQLGDLPWQVAIKDASGITCGGIYIGGCWILTAAHCLRASKTHRYQIWTTVVDWIHPDLKRIVIEYVDRIIFHENYNAGTYQNDIALIEMKKDGNKKDCELPRSIPACVPWSPYLFQPNDTCIVSGWGREKDNERVFSLQWGEVKLISNCSKFYGNRFYEKEMECAGTYDGSIDACKGDSGGPLVCMDANNVTYVWGVVSWGENCGKPEFPGVYTKVANYFDWISYHVGRPFISQYNV

SEQ ID NO: 2705 - protein, 583 aa, Homo Sapiens
MKLLHVFLLFLCFHLRFCKVTYTSQEDLVEKKCLAKKYTHLSCDKVFCQPWQRCIEGTCVCKLPYQCPKNGTAVCATNRRSFPTYCQQKSLECLHPGTKFLNNGTCTAEGKFSVSLKHGNTDSEGIVEVKLVDQDKTMFICKSSWSMREANVACLDLGFQQGADTQRRFKLSDLSINSTECLHVHCRGLETSLAECTFTKRRTMGYQDFADVVCYTQKADSPMDDFFQCVNGKYISQMKACDGINDCGDQSDELCCKACQGKGFHCKSGVCIPSQYQCNGEVDCITGEDEVGCAGFASVTQEETEILTADMDAERRRIKSLLPKLSCGVKNRMHIRRKRIVGGKRAQLGDLPWQVAIKDASGITCGGIYIGGCWILTAAHCLRASKTHRYQIWTTVVDWIHPDLKRIVIEYVDRIIFHENYNAGTYQNDIALIEMKKDGNKKDCELPRSIPACVPWSPYLFQPNDTCIVSGWGREKDNERVFSLQWGEVKLISNCSKFYGNRFYEKEMECAGTYDGSIDACKGDSGGPLVCMDANNVTYVWGVVSWGENCGKPEFPGVYTKVANYFDWISYHVGRPFISQYNV

SEQ ID NO: 2706 - protein, 576 aa, Homo Sapiens
MKLLHVFLLFLCFHLRFCKVTYTSQEDLVEKKCLAKKYTHLSCDKVFCQPWQRCIEGTCVCKLPYQCPKNGTAVCATNRRSFPTYCQQKSLECLHPGTKFLNNGTCTAEGKFSVSLKHGNTDSEGIVEVKLVDQDKTMFICKSSWSMREANVACLDLGFQQGADTQRRFKLSDLSINSTECLHVHCRGLETSLAECTFTKRRTMGYQDFADVVCYTQKADSPMDDFFQCVNGKYISQMKACDGINDCGDQSDELCCKACQGKGFHCKSGVCIPSQYQCNGEVDCITGEDEVGCAEETEILTADMDAERRRIKSLLPKLSCGVKNRMHIRRKRIVGGKRAQLGDLPWQVAIKDASGITCGGIYIGGCWILTAAHCLRASKTHRYQIWTTVVDWIHPDLKRIVIEYVDRIIFHENYNAGTYQNDIALIEMKKDGNKKDCELPRSIPACVPWSPYLFQPNDTCIVSGWGREKDNERVFSLQWGEVKLISNCSKFYGNRFYEKEMECAGTYDGSIDACKGDSGGPLVCMDANNVTYVWGVVSWGENCGKPEFPGVYTKVANYFDWISYHVGRPFISQYNV

SEQ ID NO: 2707 - protein, 378 aa, Homo Sapiens
MKLLHVFLLFLCFHLRFCKVTYTSQEDLVEKKCLAKKYTHLSCDKVFCQPWQRCIEGTCVCKLPYQCPKNGTAVCATNRRSFPTYCQQKSLECLHPGTKFLNNGTCTAEGKFSVSLKHGNTDSEGIVEVKLVDQDKTMFICKSSWSMREANVACLDLGFQQGADTQRRFKLSDLSINSTECLHVHCRGLETSLAECTFTKRRTMGYQDFADVVCYTQKADSPMDDFFQCVNGKYISQMKACDGINDCGDQSDELCCKACQGKGFHCKSGVCIPSQYQCNGEVDCITGEDEVGCAGFASVTQEETEILTADMDAERRRIKSLLPKLSCGVKNRMHIRRKRIVGGKRAQLGGKMKQISLDIFKGLHRVYAILEFCCIILK

SEQ ID NO: 2708 - protein, 167 aa, Homo Sapiens
MGGWSGWGPWEPCSVTCSKGTRTRRRACNHPAPKCGGHCPGQAQESEACDTQQVCPTHGAWATWGPWTPCSASCHGGPHEPKETRSRKCSAPEPSQKPPGKPCPGLAYEQRRCTGLPPCPVAGGWGPWGPVSPCPVTCGLGQTMEQRTCNHPVPQHGGPFCAGDATR

SEQ ID NO: 2709 - protein, 469 aa, Homo Sapiens
MITEGAQAPRLLLPPLLLLLTLPATGSDPVLCFTQYEESSGKCKGLLGGGVSVEDCCLNTAFAYQKRSGGLCQPCRSPRWSLWSTWAPCSVTCSEGSQLRYRRCVGWNGQCSGKVAPGTLEWQLQACEDQQCCPEMGGWSGWGPWEPCSVTCSKGTRTRRRACNHPAPKCGGHCPGQAQESEACDTQQVCPTHGAWATWGPWTPCSASCHGGPHEPKETRSRKCSAPEPSQKPPGKPCPGLAYEQRRCTGLPPCPVAGGWGPWGPVSPCPVTCGLGQTMEQRTCNHPVPQHGGPFCAGDATRTHICNTAVPCPVDGEWDSWGEWSPCIRRNMKSISCQEIPGQQSRGRTCRGRKFDGHRCAGQQQDIRHCYSIQHCPLKGSWSEWSTWGLCMPPCGPNPTRARQRLCTPLLPKYPPTVSMVEGQGEKNVTFWGRPLPRCEELQGQKLVVEEKRPCLHVPACKDPEEEEL

SEQ ID NO: 2710 - protein, 415 aa, Homo Sapiens
MITEGAQAPRLLLPPLLLLLTLPATGSDPVLCFTQYEESSGKCKGLLGGGVSVEDCCLNTAFAYQKRSGGLCQPCRSPRWSLWSTWAPCSVTCSEGSQLRYRRCVGWNGQCSGKVAPGTLEWQLQACEDQQCCPEMGGWSGWGPWEPCSVTCSKGTRTRRRACNHPAPKCGGHCPGQAQESEACDTQQVCPTHGAWATWGPWTPCSASCHGGPHEPKETRSRKCSAPEPSQKPPGKPCPGLAYEQRRCTGLPPCPVAGGWGPWGPVSPCPVTCGLGQTMEQRTCNHPVPQHGGPFCAGDATRTHICNTAVPCPVDGEWDSWGEWSPCIRRNMKSISCQEIPGQQSRGRTCRGRKFDGHRCAGQQQDIRHCYSIQHCPLKGSWSEWSTWGLCMPPCGPNPTRARQRLCTPLLPKYP

SEQ ID NO: 2711 - protein, 469 aa, Homo Sapiens; identical to SEQ ID NO: 2709

SEQ ID NO: 2712 - protein, 62 aa, Homo Sapiens
MDYYRKYAAIFLVTLSVFLHVLHSAPDVQDCPECTLQENPFFSQPGAPILQCMGCCFSRAYP

SEQ ID NO: 2713 - protein, 101 aa, Homo Sapiens
MDYYRKYAAIFLVTLSVFLHVLHSAPDVQDCPECTLQENPFFSQPGAPILQCMGCCFSRAYPTPLRSKKTMLVQKNVTSESTCCVAKSYNRVRTSRSPEAF

SEQ ID NO: 2714 - protein, 116 aa, Homo Sapiens
MDYYRKYAAIFLVTLSVFLHVLHSAPDVQDCPECTLQENPFFSQPGAPILQCMGCCFSRAYPTPLRSKKTMLVQKNVTSESTCCVAKSYNRVTVMGGFKVENHTACHCSTCYYHKS

SEQ ID NO: 2715 - protein, 147 aa, Homo Sapiens
MDYYRKYAAIFLVTLSVFLHVLHSAPDVQETGFHHVAQAALKLLSSSNPPTKASQSARITDCPECTLQENPFFSQPGAPILQCMGCCFSRAYPTPLRSKKTMLVQKNVTSESTCCVAKSYNRVTVMGGFKVENHTACHCSTCYYHKS

SEQ ID NO: 2716 - protein, 116 aa, Homo Sapiens
MQLSFWSHCRCFCMFSIPLLMCRVRDQICDCPECTLQENPFFSQPGAPILQCMGCCFSRAYPTPLRSKKTMLVQKNVTSESTCCVAKSYNRVTVMGGFKVENHTACHCSTCYYHKS

SEQ ID NO: 2717 - protein, 130 aa, Homo Sapiens; identical to SEQ ID NO: 74

SEQ ID NO: 2718 - protein, 155 aa, Homo Sapiens
MSKRLLLLLLLSMGGTWASKEPLRPRCRPINATLAVEKEGCPVCITVNTTICAGYCPTMTRVLQGVLPALPQVVCNYRDVRFESIRLPGCPRGVNPVVSYAVALSCQCALCRRSTTDCGGPKDHPLTCDDPRFQDSSSSKAPPPSLPSPSRLPGP

SEQ ID NO: 2719 - protein, 130 aa, Homo Sapiens
MGGTWASKEPLRPRCRPINATLAVEKEGCPVCITVNTTICAGYCPTMTRVLQGVLPALPQVVCNYRDVRFESIRLPGCPRGVNPVVSYAVALSCQCALCRRSTTDCGGPKDHPLTCDDPRFQASSSSKAP

SEQ ID NO: 2720 - protein, 163 aa, Homo Sapiens
MSKGLLLLLLLSMGGTWASKEPLRPRCRPINATLAVEKEGCPVCITVNTTICAGYCPTMTRVLQGVLPALPQVVCNYRDVRFESIRLPGCPRGVNPVVSYAVALSCQCALCRRSTTDCGGPKDHPLTCDDPRFQASSSSKAPPPSLPSPSRLPGPSDTPILPQ

SEQ ID NO: 2721 - protein, 165 aa, Homo Sapiens
MEMFQGLLLLLLLSMGGTWASKEPLRPRCRPINATLAVEKEGCPVCITVNTTICAGYCPTMTRVLQGVLPALPQVVCNYRDVRFESIRLPGCPRGVNPVVSYAVALSCQCALCRRSTTDCGGPKDHPLTCDDPRFQDSSSSKAPPPSLPSPSRLPGPSDTPILPQ

SEQ ID NO: 2722 - protein, 165 aa, Homo Sapiens; identical to SEQ ID NO: 2721

SEQ ID NO: 2723 - protein, 165 aa, Homo Sapiens
MEMFQGLLLLLLLSMGGTWASREMLRPRCRPINATLAVEKEGCPVCITVNTTICAGYCPTMTRVLQGVLPALPQVVCNYRDVRFESIRLPGCPRGVNPVVSYAVALSCQCALCRRSTTDCGGPKDHPLTCDDPRFQASSSSKAPPPSLPSPSRLPGPSDTPILPQ

SEQ ID NO: 2724 - protein, 165 aa, Homo Sapiens; identical to SEQ ID NO: 2723

SEQ ID NO: 2725 - protein, 165 aa, Homo Sapiens; identical to SEQ ID NO: 2723

SEQ ID NO: 2726 - protein, 165 aa, Homo Sapiens; identical to SEQ ID NO: 2721

SEQ ID NO: 2727 - protein, 132 aa, Homo Sapiens
MLPLTMTVLILLLLPTGQAAPKDGVTRPDSEVQHQLLPNPFQPGQEQLGLLQSYLKGLGRTEVQLEHLSREQVLLYLFALHDYDQSGQLDGLELLSMLTAALAPGAANSPTTNPGNLDARLDGGEKAMQPQW

SEQ ID NO: 2728 - protein, 301 aa, Homo Sapiens
MLPLTMTVLILLLLPTGQAAPKDGVTRPDSEVQHQLLPNPFQPGQEQLGLLQSYLKGLGRTEVQLEHLSREQVLLYLFALHDYDQSGQLDGLELLSMLTAALAPGAANSPTTNPVILIVDKVLETQDLNGDGLMTPAELINFPGVALRHVEPGEPLAPSPQEPQAVGRQSLLAKSPLRQETQEAPGPREEAKGQVEARRESLDPVQEPGGQAEADGDVPGPRGEAEGQAEAKGDAPGPRGEAGGQAEAEGDAPGPRGEAGGQAEARENGEEAKELPGETLESKNTQNDFEVHIVQVENDEI

SEQ ID NO: 2729 - protein, 318 aa, Homo Sapiens
MLPLTMTVLILLLLPTGQAAPKDGVTRPDSEVQHQLLPNPFQPGQEQLGLLQSYLKGLGRTEVQLEHLSREQVLLYLFALHDYDQSGQLDGLELLSMLTAALAPGAANSPTTNPVILIVDKVLETQDLNGDGLMTPAELINFPGVALRHVEPGEPLAPSPQEPQAVGRQSLLAKSPLRQETQEAPGPREEAKGQVEARRESLDPVQEPGGQAEADGDVPGPRGEAEGQAEAKGDAPGPRGEAGGQAEAEGDAPGPRGEAGGQAEAEGDAPGPRGEAGGQAEARENGEEAKELPGETLESKNTQNDFEVHIVQVENDEI

SEQ ID NO: 2730 - protein, 318 aa, Homo Sapiens; identical to SEQ ID NO: 2729

SEQ ID NO: 2731 - protein, 318 aa, Homo Sapiens; identical to SEQ ID NO: 2729

SEQ ID NO: 2732 - protein, 57 aa, Homo Sapiens
MLPLTMTVLILLLLPTGQAAPKDGVTRPDSEVQHQLLPNPFQPGQEQLGSPLPLCPP

SEQ ID NO: 2733 - protein, 112 aa, Homo Sapiens
MLTAALAPGAANSPTTNPVILIVDKVLETQDLNGDGLMTPAELINFPGVALRPYPPYIGVGPNSNMCSRSDLPEDSNTLYPGSHLWLRHALNSKGNLDARLDGGEKAMQPQW

SEQ ID NO: 2734 - protein, 440 aa, Homo Sapiens
MNGLKEVRYACAVLLWAPWHLVGSKGMGRGVGMRPQLCFRHSRPAFMCFIYKSWSDIYFEHSSMGSLLSVCESSLSRSPVFGAAGRSRQKMRLCLTQPICDTVADASFPRPLILFLVPVPGRMLPLTMTVLILLLLPTGQAAPKDGVTRPDSEVQHQLLPNPFQPGQEQLGLLQSYLKGLGRTEVQLEHLSREQVLLYLFALHDYDQSGQLDGLELLSMLTAALAPGAANSPTTNPVILIVDKVLETQDLNGDGLMTPAELINFPGVALRHVEPGEPLAPSPQEPQAVGRQSLLAKSPLRQETQEAPGPREEAKGQVEARRESLDPVQEPGGQAEADGDVPGPRGEAEGQAEAKGDAPGPRGEAGGQAEAEGDAPGPRGEAGGQAEAEGDAPGPRGEAGGQAEARENGEEAKELPGETLESKNTQNDFEVHIVQVENDEI

SEQ ID NO: 2735 - protein, 359 aa, Homo Sapiens
MVRPMLLLSLGLLAGLLPALAACPQNCHCHSDLQHVICDKVGLQKIPKVSEKTKLLNLQRNNFPVLAANSFRAMPNLVSLHLQHCQIREVAAGAFRGLKQLIYLYLSHNDIRVLRAGAFDDLTELTYLYLDHNKVTELPRGLLSPLVNLFILQLNNNKIRELRAGAFQGAKDLRWLYLSENALSSLQPGALDDVENLAKFHVDRNQLSSYPSAALSKLRVVEELKLSHNPLKSIPDNAFQSFGRYLETLWLDNTNLEKFSDGAFLGVTTLKHVHLENNRLNQLPSNFPFDSLETLALTNNPWKCTCQLRGLRRWLEAKASRPDATCASPAKFKGQHIRDTDAFRSCKFPTKRSKKAGRH

SEQ ID NO: 2736 - protein, 359 aa, Homo Sapiens; identical to SEQ ID NO: 2735

SEQ ID NO: 2737 - protein, 42 aa, Homo Sapiens
  misc_feature (1)..(1): Xaa can be any naturally occurring amino acid
XASRPDATCASPAKFKGQHIRDTDAFRSCKFPTKRSKKAGRH

SEQ ID NO: 2738 - protein, 762 aa, Homo Sapiens
MEGPRSSTHVPLVLPLLVLLLLAPARQAAAQRCPQACICDNSRRHVACRYQNLTEVPDAIPELTQRLDLQGNLLKVIPAAAFQGVPHLTHLDLRHCEVELVAEGAFRGLGRLLLLNLASNHLRELPQEALDGLGSLRRLELEGNALEELRPGTFGALGALATLNLAHNALVYLPAMAFQGLLRVRWLRLSHNALSVLAPEALAGLPALRRLSLHHNELQALPGPVLSQARGLARLELGHNPLTYAGEEDGLALPGLRELLLDGGALQALGPRAFAHCPRLHTLDLRGNQLDTLPPLQGPGQLRRLRLQGNPLWCGCQARPLLEWLARARVRSDGACQGPRRLRGEALDALRPWDLRCPGDAAQEEEELEERAVAGPRAPPRGPPRGPGEERAVAPCPRACVCVPESRHSSCEGCGLQAVPRGFPSDTQLLDLRRNHFPSVPRAAFPGLGHLVSLHLQHCGIAELEAGALAGLGRLIYLYLSDNQLAGLSAAALEGAPRLGYLYLERNRFLQVPGAALRALPSLFSLHLQDNAVDRLAPGDLGRTRALRWVYLSGNRITEVSLGALGPARELEKLHLDRNQLREVPTGALEGLPALLELQLSGNPLRALRDGAFQPVGRSLQHLFLNSSGLEQICPGAFSGLGPGLQSLHLQKNQLRALPALPSLSQLELIDLSSNPFHCDCQLLPLHRWLTGLNLRVGATCATPPNARGQRVKAAAAVFEDCPGWAARKAKRTPASRPSARRTPIKGRQCGADKVGKEKGRL

SEQ ID NO: 2739 - protein, 253 aa, Homo Sapiens [sequence omitted]

SEQ ID NO: 2740 - protein, 684 aa, Homo Sapiens
  misc_feature (1)..(1): Xaa can be any naturally occurring amino acid
XPRSSTHVPLVLPLLVLLLLAPARQAAAQRCPQACICDNSRRHVACRYQNLTEVPDAIPELTQRLDLQGNLLKVIPAAAFQGVPHLTHLDLRHCEVELVAEGAFRGLGRLLLLNLASNHLRELPQEALDGLGSLRRLELEGNALEELRPGTFGALGALATLNLAHNALVYLPAMAFQGLLRVRWLRLSHNALSVLAPEALAGLPALRRLSLHHNELQALPGPVLSQARGLARLELGHNPLTYAGEEDGLALPGLRELLLDGGALQALGPRAFAHCPRLHTLDLRGNQLDTLPPLQGPGQLRRLRLQGNPLWCGCQARPLLEWLARARVRSDGACQGPRRLRGEALDALRPWDLRCPGDAAQEEEELEERAVAGPRAPPRGPPRGPGEERAVAPCPRACVCVPESRHSSCEGCGLQAVPRGFPSDTQLLDLRRNHFPSVPRAAFPGLGHLVSLHLQHCGIAELEAGALAGLGRLIYLYLSDNQLAGLSAAALEGAPRLGYLYLERNRFLQVPGAALRALPSLFSLHLQDNAVDRLAPGDLGRTRALRWVYLSGNRITEVSLGALGPARELEKLHLDRNQLREVPTGALEGLPALLELQLSGNPLRALRDGAFQPVGRSLQHLFLNSSGLEQICPGAFSGLGPGLQSLHLQKNQLRALPALPSARRTPIKGRQCGADKVGKEKGRL

SEQ ID NO: 2741 - protein, 57 aa, Homo Sapiens
FREVGPKNSYIAYIEDHSGNGTFVNTELVGKGKRRPLNNNSEIALSLSRNKVVPVER

SEQ ID NO: 2742 - protein, 137 aa, Homo Sapiens
MERLLYGIGACGEVKLAFERKTCKKVAIKIISKRKFAIGSAREADPALNVETEIEILKKLNHPCIIKIKNFFDAEDYYIVLELMEGGELFDKVVGNKRLKEATCKLYFYQMLLAVQYLHENGIIHRDLKPENVLLSS

SEQ ID NO: 2743 - protein, 172 aa, Homo Sapiens
MLRLLTSMVVMSRESDVEAQQSHGSSACSQPHGSVTQSQGSSSQSQGISSSSTSTMPNSSQSSHSSSGTLSSLETVSTQELYSIPEDQEPEDQEPEEPTPAPWARLWALQDGFANLECVNDNYWFGRDKSCEYCFDEPLLKRTDKYRTYSKKHFRIFREVGPKNSYIAYIED

SEQ ID NO: 2744 - protein, 121 aa, Homo Sapiens
MSKTLGSGACGEVKLAFERKTCKKVAIKIISKRKFAIGSAREADPALNVETEIEILKKLNHPCIIKIKNFFDAEDYYIVLELMEGGELFDKVVGNKRLKEATCKLYFYQMLLAVQYLHENG

SEQ ID NO: 2745 - protein, 161 aa, Homo Sapiens
MSRESDVEAQQSHGSSACSQPHGSVTQSQGSSSQSQGISSSSTSTMPNSSQSSHSSSGTLSSLETVSTQELYSIPEDQEPEDQEPEEPTPAPWARLWALQDGFANLECVNDNYWFGRDKSCEYCFDEPLLKRTDKYRTYSKKHFRIFREENLSCPYRIWFK

SEQ ID NO: 2746 - protein, 165 aa, Homo Sapiens
MSRESDVEAQQSHGSSACSQPHGSVTQSQGSSSQSQGISSSSTSTMPNSSQSSHSSSGTLSSLETVSTQELYSIPEDQEPEDQEPEEPTPAPWARLWALQDGFANLECVNDNYWFGRDKSCEYCFDEPLLKRTDKYRTYSKKHFRIFREENLSCPYRIWFNFCLF

SEQ ID NO: 2747 - protein, 298 aa, Homo Sapiens
MSRESDVEAQQSHGSSACSQPHGSVTQSQGSSSQSQGISSSSTSTMPNSSQSSHSSSGTLSSLETVSTQELYSIPEDQEPEDQEPEEPTPAPWARLWALQDGFANLECVNDNYWFGRDKSCEYCFDEPLLKRTDKYRTYSKKHFRIFREENLSCPYRIWFNGACGEVKLAFERKTCKKVAIKIISKRKFAIGSAREADPALNVETEIEILKKLNHPCIIKIKNFFDAEDYYIVLELMEGGELFDKVVGNKRLKEATCKLYFYQMLLAVQYLHENGIIHRDLKPENVLLSSQEEDCLIK

SEQ ID NO: 2748 - protein, 207 aa, Homo Sapiens
MSRESDVEAQQSHGSSACSQPHGSVTQSQGSSSQSQGISSSSTSTMPNSSQSSHSSSGTLSSLETVSTQELYSIPEDQEPEDQEPEEPTPAPWARLWALQDGFANLECVNDNYWFGRDKSCEYCFDEPLLKRTDKYRTYSKKHFRIFREVGPKNSYIAYIEDHSGNGTFVNTELVGKGKRRPLNNNSEIALSLSRNKEKILKIYSLS

SEQ ID NO: 2749 - protein, 207 aa, Homo Sapiens; identical to SEQ ID NO: 2748

SEQ ID NO: 2750 - protein, 514 aa, Homo Sapiens
MSRESDVEAQQSHGSSACSQPHGSVTQSQGSSSQSQGISSSSTSTMPNSSQSSHSSSGTLSSLETVSTQELYSIPEDQEPEDQEPEEPTPAPWARLWALQDGFANLECVNDNYWFGRDKSCEYCFDEPLLKRTDKYRTYSKKHFRIFREVGPKNSYIAYIEDHSGNGTFVNTELVGKGKRRPLNNNSEIALSLSRNKVFVFFDLTVDDQSVYPKALRDEYIMSKTLGSGACGEVKLAFERKTCKKVAIKIISKRKFAIGSAREADPALNVETEIEILKKLNHPCIIKIKNFFDAEDYYIVLELMEGGELFDKVVGNKRLKEATCKLYFYQMLLAVQITDFGHSKILGETSLMRTLCGTPTYLAPEVLVSVGTAGYNRAVDCWSLGVILFICLSGYPPFSEHRTQVSLKDQITSGKYNFIPEVWAEVSEKALDLVKKLLVVDPKARFTTEEALRHPWLQDEDMKRKFQDLLSEENESTALPQVLAQPSTSRKRPREGEAEGAETTKRPAVCAAVL

SEQ ID NO: 2751 - protein, 543 aa, Homo Sapiens
MSRESDVEAQQSHGSSACSQPHGSVTQSQGSSSQSQGISSSSTSTMPNSSQSSHSSSGTLSSLETVSTQELYSIPEDQEPEDQEPEEPTPAPWARLWALQDGFANLECVNDNYWFGRDKSCEYCFDEPLLKRTDKYRTYSKKHFRIFREVGPKNSYIAYIEDHSGNGTFVNTELVGKGKRRPLNNNSEIALSLSRNKVFVFFDLTVDDQSVYPKALRDEYIMSKTLGSGACGEVKLAFERKTCKKVAIKIISKRKFAIGSAREADPALNVETEIEILKKLNHPCIIKIKNFFDAEDYYIVLELMEGGELFDKVVGNKRLKEATCKLYFYQMLLAVQYLHENGIIHRDLKPENVLLSSQEEDCLIKITDFGHSKILGETSLMRTLCGTPTYLAPEVLVSVGTAGYNRAVDCWSLGVILFICLSGYPPFSEHRTQVSLKDQITSGKYNFIPEVWAEVSEKALDLVKKLLVVDPKARFTTEEALRHPWLQDEDMKRKFQDLLSEENESTALPQVLAQPSTSRKRPREGEAEGAETTKRPAVCAAVL

SEQ ID NO: 2752 - protein, 514 aa, Homo Sapiens; identical to SEQ ID NO: 2750

SEQ ID NO: 2753 - protein, 543 aa, Homo Sapiens; identical to SEQ ID NO: 2751

SEQ ID NO: 2754 - protein, 289 aa, Homo Sapiens
MSRESDVEAQQSHGSSACSQPHGSVTQSQGSSSQSQGISSSSTSTMPNSSQSSHSSSGTLSSLETVSTQELYSIPEDQEPEDQEPEEPTPAPWARLWALQDGFANLECVNDNYWFGRDKSCEYCFDEPLLKRTDKYRTYSKKHFRIFREVGPKNSYIAYIEDHSGNGTFVNTELVGKGKRRPLNNNSEIALSLSRNKVFVFFDLTVDDQSVYPKALRDEYIMSKTLGSGACGEVKLAFERKTCKKVAIKIISKRKFAIGSAREADPALNVETEIEILKKLNHDGRGRAV

SEQ ID NO: 2755 - protein, 543 aa, Homo Sapiens; identical to SEQ ID NO: 2751

SEQ ID NO: 2756 - protein, 203 aa, Homo Sapiens
MSRESDVEAQQSHGSSACSQPHGSVTQSQGSSSQSQGISSSSTSTMPNSSQSSHSSSGTLSSLETVSTQELYSIPEDQEPEDQEPEEPTPAPWARLWALQDGFANLECVNDNYWFGRDKSCEYCFDEPLLKRTDKYRTYSKKHFRIFREVGPKNSYIAYIEDHSGNGTFVNTELVGKGKRRPLNNNSEIALSLSRNKVVPVER

SEQ ID NO: 2757 - protein, 295 aa, Homo Sapiens
MSRESDVEAQQSHGSSACSQPHGSVTQSQGSSSQSQGISSSSTSTMPNSSQSSHSSSGTLSSLETVSTQELYSIPEDQEPEDQEPEEPTPAPWARLWALQDGFANLETESGHVTQSDLELLLSSDPPASASQSAGIRECVNDNYWFGRDKSCEYCFDEPLLKRTDKYRTYSKKHFRIFREVGPKNSYIAYIEDHSGNGTFVNTELVGKGKRRPLNNNSEIALSLSRNKVFVFFDLTVDDQSVYPKALRDEYIMSKTLGSGACGEVKLAFERKTCKKVAIKIISKRKFAIGSAREA

SEQ ID NO: 2758 - protein, 586 aa, Homo Sapiens
MSRESDVEAQQSHGSSACSQPHGSVTQSQGSSSQSQGISSSSTSTMPNSSQSSHSSSGTLSSLETVSTQELYSIPEDQEPEDQEPEEPTPAPWARLWALQDGFANLETESGHVTQSDLELLLSSDPPASASQSAGIRGVRHHPRPVCSLKCVNDNYWFGRDKSCEYCFDEPLLKRTDKYRTYSKKHFRIFREVGPKNSYIAYIEDHSGNGTFVNTELVGKGKRRPLNNNSEIALSLSRNKVFVFFDLTVDDQSVYPKALRDEYIMSKTLGSGACGEVKLAFERKTCKKVAIKIISKRKFAIGSAREADPALNVETEIEILKKLNHPCIIKIKNFFDAEDYYIVLELMEGGELFDKVVGNKRLKEATCKLYFYQMLLAVQYLHENGIIHRDLKPENVLLSSQEEDCLIKITDFGHSKILGETSLMRTLCGTPTYLAPEVLVSVGTAGYNRAVDCWSLGVILFICLSGYPPFSEHRTQVSLKDQITSGKYNFIPEVWAEVSEKALDLVKKLLVVDPKARFTTEEALRHPWLQDEDMKRKFQDLLSEENESTALPQVLAQPSTSRKRPREGEAEGAETTKRPAVCAAVL

SEQ ID NO: 2759 - protein, 452 aa, Homo Sapiens
MSRESDVEAQQSHGSSACSQPHGSVTQSQGSSSQSQGISSSSTSTMPNSSQSSHSSSGTLSSLETVSTQELYSIPEDQEPEDQEPEEPTPAPWARLWALQDGFANLVFVFFDLTVDDQSVYPKALRDEYIMSKTLGSGACGEVKLAFERKTCKKVAIKIISKRKFAIGSAREADPALNVETEIEILKKLNHPCIIKIKNFFDAEDYYIVLELMEGGELFDKVVGNKRLKEATCKLYFYQMLLAVQYLHENGIIHRDLKPENVLLSSQEEDCLIKITDFGHSKILGETSLMRTLCGTPTYLAPEVLVSVGTAGYNRAVDCWSLGVILFICLSGYPPFSEHRTQVSLKDQITSGKYNFIPEVWAEVSEKALDLVKKLLVVDPKARFTTEEALRHPWLQDEDMKRKFQDLLSEENESTALPQVLAQPSTSRKRPREGEAEGAETTKRPAVCAAVL

SEQ ID NO: 2760 - protein, 45 aa, Homo Sapiens
SSDPPASASQSAGIRGVRHHPRPVCSLIETGFHRVSQDGLHLLTS

SEQ ID NO: 2761 - protein, 276 aa, Homo Sapiens
  misc_feature (1)..(1): Xaa can be any naturally occurring amino acid
XIGSAREADPALNVETEIEILKKLNHPCIIKIKNFFDAEDYYIVLELMEGGELFDKVVGNKRLKEATCKLYFYQMLLAVQYLHENGIIHRDLKPENVLLSSQEEDCLIKITDFGHSKILGETSLMRTLCGTPTYLAPEVLVSVGTAGYNRAVDCWSLGVILFIWTQVSLKDQITSGKYNFIPEVWAEVSEKALDLVKKLLVVDPKARFTTEEALRHPWLQDEDMKRKFQDLLSEENESTALPQVLAQPSTSRKRPREGEAEGAETTKRPAVCAAVL

SEQ ID NO: 2762 - protein, 144 aa, Homo Sapiens
  misc_feature (1)..(1): Xaa can be any naturally occurring amino acid
XIISKRKFAIGSAREADPALNVETEIEILKKLNHPCIIKIKNFFDAEDYYIVLELMEGGELFDKVVGNKRLKEATCKLYFYQMLLAVQDEDMKRKFQDLLSEENESTALPQVLAQPSTSRKRPREGEAEGAETTKRPAVCAAVL

SEQ ID NO: 2763 - protein, 38 aa, Homo Sapiens
MRSAAVLALLLCAGQVTALPVNSPMNKGDTEMNGSFPF

SEQ ID NO: 2764 - protein, 457 aa, Homo Sapiens
MRSAAVLALLLCAGQVTALPVNSPMNKGDTEVMKCIVEVISDTLSKPSPMPVSQECFETLRGDERILSILRHQNLLKELQDLALQGAKERAHQQKKHSGFEDELSEVLENQSSQAELKEAVEEPSSKDVMEKREDSKEAEKSGEATDGARPQALPEPMQESKAEGNNQAPGEEEEEEEEATNTHPPASLPSQKYPGPQAEGDSEGLSQGLVDREKGLSAEPGWQAKREEEEEEEEEAEAGEEAVPEEEGPTVVLNPHPSLGYKEIRKGESRSEALAVDGAGKPGAEEAQDPEGKGEQEHSQQKEEEEEMAVVPQGLFRGGKSGELEQEEERLSKEWEDSKRWSKMDQLAKELTAEKRLEGQEEEEDNRDSSMKLSFRARAYGFRGPGPQLRRGWRPSSREDSLEAGLPLQVRGYPEEKKEEEGSANRRPEDQELESLSAIEAELEKVAHQLQALRRG

SEQ ID NO: 2765 - protein, 306 aa, Homo Sapiens
MRSAAVLALLLCAGQVTALPVNSPMNKGDTEVMKCIVEVISDTLSKPSPMPVSQECFETLRGDERILSILRHQNLLKELQDLALQGAKERAHQQKKHSGFEDELSEVLENQSSQAELKGRSEALAVDGAGKPGAEEAQDPEGKGEQEHSQQKEEEEEMAVVPQGLFRGGKSGELEQEEERLSKEWEDSKRWSKMDQLAKELTAEKRLEGQEEEEDNRDSSMKLSFRARAYGFRGPGPQLRRGWRPSSREDSLEAGLPLQVRGYPEEKKEEEGSANRRPEDQELESLSAIEAELEKVAHQLQALRRG

SEQ ID NO: 2766 - protein, 289 aa, Homo Sapiens
MPVDNRNHNEGMVTRCIIEVLSNALSKSSAPPITPECRQVLKTSRKDVKDKETTENENTKFEVRLLRDPADASEAHESSSRGEAGAPGEEDIQGPTKADTEKWAEGGGHSRERADEPQWSLYPSDSQVSEEVKTRHSEKSQREDEEEEEGENYQKGERGEDSSEEKHLEEPGETQNAFLNERKQASAIKKEELVARSETHAAGHSQEKTHSREKSSQESGEETGSQENHPQESKGQPRSQEESEEGEEDATSEVDKRRTRPRHHHGRSRPDRSSQGGSLPSEEKGHPQE

SEQ ID NO: 2767 - protein, 677 aa, Homo Sapiens
MQPTLLLSLLGAVGLAAVNSMPVDNRNHNEGMVTRCIIEVLSNALSKSSAPPITPECRQVLKTSRKDVKDKETTENENTKFEVRLLRDPADASEAHESSSRGEAGAPGEEDIQGPTKADTEKWAEGGGHSRERADEPQWSLYPSDSQVSEEVKTRHSEKSQREDEEEEEGENYQKGERGEDSSEEKHLEEPGETQNAFLNERKQASAIKKEELVARSETHAAGHSQEKTHSREKSSQESGEETGSQENHPQESKGQPRSQEESEEGEEDATSEVDKRRTRPRHHHGRSRPDRSSQGGSLPSEEKGHPQEESEESNVSMASLGEKRDHHSTHYRASEEEPEYGEEIKGYPGVQAPEDLEWERYRGRGSEEYRAPRPQSEESWDEEDKRNYPSLELDKMAHGYGEESEEERGLEPGKGRHHRGRGGEPRAYFMSDTREEKRFLGEGHHRVQENQMDKARRHPQGAWKELDRNYLNYGEEGAPGKWQQQGDLQDTKENREEARFQDKQYSSHHTAEKRKRLGELFNPYYDPLQWKSSHFERRDNMNDNFLEGEEENELTLNEKNFFPEYNYDWWEKKPFSEDVNWGYEKRNLARVPKLDLKRQYDRVAQLDQLLHYRKKSAEFPDFYDSEEPVSTHQEAENEKDRADQTVLTEDEKKELENLAAMDLELQKIAEKFSQRG

SEQ ID NO: 2768 - protein, 383 aa, Homo Sapiens
MGVKASQTGFVVLVLLQCCSAYKLVCYYTSWSQYREGDGSCFPDALDRFLCTHIIYSFANISNDHIDTWEWNDVTLYGMLNTLKNRNPNLKTLLSVGGWNFGSQRFSKIASNTQSRRTFIKSVPPFLRTHGFDGLDLAWLYPGRRDKQHFTTLIKEMKAEFIKEAQPGKKQLLLSAALSAGKVTIDSSYDIAKISQHLDFISIMTYDFHGAWRGTTGHHSPLFRGQEDASPDRFSNTDYAVGYMLRLGAPASKLVMGIPTFGRSFTLASSETGVGAPISGPGIPGRFTKEAGTLAYYEICDFLRGATVHRILGQQVPYATKGNQWVGYDDQESVKSKVQYLKDRQLAGAMVWALDLDDFQGSFCGQDLRFPLTNAIKDALAAT

SEQ ID NO: 2769 - protein, 152 aa, Homo Sapiens
  misc_feature (1)..(1): Xaa can be any naturally occurring amino acid
XLLLSAALSAGKVTIDSSYDIAKISQHLDFISIMTYDFHGAWRGTTGHHSPLFRGQEDASPDRFSNTICDFLRGATVHRILGQQVPYATKGNQWVGYDDQESVKSKVQYLKDRQLAGAMVWALDLDDFQGSFCGQDLRFPLTNAIKDALAAT

SEQ ID NO: 2770 - protein, 380 aa, Homo Sapiens
MGATTMDQKSLWAGSAYKLVCYFTNWSQDRQEPGKFTPENIDPFLCSHLIYSFASIENNKVIIKDKSEVMLYQTINSLKTKNPKLKILLSIGGYLFGSKGFHPMVDSSTSRLEFINSIILFLRNHNFDGLDVSWIYPDQKENTHFTVLIHELAEAFQKDFTKSTKERLLLTAGVSAGRQMIDNSYQVEKLAKDLDFINLLSFDFHGSWEKPLITGHNSPLSKGWQDRGPSSYYNVEYAVGYWIHKGMPSEKVVMGIPTYGHSFTLASAETTVGAPASGPGAAGPITESSGFLAYYEICQFLKGAKITRLQDQQVPYAVKGNQWVGYDDVKSMETKVQFLKNLNLGGAMIWSIDMDDFTGKSCNQGPYPLVQAVKRSLGSL

SEQ ID NO: 2771 - protein, 182 aa, Homo Sapiens
MGATTMDQKSLWAGVVVLLLLQGGSAYKLVCYFTNWSQDRQEPGKFTPENIDPFLCSHLIYSFASIENNKVIIKDKSEVMLYQTINSLKTKNPKLKILLSIGGYLFGSKGFHPMVDSSTSRLEFINSIILFLRNHNFDGLDELAEAFQKDFTKSTKERLLLTAGVSAGRQMIDNSYQVEKLA

SEQ ID NO: 2772 - protein, 201 aa, Homo Sapiens
MGATTMDQKSLWAGVVVLLLLQGGSAYKLVCYFTNWSQDRQEPGKFTPENIDPFLCSHLIYSFASIENNKVIIKDKSEVMLYQTINSLKTKNPKLKILLSIGGYLFGSKGFHPMVDSSTSRLEFINSIILFLRNHNFDGLDVSWIYPDQKENTHFTVLIHELAEAFQKDFTKSTKERLLLTAGVSAGRQMIDNSYQVEKLA

SEQ ID NO: 2773 - protein, 221 aa, Homo Sapiens
MGATTMDQKSLWAGVVVLLLLQGGSAYKLVCYFTNWSQDRQEPGKFTPENIDPFLCSHLIYSFASIENNKVIIKDKSEVMLYQTINSLKTKNPKLKILLSIGGYLFGSKGFHPMVDSSTSRLEFINSIILFLRNHNFDGLDVSWIYPDQKENTHFTVLIHELAEAFQKDFTKSTKERLLLTAGVSAGRQMIDNSYQVEKLAKDLDFINLLSFDFHGSWEKP

SEQ ID NO: 2774 - protein, 390 aa, Homo Sapiens
MGATTMDQKSLWAGVVVLLLLQGGSAYKLVCYFTNWSQDRQEPGKFTPENIDPFLCSHLIYSFASIENNKVIIKDKSEVMLYQTINSLKTKNPKLKILLSIGGYLFGSKGFHPMVDSSTSRLEFINSIILFLRNHNFDGLDVSWIYPDQKENTHFTVLIHELAEAFQKDFTKSTKERLLLTAGVSAGRQMIDNSYQVEKLAKDLDFINLLSFDFHGSWEKPLITGHNSPLSKGWQDRGPSSYYNVEYAVGYWIHKGMPSEKVVMGIPTYGHSFTLASAETTVGAPASGPGAAGPITESSGFLAYYEICQFLKGAKITRLQDQQVPYAVKGNQWVGYDDVKSMETKVQFLKNLNLGGAMIWSIDMDDFTGKSCNQGPYPLVQAVKRSLGSL

SEQ ID NO: 2775 - protein, 390 aa, Homo Sapiens; identical to SEQ ID NO: 2774

SEQ ID NO: 2776 - protein, 145 aa, Homo Sapiens
MLYQTINSLKTKFHPMVDSSTSRLEFINSIILFLRNHNFDGLDVSWIYPDQKENTHFTVLIHELAEAFQKDFTKSTKERLLLTAGVSAGRQMIDNSYQVEKLAKDLDFINLLSFDFHGSWEKPLITGHNSPLSKGWQDRGPSSYY

SEQ ID NO: 2777 - protein, 122 aa, Homo Sapiens
MLYQTINSLKTKNPKLKILLSIGGYLFGSKGFHPMVDSSTSRLEFINSIILFLRNHNFDGLDVSWIYPDQKENTHFTVLIHELAEAFQKDFTKSTKERLLLTAGVSAGRQMIDNSYQVEKLA

SEQ ID NO: 2778 - protein, 169 aa, Homo Sapiens
MLYQTINSLKTKNPKLKILLSIGGYLFGSKGFHPMVDSSTSRLEFINSIILFLRNHNFDGLDVSWIYPDQKENTHFTVLIHELAEAFQKDFTKSTKERLLLTAGVSAGRQMIDNSYQVEKLAKDLDFINLLSFDFHGSWEKPLITGHNSPLSKGWQDRGPSSYYNVEYA

SEQ ID NO: 2779 - protein, 311 aa, Homo Sapiens
MLYQTINSLKTKNPKLKILLSIGGYLFGSKGFHPMVDSSTSRLEFINSIILFLRNHNFDGLDVSWIYPDQKENTHFTVLIHELAEAFQKDFTKSTKERLLLTAGVSAGRQMIDNSYQVEKLAKDLDFINLLSFDFHGSWEKPLITGHNSPLSKGWQDRGPSSYYNVEYAVGYWIHKGMPSEKVVMGIPTYGHSFTLASAETTVGAPASGPGAAGPITESSGFLAYYEICQFLKGAKITRLQDQQVPYAVKGNQWVGYDDVKSMETKVQFLKNLNLGGAMIWSIDMDDFTGKSCNQGPYPLVQAVKRSLGSL

SEQ ID NO: 2780 - protein, 311 aa, Homo Sapiens; identical to SEQ ID NO: 2779

SEQ ID NO: 2781 - protein, 183 aa, Homo Sapiens
PDQKENTHFTVLIHELAEAFQKDFTKSTKERLLLTAGVSAGRQMIDNSYQVEKLAKDLDFINLLSFDFHGSWEKPLITGHNSPLSKGWQDRGPSSYYNVICQFLKGAKITRLQDQQVPYAVKGNQWVGYDDVKSMETKVQFLKNLNLGGAMIWSIDMDDFTGKSCNQGPYPLVQAVKRSLGSL

SEQ ID NO: 2782 - protein, 161 aa, Homo Sapiens
  misc_feature (1)..(1): Xaa can be any naturally occurring amino acid
XFTNWSQDRQEPGKFTPENIDPFLCSHLIYSFASIENNKVIIKDKSEVMLYQTINSLKTKNPKLKILLSIGGYLFGSKGDLDFINLLSFDFHGSWEKPLITGHNSPLSKGWQDRGPSSYYNVEYAVGYWIHKGMPSEKVVMGIPTYGHSFTLASAETTVGA

SEQ ID NO: 2783 - protein, 42 aa, Homo Sapiens
YEICQFLKGAKITRLQDQQVPYAVKGNQWVGYDDVKSMETKD

SEQ ID NO: 2784 - protein, 420 aa, Homo Sapiens
ETSSSVHEQVADSGAQAVAFQSGGESSIVWNSQLKTLLAIGGWNFGTAPFTAMVSTPENRQTFITSVIKFLRQYEFDGLDFDWEYPGSRGSPPQDKHLFTVLVQEMREAFEQEAKQINKPRLMVTAAVAAGISNIQSGYEIPQLSQYLDYIHVMTYDLHGSWEGYTGENSPLYKYPTDTGSNAYLNVDYVMNYWKDNGAPAEKLIVGFPTYGHNFILSNPSNTGIGAPTSGAGPAGPYAKESGIWAYYEICTFLKNGATQGWDAPQEVPYAYQGNVWVGYDNIKSFDIKAQWLKHNKFGGAMVWAIDLDDFTGTFCNQGKFPLISTLKKALGLQSASCTAPAQPIEPITAAPSGSGNGSGSSSSGGSSGGSGFCAVRANGLYPVANNRNAFWHCVNGVTYQQNCQAGLVFDTSCDCCNWA

SEQ ID NO: 2785 - protein, 315 aa, Homo Sapiens
MREAFEQEAKQINKPRLMVTAAVAAGISNIQSGYEIPQLSQYLDYIHVMTYDLHGSWEGYTGENSPLYKYPTDTGSNAYLNVDYVMNYWKDNGAPAEKLIVGFPTYGHNFILSNPSNTGIGAPTSGAGPAGPYAKESGIWAYYEICTFLKNGATQGWDAPQEVPYAYQGNVWVGYDNIKSFDIKAQWLKHNKFGGAMVWAIDLDDFTGTFCNQGKFPLISTLKKALGLQSASCTAPAQPIEPITAAPSGSGNGSGSSSSGGSSGGSGFCAVRANGLYPVANNRNAFWHCVNGVTYQQNCQAGLVFDTSCDCCNWA

SEQ ID NO: 2786 - protein, 315 aa, Homo Sapiens; identical to SEQ ID NO: 2785

SEQ ID NO: 2787 - protein, 287 aa, Homo Sapiens
MREAFEQEAKQINKPRLMVTAAVAAGISNIQSGYEIPQLSQYLDYIHVMTYDLHGSWEGYTGENSPLYKYPTDTGSNAYLNVDYVMNYWKDNGAPAEKLIVGFPTYGHNFILSNPSNTGIGAPTSGAGPAGPYAKESGIWAYYEICTFLKNGATQGWDAPQEVPYAYQGNVWVGYDNIKSFDIKAQWLKHNKFGGAMVWAIDLDDFTGTFCNQGKFPLISTLKKALGLQSASCTAPAQPIEPITAAPSGSGNGSGSSSSGGSSGGSGFCAVRANGLYPVANNRNAFW

SEQ ID NO: 2788 - protein, 315 aa, Homo Sapiens; identical to SEQ ID NO: 2785

SEQ ID NO: 2789 - protein, 476 aa, Homo Sapiens [sequence omitted]

SEQ ID NO: 2790 - protein, 476 aa, Homo Sapiens [sequence omitted]

SEQ ID NO: 2791 - protein, 368 aa, Homo Sapiens
MVSTPENRQTFITSVIKFLRQYEFDGLDFDWEYPGSRGSPPQDKHLFTVLVQEMREAFEQEAKQINKPRLMVTAAVAAGISNIQSGYEIPQLSQYLDYIHVMTYDLHGSWEGYTGENSPLYKYPTDTGSNAYLNVDYVMNYWKDNGAPAEKLIVGFPTYGHNFILSNPSNTGIGAPTSGAGPAGPYAKESGIWAYYEICTFLKNGATQGWDAPQEVPYAYQGNVWVGYDNIKSFDIKAQWLKHNKFGGAMVWAIDLDDFTGTFCNQGKFPLISTLKKALGLQSASCTAPAQPIEPITAAPSGSGNGSGSSSSGGSSGGSGFCAVRANGLYPVANNRNAFWHCVNGVTYQQNCQAGLVFDTSCDCCNWA

SEQ ID NO: 2792 - protein, 101 aa, Homo Sapiens
MVSTPENRQTFITSVIKFLRQYEFDGLDFDWEYPGSRGSPPQDKHLFTVLVQMRKLKYREDLSNLPKITQLVGIITSSAVWPQSPLLLSITLGCPLLLRNA

SEQ ID NO: 2793 - protein, 69 aa, Homo Sapiens
LKDHRPRMVWDSQASEHFFEYKKSRSGRHVVFYPTLKSLQVRLELARELGVGVSIWELGQGLDYFYDLL

SEQ ID NO: 2794 - protein, 26 aa, Homo Sapiens
MRTLFNLLWLALACSPVHTTLSKSDA

SEQ ID NO: 2795 - protein, 84 aa, Homo Sapiens
MRTLFNLLWLALACSPVHTTLSKSDAKKAASKTLLEKAGAQWRDLGSPQPLPPRFKRFSCFSLPSSWDYRVSFQISRCKTGVWW

SEQ ID NO: 2796 - protein, 84 aa, Homo Sapiens
MRTLFNLLWLALACSPVHTTLSKSDAKKAASKTLLEKSQFSDKPVQDRGLVVTDLKAESVVLEHRSYCSAKARDRHFAGDVLGY

SEQ ID NO: 2797 - protein, 116 aa, Homo Sapiens
MRTLFNLLWLALACSPVHTTLSKSDAKKAASKTLLEKSQFSDKPVQDRGLVVTDLKAESVVLEHRSYCSAKARDRHFAGDVLGYVTPWNSHGYDVTKVFGSKFTQISPVWLQLKRR

SEQ ID NO: 2798 - protein, 119 aa, Homo Sapiens
MRTLFNLLWLALACSPVHTTLSKSDAKKAASKTLLEKSQFSDKPVQDRGLVVTDLKAESVVLEHRSYCSAKARDRHFAGDVLGYVTPWNSHGYDVTKVFGSKFTQISPVWLQLKRRGRE

SEQ ID NO: 2799 - protein, 224 aa, Homo Sapiens
MRTLFNLLWLALACSPVHTTLSKSDAKKAASKTLLEKSQFSDKPVQDRGLVVTDLKAESVVLEHRSYCSAKARDRHFAGDVLGYVTPWNSHGYDVTKVFGSKFTQISPVWLQLKRRGREMFEARLLALLVIPPAITPGTDQLGMFTHKEFEQLAPVLDGFSLMTYDYSTAHQPGPNAPLSWVRACVQVLDPKSKWRSKILLGLNFYGMDYATSKDAREPVVGAR

SEQ ID NO: 2800 - protein, 132 aa, Homo Sapiens
MRTLFNLLWLALACSPVHTTLSKSDAKKAASKTLLEKSQFSDKPVQDRGLVVTDLKAESVVLEHRSYCSAKARDRHFAGDVLGYVTPWNSHGYDVTKVFGSKFTQISPVWLQLKRRGREMFEVTGLHDVDQG

SEQ ID NO: 2801 - protein, 162 aa, Homo Sapiens
MRTLFNLLWLALACSPVHTTLSKSDAKKAASKTLLEKSQFSDKPVQDRGLVVTDLKAESVVLEHRSYCSAKARDRHFAGDVLGYVTPWNSHGYDVTKVFGSKFTQISPVWLQLKRRGREMFEVTGLHDVDQGSHPSCLTVLAPQAEKSGGCELSGSMPRACT

SEQ ID NO: 2802 - protein, 393 aa, Homo Sapiens
MRTLFNLLWLALACSPVHTTLSKSDAKKAASKTLLEKSQFSDKPVQDRGLVVTDLKAESVVLEHRSYCSAKARDRHFAGDVLGYVTPWNSHGYDVTKVFGSKFTQISPVWLQLKRRGREMFEVTGLHDVDQGWMRAVRKHAKGLHIVPRLLFEDWTYDDFRNVLDSEDEIEELSKTVVQVAKNQHFDGFVVEVWNQLLSQKRVGLIHMLTHLAEALHQARLLALLVIPPAITPGTDQLGMFTHKEFEQLAPVLDGFSLMTYDYSTAHQPGPNAPLSWVRACVQVLDPKSKWRSKILLGLNFYGMDYATSKDAREPVVGARYIQTLKDHRPRMVWDSQASEHFFEYKKSRSGRHVVFYPTLKSLQVRLELARELGVGVSIWELGQGLDYFYDLL

SEQ ID NO: 2803 - protein, 393 aa, Homo Sapiens; identical to SEQ ID NO: 2802

SEQ ID NO: 2804 - protein, 393 aa, Homo Sapiens; identical to SEQ ID NO: 2802

SEQ ID NO: 2805 - protein, 362 aa, Homo Sapiens
MRTLFNLLWLALACSPVHTTLSKSDAKKAASKTLLEKSQFSDKPVQDRGLVVTDLKAESVVLEHRSYCSAKARDRHFAGDVLGYVTPWNSHGYDVTKVFGSKFTQISPVWLQLKRRGREMFEVTGLHDVDQGWMRAVRKHAKGLHIVPRLLFEDWTYDDFRNVLDSEDEIEELSKTVVQVAKNQHFDGFVVEVWNQLLSQKRVTDQLGMFTHKEFEQLAPVLDGFSLMTYDYSTAHQPGPNAPLSWVRACVQVLDPKSKWRSKILLGLNFYGMDYATSKDAREPVVGARYIQTLKDHRPRMVWDSQASEHFFEYKKSRSGRHVVFYPTLKSLQVRLELARELGVGVSIWELGQGLDYFYDLL

SEQ ID NO: 2806 - protein, 38 aa, Homo Sapiens
MRTLFNLLWLALACSPVHTTLSKSDAKKAASKTLLEKV

SEQ ID NO: 2807 - protein, 418 aa, Homo Sapiens
MRTLFNLLWLALACSPVHTTLSKSDAKKAASKTLLEKVKFCSCCPGWSAMARSWLTATSATQSQFSDKPVQDRGLVVTDLKAESVVLEHRSYCSAKARDRHFAGDVLGYVTPWNSHGYDVTKVFGSKFTQISPVWLQLKRRGREMFEVTGLHDVDQGWMRAVRKHAKGLHIVPRLLFEDWTYDDFRNVLDSEDEIEELSKTVVQVAKNQHFDGFVVEVWNQLLSQKRVGLIHMLTHLAEALHQARLLALLVIPPAITPGTDQLGMFTHKEFEQLAPVLDGFSLMTYDYSTAHQPGPNAPLSWVRACVQVLDPKSKWRSKILLGLNFYGMDYATSKDAREPVVGARYIQTLKDHRPRMVWDSQASEHFFEYKKSRSGRHVVFYPTLKSLQVRLELARELGVGVSIWELGQGLDYFYDLL

SEQ ID NO: 2808 - protein, 418 aa, Homo Sapiens; identical to SEQ ID NO: 2807

SEQ ID NO: 2809 - protein, 84 aa, Homo Sapiens
  misc_feature (1)..(1): Xaa can be any naturally occurring amino acid
XDAREPVVGARYIQTLKDHRPRMVWDSQASEHFFEYKKSRSGRHVVFYPTLKSLQVRLELARELGVGVSIWELGQGLDYFYDLL

SEQ ID NO: 2810 - protein, 108 aa, Homo Sapiens
  misc_feature (1)..(1): Xaa can be any naturally occurring amino acid
XPKSKWRSKILLGLNFYGMDYATSKDAREPVVGARYIQTLKDHRPRMVWDSQASEHFFEYKKSRSGRHVVFYPTLKSLQVRLELARELGVGVSIWELGQGLDYFYDLL

SEQ ID NO: 2811 - protein, 72 aa, Homo Sapiens
  misc_feature (1)..(1): Xaa can be any naturally occurring amino acid
XQLGMFTHKEFEQLAPVLDGFSLMTYDYSTAHQPGPNAPLSWVRACVQVLDPKSKWRSKILLGLNFYGTSRH

SEQ ID NO: 2812 - protein, 447 aa, Homo Sapiens
MVRSVAWAGFMVLLMIPWGSAAKLVCYFTNWAQYRQGEARFLPKDLDPSLCTHLIYAFAGMTNHQLSTTEWNDETLYQEFNGLKKMFTDMVATANNRQTFVNSAIRFLRKYSFDGLDLDWEYPGSQGSPAVDKERFTTLVQDLANAFQQEAQTSGKERLLLSAAVPAGQTYVDAGYEVDKIAQNLDFVNLMAYDFHGSWEKVTGHNSPLYKRQEESGAAASLNVDAAVQQWLQKGTPASKLILGMPTYGRSFTLASSSDTRVGAPATGSGTPGPFTKEGGMLAYYEVCSWKGATKQRIQDQKVPYIFRDNQWVGFDDVESFKTKVSYLKQKGLGGAMVWALDLDDFAGFSCNQGRYPLIQTLRQELSLPYLPSGTPELEVPKPGQPSEPEHGPSPGQDTFCQGKADGLYPNPRERSSFYSCAAGRLFQQSCPTGLVFSNSCKCCTWN

SEQ ID NO: 2813 - protein, 466 aa, Homo Sapiens
MVRSVAWAGFMVLLMIPWGSAAKLVCYFTNWAQYRQGEARFLPKDLDPSLCTHLIYAFAGMTNHQLSTTEWNDETLYQEFNGLKKMNPKLKTLLAIGGWNFGTQKFTDMVATANNRQTFVNSAIRFLRKYSFDGLDLDWEYPGSQGSPAVDKERFTTLVQDLANAFQQEAQTSGKERLLLSAAVPAGQTYVDAGYEVDKIAQNLDFVNLMAYDFHGSWEKVTGHNSPLYKRQEESGAAASLNVDAAVQQWLQKGTPASKLILGMPTYGRSFTLASSSDTRVGAPATGSGTPGPFTKEGGMLAYYEVCSWKGATKQRIQDQKVPYIFRDNQWVGFDDVESFKTKVSYLKQKGLGGAMVWALDLDDFAGFSCNQGRYPLIQTLRQELSLPYLPSGTPELEVPKPGQPSEPEHGPSPGQDTFCQGKADGLYPNPRERSSFYSCAAGRLFQQSCPTGLVFSNSCKCCTWN

SEQ ID NO: 2814 - protein, 387 aa, Homo Sapiens
MVRSVAWAGFMVLLMIPWGSAAKLVCYFTNWAQYRQGEARFLPKDLDPSLCTHLIYAFAGMTNHQLSTTEWNDETLYQEFNGLKKMNPKLKTLLAIGGWNFGTQKFTDMVATANNRQTFVNSAIRFLRKYSFDGLDLDWEYPGSQGSPAVDKERFTTLVQDLANAFQQEAQTSGKERLLLSAAVPAGQTYVDAGYEVDKIAQNLDFVNLMAYDFHGSWEKVTGHNSPLYKRQEESGAAASLNVDAAVQQWLQKGTPASKLILGMPTYGRSFTLASSSDTRVGAPATGSGTPGPFTKEGGMLAYYEVCSWKGATKQRIQDQKVPYIFRDNQWVGFDDVESFKTKVSYLKQKGLGGAMVWALDLDDFAGFSCNQGRYPLIQTLRQELNG

SEQ ID NO: 2815 - protein, 361 aa, Homo Sapiens
MVRSVAWAGFMVLLMIPWGSAAKLVCYFTNWAQYRQGEARFLPKDLDPSLCTHLIYAFAGMTNHQLSTTEWNDETLYQEFNGLKKMNPKLKTLLAIGGWNFGTQKFTDMVATANNRQTFVNSAIRFLRKYSFDGLDLDWEYPGSQGSPAVDKERFTTLVQDLANAFQQEAQTSGKERLLLSAAVPAGQTYVDAGYEVDKIAQNLDFVNLMAYDFHGSWEKVTGHNSPLYKRQEESGAAASLNVDAAVQQWLQKGTPASKLILGMPTYGRSFTLASSSDTRVGAPATGSGTPGPFTKEGGMLAYYEVCSWKGATKQRIQDQKVPYIFRDNQWVGFDDVESFKTKVMLTLRQGDCKMTDVQAA

SEQ ID NO: 2816 - protein, 66 aa, Homo Sapiens
MEPLLLGRGLIVYLMFLLLKFSKAIEIPSSVQQVPTIIKQSKVQVAFPFDEYFQIECEAKGNPEPT

SEQ ID NO: 2817 - protein, 85 aa, Homo Sapiens
MEPLLLGRGLIVYLMFLLLKFSKAIEIPSSVQQVPTIIKQSKVQVAFPFDEYFQIECEAKGNPEPTFSWTKDGNPFYFTDHRIIP

SEQ ID NO: 2818 - protein, 96 aa, Homo Sapiens
MEPLLLGRGLIVYLMFLLLKFSKAIEIPSSVQQVPTIIKQSKVQVAFPFDEYFQIECEAKGNPEPTFSWTKDGNPFYFTDHRIIPSNNSGTFRIPN

SEQ ID NO: 2819 - protein, 181 aa, Homo Sapiens
MEPLLLGRGLIVYLMFLLLKFSKAIEIPSSVQQVPTIIKQSKVQVAFPFDEYFQIECEAKGNPEPTFSWTKDGNPFYFTDHRIIPSNNSGTFRIPNEGHISHFQGKYRCFASNKLGIAMSEEIEFIVPSVPKFPKEKIDPLEVEEGDPIVLPCNPPKGLPPLHIYWMNIELEHIEQDERVY

SEQ ID NO: 2820 - protein, 1224 aa, Homo Sapiens
MEPLLLGRGLIVYLMFLLLKFSKAIEIPSSVQQVPTIIKQSKVQVAFPFDEYFQIECEAKGNPEPTFSWTKDGNPFYFTDHRIIPSNNSGTFRIPNEGHISHFQGKYRCFASNKLGIAMSEEIEFIVPSVPKFPKEKIDPLEVEEGDPIVLPCNPPKGLPPLHIYWMNIELEHIEQDERVYMSQKGDLYFANVEEKDSRNDYCCFAAFPRLRTIVQKMPMKLTVNSLKHANDSSSSTEIGSKANSIKQRKPKLLLPPTESGSESSITILKGEILLLECFAEGLPTPQVDWNKIGGDLPKGRETKENYGKTLKIENVSYQDKGNYRCTASNFLGTATHDFHVIVEEPPRWTKKPQSAVYSTGSNGILLCEAEGEPQPTIKWRVNGSPVDNHPFAGDVVFPREISFTNLQPNHTAVYQCEASNVHGTILANANIDVVDVRPLIQTKDGENYATVVGYSAFLHCEFFASPEAVVSWQKVEEVKPLEGRRYHIYENGTLQINRTTEEDAGSYSCWVENAIGKTAVTANLDIRNATKLRVSPKNPRIPKLHMLELHCESKCDSHLKHSLKLSWSKDGEAFEINGTEDGRIIIDGANLTISNVTLEDQGIYCCSAHTALDSAADITQVTVLDVPDPPENLHLSERQNRSVRLTWEAGADHNSNISEYIVEFEGNKEEPGRWEELTRVQGKKTTVILPLAPFVRYQFRVIAVNEVGRSQPSQPSDHHETPPAAPDRNPQNIRVQASQPKEMIIKWEPLKSMEQNGPGLEYRVTWKPQGAPVEWEEETVTNHTLRVMTPAVYAPYDVKVQAINQLGSGPDPQSVTLYSGEDYPDTAPVIHGVDVINSTLVKVTWSTVPKDRVHGRLKGYQINWWKTKSLLDGRTHPKEVNILRFSGQRNSGMVPSLDAFSEFHLTVLAYNSKGAGPESEPYIFQTPEGVPEQPTFLKVIKVDKDTATLSWGLPKKLNGNLTGYLLQYQIINDTYEIGELNDINITTPSKPSWHLSNLNATTKYKFYLRACTSQGCGKPITEESSTLGEGSKGIGKISGVNLTQKTHPIEVFEPGAEHIVRLMTKNWGDNDSIFQDVIETRGREYAGLYDDISTQGWFIGLMCAIALLTLLLLTVCFVKRNRGGKYSVKEKEDLHPDPEIQSVKDETFGEYSDSDEKPLKGSLRSLNRDMQPTESADSLVEYGEGDHGLFSEDGSFIGAYAGSKEKGSVESNGSSTATFPLRA

SEQ ID NO: 2821 - protein, 1171 aa, Homo Sapiens
MEPLLLGRGLIVYLMFLLLKFSKAIEIPSSVQQVPTIIKQSKVQVAFPFDEYFQIECEAKGNPEPTFSWTKDGNPFYFTDHRIIPSNNSGTFRIPNEGHISHFQGKYRCFASNKLGIAMSEEIEFIVPSVPKFPKEKIDPLEVEEGDPIVLPCNPPKGLPPLHIYWMNIELEHIEQDERVYMSQKGDLYFANVEEKDSRNDYCCFAAFPRLRTIVQKMPMKLTVNSLKHANDSSSSTEIGSKANSIKQRKPKLLLPPTESGSESSITILKGEILLLECFAEGLPTPQVDWNKIGGDLPKGRETKENYGKTLKIENVSYQDKGNYRCTASNFLGTATHDFHVIVEEPPRWTKKPQSAVYSTGSNGILLCEAEGEPQPTIKWRVNGSPVDNHPFAGDVVFPREISFTNLQPNHTAVYQCEASNVHGTILANANIDVVDVRPLIQTKDGENYATVVGYSAFLHCEFFASPEAVVSWQKVEEVKPLEGRRYHIYENGTLQINRTTEEDAGSYSCWVENAIGKTAVTANLDIRNATKLRVSPKNPRIPKLHMLELHCESKCDSHLKHSLKLSWSKDGEAFEINGTEDGRIIIDGANLTISNVTLEDQGIYCCSAHTALDSAADITQVTVLDVPDPPENLHLSERQNRSVRLTWEAGADHNSNISEYIVEFEGNKEEPGRWEELTRVQGKKTTVILPLAPFVRYQFRVIAVNEVGRSQPSQPSDHHETPPAAPDRNPQNIRVQASQPKEMIIKWEPLKSMEQNGPGLEYRVTWKPQGAPVEWEEETVTNHTLRVMTPAVYAPYDVKVQAINQLGSGPDPQSVTLYSGEDYPDTAPVIHGVDVINSTLVKVTWSTVPKDRVHGRLKGYQINWWKTKSLLDGRTHPKEVNILRFSGQRNSGMVPSLDAFSEFHLTVLAYNSKGAGPESEPYIFQTPEGVPEQPTFLKVIKVDKDTATLSWGLPKKLNGNLTGYLLQYQIINDTYEIGELNDINITTPSKPSWHLSNLNATTKYKFYLRACTSQGCGKPITEESSTLGEGKYAGLYDDISTQGWFIGLMCAIALLTLLLLTVCFVKRNRGGKYSVKEKEDLHPDPEIQSVKDETFGEYSDSDEKPLKGSLRSLNRDMQPTESADSLVEYGEGDHGLFSEDGSFIGAYAGSKEKGSVESNGSSTATFPLRA

SEQ ID NO: 2822 - protein, 1208 aa, Homo Sapiens
MEPLLLGRGLIVYLMFLLLKFSKAIEIPSSVQQVPTIIKQSKVQVAFPFDEYFQIECEAKGNPEPTFSWTKDGNPFYFTDHRIIPSNNSGTFRIPNEGHISHFQGKYRCFASNKLGIAMSEEIEFIVPSVPKFPKEKIDPLEVEEGDPIVLPCNPPKGLPPLHIYWMNIELEHIEQDERVYMSQKGDLYFANVEEKDSRNDYCCFAAFPRLRTIVQKMPMKLTVNSSNSIKQRKPKLLLPPTESGSESSITILKGEILLLECFAEGLPTPQVDWNKIGGDLPKGRETKENYGKTLKIENVSYQDKGNYRCTASNFLGTATHDFHVIVEEPPRWTKKPQSAVYSTGSNGILLCEAEGEPQPTIKWRVNGSPVDNHPFAGDVVFPREISFTNLQPNHTAVYQCEASNVHGTILANANIDVVDVRPLIQTKDGENYATVVGYSAFLHCEFFASPEAVVSWQKVEEVKPLEGRRYHIYENGTLQINRTTEEDAGSYSCWVENAIGKTAVTANLDIRNATKLRVSPKNPRIPKLHMLELHCESKCDSHLKHSLKLSWSKDGEAFEINGTEDGRIIIDGANLTISNVTLEDQGIYCCSAHTALDSAADITQVTVLDVPDPPENLHLSERQNRSVRLTWEAGADHNSNISEYIVEFEGNKEEPGRWEELTRVQGKKTTVILPLAPFVRYQFRVIAVNEVGRSQPSQPSDHHETPPAAPDRNPQNIRVQASQPKEMIIKWEPLKSMEQNGPGLEYRVTWKPQGAPVEWEEETVTNHTLRVMTPAVYAPYDVKVQAINQLGSGPDPQSVTLYSGEDYPDTAPVIHGVDVINSTLVKVTWSTVPKDRVHGRLKGYQINWWKTKSLLDGRTHPKEVNILRFSGQRNSGMVPSLDAFSEFHLTVLAYNSKGAGPESEPYIFQTPEGVPEQPTFLKVIKVDKDTATLSWGLPKKLNGNLTGYLLQYQIINDTYEIGELNDINITTPSKPSWHLSNLNATTKYKFYLRACTSQGCGKPITEESSTLGEGSKGIGKISGVNLTQKTHPIEVFEPGAEHIVRLMTKNWGDNDSIFQDVIETRGREYAGLYDDISTQGWFIGLMCAIALLTLLLLTVCFVKRNRGGKYSVKEKEDLHPDPEIQSVKDETFGEYSDSDEKPLKGSLRSLNRDMQPTESADSLVEYGEGDHGLFSEDGSFIGAYAGSKEKGSVESNGSSTATFPLRA

SEQ ID NO: 2823 - protein, 93 aa, Homo Sapiens
MPPAWSGESMDRGVVGLGSTKTQRGARAPPPQTAEGREGAPGAVVAMAPGSGARGAGDAGRGWSLLPLCASLFLSLFFFFWSVSVRGEAARRK

SEQ ID NO: 2824 - protein, 358 aa, Homo Sapiens
  misc_feature (1)..(1): Xaa can be any naturally occurring amino acid
XSVTLYSGEDYPDTAPVIHGVDVINSTLVKVTWSTVPKDRVHGRLKGYQINWWKTKSLLDGRTHPKEVNILRFSGQRNSGMVPSLDAFSEFHLTVLAYNSKGAGPESEPYIFQTPEGVPEQPTFLKVIKVDKDTATLSWGLPKKLNGNLTGYLLQYQIINDTYEIGELNDINITTPSKPSWHLSNLNATTKYKFYLRACTSQGCGKPITEESSTLGEGKYAGLYDDISTQGWFIGLMCAIALLTLLLLTVCFVKRNRGGKYSVKEKEDLHPDPEIQSVKDETFGEYSDSDEKPLKGSLRSLNRDMQPTESADSLVEYGEGDHGLFSEDGSFIGAYAGSKEKGSVESNGSSTATFPLRA

SEQ ID NO: 2825 - protein, 23 aa, Homo Sapiens
MALTLFDTDEYRPPVWKSYCFMA

SEQ ID NO: 2826 - protein, 459 aa, Homo Sapiens
MALTLFDTDEYRPPVWKSYLYQLQQEAPHPRRITCTCEVENRPKYYGREFHGMISREAADQLLIVAEGSYLIRESQRQPGTYTLALRFGSQTRNFRLYYDGKHFVGEKRFESIHDLVTDGLITLYIETKAAEYIAKMTINPIYEHVGYTTLNREPAYKKHMPVLKETHDERDSTGQDGVSEKRLTSLVRRATLKENEQIPKYEKIHNFKVHTFRGPHWCEYCANFMWGLIAQGVKCADCGLNVHKQCSKMVPNDCKPDLKHVKKVYSCDLTTLVKAHTTKRPMVVDMCIREIESRGLNSEGLYRVSGFSDLIEDVKMAFDRDGEKADISVNMYEDINIITGALKLYFRDLPIPLITYDAYPKFIESAKIMDPDEQLETLHEALKLLPPAHCETLRYLMAHLKRVTLHEKENLMNAENLGIVFGPTLMRSPELDAMAALNDIRYQRLVVELLIKNEDILF

SEQ ID NO: 2827 - protein, 433 aa, Homo Sapiens
MALTLFDTDEYRPPVWKSYLYQLQQEAPHPRRITCTCEVENRPKYYGREFHGMISREAADQLLIVAEGSYLIRESQRQPGTYTLALRFGSQTRNFRLYYDGKHFVGEKRFESIHDLVTDGLITLYIETKAAEYIAKMTINPIYEHVGYTTLNREPAYKKHMPVLKETHDERDSTGQDGVSEKRVHTFRGPHWCEYCANFMWGLIAQGVKCADCGLNVHKQCSKMVPNDCKPDLKHVKKVYSCDLTTLVKAHTTKRPMVVDMCIREIESRGLNSEGLYRVSGFSDLIEDVKMAFDRDGEKADISVNMYEDINIITGALKLYFRDLPIPLITYDAYPKFIESAKIMDPDEQLETLHEALKLLPPAHCETLRYLMAHLKRVTLHEKENLMNAENLGIVFGPTLMRSPELDAMAALNDIRYQRLVVELLIKNEDILF

SEQ ID NO: 2828 - protein, 22 aa, Homo Sapiens
MALTLFDTDEYRPPVWKSYYIL

SEQ ID NO: 2829 - protein, 185 aa, Homo Sapiens
MATMGLLMLLTLAASPHFLSICFHHVCVHTFRGPHWCEYCANFMWGLIAQGVKCADCGLNVHKQCSKMVPNDCKPDLKHVKKVYSCDLTTLVKAHTTKRPMVVDMCIREIESRGLNSEGLYRVSGFSDLIEDVKMAFDRDGEKADISVNMYEDINIITGALKLYFRDLPIPLITYDAYPKFIESA

SEQ ID NO: 2830 - protein, 275 aa, Homo Sapiens
MATMGLLMLLTLAASPHFLSICFHHVHTFRGPHWCEYCANFMWGLIAQGVKCADCGLNVHKQCSKMVPNDCKPDLKHVKKVYSCDLTTLVKAHTTKRPMVVDMCIREIESRGLNSEGLYRVSGFSDLIEDVKMAFDRDGEKADISVNMYEDINIITGALKLYFRDLPIPLITYDAYPKFIESAKIMDPDEQLETLHEALKLLPPAHCETLRYLMAHLKRVTLHEKENLMNAENLGIVFGPTLMRSPELDAMAALNDIRYQRLVVELLIKNEDILF

SEQ ID NO: 2831 - protein, 334 aa, Homo Sapiens
MPSKESWSGRKTNRAAVHKSKQEGRQQDLLIAALGMKLGSPKSSVTIWQPLKLFAYSQLTSLVRRATLKENEQIPKYEKIHNFKVHTFRGPHWCEYCANFMWGLIAQGVKCADCGLNVHKQCSKMVPNDCKPDLKHVKKVYSCDLTTLVKAHTTKRPMVVDMCIREIESRGLNSEGLYRVSGFSDLIEDVKMAFDRDGEKADISVNMYEDINIITGALKLYFRDLPIPLITYDAYPKFIESAKIMDPDEQLETLHEALKLLPPAHCETLRYLMAHLKRVTLHEKENLMNAENLGIVFGPTLMRSPELDAMAALNDIRYQRLVVELLIKNEDILF

SEQ ID NO: 2832 - protein, 165 aa, Homo Sapiens
MPSKESWSGRKTNRAAVHKSKQEGRQQDLLIAALGMKLGSPKSSVTIWQPLKLFAYSQLTSLVRRATLKENEQIPKYEKIHNFKVHTFRGPHWCEYCANFMWGLIAQGVKCAVLEARKSKIKLAAGSVSDCGLNVHKQCSKMVPNDCKPDLKHVKKVYSCDLTTL

SEQ ID NO: 2833 - protein, 186 aa, Homo Sapiens
MRGGRNRDRLTSLVRRATLKENEQIPKYEKIHNFKVHTFRGPHWCEYCANFMWGLIAQGVKCADCGLNVHKQCSKMVPNDCKPDLKHVKKVYSCDLTTLVKAHTTKRPMVVDMCIREIESRGLNSEGLYRVSGFSDLIEDVKMAFDRDGEKADISVNMYEDINIITGALKLYFRDLPIPLITYDAY

SEQ ID NO: 2834 - protein, 173 aa, Homo Sapiens
MWGLIAQGVKCADCGLNVHKQCSKMVPNDCKPDLKHVKKVYSCDLTTLVKAHTTKRPMVVDMCIREIESRGLNSEGLYRVSGFSDLIEDVKMAFDRDGEKADISVNMYEDINIITGALKLYFRDLPIPLITYDAYPKFIESAKIMDPDEQLETLHEALKLLPPAHCETLRYLM

SEQ ID NO: 2835 - protein, 194 aa, Homo Sapiens
MWGLIAQGVKCAVLEARKSKIKLAAGSVSDCGLNVHKQCSKMVPNDCKPDLKHVKKVYSCDLTTLVKAHTTKRPMVVDMCIREIESRGLNSEGLYRVSGFSDLIEDVKMAFDRDGEKADISVNMYEDINIITGALKLYFRDLPIPLITYDAYPKFIESAKIMDPDEQLETLHEALKLLPPAHCETLRYLMAHLK

SEQ ID NO: 2836 - protein, 613 aa, Homo Sapiens
MAVVTLGEERPIGHLHLALRHLLEQHGDDFDWFFLVPDTTYTEAHGLARLTGHLSLASAAHLYLGRPQDFIGGEPTPGRYCHGGFGVLLSRMLLQQLRPHLEGCRNDIVSARPDEWLGRCILDATGVGCTGDHEGVHYSHLELSPGEPVQEGDPHFRSALTAHPVRDPVHMYQLHKAFARAELERTYQEIQELQWEIQNTSHLAVDGDQAAAWPVGIPAPSRPASRFEVLRWDYFTEQHAFSCADGSPRCPLRGADRADVADVLGTALEELNRRYHPALRLQKQQLVNGYRRFDPARGMEYTLDLQLEALTPQGGRRPLTRRVQLLRPLSRVEILPVPYVTEASRLTVLLPLAAAERDLAPGFLEAFATAALEPGDAAAALTLLLLYEPRQAQRVAHADVFAPVKAHVAELERRFPGARVPWLSVQTAAPSPLRLMDLLSKKHPLDTLFLLAGPDTVLTPDFLNRCRMHAISGWQAFFPMHFQAFHPAVAPPQGPGPPELGRDTGRFDRQAASEACFYNSDYVAARGRLAAASEQEEELLESLDVYELFLHFSSLHVLRAVEPALLQRYRAQTCSARLSEDLYHRCLQSVLEGLGSRTQLAMLLFEQEQGNST

SEQ ID NO: 2837 - protein, 775 aa, Homo Sapiens
MRASLLLSVLRPAGPVAVGISLGFTLSLLSVTWVEEPCGPGPPQPGDSELPPRGNTNAARRPNSVQPGAEREKPGAGEGAGENWEPRVLPYHPAQPGQAAKKAVRTRYISTELGIRQRLLVAVLTSQTTLPTLGVAVNRTLGHRLERVVFLTGARGRRAPPGMAVVTLGEERPIGHLHLALRHLLEQHGDDFDWFFLVPDTTYTEAHGLARLTGHLSLASAAHLYLGRPQDFIGGEPTPGRYCHGGFGVLLSRMLLQQLRPHLEGCRNDIVSARPDEWLGRCILDATGVGCTGDHEGVHYSHLELSPGEPVQEGDPHFRSALTAHPVRDPVHMYQLHKAFARAELERTYQEIQELQWEIQNTSHLAVDGDQAAAWPVGIPAPSRPASRFEVLRWDYFTEQHAFSCADGSPRCPLRGADRADVADVLGTALEELNRRYHPALRLQKQQLVNGYRRFDPARGMEYTLDLQLEALTPQGGRRPLTRRVQLLRPLSRVEILPVPYVTEASRLTVLLPLAAAERDLAPGFLEAFATAALEPGDAAAALTLLLLYEPRQAQRVAHADVFAPVKAHVAELERRFPGARVPWLSVQTAAPSPLRLMDLLSKKHPLDTLFLLAGPDTVLTPDFLNRCRMHAISGWQAFFPMHFQAFHPAVAPPQGPGPPELGRDTGRFDRQAASEACFYNSDYVAARGRLAAASEQEEELLESLDVYELFLHFSSLHVLRAVEPALLQRYRAQTCSARLSEDLYHRCLQSVLEGLGSRTQLAMLLFEQEQGNST

SEQ ID NO: 2838 - protein, 298 aa, Homo Sapiens
MRASLLLSVLRPAGPVAVGISLGFTLSLLSVTWVEEPCGPGPPQPGDSELPPRGNTNAARRPNSVQPGAEREKPGAGEGAGENWEPRVLPYHPAQPGQAAKKAVRTRYISTELGIRQRLLVAVLTSQTTLPTLGVAVNRTLGHRLERVVFLTGARGRRAPPGMAVVTLGEERPIGHLHLALRHLLEQHGDDFDWFFLVPDTTYTEAHGLARLTGHLSLASAAHLYLGRPQDFIGGEPTPGRYCHGGFGVLLSRMLLQQLRPHLEGCRNDIVSARPDEWLGRCILDATGVGCTGDHEVG

SEQ ID NO: 2839 - protein, 123 aa, Homo Sapiens
CHGGFGYLLSRSLLLRLRPHLDGCRGDILSARPDEWLGRCLIDSLGVGCVSQHQGQQYRSFELAKNRDPEKEGSSAFLSAFAVHPVSEGTLMYRLHKRFSALELERAYSEIEQLQNCPKKAQG

SEQ ID NO: 2840 - protein, 90 aa, Homo Sapiens
MLSLARPPLPPTGLRTRTRYIQTELGSRERLLVAVLTSRATLSTLAVAVNRTVAHHFPRLLYFTGQRGARAPAGMQVVSHGDERPAWLMS

SEQ ID NO: 2841 - protein, 764 aa, Homo Sapiens
MLSLARPPLPPTGLRTSLSLLRVSWIQGEGEDPCVEAVGERGGPQNPDSRARLDQSDEDFKPRIVPYYRDPNKPYKKVLRTRYIQTELGSRERLLVAVLTSRATLSTLAVAVNRTVAHHFPRLLYFTGQRGARAPAGMQVVSHGDERPAWLMSETLRHLHTHFGADYDWFFIMQDDTYVQAPRLAALAGHLSINQDLYLGRAEEFIGAGEQARYCHGGFGYLLSRSLLLRLRPHLDGCRGDILSARPDEWLGRCLIDSLGVGCVSQHQGQQYRSFELAKNRDPEKEGSSAFLSAFAVHPVSEGTLMYRLHKRFSALELERAYSEIEQLQAQIRNLTVLTPEGEAGLSWPVGLPAPFTPHSRFEVLGWDYFTEQHTFSCADGAPKCPLQGASRADVGDALETALEQLNRRYQPRLRFQKQRLLNGYRRFDPARGMEYTLDLLLECVTQRGHRRALARRVSLLRPLSRVEILPMPYVTEATRVQLVLPLLVAEAAAAPAFLEAFAANVLEPREHALLTLLLVYGPREGGRGAPDPFLGVKAAAAELERRYPGTRLAWLAVRAEAPSQVRLMDVVSKKHPVDTLFFLTTVWTRPGPEVLNRCRMNAISGWQAFFPVHFQEFNPALSPQRSPPGPPGAGPDPPSPPGADPSRGAPIGGRFDRQASAEGCFYNADYLAARARLAGELAGQEEEEALEGLEVMDVFLRFSGLHLFRAVEPGLVQKFSLRDCSPRLSEELYHRCRLSNLEGLGGRAQLAMALFEQEQANST

SEQ ID NO: 2842 - protein, 772 aa, Homo Sapiens
MRLSSLLALLRPALPLILGLSLGCSLSLLRVSWIQGEGEDPCVEAVGERGGPQNPDSRARLDQSDEDFKPRIVPYYRDPNKPYKKVLRTRYIQTELGSRERLLVAVLTSRATLSTLAVAVNRTVAHHFPRLLYFTGQRGARAPAGMQVVSHGDERPAWLMSETLRHLHTHFGADYDWFFIMQDDTYVQAPRLAALAGHLSINQDLYLGRAEEFIGAGEQARYCHGGFGYLLSRSLLLRLRPHLDGCRGDILSARPDEWLGRCLIDSLGVGCVSQHQGQQYRSFELAKNRDPEKEGSSAFLSAFAVHPVSEGTLMYRLHKRFSALELERAYSEIEQLQAQIRNLTVLTPEGEAGLSWPVGLPAPFTPHSRFEVLGWDYFTEQHTFSCADGAPKCPLQGASRADVGDALETALEQLNRRYQPRLRFQKQRLLNGYRRFDPARGMEYTLDLLLECVTQRGHRRALARRVSLLRPLSRVEILPMPYVTEATRVQLVLPLLVAEAAAAPAFLEAFAANVLEPREHALLTLLLVYGPREGGRGAPDPFLGVKAAAAELERRYPGTRLAWLAVRAEAPSQVRLMDVVSKKHPVDTLFFLTTVWTRPGPEVLNRCRMNAISGWQAFFPVHFQEFNPALSPQRSPPGPPGAGPDPPSPPGADPSRGAPIGGRFDRQASAEGCFYNADYLAARARLAGELAGQEEEEALEGLEVMDVFLRFSGLHLFRAVEPGLVQKFSLRDCSPRLSEELYHRCRLSNLEGLGGRAQLAMALFEQEQANST

SEQ ID NO: 2843 - protein, 86 aa, Homo Sapiens
MPSLPAPPAPLLLLGLLLLGSRPARGAGPEPPVLPIRSEKEPLPVRGAAGCTFGGKVYALDETWHPDLGEPFGVMRCVLCACEAGP

SEQ ID NO: 2844 - protein, 955 aa, Homo Sapiens
MPSLPAPPAPLLLLGLLLLGSRPARGAGPEPPVLPIRSEKEPLPVRGAAGCTFGGKVYALDETWHPDLGEPFGVMRCVLCACEAPQWGRRTRGPGRVSCKNIKPECPTPACGQPRQLPGHCCQTCPQERSSSERQPSGLSFEYPRDPEHRSYSDRGEPGAEERARGDGHTDFVALLTGPRSQAVARARVSLLRSSLRFSISYRRLDRPTRIRFSDSNGSVLFEHPAAPTQDGLVCGVWRAVPRLSLRLLRAEQLHVALVTLTHPSGEVWGPLIRHRALAAETFSAILTLEGPPQQGVGGITLLTLSDTEDSLHFLLLFRGLLEPRSGGLTQVPLRLQILHQGQLLRELQANVSAQEPGFAEVLPNLTVQEMDWLVLGELQMALEWAGRPGLRISGHIAARKSCDVLQSVLCGADALIPVQTGAAGSASLTLLGNGSLIYQVQVVGTSSEVVAMTLETKPQRRDQRTVLCHMAGLQPGGHTAVGICPGLGARGAHMLLQNELFLNVGTKDFPDGELRGHVAALPYCGHSARHDTLPVPLAGALVLPPVKSQAAGHAWLSLDTHCHLHYEVLLAGLGGSEQGTVTAHLLGPPGTPGPRRLLKGFYGSEAQGVVKDLEPELLRHLAKGMASLMITTKGSPRGELRGQVHIANQCEVGGLRLEAAGAEGVRALGAPDTASAAPPVVPGLPALAPAKPGGPGRPRDPNTCFFEGQQRPHGARWAPNYDPLCSLCTCQRRTVICDPVVCPPPSCPHPVQAPDQCCPVCPEKQDVRDLPGLPRSRDPGEGCYFDGDRSWRAAGTRWHPVVPPFGLIKCAVCTCKGGTGEVHCEKVQCPRLACAQPVRVNPTDCCKQCPVGSGAHPQLGDPMQADGPRGCRFAGQWFPESQSWHPSVPPFGEMSCITCRCGAGVPHCERDDCSLPLSCGSGKESRCCSRCTAHRRPAPETRTDPELEKEAEGS

SEQ ID NO: 2845 - protein, 915 aa, Homo Sapiens
MPSLPAPPAPLLLLGLLLLGSRPARGAGPEPPVLPIRSEKEPLPVRGAAGCTFGGKVYALDETWHPDLGEPFGVMRCVLCACEAPQWGRRTRGPGRVSCKNIKPECPTPACGQPRQLPGHCCQTCPQERSSSERQPSGLSFEYPRDPEHRSYSDRGEPGAEERARGDGHTDFVALLTGPRSQAVARARVSLLRSSLRFSISYRRLDRPTRIRFSDSNGSVLFEHPAAPTQDGLVCGVWRAVPRLSLRLLRAEQLHVALVTLTHPSGEVWGPLIRHRALAAETFSAILTLEGPPQQGVGGITLLTLSDTEDSLHFLLLFRGLLEPRSGGLTQVPLRLQILHQGQLLRELQANVSAQEPGFAEVLPNLTVQEMDWLVLGELQMALEWAGRPGLRISGHIAARKSCDVLQSVLCGADALIPVQTGAAGSASLTLLGNGSLIYQAVGICPGLGARGAHMLLQNELFLNVGTKDFPDGELRGHVAALPYCGHSARHDTLPVPLAGALVLPPVKSQAAGHAWLSLDTHCHLHYEVLLAGLGGSEQGTVTAHLLGPPGTPGPRRLLKGFYGSEAQGVVKDLEPELLRHLAKGMASLMITTKGSPRGELRGQVHIANQCEVGGLRLEAAGAEGVRALGAPDTASAAPPVVPGLPALAPAKPGGPGRPRDPNTCFFEGQQRPHGARWAPNYDPLCSLCTCQRRTVICDPVVCPPPSCPHPVQAPDQCCPVCPEKQDVRDLPGLPRSRDPGEGCYFDGDRSWRAAGTRWHPVVPPFGLIKCAVCTCKGGTGEVHCEKVQCPRLACAQPVRVNPTDCCKQCPVGSGAHPQLGDPMQADGPRGCRFAGQWFPESQSWHPSVPPFGEMSCITCRCGAGVPHCERDDCSLPLSCGSGKESRCCSRCTAHRRPAPETRTDPELEKEAEGS

SEQ ID NO: 2846 - protein, 350 aa, Homo Sapiens
MPSLPAPPAPLLLLGLLLLGSRPARGAGPEPPVLPIRSEKEPLPVRGAAGCTFGGKVYALDETWHPDLGEPFGVMRCVLCACEAPQWGRRTRGPGRVSCKNIKPECPTPACGQPRQLPGHCCQTCPQERSSSERQPSGLSFEYPRDPEHRSYSDRGEPGAEERARGDGHTDFVALLTGPRSQAVARARVSLLRSSLRFSISYRRLDRPTRIRFSDSNGSVLFEHPAAPTQDGLVCGVWRAVPRLSLRLLRAEQLHVALVTLTHPSGEVWGPLIRHRALAAETFSAILTLEGPPQQGVGGITLLTLSDTEDSLHFLLLFRGLLEPRSGDSTPGAATARTSGQCLSPGTRLC

SEQ ID NO: 2847 - protein, 954 aa, Homo Sapiens
MPSLPAPPAPLLLLGLLLLGSRPARGAGPEPPVLPIRSEKEPLPVRGAAGCTFGGKVYALDETWHPDLGEPFGVMRCVLCACEAPQWGRRTRGPGRVSCKNIKPECPTPACGQPRQLPGHCCQTCPQERSSSERQPSGLSFEYPRDPEHRSYSDRGEPGAEERARGDGHTDFVALLTGPRSQAVARARVSLLRSSLRFSISYRRLDRPTRIRFSDSNGSVLFEHPAAPTQDGLVCGVWRAVPRLSLRLLRAEQLHVALVTLTHPSGEVWGPLIRHRALAAETFSAILTLEGPPQQGVGGITLLTLSDTEDSLHFLLLFRGLLEPRSGGLTQVPLRLQILHQGQLLRELQANVSAQEPGFAEVLPNLTVQEMDWLVLGELQMALEWAGRPGLRISGHIAARKSCDVLQSVLCGADALIPVQTGAAGSASLTLLGNGSLIYQVQVVGTSSEVVAMTLETKPQRRDQRTVLCHMAGLQPGGHTAVGICPGLGARGAHMLLQNELFLNVGTKDFPDGELRGHVAALPYCGHSARHDTLPVPLAGALVLPPVKSQAAGHAWLSLDTHCHLHYEVLLAGLGGSEQGTVTAHLLGPPGTPGPRRLLKGFYGSEAQGVVKDLEPELLRHLAKGMASLMITTKGSPRGELRGQVHIANQCEVGGLRLEAAGAEGVRALGAPDTASAAPPVVPGLPALAPAKPGGPGRPRDPNTCFFEGQQRPHGARWAPNYDPLCSLCTCQRRTVICDPVVCPPPSCPHPVQAPDQCCPVCPEKQDVRDLPGLPRSRDPGEGCYFDGDRSWRAAGTRWHPVVPPFGLIKCAVCTCKGGTGEVHCEKVQCPRLACAQPVRVNPTDCCKQCPVGSGAHPQLGDPMQADGPRGCRFAGQWFPESQSWHPSVPPFGEMSCITCRCGAGVPHCERDDCSLPLSCGSGKESRCCSRCTAHRRPPETRTDPELEKEAEGS

SEQ ID NO: 2848 - protein, 94 aa, Homo Sapiens
MPSLPAPPAPLLLLGLLLLGSRPARGAGPEPPVLPIRSEKEPLPVRGAAGCTFGGKVYALDETWHPDLGEPFGVMRCVLCACEATGTLRPREMK

SEQ ID NO: 2849 - protein, 450 aa, Homo Sapiens
MGGMKYIFSLLFFLLLEGGKTEQVKHSETYCMFQDKKYRVGERWHPYLEPYGLVYCVNCICSENGNVLCSRVRCPNVHCLSPVHIPHLCCPRCPDSLPPVNNKVTSKSCEYNGTTYQHGELFVAEGLFQNRQPNQCTQCSCSEGNVYCGLKTCPKLTCAFPVSVPDSCCRVCRGDGELSWEHSDGDIFRQPANREARHSYHRSHYDPPPSRQAGGLSRFPGARSHRGALMDSQQASGTIVQIVINNKHKHGQVCVSNGKTYSHGESWHPNLRAFGIVECVLCTCNVTKQECKKIHCPNRYPCKYPQKIDGKCCKVCPGKKAKELPGQSFDNKGYFCGEETMPVYESVFMEDGETTRKIALETERPPQVEVHVWTIRKGILQHFHIEKISKRMFEELPHFKLVTRTTLSQWKIFTEGEAQISQMCSSRVCRTELEDLVKVLYLERSEKGHC

SEQ ID NO: 2850 - protein, 456 aa, Homo Sapiens
MRKKWKMGGMKYIFSLLFFLLLEGGKTEQVKHSETYCMFQDKKYRVGERWHPYLEPYGLVYCVNCICSENGNVLCSRVRCPNVHCLSPVHIPHLCCPRCPDSLPPVNNKVTSKSCEYNGTTYQHGELFVAEGLFQNRQPNQCTQCSCSEGNVYCGLKTCPKLTCAFPVSVPDSCCRVCRGDGELSWEHSDGDIFRQPANREARHSYHRSHYDPPPSRQAGGLSRFPGARSHRGALMDSQQASGTIVQIVINNKHKHGQVCVSNGKTYSHGESWHPNLRAFGIVECVLCTCNVTKQECKKIHCPNRYPCKYPQKIDGKCCKVCPGKKAKELPGQSFDNKGYFCGEETMPVYESVFMEDGETTRKIALETERPPQVEVHVWTIRKGILQHFHIEKISKRMFEELPHFKLVTRTTLSQWKIFTEGEAQISQMCSSRVCRTELEDLVKVLYLERSEKGHC

SEQ ID NO: 2851 - protein, 457 aa, Homo Sapiens
MRKKWKMGGMKYIFSLLFFLLLEGGKTEQVKHSETYCMFQDKKYRVGERWHPYLEPYGLVYCVNCICSENGNVLCSRVRCPNVHCLSPVHIPHLCCPRCPDSLPPVNNKVTSKSCEYNGTTYQHGELFVAEGLFQNRQPNQCTQCSCSEGNVYCGLKTCPKLTCAFPVSVPDSCCRVCRGDGELSWEHSDGDIFRQPANREARHSYHRSHYDPPPSRQAGGLSRFPGARSHRGALMDSQQASGTIVQIVINNKHKHGQVCVSNGKTYSHGESWHPNLRAFGIVECVLCTCNVTKQECKKIHCPNRYPCKYPQKIDGKCCKVCPGKKAKEELPGQSFDNKGYFCGEETMPVYESVFMEDGETTRKIALETERPPQVEVHVWTIRKGILQHFHIEKISKRMFEELPHFKLVTRTTLSQWKIFTEGEAQISQMCSSRVCRTELEDLVKVLYLERSEKGHC

SEQ ID NO: 2852 - protein, 458 aa, Homo Sapiens
MRKKWKMGGMKYIFSLLFFLLLEGGKTEQVKHSETYCMFQDKKYRVGERWHPYLEPYGLVYCVNCICSENGNVLCSRVRCPNVHCLSPVHIPHLCCPRCPEDSLPPVNNKVTSKSCEYNGTTYQHGELFVAEGLFQNRQPNQCTQCSCSEGNVYCGLKTCPKLTCAFPVSVPDSCCRVCRGDGELSWEHSDGDIFRQPANREARHSYHRSHYDPPPSRQAGGLSRFPGARSHRGALMDSQQASGTIVQIVINNKHKHGQVCVSNGKTYSHGESWHPNLRAFGIVECVLCTCNVTKQECKKIHCPNRYPCKYPQKIDGKCCKVCPGKKAKEELPGQSFDNKGYFCGEETMPVYESVFMEDGETTRKIALETERPPQVEVHVWTIRKGILQHFHIEKISKRMFEELPHFKLVTRTTLSQWKIFTEGEAQISQMCSSRVCRTELEDLVKVLYLERSEKGHC

SEQ ID NO: 2853 - protein, 378 aa, Homo Sapiens
MRKKWKMGGMKYIFSLLFFLLLEGGKTEQVKHSETYCMFQDKKYRVGERWHPYLEPYGLVYCVNCICSENGNVLCSRVRCPNVHCLSPVHIPHLCCPRCPGDGELSWEHSDGDIFRQPANREARHSYHRSHYDPPPSRQAGGLSRFPGARSHRGALMDSQQASGTIVQIVINNKHKHGQVCVSNGKTYSHGESWHPNLRAFGIVECVLCTCNVTKQECKKIHCPNRYPCKYPQKIDGKCCKVCPGKKAKEELPGQSFDNKGYFCGEETMPVYESVFMEDGETTRKIALETERPPQVEVHVWTIRKGILQHFHIEKISKRMFEELPHFKLVTRTTLSQWKIFTEGEAQISQMCSSRVCRTELEDLVKVLYLERSEKGHC

SEQ ID NO: 2854 - protein, 142 aa, Homo Sapiens
MALVGLPGPDMFCLFHGKRYSPGESWHPYLEPQGLMYCLRCTCSEGAHVSCYRLHCPPVHCPQPVTEPQQCCPKCVEPHTPSGLRAPPKSCQHNGTMYQHGEIFSAHELFPSRLPNQCVLCSCTMRQVSNRMKRTVCSRSMG

SEQ ID NO: 2855 - protein, 93 aa, Homo Sapiens
MALVGLPGPDMFCLFHGKRYSPGESWHPYLEPQGLMYCLRCTCSENLTLPLDSGPHQSPASTTGPCTNTERSSVPMSCSPPACPTSVSSAAAQ

SEQ ID NO: 2856 - protein, 142 aa, Homo Sapiens
MALVGLPGPDMFCLFHGKRYSPGESWHPYLEPQGLMYCLRCTCSENLTLPLDSGPHQSPASTTGPCTNTERSSVPMSCSPPACPTSVSSAAAQRARSTAASQPAPNQAAQHPSRCQTPAARPAKMRQVSNRMKRTVCSRSMG

SEQ ID NO: 2857 - protein, 451 aa, Homo Sapiens
MVPEVRVLSSLLGLALLWFPLDSHARARPDMFCLFHGKRYSPGESWHPYLEPQGLMYCLRCTCSEGAHVSCYRLHCPPVHCPQPVTEPQQCCPKCVEPHTPSGLRAPPKSCQHNGTMYQHGEIFSAHELFPSRLPNQCVLCSCTEGQIYCGLTTCPEPGCPAPLPLPDSCCQACKDEASEQSDEEDSVQSLHGVRHPQDPCSSDAGRKRGPGTPAPTGLSAPLSFIPRHFRPKGAGSTTVKIVLKEKHKKACVHGGKTYSHGEVWHPAFRAFGPLPCILCTCEDGRQDCQRVTCPTEYPCRHPEKVAGKCCKICPEDKADPGHSEISSTRCPKAPGRVLVHTSVSPSPDNLRRFALEHEASDLVEIYLWKLVKDEETEAQRGEVPGPRPHSQNLPLDSDQESQEARLPERGTALPTARWPPRRSLERLPSPDPGAEGHGQSRQSDQDITKT

SEQ ID NO: 2858 - protein, 429 aa, Homo Sapiens
MVPEVRVLSSLLGLALLWFPLDSHARARPDMFCLFHGKRYSPGESWHPYLEPQGLMYCLRCTCSEGAHVSCYRLHCPPVHCPQPVTEPQQCCPKCVEPHTPSGLRAPPKSCQHNGTMYQHGEIFSAHELFPSRLPNQCVLCSCTEGQIYCGLTTCPEPGCPAPLPLPDSCCQACKDEASEQSDEEDSVQSLHGVRHPQDPCSSDAGRKRGPGTPAPTGLSAPLSFIPRHFRPKGAGSTTVKIVLKEKHKKACVHGGKTYSHGEVWHPAFRAFGPLPCILCTCEDGRQDCQRVTCPTEYPCRHPEKVAGKCCKICPEDKADPGHSEISSTRCPKAPGRVLVHTSVSPSPDNLRRFALEHEASDLVEIYLWKLVKGIFHLTQIKKVRKQDFQKEAQHFRLLAGPHEGHWNVFLAQTLELKVTASPDKVTKT

SEQ ID NO: 2859 - protein, 308 aa, Homo Sapiens
MVPEVRVLSSLLGLALLWFPLDSHARARPDMFCLFHGKRYSPGESWHPYLEPQGLMYCLRCTCSEGAHVSCYRLHCPPVHCPQPVTEPQQCCPKCVEPHTPSGLRAPPKSCQHNGTMYQHGEIFSAHELFPSRLPNQCVLCSCTEGQIYCGLTTCPEPGCPAPLPLPDSCCQACKDEASEQSDEEDSVQSLHGVRHPQDPCSSDAGRKRGPGTPAPTGLSAPLSFIPRHFRPKGAGSTTVKIVLKEKHKKEDKADPGHSEISSTRCPKAPGRVLVHTSVSPSPDNLRRFALEHEASDLVEIYLWKLVK

SEQ ID NO: 2860 - protein, 281 aa, Homo Sapiens [sequence omitted]

SEQ ID NO: 2861 - protein, 91 aa, Homo Sapiens
  misc_feature (1)..(1): Xaa can be any naturally occurring amino acid
XGDRSRISKENRQKKTGFTVEATGRQGRGMTGNLPLDSDQESQEARLPERGTALPTARWPPRRSLERLPSPDPGAEGHGQSRQSDQDITKT

SEQ ID NO: 2862 - protein, 177 aa, Homo Sapiens
  misc_feature (1)..(1): Xaa can be any naturally occurring amino acid
XSSDAGRKRGPGTPAPTGLSAPLSFIPRHFRPKGAGSTTVKIVLKEKHKKACVHGGKTYSHGEVWHPAFRAFGPLPCILCTCEDGRQDCQRVTCPTEYPCRHPEKVAGKCCKICPEDKADPGHSEISSTRCPKAPGRVLVHTSVSPSPDNLRRFALEHEASDLVEIYLWKLVTGTSS

SEQ ID NO: 2863 - protein, 507 aa, Homo Sapiens
MAGGEEAKRPPPRAPGDPLSSPSPTALPQGGSHTETEDRLFKHLFRGYNRWARPVPNTSDVVIVRFGLSIAQLIDVDEKNQMMTTNVWLKQEWSDYKLRWNPTDFGNITSLRVPSEMIWIPDIVLYNNADGEFAVTHMTKAHLFSTGTVHWVPPAIYKSSCSIDVTFFPFDQQNCKMKFGSWTYDKAKIDLEQMEQTVDLKDYWESGEWAIVNATGTYNSKKYDCCAEIYPDVTYAFVIRRLPLFYTINLIIPCLLISCLTVLVFYLPSDCGEKITLCISVLLSLTVFLLLITEIIPSTSLVIPLIGEYLLFTMIFVTLSIVITVFVLNVHHRSPSTHTMPHWVRGALLGCVPRWLLMNRPPPPVELCHPLRLKLSPSYHWLESNVDAEEREVVVEEEDRWACAGHVAPSVGTLCSHGHLHSGASGPKAEALLQEGELLLSPHMQKALEGVHYIADHLRSEDADSSVKEDWKYVAMVIDRIFLWLFIIVCFLGTIGLFLPPFLAGMI

SEQ ID NO: 2864 - protein, 19 aa, Homo Sapiens
MGPSCPVFLSFTKLSLWWL

SEQ ID NO: 2865 - protein, 50 aa, Homo Sapiens
MGPSCPVFLSFTKLSLWWLLLTPAGGEEAKRPPPRAPGDPLSSPSPTALP

SEQ ID NO: 2866 - protein, 81 aa, Homo Sapiens
MGPSCPVFLSFTKLSLWWLLLTPAGGEEAKRPPPRAPGDPLSSPSPTALPQGGSHTETEDRLFKHLFRGYNRWARPVPNTS

SEQ ID NO: 2867 - protein, 514 aa, Homo Sapiens
MGPSCPVFLSFTKLSLWWLLLTPAGGEEAKRPPPRAPGDPLSSPSPTALPQGGSHTETEDRLFKHLFRGYNRWARPVPNTSDVDEKNQMMTTNVWLKQEWSDYKLRWNPTDFGNITSLRVPSEMIWIPDIVLYNNADGEFAVTHMTKAHLFSTGTVHWVPPAIYKSSCSIDVTFFPFDQQNCKMKFGSWTYDKAKIDLEQMEQTVDLKDYWESGEWAIVNATGTYNSKKYDCCAEIYPDVTYAFVIRRLPLFYTINLIIPCLLISCLTVLVFYLPSDCGEKITLCISVLLSLTVFLLLITEIIPSTSLVIPLIGEYLLFTMIFVTLSIVITVFVLNVHHRSPSTHTMPHWVRGALLGCVPRWLLMNRPPPPVELCHPLRLKLSPSYHWLESNVDAEEREVVVEEEDRWACAGHVAPSVGTLCSHGHLHSGASGPKAEALLQEGELLLSPHMQKALEGVHYIADHLRSEDADSSVKEDWKYVAMVIDRIFLWLFIIVCFLGTIGLFLPPFLAGMI

SEQ ID NO: 2868 - protein, 108 aa, Homo Sapiens
MGPSCPVFLSFTKLSLWWLLLTPAGGEEAKRPPPRAPGDPLSSPSPTALPQGGSHTETEDRLFKHLFRGYNRWARPVPNTSDVVIVRFGLSIAQLIDVDEKNQMMTTN

SEQ ID NO: 2869 - protein, 529 aa, Homo Sapiens
MGPSCPVFLSFTKLSLWWLLLTPAGGEEAKRPPPRAPGDPLSSPSPTALPQGGSHTETEDRLFKHLFRGYNRWARPVPNTSDVVIVRFGLSIAQLIDVDEKNQMMTTNVWLKQEWSDYKLRWNPTDFGNITSLRVPSEMIWIPDIVLYNNADGEFAVTHMTKAHLFSTGTVHWVPPAIYKSSCSIDVTFFPFDQQNCKMKFGSWTYDKAKIDLEQMEQTVDLKDYWESGEWAIVNATGTYNSKKYDCCAEIYPDVTYAFVIRRLPLFYTINLIIPCLLISCLTVLVFYLPSDCGEKITLCISVLLSLTVFLLLITEIIPSTSLVIPLIGEYLLFTMIFVTLSIVITVFVLNVHHRSPSTHTMPHWVRGALLGCVPRWLLMNRPPPPVELCHPLRLKLSPSYHWLESNVDAEEREVVVEEEDRWACAGHVAPSVGTLCSHGHLHSGASGPKAEALLQEGELLLSPHMQKALEGVHYIADHLRSEDADSSVKEDWKYVAMVIDRIFLWLFIIVCFLGTIGLFLPPFLAGMI

SEQ ID NO: 2870 - protein, 154 aa, Homo Sapiens
MGPSCPVFLSFTKLSLWWLLLTPAGGEEAKRPPPRAPGDPLSSPSPTALPQGGSHTETEDRLFKHLFRGYNRWARPVPNTSDVVIVRFGLSIAQLIDVDEKNQMMTTNVWLKQEWSDYKLRWNPTDFGNITSLRVPSEMIWIPDIVLYNNRTAR

SEQ ID NO: 2871 - protein, 133 aa, Homo Sapiens
MGPSCPVFLSFTKLSLWWLLLTPAGGEEAKRPPPRAPGDPLSSPSPTALPQGGSHTETEDRLFKHLFRGYNRWARPVPNTSDVVIVRFGLSIAQLIDVVRLSSHRWPEEGDPRPPTAFPLLLPLPQPCPHAQQ

SEQ ID NO: 2872 - protein, 160 aa, Homo Sapiens
MAARGSGPRALRLLLLVQLVAGRCGLAGAAGGAQRGLSEPSSIAKHEDSLLKDLFQDYERWVRPVEHLNDKIKIKFGLAISQLVDVDEKNQLMTTNVWLKQEWIDVKLRWNPDDYGGIKVIRVPSDSVWTPDIVLFDNADGRFEGTSTKTVIRLLKIGNS

SEQ ID NO: 2873 - protein, 468 aa, Homo Sapiens
MAARGSGPRALRLLLLVQLVAGRCGLAGAAGGAQRGLSEPSSIAKHEDSLLKDLFQDYERWVRPVEHLNDKIKIKFGLAISQLVDVDEKNQLMTTNVWLKQEWIDVKLRWNPDDYGGIKVIRVPSDSVWTPDIVLFDNADGRFEGTSTKTVIRYNGTVTWTPPANYKSSCTIDVTFFPFDLQNCSMKFGSWTYDGSQVDIILEDQDVDKRDFFDNGEWEIVSATGSKGNRTDSCCWYPYVTYSFVIKRLPLFYTLFLIIPCIGLSFLTVLVFYLPSNEGEKICLCTSVLVSLTVFLLVIEEIIPSSSKVIPLIGEYLVFTMIFVTLSIMVTVFAINIHHRSSSTHNAMAPLVRKIFLHTLPKLLCMRSHVDRYFTQKEETESGSGPKSSRNTLEAALDSIRYITRHIMKENDVREVVEDWKFIAQVLDRMFLWTFLFVSIVGSLGLFVPVIYKWANILIPVHIGNANK

SEQ ID NO: 2874 - protein, 182 aa, Homo Sapiens
  misc_feature (1)..(1): Xaa can be any naturally occurring amino acid
XRPVEHLNDKIKIKFGLAISQLVDVDEKNQLMTTNVWLKQEWIDVKLRWNPDDYGGIKVIRVPSDSVWTPDIVLFDNADGRFEGTSTKTVIRYNGTVTWTPPANYKSSCTIDVTFFPFDLQNCSMKFGSWTYDGSQVDIILEDQDVDKRDFFDNGEWEIVSATGSKGNRTDSCCWLLKIGNS

SEQ ID NO: 2875 - protein, 56 aa, Homo Sapiens
  misc_feature (1)..(1): Xaa can be any naturally occurring amino acid
XTLSIMVTVFAINIHHRSSSTHNAMAPLVRKIFLHTLPKLLCMRSHVDRLLKIGNS

SEQ ID NO: 2876 - protein, 429 aa, Homo Sapiens
MSTKVYLDLEWTDYRLSWDPAEHDGIDSLRITAESVWLPDVVLLNNNDGNFDVALDISVVVSSDGSVRWQPPGIYRSSCSIQVTYFPFDWQNCTMVFSSYSYDSSEVSLQTGLGPDGQGHQEIHIHEGTFIENGQWEIIHKPSRLIQPPGDPRGGREGQRQEVIFYLIIRRKPLFYLVNVIAPCILITLLAIFVFYLPPDAGEKMGLSIFALLTLTVFLLLLADKVPETSLSVPIIIKYLMFTMVLVTFSVILSVVVLNLHHRSPHTHQMPLWVRQIFIHKLPLYLRLKRPKPERDLMPEPPHCSSPGSGWGRGTDEYFIRKPPSDFLFPKPNRFQPELSAPDLRRFIDGPNRAVALLPELREVVSSISYIARQLQEQEDHDALKEDWQFVAMVVDRLFLWTFIIFTSVGTLVIFLDATYHLPPPDPFP

SEQ ID NO: 2877 - protein, 380 aa, Homo Sapiens
MSTKVYLDLEWTDYRLSWDPAEHDGIDSLRITAESVWLPDVVLLNNNDGNFDVALDISVVVSSDGSVRWQPPGIYRSSCSIQVTYFPFDWQNCTMVFSSYSYDSSEVSLQTGLGPDGQGHQEIHIHEGTFIENGQWEIIHKPSRLIQPPGDPRGGREGQRQEVIFYLIIRRKPLFYLVNVIAPCILITLLAIFVFYLPPDAVILSVVVLNLHHRSPHTHQMPLWVRQIFIHKLPLYLRLKRPKPERDLMPEPPHCSSPGSGWGRGTDEYFIRKPPSDFLFPKPNRFQPELSAPDLRRFIDGPNRAVALLPELREVVSSISYIARQLQEQEDHDALKEDWQFVAMVVDRLFLWTFIIFTSVGTLVIFLDATYHLPPPDPFP

SEQ ID NO: 2878 - protein, 158 aa, Homo Sapiens
MTPGALLMLLGALGAPLAPGVRGSEAEGRLREKLFSGYDSSVRPAREVGDRVRVSVGLILAQLISLNEKDEEMSTKVYLDLAVLECGGSSHPPASGGTSTSAEITAEWTDYRLSWDPAEHDGIDSLRITAESVWLPDVVLLNNNDGNFDVALDISVVV

SEQ ID NO: 2879 - protein, 501 aa, Homo Sapiens
MTPGALLMLLGALGAPLAPGVRGSEAEGRLREKLFSGYDSSVRPAREVGDRVRVSVGLILAQLISLNEKDEEMSTKVYLDLEWTDYRLSWDPAEHDGIDSLRITAESVWLPDVVLLNNNDGNFDVALDISVVVSSDGSVRWQPPGIYRSSCSIQVTYFPFDWQNCTMVFSSYSYDSSEVSLQTGLGPDGQGHQEIHIHEGTFIENGQWEIIHKPSRLIQPPGDPRGGREGQRQEVIFYLIIRRKPLFYLVNVIAPCILITLLAIFVFYLPPDAGEKMGLSIFALLTLTVFLLLLADKVPETSLSVPIIIKYLMFTMVLVTFSVILSVVVLNLHHRSPHTHQMPLWVRQIFIHKLPLYLRLKRPKPERDLMPEPPHCSSPGSGWGRGTDEYFIRKPPSDFLFPKPNRFQPELSAPDLRRFIDGPNRAVALLPELREVVSSISYIARQLQEQEDHDALKEDWQFVAMVVDRLFLWTFIIFTSVGTLVIFLDATYHLPPPDPFP

SEQ ID NO: 2880 - protein, 37 aa, Homo Sapiens
MVVDRLFLWTFIIFTSVGTLVIFLDATYHLPPPDPFP

SEQ ID NO: 2881 - protein, 316 aa, Homo Sapiens
  misc_feature (1)..(1): Xaa can be any naturally occurring amino acid
XPAREVGDRVRVSVGLILAQLISLNEKDEEMSTKVYLDLEWTDYRLSWDPAEHDGIDSLRITAESVWLPDVVLLNNNDGNFDVALDISVVVSSDGSVRWQPPGIYRSSCSIQVTYFPFDWQNCTMVFSSYSYDSSEVSLQTGLGPDGQGHQEIHIHEGTFIGEKMGLSIFALLTLTVFLLLLADKVPETSLSVPIIIKYLMFTMVLVTFSVILSVVVLNLHHRSPHTHQMPLWVRQIFIHKLPLYLRLKRPKPERDLMPEPPHCSSPGSGWGRGTDEYFIRKPPSDFLFPKPNRFQPELSAPDLRRFIDGPNRAVA

SEQ ID NO: 2882 - protein, 172 aa, Homo Sapiens
MEGPVLTLGLLAALAVCGSWGLNEEERLIRHLFQEKGYNKELRPVAHKEESVDVALALTLSNLISLGWTDNRLKWNAEEFGNISVLRLPPDMVWLPEIVLENNNDGSFQISYSCNVLVYHYGFVYWLPPAIFRSSCPISVTYFPFDWQNCSLKFSSLKYTAKEITLSLKQDA

SEQ ID NO: 2883 - protein, 502 aa, Homo Sapiens
MEGPVLTLGLLAALAVCGSWGLNEEERLIRHLFQEKGYNKELRPVAHKEESVDVALALTLSNLISLGWTDNRLKWNAEEFGNISVLRLPPDMVWLPEIVLENNNDGSFQISYSCNVLVYHYGFVYWLPPAIFRSSCPISVTYFPFDWQNCSLKFSSLKYTAKEITLSLKQDAKENRTYPVEWIIIDPEGFTENGEWEIVHRPARVNVDPRAPLDSPSRQDITFYLIIRRKPLFYIINILVPCVLISFMVNLVFYLPADSGEKTSVAISVLLAQSVFLLLISKRLPATSMAIPLIGKFLLFGMVLVTMVVVICVIVLNIHFRTPSTHVLSEGVKKLFLETLPELLHMSRPAEDGPSPGALVRRSSSLGYISKAEEYFLLKSRSDLMFEKQSERHGLARRLTTARRPPASSEQAQQELFNELKPAVDGANFIVNHMRDQNNYNEEKDSWNRVARTVDRLCLFVVTPVMVVGTAWIFLQGVYNQPPPQPFPGDPYSYNVQDKRFI

SEQ ID NO: 2884 - protein, 108 aa, Homo Sapiens
MEGPVLTLGLLAALAVCGSWGLNEEERLIRHLFQEKGYNKELRPVAHKEESVDVALALTLSNLISLKEVEETLTTNVWIEHGWTDNRLKWNAEEFGNISVLRLPPDMQ

SEQ ID NO: 2885 - protein, 235 aa, Homo Sapiens
MEGPVLTLGLLAALAVCGSWGLNEEERLIRHLFQEKGYNKELRPVAHKEESVDVALALTLSNLISLKEVEETLTTNVWIEHGWTDNRLKWNAEEFGNISVLRLPPDMVWLPEIVLENNNDGSFQISYSCNVLVYHYGFVYWLPPAIFRSSCPISVTYFPFDWQNCSLKFRERGVGDSPPAGQGQRGPQSPSGQPQPPGHHLLPHHPPQAPLLHHQHPGALRAHLLHGQPGLLPTG

SEQ ID NO: 2886 - protein, 171 aa, Homo Sapiens
MEGPVLTLGLLAALAVCGSWGLNEEERLIRHLFQEKGYNKELRPVAHKEESVDVALALTLSNLISLKEVEETLTTNVWIEHGWTDNRLKWNAEEFGNISVLRLPPDMVWLPEIVLENNNDGSFQISYSCNVLVYHYGFVYWLPPAIFRSSCPISVTYFPFDWQNCSLKFRW

SEQ ID NO: 2887 - protein, 517 aa, Homo Sapiens
MEGPVLTLGLLAALAVCGSWGLNEEERLIRHLFQEKGYNKELRPVAHKEESVDVALALTLSNLISLKEVEETLTTNVWIEHGWTDNRLKWNAEEFGNISVLRLPPDMVWLPEIVLENNNDGSFQISYSCNVLVYHYGFVYWLPPAIFRSSCPISVTYFPFDWQNCSLKFSSLKYTAKEITLSLKQDAKENRTYPVEWIIIDPEGFTENGEWEIVHRPARVNVDPRAPLDSPSRQDITFYLIIRRKPLFYIINILVPCVLISFMVNLVFYLPADSGEKTSVAISVLLAQSVFLLLISKRLPATSMAIPLIGKFLLFGMVLVTMVVVICVIVLNIHFRTPSTHVLSEGVKKLFLETLPELLHMSRPAEDGPSPGALVRRSSSLGYISKAEEYFLLKSRSDLMFEKQSERHGLARRLTTARRPPASSEQAQQELFNELKPAVDGANFIVNHMRDQNNYNEEKDSWNRVARTVDRLCLFVVTPVMVVGTAWIFLQGVYNQPPPQPFPGDPYSYNVQDKRFI

SEQ ID NO: 2888 - protein, 411 aa, Homo Sapiens
MQCSWKAVLLLALASIAIQYTAIRTFTAKSFHTCPGLAEAGLAERLCEESPTFAYNLSRKTHILILATTRSGSSFVGQLFNQHLDVFYLFEPLYHVQNTLIPRFTQGKSPADRRVMLGASRDLLRSLYDCDLYFLENYIKPPPVNHTTDRIFRRGASRVLCSRPVCDPPGPADLVLEEGDCVRKCGLLNLTVAAEACRERSHVAIKTVRVPEVNDLRALVEDPRLNLKVIQLVRDPRGILASRSETFRDTYRLWRLWYGTGRKPYNLDVTQLTTVCEDFSNSVSTGLMRPPWLKGKYMLVRYEDLARNPMKKTEEIYGFLGIPLDSHVARWIQNNTRGDPTLGKHKYGTVRNSAATAEKWRFRLSYDIVAFAQNACQQVLAQLGYKIAASEEELKNPSVSLVEERDFRPFS

SEQ ID NO: 2889 - protein, 33 aa, Homo Sapiens
MHHQWLLLAACFWVIFMFMVASKFITLTFKDPD

SEQ ID NO: 2890 - protein, 64 aa, Homo Sapiens
MHHQWLLLAACFWVIFMFMVASKFITLTFKDPDVYSAKQEFLFLTTMPEVRKLPEEKHIPEELK

SEQ ID NO: 2891 - protein, 85 aa, Homo Sapiens
MHHQWLLLAACFWVIFMFMVASKFITLTFKDPDVYSAKQEFLFLTTMPEVRKLPEEKHIPEELKPTGKELPDSQLVQPLVYMERL

SEQ ID NO: 2892 - protein, 133 aa, Homo Sapiens
MHHQWLLLAACFWVIFMFMVASKFITLTFKDPDVYSAKQEFLFLTTMPEVRKLPEEKHIPEELKPTGKELPDSQLVQPLVYMERLELIRNVCRDDALKNLSHTPVSKFVLDRIFVCDKHKILFCQTPKVGNTQ

SEQ ID NO: 2893 - protein, 141 aa, Homo Sapiens
MHHQWLLLAACFWVIFMFMVASKFITLTFKDPDVYSAKQEFLFLTTMPEVRKLPEEKHIPEELKPTGKELPDSQLVQPLVYMERLELIRNVCRDDALKNLSHTPVSKFVLDRIFVCDKHKILFCQTPKVGNTQWKKVLIVL

SEQ ID NO: 2894 - protein, 356 aa, Homo Sapiens
MHHQWLLLAACFWVIFMFMVASKFITLTFKDPDVYSAKQEFLFLTTMPEVRKLPEEKHIPEELKPTGKELPDSQLVQPLVYMERLELIRNVCRDDALKNLSHTPVSKFVLDRIFVCDKHKILFCQTPKVGNTQWKKVLIVLNGAFSSIEEIPENVVHDHEKNGLPRLSSFSDAEIQKRLKTYFKFFIVRDPFERLISAFKDKFVHNPRFEPWYRHEIAPGIIRKYRRNRTETRGIQFEDFVRYLGDPNHRWLDLQFGDHIIHWVTYVELCAPCEIMYSVIGHHETLEDDAPYILKEAGIDHLVSYPTIPPGITVYNRTKVEHYFLGISKRDIRRLYARFEGDFKLFGYQKPDFLLN

SEQ ID NO: 2895 - protein, 356 aa, Homo Sapiens; identical to SEQ ID NO: 2894

SEQ ID NO: 2896 - protein, 142 aa, Homo Sapiens
MQRKAGKKEHVQLRDKRNQEPQFRGNTARKCEPQAAEGRVSEWLRCDNMHHQWLLLAACFWVIFMFMVASKFITLTFKDPDVYSAKQEFLFLTTMPEVRKLPEEKHIPEELKPTGKELPDSQLVQPLVYMERLELIRNVCRD

SEQ ID NO: 2897 - protein, 347 aa, Homo Sapiens
MKPALLEVMRMNRICRMVLATCLGSFILVIFYFQIMRRNPFGVDICCRKGSRSPLQELYNPIQLELSNTAVLHQMRRDQVTDTCRANSATSRKRRVLTPNDLKHLVVDEDHELIYCYVPKVACTNWKRLMMVLTGRGKYSDPMEIPANEAHVSANLKTLNQYSIPEINHRLKSYMKFLFVREPFERLVSAYRNKFTQKYNISFHKRYGTKIIKRQRKNATQEALRKGDDVKFEEFVAYLIDPHTQREEPFNEHWQTVYSLCHPCHIHYDLVGKYETLEEDSNYVLQLAGVGSYLKFPTYAKSTRTTDEMTTEFFQNISSEHQTQLYEVYKLDFLMFNYSVPSYLKLE

SEQ ID NO: 2898 - protein, 72 aa, Homo Sapiens
MKPALLEVMRMNRICRMVLATCLGSFILVIFYFQIMRRNPFGVDICCRKGSRSPLQELYNPIQVSFKHSVSM

SEQ ID NO: 2899 - protein, 352 aa, Homo Sapiens
MKPALLEVMRMNRICRMVLATCLGSFILVIFYFQSMLHPVMRRNPFGVDICCRKGSRSPLQELYNPIQLELSNTAVLHQMRRDQVTDTCRANSATSRKRRVLTPNDLKHLVVDEDHELIYCYVPKVACTNWKRLMMVLTGRGKYSDPMEIPANEAHVSANLKTLNQYSIPEINHRLKSYMKFLFVREPFERLVSAYRNKFTQKYNISFHKRYGTKIIKRQRKNATQEALRKGDDVKFEEFVAYLIDPHTQREEPFNEHWQTVYSLCHPCHIHYDLVGKYETLEEDSNYVLQLAGVGSYLKFPTYAKSTRTTDEMTTEFFQNISSEHQTQLYEVYKLDFLMFNYSVPSYLKLE

SEQ ID NO: 2900 - protein, 77 aa, Homo Sapiens
MKPALLEVMRMNRICRMVLATCLGSFILVIFYFQSMLHPVMRRNPFGVDICCRKGSRSPLQELYNPIQVSFKHSVSM

SEQ ID NO: 2901 - protein, 158 aa, Homo Sapiens
MRRNPFGVDICCRKGSRSPLQELYNPIQLELSNTAVLHQMRRDQVTDTCRANSATSRKRRVLTPNDLKHLVVDEDHELIYCYVPKVACTNWKRLMMVLTGRGKYSDPMEIPANEAHVSANLKTLNQYSIPEINHRLKSYMKFLFVREPFERLVSAYRN

SEQ ID NO: 2902 - protein, 225 aa, Homo Sapiens [sequence omitted]

SEQ ID NO: 2903 - protein, 341 aa, Homo Sapiens
MGRRCCRRRVLAAACLGAALLLLCAAPRSLRPAFGNRALGSSWLGGEKRSPLQKLYDLDQDPRSTLAKVHRQRRDLLNSACSRHSRRQRLLQPEDLRHVLVDDAHGLLYCYVPKVACTNWKRVLLALSGQARGDPRAISAQEAHAPGRLPSLADFSPAEINRRLRAYLAFLFVREPFERLASAYRNKLARPYSAAFQRRYGARIVQRLRPRALPDARARGHDVRFAEFLAYLLDPRTRREEPFNEHWERAHALCHPCRLRYDVVGKFETLAEDAAFVLGLAGASDLSFPGPPRPRGAAASRDLAARLFRDISPFYQRRLFDLYKMDFLLFNYSAPSYLRLL

SEQ ID NO: 2904 - protein, 386 aa, Homo Sapiens
MLLPKKMKLLLFLVSQMAILALFFHMYSHNISSLSMKAQPERMHVLVLSSWRSGSSFVGQLFGQHPDVFYLMEPAWHVWMTFKQSTAWMLHMAVRDLIRAVFLCDMSVFDAYMEPGPRRQSSLFQWENSRALCSAPACDIIPQDEIIPRAHCRLLCSQQPFEVVEKACRSYSHVVLKEVRFFNLQSLYPLLKDPSLNLHIVHLVRDPRAVFRSRERTKGDLMIDSRIVMGQHEQKLKKEDQPYYVMQVICQSQLEIYKTIQSLPKALQERYLLVRYEDLARAPVAQTSRMYEFVGLEFLPHLQTWVHNITRGKGMGDHAFHTNARDALNVSQAWRWSLPYEKVSRLQKACGDAMNLLGYRHVRSEQEQRNLLLDLLSTWTVPEQIH

SEQ ID NO: 2905 - protein, 386 aa, Homo Sapiens; identical to SEQ ID NO: 2904

SEQ ID NO: 2906 - protein, 411 aa, Homo Sapiens
MGMRARVPKVAHSTRRPPAARMWLPRFSSKTVTVLLLAQTTCLLLFIISRPGPSSPAGGEDRVHVLVLSSWRSGSSFLGQLFSQHPDVFYLMEPAWHVWTTLSQGSAATLHMAVRDLMRSIFLCDMDVFDAYMPQSRNLSAFFNWATSRALCSPPACSAFPRGTISKQDVCKTLCTRQPFSLAREACRSYSHVVLKEVRFFNLQVLYPLLSDPALNLRIVHLVRDPRAVLRSREAAGPILARDNGIVLGTNGKWVEADPHLRLIREVCRSHVRIAEAATLKPPPFLRGRYRLVRFEDLAREPLAEIRALYAFTGLTLTPQLEAWIHNITHGSGIGKPIEAFHTSSRNARNVSQAWRHALPFTKILRVQEVCAGALQLLGYRPVYSADQQRDLTLDLVLPRGPDHFSWASPD

SEQ ID NO: 2907 - protein, 99 aa, Homo Sapiens
MSRHLPWICDQRCSSPSSPGRWPPAARMWLPRFSSKTVTVLLLAQTTCLLLFIISRPGPSSPAGGEDRVHVLVLSSWRSGSSFLGQLFSQHPDVFYLME

SEQ ID NO: 2908 - protein, 395 aa, Homo Sapiens
MWLPRVSSTAVTALLLAQTFLLLFLVSRPGPSSPAGGEARVHVLVLSSWRSGSSFVGQLFNQHPDVFYLMEPAWHVWTTLSQGSAATLHMAVRDLVRSVFLCDMDVFDAYLPWRRNLSDLFQWAVSRALCSPPACSAFPRGAISSEAVCKPLCARQSFTLAREACRSYSHVVLKEVRFFNLQVLYPLLSDPALNLRIVHLVRDPRAVLRSREQTAKALARDNGIVLGTNGTWVEADPGLRVVREVCRSHVRIAEAATLKPPPFLRGRYRLVRFEDLAREPLAEIRALYAFTGLSLTPQLEAWIHNITHGSGPGARREAFKTSSRNALNVSQAWRHALPFAKIRRVQELCAGALQLLGYRPVYSEDEQRNLALDLVLPRGLNGFTWASSTASHPRN

SEQ ID NO: 2909 - protein, 395 aa, Homo Sapiens; identical to SEQ ID NO: 2908

SEQ ID NO: 2910 - protein, 486 aa, Homo Sapiens
MKGRRRRRREYCKFALLLVLYTLVLLLVPSVLDGGRDGDKGAEHCPGLQRSLGVWSLEAAAAGEREQGAEARAAEEGGANQSPRFPSNLSGAVGEAVSREKQHIYVHATWRTGSSFLGELFNQHPDVFYLYEPMWHLWQALYPGDAESLQGALRDMLRSLFRCDFSVLRLYAPPGDPAARAPDTANLTTAALFRWRTNKVICSPPLCPGAPRARAEVGLVEDTACERSCPPVAIRALEAECRKYPVVVIKDVRLLDLGVLVPLLRDPGLNLKVVQLFRDPRAVHNSRLKSRQGLLRESIQVLRTRQRGDRFHRVLLAHGVGARPGGQSRALPAAPRADFFLTGALEVICEAWLRDLLFARGAPAWLRRRYLRLRYEDLVRQPRAQLRRLLRFSGLRALAALDAFALNMTRGAAYGADRPFHLSARDAREAVHAWRERLSREQVRQVEAACAPAMRLLAYPRSGEEGDAEQPREGETPLEMDADGAT

SEQ ID NO: 2911 - protein, 178 aa, Homo Sapiens
MTLRPGTMRLACMFSSILLFGAAGLLLFISLQDPTELAPQQVPGIKFNIRPRQPHHDLPPGGSQDGDLKEPTERVTRDLSSGAPRGRNLPAPDQPQPPLQRGTRLRLRQRRRRLLIKKMPAAATIPANSSDAPFIRPGPGTLDGRWVSLHRSQQERKRVMQEACAKYRASSSRRAVTP

SEQ ID NO: 2912 - protein, 424 aa, Homo Sapiens
MTLRPGTMRLACMFSSILLFGAAGLLLFISLQDPTELAPQQVPGIKFNIRPRQPHHDLPPGGSQDGDLKEPTERVTRDLSSGAPRGRNLPAPDQPQPPLQRGTRLRLRQRRRRLLIKKMPAAATIPANSSDAPFIRPGPGTLDGRWVSLHRSQQERKRVMQEACAKYRASSSRRAVTPRHVSRIFVEDRHRVLYCEVPKAGCSNWKRVLMVLAGLASSTADIQHNTVHYGSALKRLDTFDRQGILHRLSTYTKMLFVREPFERLVSAFRDKFEHPNSYYHPVFGKAILARYRANASREALRTGSGVRFPEFVQYLLDVHRPVGMDIHWDHVSRLCSPCLIDYDFVGKFESMEDDANFFLSLIRAPRNLTFPRFKDRHSQEARTTARIAHQYFAQLSALQRQRTYDFYYMDYLMFNYSKPFADLY

SEQ ID NO: 2913 - protein, 424 aa, Homo Sapiens; identical to SEQ ID NO: 2912

SEQ ID NO: 2914 - protein, 424 aa, Homo Sapiens; identical to SEQ ID NO: 2912

SEQ ID NO: 2915 - protein, 53 aa, Homo Sapiens
EDVEVGRCVRRFAGVQCVWSYEDKRVRKPLLCNELKRCLSPNGKLSLCSSDGL

SEQ ID NO: 2916 - protein, 802 aa, Homo Sapiens
MAARGRRAWLSVLLGLVLGFVLASRLVLPRASELKRAGPRRRASPEGCRSGQAAASQAGGARGDARGAQLWPPGSDPDGGPRDRNFLFVGVMTAQKYLQTRAVAAYRTWSKTIPGKVQFFSSEGSDTSVPIPVVPLRGVDDSYPPQKKSFMMLKYMHDHYLDKYEWFMRADDDVYIKGDRLENFLRSLNSSEPLFLGQTGLGTTEEMGKLALEPGENFCMGGPGVIMSREVLRRMVPHIGKCLREMYTTHEDVEVGRCVRRFAGVQCVWSYEMQQLFYENYEQNKKGYIRDLHNSKIHQAITLHPNKNPPYQYRLHSYMLSRKISELRHRTIQLHREIVLMSKYSNTEIHKEDLQLGIPPSFMRFQPRQREEILEWEFLTGKYLYSAVDGQPPRRGMDSAQREALDDIVMQVMEMINANAKTRGRIIDFKEIQYGYRRVNPMYGAEYILDLLLLYKKHKGKKMTVPVRRHAYLQQTFSKIQFVEHEELDAQELAKRINQESGSLSFLSNSLKKLVPFQLPGSKSEHKEPKDKKINILIPLSGRFDMFVRFMGNFEKTCLIPNQNVKLVVLLFNSDSNPDKAKQVELMRDYRIKYPKADMQILPVSGEFSRALALEVGSSQFNNESLLFFCDVDLVFTTEFLQRCRANTVLGQQIYFPIIFSQYDPKIVYSGKVPSDNHFAFTQKTGFWRNYGFGITCIYKGDLVRVGGFDVSIQGWGLEDVDLFNKVVQAGLKTFRSQEVGVVHVHHPVFCDPNLDPKQYKMCLGSKASTYGSTQQLAEMWLEKNDPSYSKSSNNNGSVRTA

SEQ ID NO: 2917 - protein, 882 aa, Homo Sapiens
MAVRSRRPWMSVALGLVLGFTAASWLIAPRVAELSERKRRGSSLCSYYGRSAAGPRAGAQQPLPQPQSRPRQEQSPPPARQDLQGPPLPEAAPGITSFRSSPWQQPPPLQQRRRGREPEGATGLPGAPAAEGEPEEEDGGAAGQRRDGRPGSSHNGSGDGGAAAPSARPRDFLYVGVMTAQKYLGSRALAAQRTWARFIPGRVEFFSSQQPPNAGQPPPPLPVIALPGVDDSYPPQKKSFMMIKYMHDHYLDKYEWFMRADDDVYIKGDKLEEFLRSLNSSKPLYLGQTGLGNIEELGKLGLEPGENFCMGGPGMIFSREVLRRMVPHIGECLREMYTTHEDVEVGRCVRRFGGTQCVWSYEMQQLFHENYEHNRKGYIQDLHNSKIHAAITLHPNKRPAYQYRLHNYMLSRKISELRYRTIQLHRESALMSKLSNTEVSKEDQQLGVIPSFNHFQPRERNEVIEWEFLTGKLLYSAAENQPPRQSLSSILRTALDDTVLQVMEMINENAKSRGRLIDFKEIQYGYRRVNPMHGVEYILDLLLLYKRHKGRKLTVPVRRHAYLQQLFSKPFFRETEELDVNSLVESINSETQSFSFISNSLKILSSFQGAKEMGGHNEKKVHILVPLIGRYDIFLRFMENFENMCLIPKQNVKLVIILFSRDSGQDSSKHIELIKGYQNKYPKAEMTLIPMKGEFSRGLGLEMASAQFDNDTLLLFCDVDLIFREDFLQRCRDNTIQGQQVYYPIIFSQYDPKVTNGGNPPTDDYFIFSKKTGFWRDYGYGITCIYKSDLLGAGGFDTSIQGWGLEDVDLYNKVILSGLRPFRSQEVGVVHIFHPVHCDPNLDPKQYKMCLGSKASTFASTMQLAELWLEKHLGVRYNRTLS

SEQ ID NO: 2918 - protein, 65 aa, Homo Sapiens
HILYGKIIHLEKPFAVLVKHTPGDQDCDELGRETGTRYLVTALIKDKILFKTRPKPIITSVPKKV

SEQ ID NO: 2919 - protein, 524 aa, Homo Sapiens
MKEPRIFPRERPTPWTRAPLPPRGRLDGSLGPQGGPVLNTGHPLGVNSDPFLMAAGSLGGNLTPFPRNPSPFPASSGSLASNPAPFPAGARDPSMASFPRGMNPTGTGAVSFPRPGGLLGPGPGPGPTLNPRTGALPGPGPLSNPRLGGLPGPGPMSNPRAGGLLGAGPDPRGGGPMGPGSGPNLRAGVLLTSGNGPPNPRPVGLGPGPNPNLRSGFLGTNPAPRSGVFPGPGLGPNPRPSGLGPGPNLDARAGGLLGTGSGLNLRMAGPQGLDLAPILRAAGLLGANSASFSQASGNMGTSPSSMARVPGPMGPNSGPSSRGIGLPGPNPSPMSRAPGPIGPNSAHFSRPVGPMGVNANPFPRGAGSSAFSQSSGTLASNPATFQRSAGLQGSNPTIFPRASGPLGPNPANFPRATGLQGPSPTTFPRSTGPLGPGQVTFPRPAAGHLGPSPAGPVGINPAPFTRPTGTLGLNPASFPRMNGPAGKSFVPFPRVGSLPGTNPAAFPRPGGPMAAMYPNGMLPP

SEQ ID NO: 2920 - protein, 12 aa, Homo Sapiens
MVQIVISRESLC

SEQ ID NO: 2921 - protein, 12 aa, Homo Sapiens
MVQIVISRESLC

SEQ ID NO: 2922 - protein, 121 aa, Homo Sapiens
MVQIVISSARAGGLAEWVLMELQGEIEARYSTGLAGNLLGDLHYTTEGIPVLIVGHHILYGKIIHLEKPFAVLVKHTPGDQDCDELGRETGTRYLVTALIKDKILFKTRPKPIITSVPKKV

SEQ ID NO: 2923 - protein, 121 aa, Homo Sapiens; identical to SEQ ID NO: 2922

SEQ ID NO: 2924 - protein, 58 aa, Homo Sapiens
MVQIVISSARAGGLAEWVLMELQGEIEARYSTGLAGNLLGDLHYTTEGYIGLQVPVHM

SEQ ID NO: 2925 - protein, 75 aa, Homo Sapiens
MVQIVISSARAGGLAEWVLMELQGEIEARYSTGLAGNLLGDLHYTTELHQAHWLQIQHLSRLVLVTQVWLLFQEG

SEQ ID NO: 2926 - protein, 99 aa, Homo Sapiens
MVQIVISSARAGGLAEWVLMELQGEIEARYSTGLAGNLLGDLHYTTEVRGLFFPCLMPQESKLHQGGAPRTQSEDCLRFVIQGLANLRCSLLVLPLPLQ

SEQ ID NO: 2927 - protein, 144 aa, Homo Sapiens
  misc_feature (1)..(1): Xaa can be any naturally occurring amino acid
XAVLAAAATAAGGSVVARWPRGAALGGRHCSARAGGLAEWVLMELQGEIEARYSTGLAGNLLGDLHYTTEGIPVLIVGHHILYGKIIHLEKPFAVLVKHTPGDQDCDELGRETGTRYLVTALIKDKILFKTRPKPIITSVPKKV

SEQ ID NO: 2928 - protein, 104 aa, Homo Sapiens
  misc_feature (1)..(1): Xaa can be any naturally occurring amino acid
XSARGGGDGGGRFGCRPLAARRRARRPPLQGIPVLIVGHHILYGKIIHLEKPFAVLVKHTPGDQDCDELGRETGTRYLVTALIKDKILFKTRPKPIITSVPKKV

SEQ ID NO: 2929 - protein, 1184 aa, Homo Sapiens
MVGTKAWVFSFLVLEVTSVLGRQTMLTQSVRRVQPGKKNPSIFAKPADTLESPGEWTTWFNIDYPGGKGDYERLDAIRFYYGDRVCARPLRLEARTTDWTPAGSTGQVVHGSPREGFWCLNREQRPGQNCSNYTVRFLCPPGSLRRDTERIWSPWSPWSKCSAACGQTGVQTRTRICLAEMVSLCSEASEEGQHCMGQDCTACDLTCPMGQVNADCDACMCQDFMLHGAVSLPGGAPASGAAIYLLTKTPKLLTQTDSDGRFRIPGLCPDGKSILKITKVKFAPIVLTMPKTSLKAATIKAEFVRAETPYMVMNPETKARRAGQSVSLCCKATGKPRPDKYFWYHNDTLLDPSLYKHESKLVLRKLQQHQAGEYFCKAQSDAGAVKSKVAQLIVIASDETPCNPVPESYLIRLPHDCFQNATNSFYYDVGRCPVKTCAGQQDNGIRCRDAVQNCCGISKTEEREIQCSGYTLPTKVAKECSCQRCTETRSIVRGRVSAADNGEPMRFGHVYMGNSRVSMTGYKGTFTLHVPQDTERLVLTFVDRLQKFVNTTKVLPFNKKGSAVFHEIKMLRRKKPITLEAMETNIIPLGEVVGEDPMAELEIPSRSFYRQNGEPYIGKVKASVTFLDPRNISTATAAQTDLNFINDEGDTFPLRTYGMFSVDFRDEVTSEPLNAGKVKVHLDSTQVKMPEHISTVKLWSLNPDTGLWEEEGDFKFENQRRNKREDRTFLVGNLEIRERRLFNLDVPESRRCFVKVRAYRSERFLPSEQIQGVVISVINLEPRTGFLSNPRAWGRFDSVITGPNGACVPAFCDDQSPDAYSAYVLASLAGEELQAVESSPKFNPNAIGVPQPYLNKLNYRRTDHEDPRVKKTAFQISMAKPRPNSAEESNGPIYAFENLRACEEAPPSAAHFRFYQIEGDRYDYNTVPFNEDDPMSWTEDYLAWWPKPMEFRACYIKVKIVGPLEVNVRSRNMGGTHRQTVGKLYGIRDVRSTRDRDQPNVSAACLEFKCSGMLYDQDRVDRTLVKVIPQGSCRRASVNPMLHEYLVNHLPLAVNNDTSEYTMLAPLDPLGHNYGIYTVTDQDPRTAKEIALGRCFDGTSDGSSRIMKSNVGVALTFNCVERQVGRQSAFQYLQSTPAQSPAAGTVQGRVPSRRQQRASRGGQRQGGVVASLRFPRVAQQPLIN

SEQ ID NO: 2930 - protein, 1162 aa, Homo Sapiens
MASLLPLLCLCVVAAHLAGARDATPTEEPMATALGLERRSVYTGQPSPALEDWEARAVPAEASEWTSWFNVDHPGGDGDFESLAAIRFYYGPARVCPRPLALEARTTDWALPSAVGERVHLNPTRGFWCLNREQPRGRRCSNYHVRFRCPLEASWGAWGPWGPCSGSCGPGRRLRRRHCPSPAGDACPGRPLEAQKCVRPRCPGCSLDTCECPDHILLGSVVTPSGQPLLGARVSLRDQPGTVATSDAHGTFRVPGVCADSRANIRAQMDGFSAGEAQAQANGSISVVTIILDKLEKPYLVKHPESRVREAGQNVTFCCKASGTPMPKKYSWFHNGTLLDRRAHGYGAHLELRGLRPDQAGIYHCKAWNEAGAVRSGTARLTVLAPGQPACDPRPREYLIKLPEDCGQPGSGPAYLDVGLCPDTRCPSLAGSSPRCGDASSRCCSVRRLERREIHCPGYVLPVKVVAECGCQKCLPPRGLVRGRVVAADSGEPLRFARILLGQEPIGFTAYQGDFTIEVPPSTQRLVVTFVDPSGEFMDAVRVLPFDPRGAGVYHEVKAMRKKAPVILHTSQSNTIPLGELEDEAPLGELVLPSGAFRRADGKPYSGPVEARVTFVDPRDLTSAASAPSDLRFVDSDGELAPLRTYGMFSVDLRAPGSAEQLQVGPVAVRVAASQIHMPGHVEALKLWSLNPETGLWEEESGFRREGSSGPRVRREERVFLVGNVEIRERRLFNLDVPERRRCFVKVRAYANDKFTPSEQVEGVVVTLVNLEPAPGFSANPRAWGRFDSAVTGPNGACLPAFCDADRPDAYTALVTATLGGEELEPAPSLPRPLPATVGVTQPYLDRLGYRRTDHDDPAFKRNGFRINLAKPRPGDPAEANGPVYPWRSLRECQGAPVTASHFRFARVEADKYEYNVVPFREGTPASWTGDLLAWWPNPQEFRACFLKVKIQGPQEYMVRSHNAGGSHPRTRGQLYGLRDARSVRDPERPGTSAACVEFKCSGMLFDQRQVDRTLVTIMPQGSCRRVAVNGLLRDYLTRHPPPVPAEDPAAFSMLAPLDPLGHNYGVYTVTDQSPRLAKEIAIGRCFDGSSDGFSREMKADAGTAVTFQCREPPAGRPSLFQRLLESPATALGDIRREMSEAAQAQARASGPLRTRRGRVRQ

SEQ ID NO: 2931 - protein, 1156 aa, Homo Sapiens
MASLLPLLCLCVVAAHLAGARDATPTEEPMATALGLERRSVYTGQPSPALEDWEEASEWTSWFNVDHPGGDGDFESLAAIRFYYGPARVCPRPLALEARTTDWALPSAVGERVHLNPTRGFWCLNREQPRGRRCSNYHVRFRCPLEASWGAWGPWGPCSGSCGPGRRLRRRHCPSPAGDACPGRPLEAQKCVRPRCPGCSLDTCECPDHILLGSVVTPSGQPLLGARVSLRDQPGTVATSDAHGTFRVPGVCADSRANIRAQMDGFSAGEAQAQANGSISVVTIILDKLEKPYLVKHPESRVREAGQNVTFCCKASGTPMPKKYSWFHNGTLLDRRAHGYGAHLELRGLRPDQAGIYHCKAWNEAGAVRSGTARLTVLAPGQPACDPRPREYLIKLPEDCGQPGSGPAYLDVGLCPDTRCPSLAGSSPRCGDASSRCCSVRRLERREIHCPGYVLPVKVVAECGCQKCLPPRGLVRGRVVAADSGEPLRFARILLGQEPIGFTAYQGDFTIEVPPSTQRLVVTFVDPSGEFMDAVRVLPFDPRGAGVYHEVKAMRKKAPVILHTSQSNTIPLGELEDEAPLGELVLPSGAFRRADGKPYSGPVEARVTFVDPRDLTSAASAPSDLRFVDSDGELAPLRTYGMFSVDLRAPGSAEQLQVGPVAVRVAASQIHMPGHVEALKLWSLNPETGLWEEESGFRREGSSGPRVRREERVFLVGNVEIRERRLFNLDVPERRRCFVKVRAYANDKFTPSEQVEGVVVTLVNLEPAPGFSANPRAWGRFDSAVTGPNGACLPAFCDADRPDAYTALVTATLGGEELEPAPSLPRPLPATVGVTQPYLDRLGYRRTDHDDPAFKRNGFRINLAKPRPGDPAEANGPVYPWRSLRECQGAPVTASHFRFARVEADKYEYNVVPFREGTPASWTGDLLAWWPNPQEFRACFLKVKIQGPQEYMVRSHNAGGSHPRTRGQLYGLRDARSVRDPERPGTSAACVEFKCSGMLFDQRQVDRTLVTIMPQGSCRRVAVNGLLRDYLTRHPPPVPAEDPAAFSMLAPLDPLGHNYGVYTVTDQSPRLAKEIAIGRCFDGSSDGFSREMKADAGTAVTFQCREPPAGRPSLFQRLLESPATALGDIRREMSEAAQAQARASGPLRTRRGRVRQ

SEQ ID NO: 2932 - protein, 113 aa, Homo Sapiens
MDNVQPKIKHRPFCFSVKGHVKMLRLALTVTSMTFFIIAQAPEPYIVITGFEVTVILFFILLYVLRLDRLMKWLFWPLLDIINSLVTTVFMLIVSVLALIPETTTLTVGGGLF

SEQ ID NO: 2933 - protein, 152 aa, Homo Sapiens
MDNVQPKIKHRPFCFSVKGHVKMLRLALTVTSMTFFIIAQAPEPYIVITGFEVTVILFFILLYVLRLDRLMKWLFWPLLDIINSLVTTVFMLIVSVLALIPETTTLTVGGGVFALVTAVCCLADGALIYRKLLFNPSGPYQKKPVHEKKEVL

SEQ ID NO: 2934 - protein, 120 aa, Homo Sapiens
MDNVQPKIKHRPFCFSVKGHVKMLRLALTVTSMTFFIIAQAPEPYIVITGFEVTVILFFILLYVLRLDRLMKWLFWPLLVFALVTAVCCLADGALIYRKLLFNPSGPYQKKPVHEKKEVL

SEQ ID NO: 2935 - protein, 99 aa, Homo Sapiens
MDNVQPKIKHRPFCFSVKGHVKMLRLDIINSLVTTVFMLIVSVLALIPETTTLTVGGGVFALVTAVCCLADGALIYRKLLFNPSGPYQKKPVHEKKEVL

SEQ ID NO: 2936 - protein, 33 aa, Homo Sapiens
MDNVQPKIKHRPFCFSVKGHVKMLRLHCLVVFM

SEQ ID NO: 2937 - protein, 67 aa, Homo Sapiens
MDNVQPKIKHRPFCFSVKGHVKMLRLVFALVTAVCCLADGALIYRKLLFNPSGPYQKKPVHEKKEVL

SEQ ID NO: 2938 - protein, 69 aa, Homo Sapiens
MAGPFSRLLSARPGLRLLALAGAGSLAAGFLLRPEPVRAASERRRLYPPRLFPSSIRSVVSWEERTEQI

SEQ ID NO: 2939 - protein, 148 aa, Homo Sapiens
MAGPFSRLLSARPGLRLLALAGAGSLAAGFLLRPEPVRAASERRRLYPPSAEYPDLRKHNNCMASHLTPAVYARLCDKTTPTGWTLDQCIQTGVDNPGHPFIKTVGMVAGDEETYEVFADLFDPVIQERHNGYDPRTMKHTTDLDASK

SEQ ID NO: 2940 - protein, 417 aa, Homo Sapiens
MAGPFSRLLSARPGLRLLALAGAGSLAAGFLLRPEPVRAASERRRLYPPSAEYPDLRKHNNCMASHLTPAVYARLCDKTTPTGWTLDQCIQTGVDNPGHPFIKTVGMVAGDEETYEVFADLFDPVIQERHNGYDPRTMKHTTDLDASKIRSGYFDERYVLSSRVRTGRSIRGLSLPPACTRAERREVERVVVDALSGLKGDLAGRYYRLSEMTEAEQQQLIDDHFLFDKPVSPLLTAAGMARDWPDARGIWHNNEKSFLIWVNEEDHTRVISMEKGGNMKRVFERFCRGLKEVERLIQERGWEFMWNERLGYILTCPSNLGTGLRAGVHIKLPLLSKDSRFPKILENLRLQKRGTGGVDTAATGGVFDISNLDRLGKSEVELVQLVIDGVNYLIDCERRLERGQDIRIPTPVIHTKH

SEQ ID NO: 2941 - protein, 417 aa, Homo Sapiens; identical to SEQ ID NO: 2940

SEQ ID NO: 2942 - protein, 298 aa, Homo Sapiens
MAGPFSRLLSARPGLRLLALAGAGSLAAGFLLRPEPVRAASERRRLYPPSAEYPDLRKHNNCMASHLTPAVYARLCDKTTPTGWTLDQCIQTGVDNPGHPFIKTVGMVAGDEETYEVFADLFDPVIQERHNGYDPRTMKHTTDLDASKIRSGYFDERYVLSSRVRTGRSIRGLSLPPACTRAERREVERVVVDALSGLKGDLAGRYYRLSEMTEAEQQQLIDDHFLFDKPVSPLLTAAGMARDWPDARGIWHNNEKSFLIWVNEEDHTRVISMEKGGNMKRVFERFCRGLKEVVVGIK

SEQ ID NO: 2943 - protein, 222 aa, Homo Sapiens
MAGPFSRLLSARPGLRLLALAGAGSLAAGFLLRPEPVRAASERRRLYPPSQTWPTGQLPGNCTRSRRLCPPSMVTGYPLPSAEYPDLRKHNNCMASHLTPAVYARLCDKTTPTGWTLDQCIQTGVDNPGHPFIKTVGMVAGDEETYEVFADLFDPVIQERHNGYDPRTMKHTTDLDASKIRSGYFDERYVLSSRVRTGRSIRGLSLPPACTRAERREVERVV

SEQ ID NO: 2944 - protein, 58 aa, Homo Sapiens
MAGPFSRLLSARPGLRLLALAGAGSLAAGFLLRPEPVRAASERRRLYPPRYLLTCLTL

SEQ ID NO: 2945 - protein, 103 aa, Homo Sapiens
MAGPFSRLLSARPGLRLLALAGAGSLAAGFLLRPEPVRAASERRRLYPPSAEYPDLRKHNNCMASHLTPAVYARLCDKTTPTGWTLDQCIQTGVDNPGHPFIK

SEQ ID NO: 2946 - protein, 129 aa, Homo Sapiens
MAGPFSRLLSARPGLRLLALAGAGSLAAGFLLRPEPVRAASERRRLYPPSAEYPDLRKHNNCMASHLTPAVYARLCDKTTPTGWTLDQCIQTGVDNPGHPFIKTVGMVAGDEETYEVFADLFDPVIQER

SEQ ID NO: 2947 - protein, 241 aa, Homo Sapiens
MAGPFSRLLSARPGLRLLALAGAGSLAAGFLLRPEPVRAASERRRLYPPSAEYPDLRKHNNCMASHLTPAVYARLCDKTTPTGWTLDQCIQTGVDNPGHPFIKTVGMVAGDEETYEVFADLFDPVIQERHNGYDPRTMKHTTDLDASKIRSGYFDERYVLSSRVRTGRSIRGLSLPPACTRAERREVERVVVDALSGLKGDLAGRYYRLSEMTEAEQQQLIDDHFLFDKPVSPLLTAAGMA

SEQ ID NO: 2948 - protein, 417 aa, Homo Sapiens; identical to SEQ ID NO: 2940

SEQ ID NO: 2949 - protein, 298 aa, Homo Sapiens; identical to SEQ ID NO: 2942

SEQ ID NO: 2950 - protein, 417 aa, Homo Sapiens; identical to SEQ ID NO: 2940

SEQ ID NO: 2951 - protein, 298 aa, Homo Sapiens; identical to SEQ ID NO: 2942

SEQ ID NO: 2952 - protein, 96 aa, Homo Sapiens
MAGPFSRLLSARPGLRLLALAGAGSLAAGFLLRPEPVRAASERRRLYPPSQTWPTGQLPGNCTRSRRLCPPSMVTGYPLPSAEYPDLRKHNNCMAS

SEQ ID NO: 2953 - protein, 203 aa, Homo Sapiens
MAGPFSRLLSARPGLRLLALAGAGSLAAGFLLRPEPVRAASERRRLYPPSQTWPTGQLPGNCTRSRRLCPPSMVTGYPLPSAEYPDLRKHNNCMASHLTPAVYARLCDKTTPTGWTLDQCIQTGVDNPGHPFIKTVGMVAGDEETYEVFADLFDPVIQERHNGYDPRTMKHTTDLDASKIRSGYFDERYVLSSRVRTGRSIRG

SEQ ID NO: 2954 - protein, 914 aa, Homo Sapiens
MGPFKSSVFILILHLLEGALSNSLIQLNNNGYEGIVVAIDPNVPEDETLIQQIKDMVTQASLYLLEATGKRFYFKNVAILIPETWKTKADYVRPKLETYKNADVLVAESTPPGNDEPYTEQMGNCGEKGERIHLTPDFIAGKKLAEYGPQGRAFVHEWAHLRWGVFDEYNNDEKFYLSNGRIQAVRCSAGITGTNVVKKCQGGSCYTKRCTFNKVTGLYEKGCEFVLQSRQTEKASIMFAQHVDSIVEFCTEQNHNKEAPNKQNQKCNLRSTWEVIRDSEDFKKTTPMTTQPPNPTFSLLQIGQRIVCLVLDKSGSMATGNRLNRLNQAGQLFLLQTVELGSWVGMVTFDSAAHVQNELIQINSGSDRDTLAKRLPAAASGGTSICSGLRSAFTVIRKKYPTDGSEIVLLTDGEDNTISGCFNEVKQSGAIIHTVALGPSAAQELEELSKMTGGLQTYASDQVQNNGLIDAFGALSSGNGAVSQRSIQLESKGLTLQNSQWMNGTVIVDSTVGKDTLFLITWTMQPPQILLWDPSGQKQGGFVVDKNTKMAYLQIPGIAKVGTWKYSLQASSQTLTLTVTSRASNATLPPITVTSKTNKDTSKFPSPLVVYANIRQGASPILRASVTALIESVNGKTVTLELLDNGAGADATKDDGVYSRYFTTYDTNGRYSVKVRALGGVNAARRRVIPQQSGALYIPGWIENDEIQWNPPRPEINKDDVQHKQVCFSRTSSGGSFVASDVPNAPIPDLFPPGQITDLKAEIHGGSLINLTWTAPGDDYDHGTAHKYIIRISTSILDLRDKFNESLQVNTTALIPKEANSEEVFLFKPENITFENGTDLFIAIQAVDKVDLKSEISNIARVSLFIPPQTPPETPSPDETSAPCPNIHINSTIPGIHILKIMWKWIGELQLSIA

SEQ ID NO: 2955 - protein, 914 aa, Homo Sapiens; identical to SEQ ID NO: 2954

SEQ ID NO: 2956 - protein, 225 aa, Homo Sapiens
MDLRAGDSWGMLACLCTVLWHLPAVPALNRTGDPGPGPSIQKTYDLTRYLEHQLRSLAGTYLNYLGPPFNEPDFNPPRLGAETLPRATVDLEVWRSLNDKLRLTQNYEAYSHLLCYLRGLNRQAATAELRRSLAHFCTSLQGLLGSIAGVMAALGYPLPQPLPGTEPTWTPGPAHSDFLQKMDDFWLLKELQTWLWRSAKDFNRLKKKMQPPAAAVTLHLGAHGF

SEQ ID NO: 2957 - protein, 215 aa, Homo Sapiens
MLACLCTVLWHLPAVPALNRTGDPGPGPSIQKTYDLTRYLEHQLRSLAGTYLNYLGPPFNEPDFNPPRLGAETLPRATVDLEVWRSLNDKLRLTQNYEAYSHLLCYLRGLNRQAATAELRRSLAHFCTSLQGLLGSIAGVMAALGYPLPQPLPGTEPTWTPGPAHSDFLQKMDDFWLLKELQTWLWRSAKDFNRLKKKMQPPAAAVTLHLGAHGF

SEQ ID NO: 2958 - protein, 170 aa, Homo Sapiens
MSMAVETFGFFMATVGLLMLGVTLPNSYWRVSTVHGNVITTNTIFENLWFSCATDSLGVYNCWEFPSMLALSGIAGLRCTNIGGLELSRKAKLAATAGALHILAGICGMVAISWYAFNITRDFFDPLYPGTKYELGPALYLGWSASLISILGGLCLCSACCCGSDEDPAA

SEQ ID NO: 2959 - protein, 148 aa, Homo Sapiens
MSMAVETFGFFMATVGLLMLGVTLPNSYWRVSTVHGNVITTNTIFENLWFSCATDSLGVYNCWEFPSMLALSGICGMVAISWYAFNITRDFFDPLYPGTKYELGPALYLGWSASLISILGGLCLCSACCCGSDEDPAASARRPYQAPV

SEQ ID NO: 2960 - protein, 128 aa, Homo Sapiens
MSMAVETFGFFMATVGLLMLGVTLPNSYWRVSTVHGNVITTNTIFENLWFSCATDSLGVYNCWEFPSMLALSGSTDSPASLSGGTGLLVRLMSIKGPCEGRRLASCRLSVRCKEAVCVQGIFRPAGHS

SEQ ID NO: 2961 - protein, 228 aa, Homo Sapiens
MSMAVETFGFFMATVGLLMLGVTLPNSYWRVSTVHGNVITTNTIFENLWFSCATDSLGVYNCWEFPSMLALSGYIQACRALMITAILLGFLGLLLGIAGLRCTNIGGLELSRKAKLAATAGALHILAGICGMVAISWYAFNITRDFFDPLYPGTKYELGPALYLGWSASLISILGGLCLCSACCCGSDEDPAASARRPYQAPVSVMPVATSDQEGDSSFGKYGRNAYV

SEQ ID NO: 2962 - protein, 228 aa, Homo Sapiens; identical to SEQ ID NO: 2961

SEQ ID NO: 2963 - protein, 106 aa, Homo Sapiens
  misc_feature (1)..(1): Xaa can be any naturally occurring amino acid
XGNVITTNTIFENLWFSCATDSLGVYNCWEFPSMLALSGYIQACRALMITAILLGFLGLLLGIAGLRCTNIGGLELSRKAKLAATAGALHILADLLAANQPIGSVS

SEQ ID NO: 2964 - protein, 140 aa, Homo Sapiens
MANSGLQLLGFSMALLGWVGLVACTAIPQWQMSSYAGDNIITAQAMYKGLWMDCVTQSTGMMSCKIGLAGHSSPNGGLPGAGLPGHVCGHDGHEVHALWGRRQSEEGPYSHGWRHNFHRGRSCRLGSLLLVWPSDCHRLL

SEQ ID NO: 2965 - protein, 129 aa, Homo Sapiens
MANSGLQLLGFSMALLGWVGLVACTAIPQWQMSSYAGDNIITAQAMYKGLWMDCVTQSTGMMSCKMYDSVLALSAALQATRALMVVSLVLGFLAMFVATMGMKCTRCGGDDKVKKARIAMGGGIIFIVA

SEQ ID NO: 2966 - protein, 211 aa, Homo Sapiens
MANSGLQLLGFSMALLGWVGLVACTAIPQWQMSSYAGDNIITAQAMYKGLWMDCVTQSTGMMSCKMYDSVLALSAALQATRALMVVSLVLGFLAMFVATMGMKCTRCGGDDKVKKARIAMGGGIIFIVAGLAALVACSWYGHQIVTDFYNPLIPTNIKYEFGPAIFIGWAGSALVILGGALLSCSCPGNESKAGYRVPRSYPKSNSSKEYV

SEQ ID NO: 2967 - protein, 211 aa, Homo Sapiens; identical to SEQ ID NO: 2966

SEQ ID NO: 2968 - protein, 145 aa, Homo Sapiens
MANSGLQLLGFSMALLGWVGLVACTAIPQWQMSSYAGDNIITAQAMYKGLWMDCVTQSTGMMSCKMYDSVLALSAALQATRALMVVSLVLGFLAMFVATMGMKCTRCGGDDKVKKARIAMGGGIIFIVAGMSLALPSLLAGQGLP

SEQ ID NO: 2969 - protein, 194 aa, Homo Sapiens
MPEGTVGLPARRPQCFLRAEMANSGLQLLGFSMALLGWVGLVACTAIPQWQMSSYAGDNIITAQAMYKGLWMDCVTQSTGMMSCKMYDSVLALSAALQATRALMVVSLVLGFLAMFVATMGMKCTRCGGDDKVKKARIAMGGGIIFIVAGLAALVACSWYGHQIVTDFYNPLIPTNIKYEFGPAIFIGWAGSAL

SEQ ID NO: 2970 - protein, 100 aa, Homo Sapiens
MVVSLVLGFLAMFVATMGMKCTRCGGDDKVKKARIAMGGGIIFIVAGLAALVACSWYGHQIVTDFYNPLIPTNIKYEFGPAIFIGWAGSALVILGGALLS

SEQ ID NO: 2971 - protein, 72 aa, Homo Sapiens
FVSLGLMCFGALIGLCACICRSLYPTIATGILHLLAGLCTLGSVSCYVAGIELLHQKLELPDNPSTIKNVSP

SEQ ID NO: 2972 - protein, 155 aa, Homo Sapiens
KSIWDEFISDEADEKTYNDALFRYNGTVGLWRRCITIPKNMHWYSPPERTESFDVVTKCVSFTLTEQFMEKFVDPGNHNSGIDLLRTYLWRCQFLLPFVSLGLMCFGALIGLCACICRSLYPTIATGILHLLAAQYYKERFTIMTLQSWETYHKI

SEQ ID NO: 2973 - protein, 138 aa, Homo Sapiens
MAASIGTDFWYEYRSPVQENSSDLNKSIWDEFISDEADEKTYNDALFRYNGTVGLWRRCITIPKNMHWYSPPERTESFDVVTKCVSFTLTEQFMEKFVDPGNHNSGIDLLRTYLWRCQFLLPFVSLGLMCFGALIGLC

SEQ ID NO: 2974 - protein, 223 aa, Homo Sapiens
MAASIGTDFWYEYRSPVQENSSDLNKSIWDEFISDEADEKTYNDALFRYNGTVGLWRRCITIPKNMHWYSPPERTESFDVVTKCVSFTLTEQFMEKFVDPGNHNSGIDLLRTYLWRCQFLLPFVSLGLMCFGALIGLCACICRSLYPTIATGILHLLAGLCTLGSVSCYVAGIELLHQKLELPDNVSGEFGWSFCLACVSAPLQFMASALFIWAAHTNRKEYT

SEQ ID NO: 2975 - protein, 89 aa, Homo Sapiens
MDNRFATAFVIACVLSLISTIYMAASIGTDFWYEYRSPVQENSSDLNKSIWDEFISDEADEKTYNDALFRYNGTVGLWRRCITIPKNMH

SEQ ID NO: 2976 - protein, 145 aa, Homo Sapiens
MDNRFATAFVIACVLSLISTIYMAASIGTDFWYEYRSPVQENSSDLNKSIWDEFISDEADEKTYNDALFRYNGTVGLWRRCITIPKNMHWYSPPERTESFDVVTKCVSFTLTEQFMEKFVDPGNHNSGIDLLRTYLWRCQFLLPF

SEQ ID NO: 2977 - protein, 172 aa, Homo Sapiens
MDNRFATAFVIACVLSLISTIYMAASIGTDFWYEYRSPVQENSSDLNKSIWDEFISDEADEKTYNDALFRYNGTVGLWRRCITIPKNMHWYSPPERTESFDVVTKCVSFTLTEQFMEKFVDPGNHNSGIDLLRTYLWRCQFLLPFVSLGLMCFGALIGLCACICRSLYPTIA

SEQ ID NO: 2978 - protein, 177 aa, Homo Sapiens
MDNRFATAFVIACVLSLISTIYMAASIGTDFWYEYRSPVQENSSDLNKSIWDEFISDEADEKTYNDALFRYNGTVGLWRRCITIPKNMHWYSPPERTESFDVVTKCVSFTLTEQFMEKFVDPGNHNSGIDLLRTYLWRCQFLLPFVSLGLMCFGALIGLCACICRSLYPTIATGILH

SEQ ID NO: 2979 - protein, 180 aa, Homo Sapiens
MDNRFATAFVIACVLSLISTIYMAASIGTDFWYEYRSPVQENSSDLNKSIWDEFISDEADEKTYNDALFRYNGTVGLWRRCITIPKNMHWYSPPERTESFDVVTKCVSFTLTEQFMEKFVDPGNHNSGIDLLRTYLWRCQFLLPFVSLGLMCFGALIGLCACICRSLYPTIATGILHLLA

SEQ ID NO: 2980 - protein, 213 aa, Homo Sapiens
MDNRFATAFVIACVLSLISTIYMAASIGTDFWYEYRSPVQENSSDLNKSIWDEFISDEADEKTYNDALFRYNGTVGLWRRCITIPKNMHWYSPPERTESFDVVTKCVSFTLTEQFMEKFVDPGNHNSGIDLLRTYLWRCQFLLPFVSLGLMCFGALIGLCACICRSLYPTIATGILHLLAGLCTLGSVSCYVAGIELLHQKLELPDNVSGEFG

SEQ ID NO: 2981 - protein, 237 aa, Homo Sapiens
MDNRFATAFVIACVLSLISTIYMAASIGTDFWYEYRSPVQENSSDLNKSIWDEFISDEADEKTYNDALFRYNGTVGLWRRCITIPKNMHWYSPPERTESFDVVTKCVSFTLTEQFMEKFVDPGNHNSGIDLLRTYLWRCQFLLPFVSLGLMCFGALIGLCACICRSLYPTIATGILHLLAGLCTLGSVSCYVAGIELLHQKLELPDNVSGEFGWSFCLACVSAPLQFMASALFIWAA

SEQ ID NO: 2982 - protein, 239 aa, Homo Sapiens
MDNRFATAFVIACVLSLISTIYMAASIGTDFWYEYRSPVQENSSDLNKSIWDEFISDEADEKTYNDALFRYNGTVGLWRRCITIPKNMHWYSPPERTESFDVVTKCVSFTLTEQFMEKFVDPGNHNSGIDLLRTYLWRCQFLLPFVSLGLMCFGALIGLCACICRSLYPTIATGILHLLAGLCTLGSVSCYVAGIELLHQKLELPDNVSGEFGWSFCLACVSAPLQFMASALFIWAAHT

SEQ ID NO: 2983 - protein, 245 aa, Homo Sapiens
MDNRFATAFVIACVLSLISTIYMAASIGTDFWYEYRSPVQENSSDLNKSIWDEFISDEADEKTYNDALFRYNGTVGLWRRCITIPKNMHWYSPPERTESFDVVTKCVSFTLTEQFMEKFVDPGNHNSGIDLLRTYLWRCQFLLPFVSLGLMCFGALIGLCACICRSLYPTIATGILHLLAGLCTLGSVSCYVAGIELLHQKLELPDNVSGEFGWSFCLACVSAPLQFMASALFIWAAHTNRKEYT

SEQ ID NO: 2984 - protein, 253 aa, Homo Sapiens
MDNRFATAFVIACVLSLISTIYMAASIGTDFWYEYRSPVQENSSDLNKSIWDEFISDEADEKTYNDALFRYNGTVGLWRRCITIPKNMHWYSPPERTESFDVVTKCVSFTLTEQFMEKFVDPGNHNSGIDLLRTYLWRCQFLLPFVSLGLMCFGALIGLCACICRSLYPTIATGILHLLAGLCTLGSVSCYVAGIELLHQKLELPDNVSGEFGWSFCLACVSAPLQFMASALFIWAAHTNRKEYTLMKAYRVA

SEQ ID NO: 2985 - protein, 253 aa, Homo Sapiens; identical to SEQ ID NO: 2984

SEQ ID NO: 2986 - protein, 253 aa, Homo Sapiens; identical to SEQ ID NO: 2984

SEQ ID NO: 2987 - protein, 253 aa, Homo Sapiens; identical to SEQ ID NO: 2984

SEQ ID NO: 2988 - protein, 253 aa, Homo Sapiens; identical to SEQ ID NO: 2984

SEQ ID NO: 2989 - protein, 253 aa, Homo Sapiens; identical to SEQ ID NO: 2984

SEQ ID NO: 2990 - protein, 210 aa, Homo Sapiens
MDNRFATAFVIACVLSLISTIYMAASIGTDFWYEYRSPVQENSSDLNKSIWDEFISDEADEKTYNDALFRYNGTVGLWRRCITIPKNMHWYSPPERTESFDVVTKCVSFTLTEQFMEKFVDPGNHNSGIDLLRTYLWRCQFLLPFVSLGLMCFGALIGLCACICRSLYPTIATGILHLLAVTKESMLPAGAESKHTATPAHACVQTGKPK

SEQ ID NO: 2991 - protein, 106 aa, Homo Sapiens
MDNRFATAFVIACVLSLISTIYMAASIGTDFWYEYRSPVQENSSDLNKSIWDEFISDEADEKTYNDALFRYNGTVGLWRRCITIPKNMHWYSPPERTGNCSCSRVI

SEQ ID NO: 2992 - protein, 100 aa, Homo Sapiens
MEKFVDPGNHNSGIDLLRTYLWRCQFLLPFVSLGLMCFGALIGLCACICRSLYPTIATGILHLLAGLCTLGSVSCYVAGIELLHQKLELPDNVSGEFGWS

SEQ ID NO: 2993 - protein, 122 aa, Homo Sapiens
MEKFVDPGNHNSGIDLLRTYLWRCQFLLPFVSLGLMCFGALIGLCACICRSLYPTIATGILHLLAGLCTLGSVSCYVAGIELLHQKLELPDNVSGEFGWSFCLACVSAPLQFMASALFIWAA

SEQ ID NO: 2994 - protein, 87 aa, Homo Sapiens
MGESFDVVTKCVSFTLTEQFMEKFVDPGNHNSGIDLLRTYLWRCQFLLPFVSLGLMCFGALIGLCACICRSLYPTIATGILHLLAEN

SEQ ID NO: 2995 - protein, 158 aa, Homo Sapiens
MGESFDVVTKCVSFTLTEQFMEKFVDPGNHNSGIDLLRTYLWRCQFLLPFVSLGLMCFGALIGLCACICRSLYPTIATGILHLLAGLCTLGSVSCYVAGIELLHQKLELPDNVSGEFGWSFCLACVSAPLQFMASALFIWAAHTNRKEYTLMKAYRVA

SEQ ID NO: 2996 - protein, 276 aa, Homo Sapiens
MGGDRLENKTSVSVASWSSLNARMDNRFATAFVIACVLSLISTIYMAASIGTDFWYEYRSPVQENSSDLNKSIWDEFISDEADEKTYNDALFRYNGTVGLWRRCITIPKNMHWYSPPERTESFDVVTKCVSFTLTEQFMEKFVDPGNHNSGIDLLRTYLWRCQFLLPFVSLGLMCFGALIGLCACICRSLYPTIATGILHLLAGLCTLGSVSCYVAGIELLHQKLELPDNVSGEFGWSFCLACVSAPLQFMASALFIWAAHTNRKEYTLMKAYRVA

SEQ ID NO: 2997 - protein, 317 aa, Homo Sapiens
MQAAWLLGALVVPQLLGFGHGARGAEREWEGGWGGAQEEEREREALMLKHLQEALGLPAGRGDENPAGTVEGKEDWEMEEDQGEEEEEEATPTPSSGPSPSPTPEDIVTYILGRLAGLDAGLHQLHVRLHALDTRVVELTQGLRQLRNAAGDTRDAVQALQEAQGRAEREHGRLEDSECMTPPPSLPGPAHRLPEGAAPGPQVLPALARLRSSGGGAGAVHGAGREPGAAGRPPADGGAHSVPARGARSLQLARVAGRARSARRGPLPLRKRPARVLLRLASLTPPRARRPAQRLAASAQPGPAQRWHARELRGAGL

SEQ ID NO: 2998 - protein, 323 aa, Homo Sapiens
MQAAWLLGALVVPQLLGFGHGARGAEREWEGGWGGAQEEEREREALMLKHLQEALGLPAGRGDENPAGTVEGKEDWEMEEDQGEEEEEEATPTPSSGPSPSPTPEDIVTYILGRLAGLDAGLHQLHVRLHALDTRVVELTQGLRQLRNAAGDTRDAVQALQEAQGRAEREHGRLEGCLKGLRLGHKCFLLSRDFEAQAAAQARCTARGGSLAQPADRQQMEALTRYLRAALAPYNWPVWLGVHDRRAEGLYLFENGQRVSFFAWHRSPRPELGAQPSASPHPLSPDQPNGGTLENCVAQASDDGSWWDHDCQRRLYYVCEFPF

SEQ ID NO: 2999 - protein, 245 aa, Homo Sapiens
MQAAWLLGALVVPQLLGFGHGARGAEREWEGGWGGAQEEEREREALMLKHLQEALGLPAGRGDENPAGTVEGKEDWEMEEDQGEEEEEEATPTPSSGPSPSPTPEDIVTYILGRLAGLDAGLHQLHVRLHALDTRVVELTQGLRQLRNAAGDTRDAVQALQEAQGRAEREHGRLEGCLKGLRLGHKCFLLSRDFEAQPSASPHPLSPDQPNGGTLENCVAQASDDGSWWDHDCQRRLYYVCEFPF

SEQ ID NO: 3000 - protein, 118 aa, Homo Sapiens
LAKGRIQARRMKMQRIAALLDLPIQPTTEVLGFGLGSSTSTQHLPFRFYDQGRRGSSDPTVQRSVFASVDKVPALLTAAVERQPRWPLPSLLVPWLTDCCGGLCLLIYRRFSRIVFKI

SEQ ID NO: 3001 - protein, 906 aa, Homo Sapiens
MFGRSRSWVGGGHGKTSRNIHSLDHLKYLYHVLTKNTTVTEQNRNLLVETIRSITEILIWGDQNDSSVFDFFLEKNMFVFFLNILRQKSGRYVCVQLLQTLNILFENISHETSLYYLLSNNYVNSIIVHKFDFSDEEIMAYYISFLKTLSLKLNNHTVHFFYNEHTNDFALYTEAIKFFNHPESMVRIAVRTITLNVYKVDNQAMLHYIRDKTAVPYFSNLVWFIGSHVIELDDCVQTDEEHRNRGKLSDLVAEHLDHLHYLNDILIINCEFLNDVLTDHLLNRLFLPLYVYSLENQDKGGERPKISLPVSLYLLSQVFLIIHHAPLVNSLAEVILNGDLSEMYAKTEQDIQRSSAKPSIRCFIKPTETLERSLEMNKHKGKRRVQKRPNYKNVGEEEDEEKGPTEDAQEDAEKAKEIEMVIMERSKLSELAASTSVQEQNTTDEEKSAAATCSESTQWSRPFLDMVYHALDSPDDDYHALFVLCLLYAMSHNKGMDPEKLERIQLPVPNAAEKTTYNHPLAERLIRIMNNAAQPDGKIRLATLELSCLLLKQQVLMSAGCIMKDVHLACLEGAREESVHLVRHFYKGEDIFLDMFEDEYRSMTMKPMNVEYLMMDASILLPPTGTPLTGIDFVKRLPCGDVEKTRRAIRVFFMLRSLSLQLRGEPETQLPLTREEDLIKTDDVLDLNNSDLIACTVITKDGGMVQRFLAVDIYQMSLVEPDVSRLGWGVVKFAGLLQDMQVTGVEDDSRALNITIHKPASSPHSKPFPILQATFIFSDHIRCIIAKQRLAKGRIQARRMKMQRIAALLDLPIQPTTEVLGFGLGSSTSTQHLPFRFYDQGRRGSSDPTVQRSVFASVDKVPGEPAPRPAPQLVHHGGRSRSFSLWSLCELPFLSQKPRRLAAPAS

SEQ ID NO: 3002 - protein, 1053 aa, Homo Sapiens
MFGRSRSWVGGGHGKTSRNIHSLDHLKYLYHVLTKNTTVTEQNRNLLVETIRSITEILIWGDQNDSSVFDFFLEKNMFVFFLNILRQKSGRYVCVQLLQTLNILFENISHETSLYYLLSNNYVNSIIVHKFDFSDEEIMAYYISFLKTLSLKLNNHTVHFFYNEHTNDFALYTEAIKFFNHPESMVRIAVRTITLNVYKVSLDNQAMLHYIRDKTAVPYFSNLVWFIGSHVIELDDCVQTDEEHRNRGKLSDLVAEHLDHLHYLNDILIINCEFLNDVLTDHLLNRLFLPLYVYSLENQDKGGERPKISLPVSLYLLSQVFLIIHHAPLVNSLAEVILNGDLSEMYAKTEQDIQRSSAKPSIRCFIKPTETLERSLEMNKHKGKRRVQKRPNYKNVGEEEDEEKGPTEDAQEDAEKAKGTEGGSKGIKTSGESEEIEMVIMERSKLSELAASTSVQEQNTTDEEKSAAATCSESTQWSRPFLDMVYHALDSPDDDYHALFVLCLLYAMSHNKGMDPEKLERIQLPVPNAAEKTTYNHPLAERLIRIMNNAAQPDGKIRLATLELSCLLLKQQVLMSAGCIMKDVHLACLEGAREESVHLVRHFYKGEDIFLDMFEDEYRSMTMKPMNVEYLMMDASILLPPTGTPLTGIDFVKRLPCGDVEKTRRAIRVFFMLRSLSLQLRGEPETQLPLTREEDLIKTDDVLDLNNSDLIACTVITKDGGMVQRFLAVDIYQMSLVEPDVSRLGWGVVKFAGLLQDMQVTGVEDDSRALNITIHKPASSPHSKPFPILQATFIFSDHIRCIIAKQRLAKGRIQARRMKMQRIAALLDLPIQPTTEVLGFGLGSSTSTQHLPFRFYDQGRRGSSDPTVQRSVFASVDKVPGFAVAQCINQHSSPSLSSQSPPSASGSPSGSGSTSHCDSGGTSSSSTPSTAQSPADAPMSPELPKPHLPDQLVIVNETEADSKPSKNVARSAAVETASLSPSLVPARQPTISLLCEDTADTLSVESLTLVPPVDPHSLRSLTGMPPLSTPAAACTEPVGEEAACAEPVGTAED

SEQ ID NO: 3003 - protein, 60 aa, Homo Sapiens
  misc_feature (1)..(1): Xaa can be any naturally occurring amino acid
XEVLGFGLGSSTSTQHLPFRFYDQGRRGSSDPTVQRSVFASVDKVPDPSLCSCISYMCQS

SEQ ID NO: 3004 - protein, 152 aa, Homo Sapiens
  misc_feature (1)..(1): Xaa can be any naturally occurring amino acid
XKGRIQARRMKMQRIAALLDLPIQPTTEVLGFGLGSSTSTQHLPFRFYDQGRRGSSDPTVQRSVFASVDKVPGFAVAQCINQHSSPSLSSQSPPSASGSPSGSGSTSHCDSGGTSSSSTPSTAQSPAVRSGRKGRRRVFSLSEADSHGGHWV

SEQ ID NO: 3005 - protein, 128 aa, Homo Sapiens
  misc_feature (1)..(1): Xaa can be any naturally occurring amino acid
XMQVTGVEDDSRALNITIHKPASSPHSKPFPILQATFIFSDHIRCIIAKQRLAKGRIQARRMKMQRIAALLDLPIQPTTEVLGFGLGSSTSTQHLPFRFYDQGRRGSSDPTVQRSVFASVDKVPGFQG

SEQ ID NO: 3006 - protein, 446 aa, Homo Sapiens
MLHPETSPGRGHLLAVLLALLGTAWAEVWPPQLQEQAPMAGALNRKESFLLLSLHNRLRSWVQPPAADMRRLDWSDSLAQLAQARAALCGTPTPSLASGLWRTLQVGWNMQLLPAGLVSFVEVVSLWFAEGQRYSHAAGECARNATCTHYTQLVWATSSQLGCGRHLCSAGQAAIEAFVCAYSPRGNWEVNGKTIVPYKKGAWCSLCTASVSGCFKAWDHAGGLCEVPRNPCRMSCQNHGRLNISTCHCHCPPGYTGRYCQVRCSLQCVHGRFREEECSCVCDIGYGGAQCATKVHFPFHTCDLRIDGDCFMVSSEADTYYRARMKCQRKGGVLAQIKSQKVQDILAFYLGRLETTNEVIDSDFETRNFWIGLTYKTAKDSFRWATGEHQAFTSFAFGQPDNHGFGNCVELQASAAFNWNDQRCKTRNRYICQFAQEHISRWGPGS

SEQ ID NO: 3007 - protein, 446 aa, Homo Sapiens; identical to SEQ ID NO: 3006

SEQ ID NO: 3008 - protein, 455 aa, Homo Sapiens
MLHPETSPGRGHLLAVLLALLGTAWAEVWPPQLQEQAPMAGALNRKESFLLLSLHNRLRSWVQPPAADMRRLDWSDSLAQLAQARAALCGTPTPSLASGLWRTLQVGWNMQLLPAGLVSFVEVVSLWFAEGQRYSHAAGECARNATCTHYTQLVWATSSQLGCGRHLCSAGQAAIEAFVCAYSPRGNWEVNGKTIVPYKKGAWCSLCTASVSGCFKAWDHAGGLCEVPRNPCRMSCQNHGRLNISTCHCHCPPGYTGRYCQVRCSLQCVHGRFREEECSCVCDIGYGGAQCATKVHFPFHTCDLRIDGDCFMVSSEADTYYRARMKCQRKGGVLAQIKSQKVQDILAFYLGRLETTNEVIDSDFETRNFWIGLTYKTAKDSFRWATGEHQAFTSFAFGQPDNHGLVWLSAAMGFGNCVELQASAAFNWNDQRCKTRNRYICQFAQEHISRWGPGS

SEQ ID NO: 3009 - protein, 446 aa, Homo Sapiens; identical to SEQ ID NO: 3006

SEQ ID NO: 3010 - protein, 446 aa, Homo Sapiens; identical to SEQ ID NO: 3006

SEQ ID NO: 3011 - protein, 66 aa, Homo Sapiens
MRRLLVWATSSQLGCGRHLCSAGQAAIEAFVCAYSPRGNWEVNGKTIVPYKKGAWCSLCTASVSGC

SEQ ID NO: 3012 - protein, 455 aa, Homo Sapiens
MLHPETSPGRGHLLAVLLALLGTTWAEVWPPQLQEQAPMAGALNRKESFLLLSLHNRLRSWVQPPAADMRRLDWSDSLAQLAQARAALCGIPTPSLASGLWRTLQVGWNMQLLPAGLASFVEVVSLWFAEGQRYSHAAGECARNATCTHYTQLVWATSSQLGCGRHLCSAGQTAIEAFVCAYSPGGNWEVNGKTIIPYKKGAWCSLCTASVSGCFKAWDHAGGLCEVPRNPCRMSCQNHGRLNISTCHCHCPPGYTGRYCQVRCSLQCVHGRFREEECSCVCDIGYGGAQCATKVHFPFHTCDLRIDGDCFMVSSEADTYYRARMKCQRKGGVLAQIKSQKVQDILAFYLGRLETTNEVIDSDFETRNFWIGLTYKTAKDSFRWATGEHQAFTSFAFGQPDNHGLVWLSAAMGFGNCVELQASAAFNWNDQRCKTRNRYICQFAQEHISRWGPGS

SEQ ID NO: 3013 - protein, 446 aa, Homo Sapiens
MLHPETSPGRGHLLAVLLALLGTTWAEVWPPQLQEQAPMAGALNRKESFLLLSLHNRLRSWVQPPAADMRRLDWSDSLAQLAQARAALCGIPTPSLASGLWRTLQVGWNMQLLPAGLASFVEVVSLWFAEGQRYSHAAGECARNATCTHYTQLVWATSSQLGCGRHLCSAGQTAIEAFVCAYSPRGNWEVNGKTIIPYKKGAWCSLCTASVSGCFKAWDHAGGLCEVPRNPCRMSCQNHGRLNISTCHCHCPPGYTGRYCQVRCSLQCVHGRFREEECSCVCDIGYGGAQCATKVHFPFHTCDLRIDGDCFMVSSEADTYYRARMKCQRKGGVLAQIKSQKVQDILAFYLGRLETTNEVIDSDFETRNFWIGLTYKTAKDSFRWATGEHQAFTSFAFGQPDNHGFGNCVELQASAAFNWNDQRCKTRNRYICQFAQEHISRWGPGS

SEQ ID NO: 3014 - protein, 303 aa, Homo Sapiens [sequence omitted]

SEQ ID NO: 3015 - protein, 446 aa, Homo Sapiens; identical to SEQ ID NO: 3013

SEQ ID NO: 3016 - protein, 119 aa, Homo Sapiens
MLHPETSPGRGHLLAVLLALLGTAWAEVWPPQLQEQAPMAGALNRKESFLLLSLHNRLRSWVQPPAADMRRLDWSDSLAQLAQARAALCGIPTPSLASGLWRTLQVGWNMQLLPAGLAS

SEQ ID NO: 3017 - protein, 446 aa, Homo Sapiens
MLHPETSPGRGHLLAVLLALLGTAWAEVWPPQLQEQAPMAGALNRKESFLLLSLHNRLRSWVQPPAADMRRLDWSDSLAQLAQARAALCGIPTPSLASGLWRTLQVGWNMQLLPAGLASFVEVVSLWFAEGQRYSHAAGECARNATCTHYTQLVWATSSQLGCGRHLCSAGQAAIEAFVCAYSPRGNWEVNGKTIVPYKKGAWCSLCTASVSGCFKAWDHAGGLCEVPRNPCRMSCQNHGRLNISTCHCHCPPGYTGRYCQVRCSLQCVHGRFREEECSCVCDIGYGGAQCATKVHFPFHTCDLRIDGDCFMVSSEADTYYRARMKCQRKGGVLAQIKSQKVQDILAFYLGRLETTNEVIDSDFETRNFWIGLTYKTAKDSFRWATGEHQAFTSFAFGQPDNHGFGNCVELQASAAFNWNNQRCKTRNRYICQFAQEHISRWGPGS

SEQ ID NO: 3018 - protein, 455 aa, Homo Sapiens
MLHPETSPGRGHLLAVLLALLGTAWAEVWPPQLQEQAPMAGALNRKESFLLLSLHNRLRSWVQPPAADMRRLDWSDSLAQLAQARAALCGIPTPSLASGLWRTLQVGWNMQLLPAGLASFVEVVSLWFAEGQRYSHAAGECARNATCTHYTQLVWATSSQLGCGRHLCSAGQAAIEAFVCAYSPRGNWEVNGKTIVPYKKGAWCSLCTASVSGCFKAWDHAGGLCEVPRNPCRMSCQNHGRLNISTCHCHCPPGYTGRYCQVRCSLQCVHGRFREEECSCVCDIGYGGAQCATKVHFPFHTCDLRIDGDCFMVSSEADTYYRARMKCQRKGGVLAQIKSQKVQDILAFYLGRLETTNEVIDSDFETRNFWIGLTYKTAKDSFRWATGEHQAFTSFAFGQPDNHGLVWLSAAMGFGNCVELQASAAFNWNNQRCKTRNRYICQFAQEHISRWGPGS

SEQ ID NO: 3019 - protein, 446 aa, Homo Sapiens; identical to SEQ ID NO: 3017

SEQ ID NO: 3020 - protein, 446 aa, Homo Sapiens; identical to SEQ ID NO: 3017

SEQ ID NO: 3021 - protein, 446 aa, Homo Sapiens; identical to SEQ ID NO: 3017

SEQ ID NO: 3022 - protein, 134 aa, Homo Sapiens
MLHPETSPGRGHLLAVLLALLGTAWAEVWPPQLQEQAPMAGALNRKESFLLLSLHNRLRSWVQPPAADMRRLLVWATSSQLGCGRHLCSAGQAAIEAFVCAYSPRGNWEVNGKTIVPYKKGAWCSLCTASVSGC

SEQ ID NO: 3023 - protein, 86 aa, Homo Sapiens
MQRWTLWAAAFLTLHSAQAFPQTDISISPALPELPLPSLCPLFWMEFKGHCYRFFPLNKTWAEADLYCSEFSVGRKSAKLASIHSL

SEQ ID NO: 3024 - protein, 186 aa, Homo Sapiens
MQRWTLWAAAFLTLHSAQAFPQTDISISPALPELPLPSLCPLFWMEFKGHCYRFFPLNKTWAEADLYCSEFSVGRKSAKLASIHSWEENVFVYDLVNSCVPGIPADVWTGLHDHRQEGQFEWTDGSSYDYSYWDGSQPDDGVHADPEEEDCVQIWYRPTSALRSWNDNTCSRKFPFVCKIPSLTIH

SEQ ID NO: 3025 - protein, 136 aa, Homo Sapiens
MQRWTLWAAAFLTLHSAQAFPQTDISISPALPELPLPSLCPLFWMEFKGHCYRFFPLNKTWAEADLYCSEFSVGRKSAKLASIHSWEENVFVYDLVNSCVPGIPADVWTGLHDHRQVRKQWPLGPLGSSSQDSILI

SEQ ID NO: 3026 - protein, 65 aa, Homo Sapiens
MQRWTLWAAAFLTLHSAQAFPQTDISISPVCFLSAPSPARAAPAFPVPPVLDGVQRPLLSILPSQ

SEQ ID NO: 3027 - protein, 80 aa, Homo Sapiens
MILKLILSLKNFLRRYKCSSDHWIGLKMAKNRTGQWVDGATFTKSFGMRGSEGCAYLSDDGAATARCYTERKWICRKRIH

SEQ ID NO: 3028 - protein, 149 aa, Homo Sapiens
MMTKHKKCFIIVGVLITTNIITLIVKLTRDSQSLCPYDWIGFQNKCYYFSKEEGDWNSSKYNCSTQHADLTIIDNIEEMNFLRRYKCSSDHWIGLKMAKNRTGQWVDGATFTKSFGMRGSEGCAYLSDDGAATARCYTERKWICRKRIH

SEQ ID NO: 3029 - protein, 206 aa, Homo Sapiens
MAQQACPRAMAKNGLVICILVITLLLDQTTSHTSRLKARKHSKRRVRDKDGDLKTQIEKLWTEVNALKEIQALQTVCLRGTKVHKKCYLASEGLKHFHEANEDCISKGGILVIPRNSDEINALQDYGKRSLPGVNDFWLGINDMVTEGKFVDVNGIAISFLNWDRAQPNGGKRENCVLFSQSAQGKWSDEACRSSKRYICEFTIPQ

SEQ ID NO: 3030 - protein, 50 aa, Homo Sapiens
MAQQACPRAMAKNGLVICILVITLLLDQTTSHTSRLKARKHSKRRVRGIC

SEQ ID NO: 3031 - protein, 202 aa, Homo Sapiens
MELWGAYLLLCLFSLLTQVTTEPPTQKPKKIVNAKKDVVNTKMFEELKSRLDTLAQEVALLKEQQALQTVCLKGTKVHMKCFLAFTQTKTFHEASEDCISRGGTLGTPQTGSENDALYEYLRQSVGNEAEIWLGLNDMAAEGTWVDMTGARIAYKNWETEITAQPDGGKTENCAVLSGAANGKWFDKRCRDQLPYICQFGIV

SEQ ID NO: 3032 - protein, 160 aa, Homo Sapiens
MFEELKSRLDTLAQEVALLKEQQALQTVCLKGTKVHMKCFLAFTQTKTFHEASEDCISRGGTLGTPQTGSENDALYEYLRQSVGNEAEIWLGLNDMAAEGTWVDMTGARIAYKNWETEITAQPDGGKTENCAVLSGAANGKWFDKRCRDQLPYICQFGIV

SEQ ID NO: 3033 - protein, 179 aa, Homo Sapiens
MHFQAFWLCLGLLFISINAEFMDDDVETEDFEENSEEIDVNESELSSEIKYKTPQPIGEVYFAETFDSGRLAGWVLSKAKKDDMDEEISIYDGRWEIEELKENQVPGDRGLVLKSRAKHHAISAVLAKPFIFADKPLIVQYEVNFQDGIDCGGAYIKLLADTDDLILENFYDKTSYIIM

SEQ ID NO: 3034 - protein, 610 aa, Homo Sapiens
MHFQAFWLCLGLLFISINAEFMDDDVETEDFEENSEEIDVNESELSSEIKYKTPQPIGEVYFAETFDSGRLAGWVLSKAKKDDMDEEISIYDGRWEIEELKENQVPGDRGLVLKSRAKHHAISAVLAKPFIFADKPLIVQYEVNFQDGIDCGGAYIKLLADTDDLILENFYDKTSYIIMFGPDKCGEDYKLHFIFRHKHPKTGVFEEKHAKPPDVDLKKFFTDRKTHLYTLVMNPDDTFEVLVDQTVVNKGSLLEDVVPPIKPPKEIEDPNDKKPEEWDERAKIPDPSAVKPEDWDESEPAQIEDSSVVKPAGWLDDEPKFIPDPNAEKPDDWNEDTDGEWEAPQILNPACRIGCGEWKPPMIDNPKYKGVWRPPLVDNPNYQGIWSPRKIPNPDYFEDDHPFLLTSFSALGLELWSMTSDIYFDNFIICSEKEVADHWAADGWRWKIMIANANKPGVLKQLMAAAEGHPWLWLIYLVTAGVPIALITSFCWPRKVKKKHKDTEYKKTDICIPQTKGVLEQEEKEEKAALEKPMDLEEEKKQNDGEMLEKEEESEPEEKSEEEIEIIEGQEESNQSNKSGSEDEMKEADESTGSGDGPIKSVRKRRVRKD

SEQ ID NO: 3035 - protein, 610 aa, Homo Sapiens; identical to SEQ ID NO: 3034

SEQ ID NO: 3036 - protein, 277 aa, Homo Sapiens
GCSLMAQEVDTAQGAEMRRGAGAARGRASWCWALALLWLAVVPGWSRVSGIPSRRHWPVPYKRFDFRPKPDPYCQAKYTFCPTGSPIPVMEGDDDIEVFRLQAPVWEFKYGDLLGHLKIMHDAIGFRSTLTGKNYTMEWYELFQLGNCTFPHLRPEMDAPFWCNQGAACFFEGIDDVHWKENGTLVQVATISGFHHVGQDSIELRTSSDPPILASQSAGITDVSHCTRPTIRILPQRGTLYYLSLALLPGWSTVVRPRLTATSASRIQTIFLPQPPK

SEQ ID NO: 3037 - protein, 204 aa, Homo Sapiens
GSTGCSLMAQEVDTAQGAEMRRGAGAARGRASWCWALALLWLAVVPGWSRVSGIPSRRHWPVPYKRFDFRPKPDPYCQAKYTFCPTGSPIPVMEGDDDIEVFRLQAPVWEFKYGDLLGHLKIMHDAIGFRSTLTGKNYTMEWYELFQLGNCTFPHLRPEMDAPFWCNQGAACFFEGIDDVHWKENGTLVQVATISDGETEAQRG

SEQ ID NO: 3038 - protein, 271 aa, Homo Sapiens
LMAQEVDTAQGAEMRRGAGAARGRASWCWALALLWLAVVPGWSRVSGIPSRRHWPVPYKRFDFRPKPDPYCQAKYTFCPTGSPIPVMEGDDDIEVFRLQAPVWEFKYGDLLGHLKIMHDAIGFRSTLTGKNYTMEWYELFQLGNCTFPHLRPEMDAPFWCNQGAACFFEGIDDVHWKENGTLVQVATISGFHHVGQDSIELRTSSDPPILASQSAGITDVSHCTRPTIRILPQRGTLYYLLWTKTFLLCSLQFSWDFQNIATPYFNLLPKP

SEQ ID NO: 3039 - protein, 358 aa, Homo Sapiens
MAQEVDTAQGAEMRRGAGAARGRASWCWALALLWLAVVPGWSRVSGIPSRRHWPVPYKRFDFRPKPDPYCQAKYTFCPTGSPIPVMEGDDDIEVFRLQAPVWEFKYGDLLGHLKIMHDAIGFRSTLTGKNYTMEWYELFQLGNCTFPHLRPEMDAPFWCNQGAACFFEGIDDVHWKENGTLVQVATISGNMFNQMAKWVKQDNETGIYYETWNVKASPEKGAETWFDSYDCSKFVLRTFNKLAEFGAEFKNIETNYTRIFLYSGEPTYLGNETSVFGPTGNKTLGLAIKRFYYPFKPHLPTKEFLLSLLQIFDAVIVHKQFYLFYNFEYWFLPMKFPFIKITYEEIPLPIRNKTLSGL

SEQ ID NO: 3040 - protein, 36 aa, Homo Sapiens
MEGDDDIEVFRLQAPVWEFKYGDLLGHLLLYLAPGR

SEQ ID NO: 3041 - protein, 407 aa, Homo Sapiens
MRRNLRLGPSSGADAQGQGAPRPGLAAPRMLLPPASQASRGSGSTGCSLMAQEVDTAQGAEMRRGAGAARGRASWCWALALLWLAVVPGWSRVSGIPSRRHWPVPYKRFDFRPKPDPYCQAKYTFCPTGSPIPVMEGDDDIEVFRLQAPVWEFKYGDLLGHLKIMHDAIGFRSTLTGKNYTMEWYELFQLGNCTFPHLRPEMDAPFWCNQGAACFFEGIDDVHWKENGTLVQVATISGNMFNQMAKWVKQDNETGIYYETWNVKASPEKGAETWFDSYDCSKFVLRTFNKLAEFGAEFKNIETNYTRIFLYSGEPTYLGNETSVFGPTGNKTLGLAIKRFYYPFKPHLPTKEFLLSLLQIFDAVIVHKQFYLFYNFEYWFLPMKFPFIKITYEEIPLPIRNKTLSGL

SEQ ID NO: 3042 - protein, 125 aa, Homo Sapiens
  misc_feature (1)..(1): Xaa can be any naturally occurring amino acid
XGRASWCWALALLWLAVVPGWSRVSGIPSRRHWPVPYKRFDFRPKPDPYCQAKYTFCPTGSPIPVMEGDDDIEVFRLQAPVWEFKYGDLLGHLVTWTHGCVTVAFIHVLSLHRKLCMMPLDSEVH

SEQ ID NO: 3043 - protein, 304 aa, Homo Sapiens
  misc_feature (1)..(1): Xaa can be any naturally occurring amino acid
XGYKRFDFRPKPDPYCQAKYTFCPTGSPIPVMEGDDDIEVFRLQAPVWEFKYGDLLGHLKIMHDAIGFRSTLTGKNYTMEWYELFQLGNCTFPHLRPEMDAPFWCNQGAACFFEGIDDVHWKENGTLVQVATISGNMFNQMAKWVKQDNETGIYYETWNVKASPEKGAETWFDSYDCSKFVLRTFNKLAEFGAEFKNIETNYTRIFLYSGEPTYLGNETSVFGPTGNKTLGLAIKRFYYPFKPHLPTKEFLLSLLQIFDAVIVHKQFYLFYNFEYWFLPMKFPFIKITYEEIPLPIRNKTLSGL

SEQ ID NO: 3044 - protein, 216 aa, Homo Sapiens
  misc_feature (1)..(1): Xaa can be any naturally occurring amino acid
XLPPASQASRGSGSTGCSLMAQEVDTAQGAEMRRGAGAARGRASWCWALALLWLAVVPGWSRVSGIPSRRHWPVPYKRFDFRPKPDPYCQAKYTFCPTGSPIPVMEGDDDIEVFRLQAPVWEFKYGDLLGHLKIMHDAIGFRSTLTGKNYTMEWYELFQLGNCTFPHLRPEMDAPFWCNQGAACFFEGIDDVHWKENGTLVQVATISDGETEAQRG

SEQ ID NO: 3045 - protein, 249 aa, Homo Sapiens
  misc_feature (1)..(1): Xaa can be any naturally occurring amino acid
XMAQEVDTAQGAEMRRGAGAARGRASWCWALALLWLAVVPGWSRVSGIPSRRHWPVPYKRFDFRPKPDPYCQAKYTFCPTGSPIPVMEGDDDIEVFRLQAPVWEFKYGDLLGHLKIMHDAIGFRSTLTGKNYTMEWYELFQLGNCTFPHLRPEMDAPFWCNQGAACFFEGIDDVHWKENGTLVQVATISGFHHVGQDSIELRTSSDPPILASQSAGITDVSHCTRPTIRILPQRGTLYYLRWVLLCCPG

SEQ ID NO: 3046 - protein, 205 aa, Homo Sapiens
  misc_feature (1)..(1): Xaa can be any naturally occurring amino acid
XQASRGSGSTGCSLMAQEVDTAQGAEMRRGAGAARGRASWCWALALLWLAVVPGWSRVSGIPSRRHWPVPYKRFDFRPKPDPYCQAKYTFCPTGSPIPVMEGDDDIEVFRLQAPVWEFKYGDLLGHLKIMHDAIGFRSTLTGKNYTMEWYELFQLGNCTFPHLRPEMDAPFWCNQGAACFFEGIDDVHWKENGTLVQVATISGKL

SEQ ID NO: 3047 - protein, 210 aa, Homo Sapiens
  misc_feature (1)..(1): Xaa can be any naturally occurring amino acid
XSLMAQEVDTAQGAEMRRGAGAARGRASWCWALALLWLAVVPGWSRVSGIPSRRHWPVPYKRFDFRPKPDPYCQAKYTFCPTGSPIPVMEGDDDIEVFRLQAPVWEFKYGDLLGHLKIMHDAIGFRSTLTGKNYTMEWYELFQLGNCTFPHLRPEMDAPFWCNQGAACFFEGIDDVHWKENGTLVQVATISEISCALKNGIKLAELGFLL

SEQ ID NO: 3048 - protein, 112 aa, Homo Sapiens
MEKILILLLVALSVAYAAPGPRGIIINLENGELCMNSAQCKSNCCQHSSALGLARCTSMASENSECSVKTLYGIYYKCPCERGLTCEGDKTIVGSITNTNFGICHDAGRSKQ

SEQ ID NO: 3049 - protein, 71 aa, Homo Sapiens
MEKILILLLVALSVAYAAPGPRGIIINLTLYGIYYKCPCERGLTCEGDKTIVGSITNTNFGICHDAGRSKQ

SEQ ID NO: 3050 - protein, 98 aa, Homo Sapiens
MILLPQPPKKLGLQENGELCMNSAQCKSNCCQHSSALGLARCTSMASENSECSVKTLYGIYYKCPCERGLTCEGDKTIVGSITNTNFGICHDAGRSKQ

SEQ ID NO: 3051 - protein, 42 aa, Homo Sapiens
GCCQRAPDNCESHCAEKGSEGSLCQTQLPATPCFLPSNTVRT

SEQ ID NO: 3052 - protein, 121 aa, Homo Sapiens
MMLPQWLLLLFLLFFFLFLLTRGSLSPTKYNLLELKESCIRNQDCETGCCQRAPDNCESHCAEKGSEGSLCQTQVFFGQYRACPCLRNLTCIYSKNEKWLSIAYGRCQKIGRQKLAKKMFF

SEQ ID NO: 3053 - protein, 100 aa, Homo Sapiens
MAAALALVAGVLSGAVLPLWSALPQYKKKITDRCFHHSECYSGCCLMDLDSGGAFCAPRARITMICLPQTKGATNIICPCRMGLTCISKDLMCSRRCHMI

SEQ ID NO: 3054 - protein, 153 aa, Homo Sapiens
MAAALALVAGVLSGAVLPLWSALPQYKKKITDRCFHHSECYSGCCLMDLDSGGAFCAPRARITMICLPQWLELFKGRDRIIFIYEAPTPSLVSAHNQGSYQHHLPLPDGLDVHIQGLDVFPPVPYDLEEDAGWSLLPWGHRPWLPPTCSKSSS

SEQ ID NO: 3055 - protein, 633 aa, Homo Sapiens
MPSCGACTCGAAAVRLITSSLASAQRGISGGRIHMSVLGRLGTFETQILQRAPLRSFTETPAYFASKDGISKDGSGDGNKKSASEGSSKKSGSGNSGKGGNQLRCPKCGDLCTHVETFVSSTRFVKCEKCHHFFVVLSEADSKKSIIKEPESAAEAVKLAFQQKPPPPPKKIYNYLDKYVVGQSFAKKVLSVAVYNHYKRIYNNIPANLRQQAEVEKQTSLTPRELEIRRREDEYRFTKLLQIAGISPHGNALGASMQQQVNQQIPQEKRGGEVLDSSHDDIKLEKSNILLLGPTGSGKTLLAQTLAKCLDVPFAICDCTTLTQAGYVGEDIESVIAKLLQDANYNVEKAQQGIVFLDEVDKIGSVPGIHQLRDVGGEGVQQGLLKLLEGTIVNVPEKNSRKLRGETVQVDTTNILFVASGAFNGLDRIISRRKNEKYLGFGTPSNLGKGRRAAAAADLANRSGESNTHQDIEEKDRLLRHVEARDLIEFGMIPEFVGRLPVVVPLHSLDEKTLVQILTEPRNAVIPQYQALFSMDKCELNVTEDALKAIARLALERKTGARGLRSIMEKLLLEPMFEVPNSDIVCVEVDKEVVEGKKEPGYIRAPTKESSEEEYDSGVEEEGWPRQADAANS

SEQ ID NO: 3056 - protein, 268 aa, Homo Sapiens
MPSCGACTCGAAAVRLITSSLASAQRGISGGRIHMSVLGRLGTFETQILQRAPLRSFTETPAYFASKDGISKDGSGDGNKKSASEGSSKKSGSGNSGKGGNQLRCPKCGDLCTHVETFVSSTRFVKCEKCHHFFVVLSEADSKKSIIKEPESAAEAVKLAFQQKPPPPPKKIYNYLDKYVVGQSFAKKVLSVAVYNHYKRIYNNIPANLRQQAEVEKQTSLTPRELEIRRREDEYRFTKLLQIAGISPHGNALGASMQQQVKLCWHKP

SEQ ID NO: 3057 - protein, 130 aa, Homo Sapiens
MSVLGRLGTFETQILQRAPLRSFTETPAYFASKDGISKDGSGDGNKKSASEGSSKKSGSGNSGKGGNQLRCPKCGDLCTHVETFVSSTRFVKCEKCHHFFVVLSEADSKKSIIKEPESAAEAVKLAFQQK

SEQ ID NO: 3058 - protein, 129 aa, Homo Sapiens
MENDNTVLLNPPLFALDKDAPLRYAGEICGFRLHGSGVPFEAVILDKATGEGLIRAKEPVDCEAQKEHTFTIQAYDCGEGPDGANTKKSHKATVHVRVNDVNEFAPVFVERLYRAAVTEGKLYDRILRV

SEQ ID NO: 3059 - protein, 142 aa, Homo Sapiens
MENDNTVLLNPPLFALDKDAPLRYAGEICGFRLHGSGVPFEAVILDKATGEGLIRAKEPVDCEAQKEHTFTIQAYDCGEGPDGANTKKSHKATVHVRVNDVNEFAPVFVERLYRAAVTEGKLYDRILRVEAIDGDCSPQYSQ

SEQ ID NO: 3060 - protein, 154 aa, Homo Sapiens
MENDNTVLLNPPLFALDKDAPLRYAGEICGFRLHGSGVPFEAVILDKATGEGLIRAKEPVDCEAQKEHTFTIQAYDCGEGPDGANTKKSHKATVHVRVNDVNEFAPVFVERLYRAAVTEGKLYDRILRVEAIDGDCSPQYSQICYYEILTPNTP

SEQ ID NO: 3061 - protein, 134 aa, Homo Sapiens
MTLLLLPLLLASLLASCSCNKANKHKPWIEAEYQGIVMENDNTVLLNPPLFALDKDAPLRYAGEICGFRLHGSGVPFEAVILDKATGEGLIRAKEPVDCEAQKEHTFTIQAYDCGEGPDGANTKKSHKATVHVR

SEQ ID NO: 3062 - protein, 956 aa, Homo Sapiens
MTLLLLPLLLASLLASCSCNKANKHKPWIEAEYQGIVMENDNTVLLNPPLFALDKDAPLRYAGEICGFRLHGSGVPFEAVILDKATGEGLIRAKEPVDCEAQKEHTFTIQAYDCGEGPDGANTKKSHKATVHVRVNDVNEFAPVFVERLYRAAVTEGKLYDRILRVEAIDGDCSPQYSQICYYEILTPNTPFLIDNDGNIENTEKLQYSGERLYKFTVTAYDCGKKRAADDAEVEIQVKPTCKPSWQGWNKRIEYAPGAGSLALFPGIRLETCDEPLWNIQATIELQTSHVAKGCDRDNYSERALRKLCGAATGEVDLLPMPGPNANWTAGLSVHYSQDSSLIYWFNGTQAVQVPLGGPSGLGSGPQDSLSDHFTLSFWMKHGVTPNKGKKEEETIVCNTVQNEDGFSHYSLTVHGCRIAFLYWPLLESARPVKFLWKLEQVCDDEWHHYALNLEFPTVTLYTDGISFDPALIHDNGLIHPPRREPALMIGACWTEEKNKEKEKGDNSTDTTQGDPLSIHHYFHGYLAGFSVRSGRLESREVIECLYACREGLDYRDFESLGKGMKVHVNPSQSLLTLEGDDVETFNHALQHVAYMNTLRFATPGVRPLRLTTAVKCFSEESCVSIPEVEGYVVVLQPDAPQILLSGTAHFARPAVDFEGTNGVPLFPDLQITCSISHQVEAKKDESWQGTVTDTRMSDEIVHNLDGCEISLVGDDLDPERESLLLDTTSLQQRGLELTNTSAYLTIAGVESITVYEEILRQARYRLRHGAALYTRKFRLSCSEMNGRYSSNEFIVEVNVLHSMNRVAHPSHVLSSQQFLHRGHQPPPEMAGHSLASSHRNSMIPSAATLIIVVCVGFLVLMVVLGLVRIHSLHRRVSGAGGPPGASSDPKDPDLFWDDSALTIIVNPMESYQNRQSCVTGAVGGQQEDEDSSDSEVADSPSSDERRIIETPPHRY

SEQ ID NO: 3063 - protein, 968 aa, Homo Sapiens
MVLGCELSGSTRVVVGVEALLTGASSPLPGVGPANKHKPWIEAEYQGIVMENDNTVLLNPPLFALDKDAPLRYAGEICGFRLHGSGVPFEAVILDKATGEGLIRAKEPVDCEAQKEHTFTIQAYDCGEGPDGANTKKSHKATVHVRVNDVNEFAPVFVERLYRAAVTEGKLYDRILRVEAIDGDCSPQYSQICYYEILTPNTPFLIDNDGNIENTEKLQYSGERLYKFTVTAYDCGKKRAADDAEVEIQVKPTCKPSWQGWNKRIEYAPGAGSLALFPGIRLETCDEPLWNIQATIELQTSHVAKGCDRDNYSERALRKLCGAATGEVDLLPMPGPNANWTAGLSVHYSQDSSLIYWFNGTQAVQVPLGGPSGLGSGPQDSLSDHFTLSFWMKHGVTPNKGKKEEETIVCNTVQNEDGFSHYSLTVHGCRIAFLYWPLLESARPVKFLWKLEQVCDDEWHHYALNLEFPTVTLYTDGISFDPALIHDNGLIHPPRREPALMIGACWTEEKNKEKEKGDNSTDTTQGDPLSIHHYFHGYLAGFSVRSGRLESREVIECLYACREGLDYRDFESLGKGMKVHVNPSQSLLTLEGDDVETFNHALQHVAYMNTLRFATPGVRPLRLTTAVKCFSEESCVSIPEVEGYVVVLQPDAPQILLSGTAHFARPAVDFEGTNGVPLFPDLQITCSISHQVEAKKDESWQGTVTDTRMSDEIVHNLDGCEISLVGDDLDPERESLLLDTTSLQQRGLELTNTSAYLTIAGVESITVYEEILRQARYRLRHGAALYTRKFRLSCSEMNGRYSSNEFIVEVNVLHSMNRVAHPSHVLSSQQFLHRGHQPPPEMAGHSLASSHRNSMIPSAATLIIVVCVGFLVLMVVLGLVRIHSLHRRVSGAGGPPGASSDPKDPDLFWDDSALTIIVNPMESYQNRQSCVTGAVGGQQEDEDSSDSEVADSPSSDERRIIETPPHRY

SEQ ID NO: 3064 - protein, 176 aa, Homo Sapiens
MVVITNKHKPWIEAEYQGIVMENDNTVLLNPPLFALDKDAPLRYAGEICGFRLHGSGVPFEAVILDKATGEGLIRAKEPVDCEAQKEHTFTIQAYDCGEGPDGANTKKSHKATVHVRVNDVNEFAPVFVERLYRAAVTEGKLYDRILRVEAIDGDCSPQYSQICYYEILTPNTPFL

SEQ ID NO: 3065 - protein, 297 aa, Homo Sapiens
MEACKDSRIGGMMKTLLLFVGLLLTWESGQVLGDQTVSDNELQEMSNQGSKYVNKEIQNAVNGVKQIKTLIEKTNEERKTLLSNLEEAKKKKEDALNETRESETKLKELPGVCNETMMALWEECKPCLKQTCMKFYARVCRSGSGLVGRQLEEFLNQSSPFYFWMNGDRIDSLLENDRQQTHMLDVMQDHFSRASSIIDELFQDRFFTREPQDTYHYLPFSLPHRRPHFFFPKSRIVRSLMPFSPYEPLNFHAMFQPFLEMIHEAQQAMDIHFHSPAFQHPPTEFIREGDDDRTVCR

SEQ ID NO: 3066 - protein, 32 aa, Homo Sapiens
MMKTLLLFVGLLLTWESGQVLGDQTVSDNELQ

SEQ ID NO: 3067 - protein, 82 aa, Homo Sapiens
MMKTLLLFVGLLLTWESGQVLGDQTVSDNELQEMSNQGSKYVNKEIQNAVNGVKQIKTLIEKTNEERKTLLSNLEEAKKKKE

SEQ ID NO: 3068 - protein, 82 aa, Homo Sapiens; identical to SEQ ID NO: 3067

SEQ ID NO: 3069 - protein, 129 aa, Homo Sapiens
MMKTLLLFVGLLLTWESGQVLGDQTVSDNELQEMSNQGSKYVNKEIQNAVNGVKQIKTLIEKTNEERKTLLSNLEEAKKKKEDALNETRESETKLKELPGVCNETMMALWEECKPCLKQTCMKFYARVC

SEQ ID NO: 3070 - protein, 136 aa, Homo Sapiens
MMKTLLLFVGLLLTWESGQVLGDQTVSDNELQEMSNQGSKYVNKEIQNAVNGVKQIKTLIEKTNEERKTLLSNLEEAKKKKEDALNETRESETKLKELPGVCNETMMALWEECKPCLKQTCMKFYARVCRSGSGLV

SEQ ID NO: 3071 - protein, 139 aa, Homo Sapiens
MMKTLLLFVGLLLTWESGQVLGDQTVSDNELQEMSNQGSKYVNKEIQNAVNGVKQIKTLIEKTNEERKTLLSNLEEAKKKKEDALNETRESETKLKELPGVCNETMMALWEECKPCLKQTCMKFYARVCRSGSGLVGRQ

SEQ ID NO: 3072 - protein, 204 aa, Homo Sapiens
MMKTLLLFVGLLLTWESGQVLGDQTVSDNELQEMSNQGSKYVNKEIQNAVNGVKQIKTLIEKTNEERKTLLSNLEEAKKKKEDALNETRESETKLKELPGVCNETMMALWEECKPCLKQTCMKFYARVCRSGSGLVGRQLEEFLNQSSPFYFWMNGDRIDSLLENDRQQTHMLDVMQDHFSRASSIIDELFQDRFFTREPQDTY

SEQ ID NO: 3073 - protein, 449 aa, Homo Sapiens
MMKTLLLFVGLLLTWESGQVLGDQTVSDNELQEMSNQGSKYVNKEIQNAVNGVKQIKTLIEKTNEERKTLLSNLEEAKKKKEDALNETRESETKLKELPGVCNETMMALWEECKPCLKQTCMKFYARVCRSGSGLVGRQLEEFLNQSSPFYFWMNGDRIDSLLENDRQQTHMLDVMQDHFSRASSIIDELFQDRFFTREPQDTYHYLPFSLPHRRPHFFFPKSRIVRSLMPFSPYEPLNFHAMFQPFLEMIHEAQQAMDIHFHSPAFQHPPTEFIREGDDDRTVCREIRHNSTGCLRMKDQCDKCREILSVDCSTNNPSQAKLRRELDESLQVAERLTRKYNELLKSYQWKMLNTSSLLEQLNEQFNWVSRLANLTQGEDQYYLRVTTVASHTSDSDVPSGVTEVVVKLFDSDPITVTVPVEVSRKNPKFMETVAEKALQEYRKKHREE

SEQ ID NO: 3074 - protein, 449 aa, Homo Sapiens; identical to SEQ ID NO: 3073

SEQ ID NO: 3075 - protein, 449 aa, Homo Sapiens; identical to SEQ ID NO: 3073

SEQ ID NO: 3076 - protein, 271 aa, Homo Sapiens
MMKTLLLFVGLLLTWESGQVLGDQTVSDNELQEMSNQGSKYVNKEIQNAVNGVKQIKTLIEKTNEERKTLLSNLEEAKKKKEDALNETRESETKLKELPGVCNETMMALWEECKPCLKQTCMKFYARVCRSGSGLVGRQLEEFLNQSSPFYFWMNGDRIDSLLENDRQQTHMLDVMQDHFSRASSIIDELFQDSLMPFSPYEPLNFHAMFQPFLEMIHEAQQAMDIHFHSPAFQHPPTEFIREGDDDRTVCREIRHNSTGCLRMKDQCDKC

SEQ ID NO: 3077 - protein, 140 aa, Homo Sapiens
  misc_feature (1)..(1): Xaa can be any naturally occurring amino acid
XADCSTNNPSQAKLRRELDESLQVAERLTRKYNELLKSYQWKMLNTSSLLEQLNEQFNWVSRLANLTQGEDQYYLRVTTVASHTSDSDVPSGVTEVVVKLFDSDPITVTVPVEVSRKNPKFMETVAEKALQEYRKKHREE

SEQ ID NO: 3078 - protein, 284 aa, Homo Sapiens
  misc_feature (1)..(1): Xaa can be any naturally occurring amino acid
XQLEEFLNQSSPFYFWMNGDRIDSLLENDRQQTHMLDVMQDHFSRASSIIDELFQDRFFTREPQDTYHYLPFSLPHRRPHFFFPKSRIVRSLMPFSPYEPLNFHAMFQPFLEMIHEAQQAMDIHFHSPAFQHPPTEFIREGDDDRTVCREIRHNSTGCLRMKDQCDKCREILSVDCSTNNPSQAKLRRELDESLQVAERLTRKYNELLKSYQWKMLNTSSLLEQLNEQFNWVSRLANLTQGEDQYYLRVTTVASHTSDSDVPSGVTEVVVKLFDSDPITVTVPV

SEQ ID NO: 3079 - protein, 466 aa, Homo Sapiens
MKPPLLVFIVCLLWLKDSHCAPTWKDKTAISENLKSFSEVGEIDADEEVKKALTGIKQMKIMMERKEKEHTNLMSTLKKCREEKQEALKLLNEVQEHLEEEERLCRESLADSWGECRSCLENNCMRIYTTCQPSWSSVKNKIERFFRKIYQFLFPFHEDNEKDLPISEKLIEEDAQLTQMEDVFSQLTVDVNSLFNRSFNVFRQMQQEFDQTFQSHFISDTDLTEPYFFPAFSKEPMTKADLEQCWDIPNFFQLFCNFSVSIYESVSETITKMLKAIEDLPKQDKAPDHGGLISKMLPGQDRGLCGELDQNLSRCFKFHEKCQKCQAHLSEDCPDVPALHTELDEAIRLVNVSNQQYGQILQMTRKHLEDTAYLVEKMRGQFGWVSELANQAPETEIIFNSIQVVPRIHEGNISKQDETMMTDLSILPSSNFTLKIPLEESAESSNFIGYVVAKALQHFKEHFKTW

SEQ ID NO: 3080 - protein, 466 aa, Homo Sapiens; identical to SEQ ID NO: 3079

SEQ ID NO: 3081 - protein, 466 aa, Homo Sapiens; identical to SEQ ID NO: 3079

SEQ ID NO: 3082 - protein, 491 aa, Homo Sapiens
MNSMEAAVGTEVPLLDNLQHCNSGNMKPPLLVFIVCLLWLKDSHCAPTWKDKTAISENLKSFSEVGEIDADEEVKKALTGIKQMKIMMERKEKEHTNLMSTLKKCREEKQEALKLLNEVQEHLEEEERLCRESLADSWGECRSCLENNCMRIYTTCQPSWSSVKNKIERFFRKIYQFLFPFHEDNEKDLPISEKLIEEDAQLTQMEDVFSQLTVDVNSLFNRSFNVFRQMQQEFDQTFQSHFISDTDLTEPYFFPAFSKEPMTKADLEQCWDIPNFFQLFCNFSVSIYESVSETITKMLKAIEDLPKQDKAPDHGGLISKMLPGQDRGLCGELDQNLSRCFKFHEKCQKCQAHLSEDCPDVPALHTELDEAIRLVNVSNQQYGQILQMTRKHLEDTAYLVEKMRGQFGWVSELANQAPETEIIFNSIQVVPRIHEGNISKQDETMMTDLSILPSSNFTLKIPLEESAESSNFIGYVVAKALQHFKEHFKTW

SEQ ID NO: 3083 - protein, 518 aa, Homo Sapiens
MRTWDYRWSLALVAQTGVHCCNLSSLQPLPPRFKRFSCLSLSSGWDYSNSGNMKPPLLVFIVCLLWLKDSHCAPTWKDKTAISENLKSFSEVGEIDADEEVKKALTGIKQMKIMMERKEKEHTNLMSTLKKCREEKQEALKLLNEVQEHLEEEERLCRESLADSWGECRSCLENNCMRIYTTCQPSWSSVKNKIERFFRKIYQFLFPFHEDNEKDLPISEKLIEEDAQLTQMEDVFSQLTVDVNSLFNRSFNVFRQMQQEFDQTFQSHFISDTDLTEPYFFPAFSKEPMTKADLEQCWDIPNFFQLFCNFSVSIYESVSETITKMLKAIEDLPKQDKAPDHGGLISKMLPGQDRGLCGELDQNLSRCFKFHEKCQKCQAHLSEDCPDVPALHTELDEAIRLVNVSNQQYGQILQMTRKHLEDTAYLVEKMRGQFGWVSELANQAPETEIIFNSIQVVPRIHEGNISKQDETMMTDLSILPSSNFTLKIPLEESAESSNFIGYVVAKALQHFKEHFKTW

SEQ ID NO: 3084 - protein, 518 aa, Homo Sapiens; identical to SEQ ID NO: 3083

SEQ ID NO: 3085 - protein, 82 aa, Homo Sapiens
MRTWDYSNSGNMKPPLLVFIVCLLWLKDSHCAPTWKDKTAISENLKSFSEVGEIDADEEVKKALTGIKQMKIMMERKEKEHT

SEQ ID NO: 3086 - protein, 34 aa, Homo Sapiens
  misc_feature (1)..(1): Xaa can be any naturally occurring amino acid
XQFGWVSELANQAPETEIIFNSIQVRRSNASYIQ

SEQ ID NO: 3087 - protein, 136 aa, Homo Sapiens
MLLKLKEKASLTLAVGTLPFPSQFNFVPPGRMCRVAGWGRTGVLKPGSDTLQEVKLRLMDPQACSHFRDFDHNLQLCVGNPRKTKSAFKGDSGGPLLCAGVAQGIVSYGRSDAKPPAVFTRISHYRPWINQILQAN

SEQ ID NO: 3088 - protein, 247 aa, Homo Sapiens
MLLLPLPLLLFLLCSRAEAGEIIGGTECKPHSRPYMAYLEIVTSNGPSKFCGGFLIRRNFVLTAAHCAGRSITVTLGAHNITEEEDTWQKLEVIKQFRHPKYNTSTLHHDIMLLKLKEKASLTLAVGTLPFPSQFNFVPPGRMCRVAGWGRTGVLKPGSDTLQEVKLRLMDPQACSHFRDFDHNLQLCVGNPRKTKSAFKGDSGGPLLCAGVAQGIVSYGRSDAKPPAVFTRISHYRPWINQILQAN

SEQ ID NO: 3089 - protein, 179 aa, Homo Sapiens
MLSRCRSGLLHVLGLSFLLQTRRPILLCSPRLMKPLVVFVLGGPGAGKGTQCARIVEEMDQTMAANAQKNKFLIDGFPRNQDNLQGWNKTMDGKADVSFVLFFDCNNEICIERCLERGKSSGRSDDNRESLEKRIQTYLQSTKPIIDLYEEMGKVKKIDASKSVDEVFDEVVQIFDKEG

SEQ ID NO: 3090 - protein, 58 aa, Homo Sapiens
MLSRCRSGLLHVLGLSFLLQTRRPILLCSPRLMKPLVVFVLGGPGAGKGTQCARIVEG

SEQ ID NO: 3091 - protein, 228 aa, Homo Sapiens
MLSRCRSGLLHVLGLSFLLQTRRPILLCSPRLMKPLVVFVLGGPGAGKGTQCARIVEKYGYTHLSAGELLRDERKNPDSQYGELIEKYIKEGKIVPVEITISLLKREMDQTMAANAQKNKFLIDGFPRNQDNLQGWNKTMDGKADVSFVLFFDCNNEICIERCLERGKSSGRSDDNRESLEKRIQTYLQSTKPIIDLYEEMGKVKKIDASKSVDEVFDEVVQIFDKEG

SEQ ID NO: 3092 - protein, 169 aa, Homo Sapiens
MLSRCRSGLLHVLGLSFLLQTRRPILLCSPRLMKPLVVFVLGGPGAGKGTQCARIVEKYGYTHLSAGELLRDERKNPDSQYGELIEKYIKEGKIVPVEITISLLKREMDQTMAANAQKNKFLIDGFPRNQDNLQGWNKTMDGKADVSFVLFFDCNNENSDLPSVNKANY

SEQ ID NO: 3093 - protein, 436 aa, Homo Sapiens
MPMSSLPAAILSHMTAINNVPPPPLHSIPNLKKSKHINYGQLNALCHIRGQHSRSMSNILSAHDTFMKQYPKVFLHQKPRLPKLFKQEEQRELNEGKEESQHQQPDDSNNIAVHVQRAHGGHILYRPKRATEKFEEFLAILKKLPIHRTPYEHKTVWKFLKTIPDLTFQLNDKHLKTLSKTVFSETWLKGSTVVANDGFYVILKGLARPQTNVYKNLIEGSDSPDSFISQSFHSFIWSEEFKNSTLAEMYLPSYDSMLSKWSTFGTLEVMPQNESETQMFSVVTEDDCEILKIPAKGYAKIKEEKIKLENMQKLKLIRMCPYYEEWPTLSIYELIALLKWKKFPPGHVIVESGNIISFVGYINSGCCNIYRSIIGFVKLRSNKVKRSQKLVYMGKLKEKESFGEISVLLQVPFTCTIITKKEVEMAIIEDKDLFVA

SEQ ID NO: 3094 - protein, 292 aa, Homo Sapiens [sequence omitted]

SEQ ID NO: 3095 - protein, 161 aa, Homo Sapiens
  misc_feature (1)..(1): Xaa can be any naturally occurring amino acid
XGCCNIYRSIIGFVKLRSNKVKRSQKLVYMGKLKEKESFGEISVLLQVPFTCTIITKKEVEMAIIEDKDLFELDPVTKQLMLQTAKPTFGHLTDEDVKNEYLKKEQQKEWKDFKIASWTKEITDFICLYEKHQDNFTLPKIAHLERITKRIKNNSILIHLE

SEQ ID NO: 3096 - protein, 207 aa, Homo Sapiens
  misc_feature (1)..(1): Xaa can be any naturally occurring amino acid
XNMQKLKLIRMCPYYEEWPTLSIYELIALLKWKKFPPGHVIVESGNIISFVGYINSGCCNIYRSIIGFVKLRSNKVKRSQKLVYMGKLKEKESFGEISVLLQVPFTCTIITKKEVEMAIIEDKDLFELDPVTKQLMLQTAKPTFGHLTDEDVKNEYLKKEQQKEWKDFKDKTVKNSLYYKGIIPGFGKWDHYCTSIPRNLKDTLVNY

SEQ ID NO: 3097 - protein, 507 aa, Homo Sapiens
MDPKLGRMAASLLAVLLLLLERGMFSSPSPPPALLEKVFQYIDLHQDEFVQTLKEWVAIESDSVQPVPRFRQELFRMMAVAADTLQRLGARVASVDMGPQQLPDGQSLPIPPVILAELGSDPTKGTVCFYGHLDVQPADRGDGWLTDPYVLTEVDGKLYGRGATDNKGPVLAWINAVSAFRALEQDLPVNIKFIIEGMEEAGSVALEELVEKEKDRFFSGVDYIVISDNLWISQRKPAITYGTRGNSYFMVEVKCRDQDFHSGTFGGILHEPMADLVALLGSLVDSSGHILVPGIYDEVVPLTEEEINTYKAIHLDLEEYRNSSRVEKFLFDTKEEILMHLWRYPSLSIHGIEGAFDEPGTKTVIPGRVIGKFSIRLVPHMNVSAVEKQVTRHLEDVFSKRNSSNKMVVSMTLGLHPWIANIDDTQYLAAKRAIRTVFGTEPDMIRDGSTIPIAKMFQEIVHKSVVLIPLGAVDDGEHSQNEKINRWNYIEGTKLFAAFFLEMAQLH

SEQ ID NO: 3098 - protein, 464 aa, Homo Sapiens
MDPKLGRMTLKEWVAIESDSVQPVPRFRQELFRMMAVAADTLQRLGARVASVDMGPQQLPDGQSLPIPPVILAELGSDPTKGTVCFYGHLDVQPADRGDGWLTDPYVLTEVDGKLYGRGATDNKGPVLAWINAVSAFRALEQDLPVNIKFIIEGMEEAGSVALEELVEKEKDRFFSGVDYIVISDNLWISQRKPAITYGTRGNSYFMVEVKCRDQDFHSGTFGGILHEPMADLVALLGSLVDSSGHILVPGIYDEVVPLTEEEINTYKAIHLDLEEYRNSSRVEKFLFDTKEEILMHLWRYPSLSIHGIEGAFDEPGTKTVIPGRVIGKFSIRLVPHMNVSAVEKQVTRHLEDVFSKRNSSNKMVVSMTLGLHPWIANIDDTQYLAAKRAIRTVFGTEPDMIRDGSTIPIAKMFQEIVHKSVVLIPLGAVDDGEHSQNEKINRWNYIEGTKLFAAFFLEMAQLH

SEQ ID NO: 3099 - protein, 38 aa, Homo Sapiens
  misc_feature (1)..(1): Xaa can be any naturally occurring amino acid
XADRGDGWLTDPYVLTEGNFMDEERPTTKALSWLGSML

SEQ ID NO: 3100 - protein, 61 aa, Homo Sapiens
ILQKILLDDTGLAYICQTYERFSHVAMILGKMVLQLSKEPSARLLKHVVRCYLRLSDNPRC

SEQ ID NO: 3101 - protein, 41 aa, Homo Sapiens
MHSLATAADLALLPRLECSGVILAHRNLDLLGSVDSPTSAS

SEQ ID NO: 3102 - protein, 299 aa, Homo Sapiens
MHSLATAAPVPTTLAQVDREKIYQWINELSSPETRENALLELSKKRESVPDLAPMLWHSFGTIAALLQEIVNIYPSINPPTLTAHQSNRVCNALALLQCVASHPETRSAFLAAHIPLFLYPFLHTVSKTRPFEYLRLTSLGVIGALVKTDEQEVINFLLTTEIIPLCLRIMESGSELSKTVATFILQKILLDDTGLAYICQTYERFSHVAMILGKMVLQLSKEPSARLLKHVVRCYLRLSDNPRAREALRQCLPDQLKDTTFAQVLKDDTTTKRWLAQLVKNLQEGQVTDPRGIPLPPQ

SEQ ID NO: 3103 - protein, 299 aa, Homo Sapiens; identical to SEQ ID NO: 3102

SEQ ID NO: 3104 - protein, 258 aa, Homo Sapiens
MHSLATAAPVPTTLAQVDREKIYQWINELSSPETRENALLELSKKRESVPDLAPMLWHSFGTIAALLQEIVNIYPSINPPTLTAHQSNRVCNALALLQCVASHPETRSAFLAAHIPLFLYPFLHTVSKTRPFEYLRLTSLGVIGALVKTDEQEVINFLLTTEIIPLCLRIMESGSELSKTVATFILQKILLDDTGLAYICQTYERFSHVAMILGKMVLQLSKEPSARLLKHVVRCYLRLSDNPRFSDLTFCWSSFQRK

SEQ ID NO: 3105 - protein, 331 aa, Homo Sapiens
MHSLATAAPVPTTLAQVDREKIYQWINELSSPETRENALLELSKKRESVPDLAPMLWHSFGTIAALLQEIVNIYPSINPPTLTAHQSNRVCNALALLQCVASHPETRSAFLAAHIPLFLYPFLHTVSKTRPFEYLRLTSLGVIVETGFHHVGQADLELPTSSDLPASASQSAGITGALVKTDEQEVINFLLTTEIIPLCLRIMESGSELSKTVATFILQKILLDDTGLAYICQTYERFSHVAMILGKMVLQLSKEPSARLLKHVVRCYLRLSDNPRAREALRQCLPDQLKDTTFAQVLKDDTTTKRWLAQLVKNLQEGQVTDPRGIPLPPQ

SEQ ID NO: 3106 - protein, 75 aa, Homo Sapiens
MHSLATAAPVPTTLAQVDREKIYQWINELSSPETRENALLELSKKRESVPDLAPMLWHSFGTIAALLQVIVMQVI

SEQ ID NO: 3107 - protein, 80 aa, Homo Sapiens
KNYVRVVGRNGESSELDLQGIRIDSDISGTLKFACESIVEEYEDELIEFFSREADNVKDKLCSKRTDLCDHALHISHDEL

SEQ ID NO: 3108 - protein, 102 aa, Homo Sapiens
MGSFRINPDGSQSVVEVPYARSEAHLTELLEEICDRMKEYGEQIDPSTHRKNYVRVVGRNGESSELDLQGIRIDSDISGTLKFACESIVEEYEDELIEFFSR

SEQ ID NO: 3109 - protein, 168 aa, Homo Sapiens
MKGWGWLALLLGALLGTAWARRSQDLHCGACRALVDELEWEIAQVDPKKTIQMGSFRINPDGSQSVVEVPYARSEAHLTELLEEICDRMKEYGEQIDPSTHRKNYVRVVGRNGESSELDLQGIRIDSDISGTLKFACESIVEEYEDELIEFFSREADNVKDKLCSKRT

SEQ ID NO: 3110 - protein, 182 aa, Homo Sapiens
MKGWGWLALLLGALLGTAWARRSQDLHCGACRALVDELEWEIAQVDPKKTIQMGSFRINPDGSQSVVEVPYARSEAHLTELLEEICDRMKEYGEQIDPSTHRKNYVRVVGRNGESSELDLQGIRIDSDISGTLKFACESIVEEYEDELIEFFSREADNVKDKLCSKRTDLCDHALHISHDEL

SEQ ID NO: 3111 - protein, 41 aa, Homo Sapiens
  misc_feature (1)..(1): Xaa can be any naturally occurring amino acid
XACRALVDELEWEIAQVDPKKTIQMGSFRINPDGSQSVVER

SEQ ID NO: 3112 - protein, 278 aa, Homo Sapiens [sequence omitted]

SEQ ID NO: 3113 - protein, 143 aa, Homo Sapiens
MDSMPEPASRCLLLLPLLLLLLLLLPAPELGPSQAGAEENDWVRLPSKCEVCKYVAVELKSAFEETGKTKEVIGTGYGILDQKASGVKYTKSDLRLIEVTETICKRLLIIACTRRGPAAIDLPRACQRPLRHYTTWYTKGSRW

SEQ ID NO: 3114 - protein, 36 aa, Homo Sapiens
MATLKGLVQKGVKVDLGIPLELWDEPSVEVTYLKKQ

SEQ ID NO: 3115 - protein, 248 aa, Homo Sapiens
MGPVRLGILLFLFLAVHEAWAGMLKEEDDDTERLPSKCEVCKLLSTELQAELSRTGRSREVLELGQVLDTGKRKRHVPYSVSETRLEEALENLCERILDYSVHAERKGSLRYAKGQSQTMATLKGLVQKGVKVDLGIPLELWDEPSVEVTYLKKQCETMLEEFEDIVGDWYFHHQEQPLQNFLCEGHVLPAAETACLQETWTGKEITDGEEKTEGEEEQEEEEEEEEEEGGDKMTKTGSHPKLDREDL

SEQ ID NO: 3116 - protein, 118 aa, Homo Sapiens
  misc_feature (1)..(1): Xaa can be any naturally occurring amino acid
XCKLLSTELQAELSRTGRSREVLELGQVLDTGKRKRHVPYSVSETRLEEALENLCERILDYSVHAERKGSLRYAKGQSQTMATLKGLVQKGVKVDLGIPLELWDEPSVEVTYLKKQSG

SEQ ID NO: 3117 - protein, 372 aa, Homo Sapiens
MAAPVPWACCAVLAAAAAVVYAQRHSPQEAPHVQYERLGSDVTLPCGTANWDAAVTWRVNGTDLAPDLLNGSQLVLHGLELGHSGLYACFHRDSWHLRHQVLLHVGLPPREPVLSCRSNTYPKGFYCSWHLPTPTYIPNTFNVTVLHGSKIMVCEKDPALKNRCHIRYMHLFSTIKYKVSISVSNALGHNATAITFDEFTIVKPDPPENVVARPVPSNPRRLEVTWQTPSTWPDPESFPLKFFLRYRPLILDQWQHVELSDGTAHTITDAYAGKEYIIQVAAKDNEIGTWSDWSVAAHATPWTEEPRHLTTEAQAAETTTSTTSSLAPPPTTKICDPGELGSGGGPSAPFLVSVPITLALAAAAATASSLLI

SEQ ID NO: 3118 - protein, 372 aa, Homo Sapiens; identical to SEQ ID NO: 3117

SEQ ID NO: 3119 - protein, 256 aa, Homo Sapiens
MAAPVPWACCAVLAAAAAVVYAQRHSPQEAPHVQYERLGSDVTLPCGTANWDAAVTWRVNGTDLAPDLLNGSQLVLHGLELGHSGLYACFHRDSWHLRHQVLLHVGLPPREPVLSCRSNTYPKGFYCSWHLPTPTYIPNTFNVTVLHGSKIMVCEKDPALKNRCHIRYMHLFSTIKYKVSISVSNALGHNATAITFDEFTIVKPDPPENVVARPVPSNPRRLEVTWQTPSTWPDPESFPLKFFLRYRPLILDQWQH

SEQ ID NO: 3120 - protein, 372 aa, Homo Sapiens; identical to SEQ ID NO: 3117

SEQ ID NO: 3121 - protein, 57 aa, Homo Sapiens
KHSIEVPIPRDGEYVVEVRAHSDGGDGVVSQVKISEGKSTSLRSKTAKDHRSIRTMS

SEQ ID NO: 3122 - protein, 63 aa, Homo Sapiens
MKMWLLVSHLVIISITTCLAEFTWYRRYGHGVSEEDKGFGPIFEEQPINTIYPEESLEGKVSL

SEQ ID NO: 3123 - protein, 73 aa, Homo Sapiens
MKMWLLVSHLVIISITTCLAEFTWYRRYGHGVSEEDKGFGPIFEEQPINTIYPEESLEGKVSLNCRARASPFP

SEQ ID NO: 3124 - protein, 85 aa, Homo Sapiens
MKMWLLVSHLVIISITTCLAEFTWYRRYGHGVSEEDKGFGPIFEEQPINTIYPEESLEGKVSLNCRARASPFPVYKWRMNNGDVD

SEQ ID NO: 3125 - protein, 90 aa, Homo Sapiens
MKMWLLVSHLVIISITTCLAEFTWYRRYGHGVSEEDKGFGPIFEEQPINTIYPEESLEGKVSLNCRARASPFPVYKWRMNNGDVDLTSDR

SEQ ID NO: 3126 - protein, 1018 aa, Homo Sapiens
MKMWLLVSHLVIISITTCLAEFTWYRRYGHGVSEEDKGFGPIFEEQPINTIYPEESLEGKVSLNCRARASPFPVYKWRMNNGDVDLTSDRYSMVGGNLVINNPDKQKDAGIYYCLASNNYGMVRSTEATLSFGYLDPFPPEERPEVRVKEGKGMVLLCDPPYHFPDDLSYRWLLNEFPVFITMDKRRFVSQTNGNLYIANVEASDKGNYSCFVSSPSITKSVFSKFIPLIPIPERTTKPYPADIVVQFKDVYALMGQNVTLECFALGNPVPDIRWRKVLEPMPSTAEISTSGAVLKIFNIQLEDEGIYECEAENIRGKDKHQARIYVQAFPEWVEHINDTEVDIGSDLYWPCVATGKPIPTIRWLKNGYAYHKGELRLYDVTFENAGMYQCIAENTYGAIYANAELKILALAPTFEMNPMKKKILAAKGGRVIIECKPKAAPKPKFSWSKGTEWLVNSSRILIWEDGSLEINNITRNDGGIYTCFAENNRGKANSTGTLVITDPTRIILAPINADITVGENATMQCAASFDPALDLTFVWSFNGYVIDFNKENIHYQRNFMLDSNGELLIRNAQLKHAGRYTCTAQTIVDNSSASADLVVRGPPGPPGGLRIEDIRATSVALTWSRGSDNHSPISKYTIQTKTILSDDWKDAKTDPPIIEGNMEAARAVDLIPWMEYEFRVVATNTLGRGEPSIPSNRIKTDGAAPNVAPSDVGGGGGRNRELTITWAPLSREYHYGNNFGYIVAFKPFDGEEWKKVTVTNPDTGRYVHKDETMSPSTAFQVKVKAFNNKGDGPYSLVAVINSAQDAPSEAPTEVGVKVLSSSEISVHWEHVLEKIVESYQIRYWAAHDKEEAANRVQVTSQEYSARLENLLPDTQYFIEVGACNSAGCGPPSDMIEAFTKKAPPSQPPRIISSVRSGSRYIITWDHVVALSNESTVTGYKVLYRPDGQHDGKLYSTHKHSIEVPIPRDGEYVVEVRAHSDGGDGVVSQVKISGAPTLSPSLLGLLLPAFGILVYLEF

SEQ ID NO: 3127 - protein, 1018 aa, Homo Sapiens; identical to SEQ ID NO: 3126

SEQ ID NO: 3128 - protein, 627 aa, Homo Sapiens
MKMWLLVSHLVIISITTCLAEFTWYRRYGHGVSEEDKGFGPIFEEQPINTIYPEESLEGKVSLNCRARASPFPVYKWRMNNGDVDLTSDRYSMVGGNLVINNPDKQKDAGIYYCLASNNYGMVRSTEATLSFGYLDPFPPEERPEVRVKEGKGMVLLCDPPYHFPDDLSYRWLLNEFPVFITMDKRRFVSQTNGNLYIANVEASDKGNYSCFVSSPSITKSVFSKFIPLIPIPERTTKPYPADIVVQFKDVYALMGQNVTLECFALGNPVPDIRWRKVLEPMPSTAEISTSGAVLKIFNIQLEDEGIYECEAENIRGKDKHQARIYVQAFPEWVEHINDTEVDIGSDLYWPCVATGKPIPTIRWLKNGYAYHKGELRLYDVTFENAGMYQCIAENTYGAIYANAELKILALAPTFEMNPMKKKILAAKGGRVIIECKPKAAPKPKFSWSKGTEWLVNSSRILIWEDGSLEINNITRNDGGIYTCFAENNRGKANSTGTLVITDPTRIILAPINADITVGENATMQCAASFDPALDLTFVWSFNGYVIDFNKENIHYQRNFMLDSNGELLIRNAQLKHAGRYTCTAQTIVDNSSASADLVVRGKNRKGGEKNMVDSFLPVCASLPPTW

SEQ ID NO: 3129 - protein, 627 aa, Homo Sapiens; identical to SEQ ID NO: 3128

SEQ ID NO: 3130 - protein, 1007 aa, Homo Sapiens
MKMWLLVSHLVIISITTCLAVSEEDKGFGPIFEEQPINTIYPEESLEGKVSLNCRARASPFPVYKWRMNNGDVDLTSDRYSMVGGNLVINNPDKQKDAGIYYCLASNNYGMVRSTEATLSFGYLDPFPPEERPEVRVKEGKGMVLLCDPPYHFPDDLSYRWLLNEFPVFITMDKRRFVSQTNGNLYIANVEASDKGNYSCFVSSPSITKSVFSKFIPLIPIPERTTKPYPADIVVQFKDVYALMGQNVTLECFALGNPVPDIRWRKVLEPMPSTAEISTSGAVLKIFNIQLEDEGIYECEAENIRGKDKHQARIYVQAFPEWVEHINDTEVDIGSDLYWPCVATGKPIPTIRWLKNGYAYHKGELRLYDVTFENAGMYQCIAENTYGAIYANAELKILALAPTFEMNPMKKKILAAKGGRVIIECKPKAAPKPKFSWSKGTEWLVNSSRILIWEDGSLEINNITRNDGGIYTCFAENNRGKANSTGTLVITDPTRIILAPINADITVGENATMQCAASFDPALDLTFVWSFNGYVIDFNKENIHYQRNFMLDSNGELLIRNAQLKHAGRYTCTAQTIVDNSSASADLVVRGPPGPPGGLRIEDIRATSVALTWSRGSDNHSPISKYTIQTKTILSDDWKDAKTDPPIIEGNMEAARAVDLIPWMEYEFRVVATNTLGRGEPSIPSNRIKTDGAAPNVAPSDVGGGGGRNRELTITWAPLSREYHYGNNFGYIVAFKPFDGEEWKKVTVTNPDTGRYVHKDETMSPSTAFQVKVKAFNNKGDGPYSLVAVINSAQDAPSEAPTEVGVKVLSSSEISVHWEHVLEKIVESYQIRYWAAHDKEEAANRVQVTSQEYSARLENLLPDTQYFIEVGACNSAGCGPPSDMIEAFTKKAPPSQPPRIISSVRSGSRYIITWDHVVALSNESTVTGYKVLYRPDGQHDGKLYSTHKHSIEVPIPRDGEYVVEVRAHSDGGDGVVSQVKISGAPTLSPSLLGLLLPAFGILVYLEF

SEQ ID NO: 3131 - protein, 1040 aa, Homo Sapiens
MGTATRRKPHLLLVAAVALVSSSAWSSALGSQTTFGPVFEDQPLSVLFPEESTEEQVLLACRARASPPATYRWKMNGTEMKLEPGSRHQLVGGNLVIMNPTKAQDAGVYQCLASNPVGTVVSREAILRFGFLQEFSKEERDPVKAHEGWGVMLPCNPPAHYPGLSYRWLLNEFPNFIPTDGRHFVSQTTGNLYIARTNASDLGNYSCLATSHMDFSTKSVFSKFAQLNLAAEDTRLFAPSIKARFPAETYALVGQQVTLECFAFGNPVPRIKWRKVDGSLSPQWTTAEPTLQIPSVSFEDEGTYECEAENSKGRDTVQGRIIVQAQPEWLKVISDTEADIGSNLRWGCAAAGKPRPTVRWLRNGEPLASQNRVEVLAGDLRFSKLSLEDSGMYQCVAENKHGTIYASAELAVQALAPDFRLNPVRRLIPAARGGEILIPCQPRAAPKAVVLWSKGTEILVNSSRVTVTPDGTLIIRNISRSDEGKYTCFAENFMGKANSTGILSVRDATKITLAPSSADINLGDNLTLQCHASHDPTMDLTFTWTLDDFPIDFDKPGGHYRRTNVKETIGDLTILNAQLRHGGKYTCMAQTVVDSASKEATVLVRGPPGPPGGVVVRDIGDTTIQLSWSRGFDNHSPIAKYTLQARTPPAGKWKQVRTNPANIEGNAETAQVLGLTPWMDYEFRVIASNILGTGEPSGPSSKIRTREAAPSVAPSGLSGGGGAPGELIVNWTPMSREYQNGDGFGYLLSFRRQGSTHWQTARVPGADAQYFVYSNESVRPYTPFEVKIRSYNRRGDGPESLTALVYSAEEEPRVAPTKVWAKGVSSSEMNVTWEPVQQDMNGILLGYEIRYWKAGDKEAAADRVRTAGLDTSARVSGLHPNTKYHVTVRAYNRAGTGPASPSANATTMKPPPRRPPGNISWTFSSSSLSIKWDPVVPFRNESAVTGYKMLYQNDLHLTPTLHLTGKNWIEIPVPEDIGHALVQIRTTGPGGDGIPAEVHIVRNGGTSMMVENMAVRPAPHPGTVISHSVAMLILIGSLEL

SEQ ID NO: 3132 - protein, 1040 aa, Homo Sapiens; identical to SEQ ID NO: 3131

SEQ ID NO: 3133 - protein, 1085 aa, Homo Sapiens
MGTATRRKPHLLLVAAVALVSSSAWSSALGSQTTFGPVFEDQPLSVLFPEESTEEQVLLACRARASPPATYRWKMNGTEMKLEPGSRHQLVGGNLVIMNPTKAQDAGVYQCLASNPVGTVVSREAILRFGFLQEFSKEERDPVKAHEGWGVMLPCNPPAHYPGLSYRWLLNEFPNFIPTDGRHFVSQTTGNLYIARTNASDLGNYSCLATSHMDFSTKSVFSKFAQLNLAAEDTRLFAPSIKARFPAETYALVGQQVTLECFAFGNPVPRIKWRKVDGSLSPQWTTAEPTLQIPSVSFEDEGTYECEAENSKGRDTVQGRIIVQAQPEWLKVISDTEADIGSNLRWGCAAAGKPRPTVRWLRNGEPLASQNRVEVLAGDLRFSKLSLEDSGMYQCVAENKHGTIYASAELAVQALAPDFRLNPVRRLIPAARGGEILIPCQPRAAPKAVVLWSKGTEILVNSSRVTVTPDGTLIIRNISRSDEGKYTCFAENFMGKANSTGILSVRDATKITLAPSSADINLGDNLTLQCHASHDPTMDLTFTWTLDDFPIDFDKPGGHYRRTNVKETIGDLTILNAQLRHGGKYTCMAQTVVDSASKEATVLVRGPPGPPGGVVVRDIGDTTIQLSWSRGFDNHSPIAKYTLQARTPPAGKWKQVRTNPANIEGNAETAQVLGLTPWMDYEFRVIASNILGTGEPSGPSSKIRTREAAPSVAPSGLSGGGGAPGELIVNWTPMSREYQNGDGFGYLLSFRRQGSTHWQTARVPGADAQYFVYSNESVRPYTPFEVKIRSYNRRGDGPESLTALVYSAEEEPRVAPTKVWAKGVSSSEMNVTWEPVQQDMNGILLGYEIRYWKAGDKEAAADRVRTAGLDTSARVSGLHPNTKYHVTVRAYNRAGTGPASPSANATTMKPPPRRPPGNISWTFSSSSLSIKWDPVVPFRNESAVTGYKMLYQNDLHLTPTLHLTGKNWIEIPVPEDIGHALVQIRTTGPGGDGIPAEVHIVRNGEMALWDPIRTPPLESSPRPGRNTRHEQVEELERSAHLTILQSKEEGQALGPRALPPSPSSSSKDPDAVPDNSLGAPACPSG

SEQ ID NO: 3134 - protein, 1040 aa, Homo Sapiens; identical to SEQ ID NO: 3131

SEQ ID NO: 3135 - protein, 1040 aa, Homo Sapiens; identical to SEQ ID NO: 3131

SEQ ID NO: 3136 - protein, 764 aa, Homo Sapiens
MGTATRRKPHLLLVAAVALVSSSAWSSALGSQTTFGPVFEDQPLSVLFPEESTEEQVLLACRARASPPATYRWKMNGTEMKLEPGSRHQLVGGNLVIMNPTKAQDAGVYQCLASNPVGTVVSREAILRFGFLQEFSKEERDPVKAHEGWGVMLPCNPPAHYPGLSYRWLLNEFPNFIPTDGRHFVSQTTGNLYIARTNASDLGNYSCLATSHMDFSTKSVFSKFAQLNLAAEDTRLFAPSIKARFPAETYALVGQQVTLECFAFGNPVPRIKWRKVDGSLSPQWTTAEPTLQIPSVSFEDEGTYECEAENSKGRDTVQGRIIVQAQPEWLKVISDTEADIGSNLRWGCAAAGKPRPTVRWLRNGEPLASQNRVEVLAGDLRFSKLSLEDSGMYQCVAENKHGTIYASAELAVQALAPDFRLNPVRRLIPAARGGEILIPCQPRAAPKAVVLWSKGTEILVNSSRVTVTPDGTLIIRNISRSDEGKYTCFAENFMGKANSTGILSVRDATKITLAPSSADINLGDNLTLQCHASHDPTMDLTFTWTLDDFPIDFDKPGGHYRRTNVKETIGDLTILNAQLRHGGKYTCMAQTVVDSASKEATVLVRGPPGPPGGVVVRDIGDTTIQLSWSRGFDNHSPIAKYTLQARTPPAGKWKQVRTNPANIEGNAETAQVLGLTPWMDYEFRVIASNILGTGEPSGPSSKIRTREAAPSVAPSGLSGGGGAPGELIVNWTAGQHSLADRPGAWRRCPVLCLQQRERPALHAL

SEQ ID NO: 3137 - protein, 41 aa, Homo Sapiens
MGTATRRKPHLLLVAAVALVSSSGEDTEAQKSSITFPRSHS

SEQ ID NO: 3138 - protein, 41 aa, Homo Sapiens; identical to SEQ ID NO: 3137

SEQ ID NO: 3139 - protein, 527 aa, Homo Sapiens
  misc_feature (1)..(1): Xaa can be any naturally occurring amino acid
XAQTVVDSASKEATVLVRGPPGPPGGVVVRDIGDTTIQLSWSRGFDNHSPIAKYTLQARTPPAGKWKQVRTNPANIEGNAETAQVLGLTPWMDYEFRVIASNILGTGEPSGPSSKIRTREAAPSVAPSGLSGGGGAPGELIVNWTPMSREYQNGDGFGYLLSFRRQGSTHWQTARVPGADAQYFVYSNESVRPYTPFEVKIRSYNRRGDGPESLTALVYSAEEEPRVAPTKVWAKGVSSSEMNVTWEPVQQDMNGILLGYEIRYWKAGDKEAAADRVRTAGLDTSARVSGLHPNTKYHVTVRAYNRAGTGPASPSANATTMKPPPRRPPGNISWTFSSSSLSIKWDPVVPFRNESAVTGYKMLYQNDLHLTPTLHLTGKNWIEIPVPEDIGHALVQIRTTGPGGDGIPAEVHIVRNGGAAPPLPLSPREIQDPPRYLRGSFPPRPTPISTRKGKWKAGRNQVQSSLRTASPPPFYPAPRTSPRAREGRRVQGEAEDQPAIANGLQSTVGVGLRRPPSRPLPGLQLAL

SEQ ID NO: 3140 - protein, 115 aa, Homo Sapiens
  misc_feature (1)..(1): Xaa can be any naturally occurring amino acid
XGKANSTGILSVRDATKITLAPSSADINLGDNLTLQCHASHDPTMDLTFTWTLDDFPIDFDKPGGHYRRTNVKETIGDLTILNAQLRHGGKYTCMAQTVVDSASKEATVLVRGPK

SEQ ID NO: 3141 - protein, 473 aa, Homo Sapiens
  misc_feature (1)..(1): Xaa can be any naturally occurring amino acid
XIKWRKVDGSLSPQWTTAEPTLQIPSVSFEDEGTYECEAENSKGRDTVQGRIIVQAQPEWLKVISDTEADIGSNLRWGCAAAGKPRPTVRWLRNGEPLASQNRVEVLAGDLRFSKLSLEDSGMYQCVAENKHGTIYASAELAVQALAPDFRLNPVRRLIPAARGGEILIPCQPRAAPKAVVLWSKGTEILVNSSRVTVTPDGTLIIRNISRSDEGKYTCFAENFMGKANSTGILSVRDATKITLAPSSADINLGDNLTLQCHASHDPTMDLTFTWTLDDFPIDFDKPGGHYRRTNVKETIGDLTILNAQLRHGGKYTCMAQTVVDSASKEATVLVRGPPGPPGGVVVRDIGDTTIQLSWSRGFDNHSPIAKYTLQARTPPAGKWKQVRTNPANIEGNAETAQVLGLTPWMDYEFRVIASNILGTGEPSGPSSKIRTREAAPSVAPSGLSGGGGAPGELIVNWTQRERPALHAL

SEQ ID NO: 3142 - protein, 1011 aa, Homo Sapiens
  misc_feature (1)..(1): Xaa can be any naturally occurring amino acid
XPTDGRHFVSQTTGNLYIARTNASDLGNYSCLATSHMDFSTKSVFSKFAQLNLAAEDTRLFAPSIKARFPAETYALVGQQVTLECFAFGNPVPRIKWRKVDGSLSPQWTTAEPTLQIPSVSFEDEGTYECEAENSKGRDTVQGRIIVQAQPEWLKVISDTEADIGSNLRWGCAAAGKPRPTVRWLRNGEPLASQNRVEVLAGDLRFSKLSLEDSGMYQCVAENKHGTIYASAELAVQALAPDFRLNPVRRLIPAARGGEILIPCQPRAAPKAVVLWSKGTEILVNSSRVTVTPDGTLIIRNISRSDEGKYTCFAENFMGKANSTGILSVRDATKITLAPSSADINLGDNLTLQCHASHDPTMDLTFTWTLDDFPIDFDKPGGHYRRTNVKETIGDLTILNAQLRHGGKYTCMAQTVVDSASKEATVLVRGPPGPPGGVVVRDIGDTTIQLSWSRGFDNHSPIAKYTLQARTPPAGKWKQVRTNPANIEGNAETAQVLGLTPWMDYEFRVIASNILGTGEPSGPSSKIRTREAAPSVAPSGLSGGGGAPGELIVNWTPMSREYQNGDGFGYLLSFRRQGSTHWQTARVPGADAQYFVYSNESVRPYTPFEVKIRSYNRRGDGPESLTALVYSAEEEPRVAPTKVWAKGVSSSEMNVTWEPVQQDMNGILLGYEIRYWKAGDKEAAADRVRTAGLDTSARVSGLHPNTKYHVTVRAYNRAGTGPASPSANATTMKPPPRRPPGNISWTFSSSSLSIKWDPVVPFRNESAVTGYKMLYQNDLHLTPTLHLTGKNWIEIPVPEDIGHALVQIRTTGPGGDGIPAEVHIVRNGGAAPPLPLSPREIQDPPRYLRGSFPPRPTPISTRKGKWKAGRNQVQSSLRTASPPPFYPAPRTSPRAREGRRVQGEAEDQPAIANGLQSTVGVGLRRPPSRPLPGLQLALHKHDGGEHGSPPSTTPWHRHFPLRGDADPHRLPGALILEPLPLRRSWTPPPTDTASPFLLPRWPDTVPESGWF

SEQ ID NO: 3143 - protein, 1028 aa, Homo Sapiens
MMFPWKQLILLSFIGCLGGELLLQGPVFIKEPSNSIFPVGSEDKKITLHCEARGNPSPHYRWQLNGSDIDMSMEHRYKLNGGNLVVINPNRNWDTGTYQCFATNSLGTIVSREAKLQFAYLENFKTKMRSTVSVREGQGVVLLCGPPPHSGELSYAWIFNEYPSFVEEDSRRFVSQETGHLYISKVEPSDVGNYTCVVTSMVTNARVLGSPTPLVLRSDGVMGEYEPKIEVQFPETLPAAKGSTVKLECFALGNPIPQINWRRSDGLPFSSKIKLRKFSGVLEIPNFQQEDAGSYECIAENSRGKNVARGRLTYYAKPHWVQLIKDVEIAVEDSLYWECRASGKPKPSYRWLKNGAALVLEERTQIENGALTISNLSVTDSGMFQCIAENKHGLVYSSAELKVVASAPDFSKNPMKKLVQVQVGSLVSLDCKPRASPRALSSWKKGDVSVQEHERISLLNDGGLKIANVTKADAGTYTCMAENQFGKANGTTHLVVTEPTRITLAPSNMDVSVGESVILPCQVQHDPLLDIIFTWYFNGALADFKKDGSHFEKVGGSSSGDLMIRNIQLKHSGKYVCMVQTGVDSVSSAADLIVRGSPGPPENVKVDEITDTTAQLSWKEGKDNHSPVISYSIQARTPFSVGWQTVTTVPEVIDGKTHTATVVELNPWVEYEFRVVASNKIGGGEPSLPSEKVRTEEAVPEVPPSEVNGGGGSRSELVITWDPVPEELQNGEGFGYVVAFRPLGVTTWIQTVVTSPDTPRYVFRNESIVPYSPYEVKVGVYNNKGEGPFSPVTTVFSAEEEPTVAPSQVSANSLSSSEIEVSWNTIPWKLSNGHLLGYEVRYWNGGGKEESSSKMKVAGNETSARLRGLKSNLAYYTAVRAYNSAGAGPFSATVNVTTKKTPPSQPPGNVVWNATDTKVLLNWEQVKAMENESEVTGYKVFYRTSSQNNVQVLNTNKTSAELVLPIKEDYIIEVKATTDGGDGTSSEQIRIPRITSMDARGSTSAISNVHPMSSYMPIVLFLIVYVLW

SEQ ID NO: 3144 - protein, 698 aa, Homo Sapiens
MEENVFWECKANGRPKPTYKWLKNGEPLLTRDRIQIEQGTLNITIVNLSDAGMYQCLAENKHGVIFSNAELSVIAVGPDFSRTLLKRVTLVKVGGEVVIECKPKASPKPVYTWKKGRDILKENERITISEDGNLRIINVTKSDAGSYTCIATNHFGTASSTGNLVVKDPTRVMVPPSSMDVTVGESIVLPCQVTHDHSLDIVFTWSFNGHLIDFDRDGDHFERVGGQDSAGDLMIRNIQLKHAGKYVCMVQTSVDRLSAAADLIVRGPPGPPEAVTIDEITDTTAQLSWRPGPDNHSPITMYVIQARTPFSVGWQAVSTVPELIDGKTFTATVVGLNPWVEYEFRTVAANVIGIGEPSRPSEKRRTEEALPEVTPANVSGGGGSKSELVITWETVPEELQNGRGFGYVVAFRPYGKMIWMLTVLASADASRYVFRNESVHPFSPFEVKVGVFNNKGEGPFSPTTVVYSAEEEPTKPPASIFARSLSATDIEVFWASPLEKNRGRIQGYEVKYWRHEDKEENARKIRTVGNQTSTKITNLKGSVLYHLAVKAYNSAGTGPSSATVNVTTRKPPPSQPPGNIIWNSSDSKIILNWDQVKALDNESEVKGYKVLYRWNRQSSTSVIETNKTSVELSLPFDEDYIIEIKPFSDGGDGSSSEQIRIPKISNAYARGSGASTSNACTLSAISTIMISLTARSSL

SEQ ID NO: 3145 - protein, 54 aa, Homo Sapiens
MRLPWELLVLQSFILCLADDSTLHGPIFIQEPSPVMFPLDSEEKKVKLNCEVKG

SEQ ID NO: 3146 - protein, 116 aa, Homo Sapiens
MRLPWELLVLQSFILCLADDSTLHGPIFIQEPSPVMFPLDSEEKKVKLNCEVKGNPKPHIRWKLNGTDVDTGMDFRYSVVEGSLLINNPNKTQDAGTYQCTATNSFGTIVSREAKL

SEQ ID NO: 3147 - protein, 1026 aa, Homo Sapiens
MRLPWELLVLQSFILCLADDSTLHGPIFIQEPSPVMFPLDSEEKKVKLNCEVKGNPKPHIRWKLNGTDVDTGMDFRYSVVEGSLLINNPNKTQDAGTYQCTATNSFGTIVSREAKLQFAYLDNFKTRTRSTVSVRRGQGMVLLCGPPPHSGELSYAWIFNEYPSYQDNRRFVSQETGNLYIAKVEKSDVGNYTCVVTNTVTNHKVLGPPTPLILRNDGVMGEYEPKIEVQFPETVPTAKGATVKLECFALGNPVPTIIWRRADGKPIARKARRHKSNGILEIPNFQQEDAGLYECVAENSRGKNVARGQLTFYAQPNWIQKINDIHVAMEENVFWECKANGRPKPTYKWLKNGEPLLTRDRIQIEQGTLNITIVNLSDAGMYQCLAENKHGVIFSNAELSVIAVGPDFSRTLLKRVTLVKVGGEVVIECKPKASPKPVYTWKKGRDILKENERITISEDGNLRIINVTKSDAGSYTCIATNHFGTASSTGNLVVKDPTRVMVPPSSMDVTVGESIVLPCQVTHDHSLDIVFTWSFNGHLIDFDRDGDHFERVGGQDSAGDLMIRNIQLKHAGKYVCMVQTSVDRLSAAADLIVRGPPGPPEAVTIDEITDTTAQLSWRPGPDNHSPITMYVIQARTPFSVGWQAVSTVPELIDGKTFTATVVGLNPWVEYEFRTVAANVIGIGEPSRPSEKRRTEEALPEVTPANVSGGGGSKSELVITWETVPEELQNGRGFGYVVAFRPYGKMIWMLTVLASADASRYVFRNESVHPFSPFEVKVGVFNNKGEGPFSPTTVVYSAEEEPTKPPASIFARSLSATDIEVFWASPLEKNRGRIQGYEVKYWRHEDKEENARKIRTVGNQTSTKITNLKGSVLYHLAVKAYNSAGTGPSSATVNVTTRKPPPSQPPGNIIWNSSDSKIILNWDQVKALDNESEVKGYKVLYRWNRQSSTSVIETNKTSVELSLPFDEDYIIEIKPFSDGGDGSSSEQIRIPKISNAYARGSGASTSNACTLSAISTIMISLTARSSL

SEQ ID NO: 3148 - protein, 1026 aa, Homo Sapiens; identical to SEQ ID NO: 3147

SEQ ID NO: 3149 - protein, 1026 aa, Homo Sapiens; identical to SEQ ID NO: 3147

SEQ ID NO: 3150 - protein, 232 aa, Homo Sapiens
MRLPWELLVLQSFILCLADDSTLHGPIFIQEPSPVMFPLDSEEKKVKLNCEVKGNPKPHIRWKLNGTDVDTGMDFRYSVVEGSLLINNPNKTQDAGTYQCTATNSFGTIVSREAKLQFAYLDNFKTRTRSTVSVRRGQGMVLLCGPPPHSGELSYAWIFNEYPSYQDNRRFVSQETGNLYIAKVEKSDVGNYTCVVTNTVTNHKVLGPPTPLILRNDVQYQLLSGEELMESQ

SEQ ID NO: 3151 - protein, 137 aa, Homo Sapiens
MRLPWELLVLQSFILCLAGSQTDFWSLLGVLPALEADDSTLHGPIFIQEPSPVMFPLDSEEKKVKLNCEVKGNPKPHIRWKLNGTDVDTGMDFRYSVVEGSLLINNPNKTQDAGTYQCTATNSFGTIVSREAKLQFA

SEQ ID NO: 3152 - protein, 143 aa, Homo Sapiens
NDIHVAMEENVFWECKANGRPKPTYKWLKNGEPLLTRDRIQIEQGTLNITIVNLSDAGMYQCLAENKHGVIFSNAELSVIAVGPDFSRTLLKRVTLVKVGGEVVIECKPKASPKPVYTWKKGRDILKENESVHQGFGSGSAPL

SEQ ID NO: 3153 - protein, 1022 aa, Homo Sapiens [sequence omitted]

SEQ ID NO: 3154 - protein, 1084 aa, Homo Sapiens
LTEYSKSLPGLSTSYAALLRIKKSSSSSLFGSKTRPRYSSPSLGTLSASSPSWLGAAQNYYSPINLYHSSDAFKQDESVDYGPVFVQEPDDIIFPTDSDEKKVALNCEVRGNPVPSYRWLRNGTEIDLESDYRYSLIDGTFIISNPSEAKDSGHYQCLATNTVGSILSREATLQFAYLGNFSGRTRSAVSVREGQGVVLMCSPPPHSPEIIYSWVFNEFPSFVAEDSRRFISQETGNLYISKVQTSDVGSYICLVKNTVTNARVLSPPTPLTLRNDGVMGEYEPKIEVHFPFTVTAAKGTTVKMECFALGNPVPTITWMKVNGYIPSKARLRKSQAVLEIPNVQLDDAGIYECRAENSRGKNSFRGQLQVYTYPHWVEKLNDTQLDSGSPLRWECKATGKPRPTYRWLKNGVPLSPQSRVEMVNGVLMIHNVNQSDAGMYQCLAENKYGAIYASAELKILASAPTFALNQLKKTIIVTKDQEVVIECKPQGSPKPTISWKKGDRAVRENKRIAILPDGSLRILNASKSDEGKYVCRGENVFGSAEIIASLSVKEPTRIELTPKRTELTVGESIVLNCKAIHDASLDVTFYWTLKGQPIDFEEEGGHFESIRAQASSADLMIRNILLMHAGRYGCRVQTTADSVSDEAELLVRGPPGPPGIVIVEEITESTATLSWSPAADNHSPISSYNLQARSPFSLGWQTVKTVPEIITGDMESAMAVDLNPWVEYEFRVVATNPIGTGDPSTPSRMIRTNEAVPKTAPTNVSGRSGRRHELVIAWEPVSEEFQNGEGFGYIVAFRPNGTRGWKEKMVTSSEASKFIYRDESVPPLTPFEVKVGVYNNKGDGPFSQIVVICSAEGEPSAAPTDVKATSVSVSEILVAWKHIKESLGRPQGFEVGYWKDMEQEDTAETVKTRGNESFVILTGLEGNTLYHFTVRAYNGAGYGPPSSEVSATTKKSPPSQAPSNLRWEQQGSQVSLGWEPVIPLANESEVVGYKVFYRQEGHSNSQVIETQKLQAVVPLPDAGVYIIEVRAYSEGGDGTASSQIRVPSYSGGKITSAQSTLHSLSTSSSSVTLLLALMIPSTSW

SEQ ID NO: 3155 - protein, 1026 aa, Homo Sapiens
MASSWKLMLFLSVTMCLSESVDYGPVFVQEPDDIIFPTDSDEKKVALNCEVRGNPVPSYRWLRNGTEIDLESDYRYSLIDGTFIISNPSEAKDSGHYQCLATNTVGSILSREATLQFAYLGNFSGRTRSAVSVREGQGVVLMCSPPPHSPEIIYSWVFNEFPSFVAEDSRRFISQETGNLYISKVQTSDVGSYICLVKNTVTNARVLSPPTPLTLRNDGVMGEYEPKIEVHFPFTVTAAKGTTVKMECFALGNPVPTITWMKVNGYIPSKARLRKSQAVLEIPNVQLDDAGIYECRAENSRGKNSFRGQLQVYTYPHWVEKLNDTQLDSGSPLRWECKATGKPRPTYRWLKNGVPLSPQSRVEMVNGVLMIHNVNQSDAGMYQCLAENKYGAIYASAELKILASAPTFALNQLKKTIIVTKDQEVVIECKPQGSPKPTISWKKGDRAVRENKRIAILPDGSLRILNASKSDEGKYVCRGENVFGSAEIIASLSVKEPTRIELTPKRTELTVGESIVLNCKAIHDASLDVTFYWTLKGQPIDFEEEGGHFESIRAQASSADLMIRNILLMHAGRYGCRVQTTADSVSDEAELLVRGPPGPPGIVIVEEITESTATLSWSPAADNHSPISSYNLQARSPFSLGWQTVKTVPEIITGDMESAMAVDLNPWVEYEFRVVATNPIGTGDPSTPSRMIRTNEAVPKTAPTNVSGRSGRRHELVIAWEPVSEEFQNGEGFGYIVAFRPNGTRGWKEKMVTSSEASKFIYRDESVPPLTPFEVKVGVYNNKGDGPFSQIVVICSAEGEPSAAPTDVKATSVSVSEILVAWKHIKESLGRPQGFEVGYWKDMEQEDTAETVKTRGNESFVILTGLEGNTLYHFTVRAYNGAGYGPPSSEVSATTKKSPPSQAPSNLRWEQQGSQVSLGWEPVIPLANESEVVGYKVFYRQEGHSNSQVIETQKLQAVVPLPDAGVYIIEVRAYSEGGDGTASSQIRVPSYSGGKITSAQSTLHSLSTSSSSVTLLLALMIPSTSW

SEQ ID NO: 3156 - protein, 1100 aa, Homo Sapiens
MASSWKLMLFLSVTMCLSEYSKSLPGLSTSYAALLRIKKSSSSSLFGSKTRPRYSSPSLGTLSASSPSWLGAAQNYYSPINLYHSSDAFKQDESVDYGPVFVQEPDDIIFPTDSDEKKVALNCEVRGNPVPSYRWLRNGTEIDLESDYRYSLIDGTFIISNPSEAKDSGHYQCLATNTVGSILSREATLQFAYLGNFSGRTRSAVSVREGQGVVLMCSPPPHSPEIIYSWVFNEFPSFVAEDSRRFISQETGNLYISKVQTSDVGSYICLVKNTVTNARVLSPPTPLTLRNDGVMGEYEPKIEVHFPFTVTAAKGTTVKMECFALGNPVPTITWMKVNGYIPSKARLRKSQAVLEIPNVQLDDAGIYECRAENSRGKNSFRGQLQVYTYPHWVEKLNDTQLDSGSPLRWECKATGKPRPTYRWLKNGVPLSPQSRVEMVNGVLMIHNVNQSDAGMYQCLAENKYGAIYASAELKILASAPTFALNQLKKTIIVTKDQEVVIECKPQGSPKPTISWKKGDRAVRENKRIAILPDGSLRILNASKSDEGKYVCRGENVFGSAEIIASLSVKEPTRIELTPKRTELTVGESIVLNCKAIHDASLDVTFYWTLKGQPIDFEEEGGHFESIRAQASSADLMIRNILLMHAGRYGCRVQTTADSVSDEAELLVRGPPGPPGIVIVEEITESTATLSWSPAADNHSPISSYNLQARSPFSLGWQTVKTVPEIITGDMESAMAVDLNPWVEYEFRVVATNPIGTGDPSTPSRMIRTNEAVPKTAPTNVSGRSGRRHELVIAWEPVSEEFQNGEGFGYIVAFRPNGTRGWKEKMVTSSEASKFIYRDESVPPLTPFEVKVGVYNNKGDGPFSQIVVICSAEGEPSAAPTDVKATSVSVSEILVAWKHIKESLGRPQGFEVGYWKDMEQEDTAETVKTRGNESFVILTGLEGNTLYHFTVRAYNGAGYGPPSSEVSATTKKSPPSQAPSNLRWEQQGSQVSLGWEPVIPLANESEVVGYKVFYRQEGHSNSQVIETQKLQAVVPLPDAGVYIIEVRAYSEGGDGTASSQIRVPSYSGGKITSAQSTLHSLSTSSSSVTLLLALMIPSTSW

SEQ ID NO: 3157 - protein, 1100 aa, Homo Sapiens; identical to SEQ ID NO: 3156

SEQ ID NO: 3158 - protein, 911 aa, Homo Sapiens
MASSWKLMLFLSVTMCLSEYSKSLPGLSTSYAALLRIKKSSSSSLFGSKTRPRYSSPSLGTLSASSPSWLGAAQNYYSPINLYHSSDAFKQDESVDYGPVFVQEPDDIIFPTDSDEKKVALNCEVRGNPVPSYRWLRNGTEIDLESDYRYSLIDGTFIISNPSEAKDSGHYQCLATNTVGSILSREATLQFAYLGNFSGRTRSAVSVREGQGVVLMCSPPPHSPEIIYSWVFNEFPSFVAEDSRRFISQETGNLYISKVQTSDVGSYICLVKNTVTNARVLSPPTPLTLRNDGVMGEYEPKIEVHFPFTVTAAKGTTVKMECFALGNPVPTITWMKVNGYIPSKARLRKSQAVLEIPNVQLDDAGIYECRAENSRGKNSFRGQLQVYTYPHWVEKLNDTQLDSGSPLRWECKATGKPRPTYRWLKNGVPLSPQSRVEMVNGVLMIHNVNQSDAGMYQCLAENKYGAIYASAELKILASAPTFALNQLKKTIIVTKDQEVVIECKPQGSPKPTISWKKGDRAVRENKRIAILPDGSLRILNASKSDEGKYVCRGENVFGSAEIIASLSVKEPTRIELTPKRTELTVGESIVLNCKAIHDASLDVTFYWTLKGQPIDFEEEGGHFESIRAQASSADLMIRNILLMHAGRYGCRVQTTADSVSDEAELLVRGPPGPPGIVIVEEITESTATLSWSPAADNHSPISSYNLQARSPFSLGWQTVKTVPEIITGDMESAMAVDLNPWVEYEFRVVATNPIGTGDPSTPSRMIRTNEAVPKTAPTNVSGRSGRRHELVIAWEPVSEEFQNGEGFGYIVAFRPNGTRGWKEKMVTSSEASKFIYRDESVPPLTPFEVKVGVYNNKGDGPFSQIVVICSAEGEPSAAPTDVKATSVSVSEILVAWKHIKESLGRPQGFEV

SEQ ID NO: 3159 - protein, 390 aa, Homo Sapiens
MNGVTLDLEERAKVTSGFISGCSGHCTSYGTNCENGGKCLERYHGYSCDCSNTAYDGTFCNKDVGAFFEEGMWLRYNFQAPATNARDSSSRVDNAPDQQNSHPDLAQEEIRFSFSTTKAPCILLYISSFTTDFLAVLVKPTGSLQIRYNLGGTREPYNIDVDHRNMANGQPHSVNITRHEKTIFLKLDHYPSVSYHLPSSSDTLFNSPKSLFLGKVIETGKIDQEIHKYNTPGFTGCLSRVQFNQIAPLKAALRQTNASAHVHIQGELVESNCGASPLTLSPMSSATDPWHLDHLDSASADFPYNPGQGQAIRNGVNRNSAIIGGVIAVVIFTILCTLVFLIRYMFRHKGTYHTNEAKGAESAESADAAIMNNDPNFTETIDESKKEWLI

SEQ ID NO: 3160 - protein, 120 aa, Homo Sapiens
MQAAPRAGCGAALLLWIVSSCLCRAWTAPSTSQKCDEPLVSGLPHVAFSSSSSISGSYSPGYAKINKRGGAGGWSPSDSDHYQWLQVDFGNRKQISAIATQGRYSSSDWVTQYRMLYSDT

SEQ ID NO: 3161 - protein, 1331 aa, Homo Sapiens
MQAAPRAGCGAALLLWIVSSCLCRAWTAPSTSQKCDEPLVSGLPHVAFSSSSSISGSYSPGYAKINKRGGAGGWSPSDSDHYQWLQVDFGNRKQISAIATQGRYSSSDWVTQYRMLYSDTGRNWKPYHQDGNIWAFPGNINSDGVVRHELQHPIIARYVRIVPLDWNGEGRIGLRIEVYGCSYWADVINFDGHVVLPYRFRNKKMKTLKDVIALNFKTSESEGVILHGEGQQGDYITLELKKAKLVLSLNLGSNQLGPIYGHTSVMTGSLLDDHHWHSVVIERQGRSINLTLDRSMQHFRTNGEFDYLDLDYEITFGGIPFSGKPSSSSRKNFKGCMESINYNGVNITDLARRKKLEPSNVGNLSFSCVEPYTVPVFFNATSYLEVPGRLNQDLFSVSFQFRTWNPNGLLVFSHFADNLGNVEIDLTESKVGVHINITQTKMSQIDISSGSGLNDGQWHEVRFLAKENFAILTIDGDEASAVRTNSPLQVKTGEKYFFGGFLNQMNNSSHSVLQPSFQGCMQLIQVDDQLVNLYEVAQRKPGSFANVSIDMCAIIDRCVPNHCEHGGKCSQTWDSFKCTCDETGYSGATCHNSIYEPSCEAYKHLGQTSNYYWIDPDGSGPLGPLKVYCNMTEDKVWTIVSHDLQMQTPVVGYNPEKYSVTQLVYSASMDQISAITDSAEYCEQYVSYFCKMSRLLNTPDGSPYTWWVGKANEKHYYWGGSGPGIQKCACGIERNCTDPKYYCNCDADYKQWRKDAGFLSYKDHLPVSQVVVGDTDRQGSEAKLSVGPLRCQGDRNYWNAASFPNPSSYLHFSTFQGETSADISFYFKTLTPWGVFLENMGKEDFIKLELKSATEVSFSFDVGNGPVEIVVRSPTPLNDDQWHRVTAERNVKQASLQVDRLPQQIRKAPTEGHTRLELYSQLFVGGAGGQQGFLGCIRSLRMNGVTLDLEERAKVTSGFISGCSGHCTSYGTNCENGGKCLERYHGYSCDCSNTAYDGTFCNKDVGAFFEEGMWLRYNFQAPATNARDSSSRVDNAPDQQNSHPDLAQEEIRFSFSTTKAPCILLYISSFTTDFLAVLVKPTGSLQIRYNLGGTREPYNIDVDHRNMANGQPHSVNITRHEKTIFLKLDHYPSVSYHLPSSSDTLFNSPKSLFLGKVIETGKIDQEIHKYNTPGFTGCLSRVQFNQIAPLKAALRQTNASAHVHIQGELVESNCGASPLTLSPMSSATDPWHLDHLDSASADFPYNPGQGQAIRNGVNRNSAIIGGVIAVVIFTILCTLVFLIRYMFRHKGTYHTNEAKGAESAESADAAIMNNDPNFTETIDESKKEWLI

SEQ ID NO: 3162 - protein, 108 aa, Homo Sapiens
MSSATDPWHLDHLDSASADFPYNPGQGQAIRNGVNRNSAIIGGVIAVVIFTILCTLVFLIRYMFRHKGTYHTNEAKGAESAESADAAIMNNDPNFTETIDESKKEWLI

SEQ ID NO: 3163 - protein, 1288 aa, Homo Sapiens
MASVAWAVLKVLLLLPTQTWSPVGAGNPPDCDAPLASALPRSSFSSSSELSSSHGPGFSRLNRRDGAGGWTPLVSNKYQWLQIDLGERMEVTAVATQGGYGSSDWVTSYLLMFSDGGRNWKQYRREESIWGFPGNTNADSVVHYRLQPPFEARFLRFLPLAWNPRGRIGMRIEVYGCAYKSEVVYFDGQSALLYRLDKKPLKPIRDVISLKFKAMQSNGILLHREGQHGNHITLELIKGKLVFFLNSGNAKLPSTIAPVTLTLGSLLDDQHWHSVLIELLDTQVNFTVDKHTHHFQAKGDSSYLDLNFEISFGGIPTPGRSRAFRRKSFHGCLENLYYNGVDVTELAKKHKPQILMMGNVSFSCPQPQTVPVTFLSSRSYLALPGNSGEDKVSVTFQFRTWNRAGHLLFGELRRGSGSFVLFLKDGKLKLSLFQPGQSPRNVTAGAGLNDGQWHSVSFSAKWSHMNVVVDDDTAVQPLVAVLIDSGDTYYFGGCLDNSSGSGCKSPLGGFQGCLRLITIGDKAVDPILVQQGALGSFRDLQIDSCGITDRCLPSYCEHGGECSQSWDTFSCDCLGTGYTGETCHSSLYEQSCEAHKHRGNPSGLYYIDADGSGPLGPFLVYCNMTADAAWTVVQHGGPDAVTLRGAPSGHPRSAVSFAYAAGAGQLRSAVNLAERCEQRLALRCGTARRPDSRDGTPLSWWVGRTNETHTSWGGSLPDAQKCTCGLEGNCIDSQYYCNCDAGRNEWTSDTIVLSQKEHLPVTQIVMTDAGRPHSEAAYTLGPLLCRGDQSFWNSASFNTETSYLHFPAFHGELTADVCFFFKTTVSSGVFMENLGITDFIRIELRAPTEVTFSFDVGNGPCEVTVQSPTPFNDNQWHHVRAERNVKGASLQVDQLPQKMQPAPADGHVRLQLNSQLFIGGTATRQRGFLGCIRSLQLNGVALDLEERATVTPGVEPGCAGHCSTYGHLCRNGGRCREKRRGVTCDCAFSAYDGPFCSNEISAYFATGSSMTYHFQEHYTLSENSSSLVSSLHRDVTLTREMITLSFRTTRTPSLLLYVSSFYEEYLSVILANNGSLQIRYKLDRHQNPDAFTFDFKNMADGQLHQVKINREEAVVMVEVNQSTKKQVILSSGTEFNAVKSLILGKVLEAAGADPDTRRAATSGFTGCLSAVRFGRAAPLKAALRPSGPSRVTVRGHVAPMARCAAGAASGSPARELAPRLAGGAGRSGPADEGEPLVNADRRDSAVIGGVIAVVIFILLCITAIAIRIYQQRKLRKENESKVSKKEEC

SEQ ID NO: 3164 - protein, 1207 aa, Homo Sapiens
MASVAWAVLKVLLLLPTQTWSPVGAGNPPDCDAPLASALPRSSFSSSSELSSSHGPGFSRLNRRDGAGGWTPLVSNKYQWLQIDLGERMEVTAVATQGGYGSSDWVTSYLLMFSDGGRNWKQYRREESIWGFPGNTNADSVVHYRLQPPFEARFLRFLPLAWNPRGRIGMRIEVYGCAYKSEVVYFDGQSALLYRLDKKPLKPIRDVISLKFKAMQSNGILLHREGQHGNHITLELIKGKLVFFLNSGNAKLPSTIAPVTLTLGSLLDDQHWHSVLIELLDTQVNFTVDKHTHHFQAKGDSSYLDLNFEISFGGIPTPGRSRAFRRKSFHGCLENLYYNGVDVTELAKKHKPQILMMGNVSFSCPQPQTVPVTFLSSRSYLALPGNSGEDKVSVTFQFRTWNRAGHLLFGELRRGSGSFVLFLKDGKLKLSLFQPGQSPRNVTAGAGLNDGQWHSVSFSAKWSHMNVVVDDDTAVQPLVAVLIDSGDTYYFGGCLDNSSGSGCKSPLGGFQGCLRLITIGDKAVDPILVQQGALGSFRDLQIDSCGITDRCLPSYCEHGGECSQSWDTFSCDCLGTGYTGETCHSSLYEQSCEAHKHRGNPSGLYYIDADGSGPLGPFLVYCNMTDAAWTVVQHGGPDAVTLRGAPSGHPRSAVSFAYAAGAGQLRSAVNLAERCEQRLALRCGTARRPDSRDGTPLSWWVGRTNETHTSWGGSLPDAQKCTCGLEGNCIDSQYYCNCDAGRNEWTSDTIVLSQKEHLPVTQIVMTDAGRPHSEAAYTLGPLLCRGDQSFWNSASFNTETSYLHFPAFHGELTADVCFFFKTTVSSGVFMENLGITDFIRIELRAPTEVTFSFDVGNGPCEVTVQSPTPFNDNQWHHVRAERNVKGASLQVDQLPQKMQPAPADGHVRLQLNSQLFIEISAYFATGSSMTYHFQEHYTLSENSSSLVSSLHRDVTLTREMITLSFRTTRTPSLLLYVSSFYEEYLSVILANNGSLQIRYKLDRHQNPDAFTFDFKNMADGQLHQVKINREEAVVMVEVNQSTKKQVILSSGTEFNAVKSLILGKVLEAAGADPDTRRAATSGFTGCLSAVRFGRAAPLKAALRPSGPSRVTVRGHVAPMARCAAGAASGSPARELAPRLAGGAGRSGPADEGEPLVNADRRDSAVIGGVIAVVIFILLCITAIAIRIYQQRKLRKENESKVSKKEEC

SEQ ID NO: 3165 - protein, 745 aa, Homo Sapiens
MASVAWAVLKVLLLLPTQTWSPVGAGNPPDCDAPLASALPRSSFSSSSELSSSHGPGFSRLNRRDGAGGWTPLVSNKYQWLQIDLGERMEVTAVATQGGYGSSDWVTSYLLMFSDGGRNWKQYRREESIWGFPGNTNADSVVHYRLQPPFEARFLRFLPLAWNPRGRIGMRIEVYGCAYKSEVVYFDGQSALLYRLDKKPLKPIRDVISLKFKAMQSNGILLHREGQHGNHITLELIKGKLVFFLNSGNAKLPSTIAPVTLTLGSLLDDQHWHSVLIELLDTQVNFTVDKHTHHFQAKGDSSYLDLNFEISFGGIPTPGRSRAFRRKSFHGCLENLYYNGVDVTELAKKHKPQILMMGNVSFSCPQPQTVPVTFLSSRSYLALPGNSGEDKVSVTFQFRTWNRAGHLLFGELRRGSGSFVLFLKDGKLKLSLFQPGQSPRNVTAGAGLNDGQWHSVSFSAKWSHMNVVVDDDTAVQPLVAVLIDSGDTYYFGGCLDNSSGSGCKSPLGGFQGCLRLITIGDKAVDPILVQQGALGSFRDLQIDSCGITDRCLPSYCEHGGECSQSWDTFSCDCLGTGYTGETCHSSLYEQSCEAHKHRGNPSGLYYIDADGSGPLGPFLVYCNMTDAAWTVVQHGGPDAVTLRGAPSGHPRSAVSFAYAAGAGQLRSAVNLAERCEQRLALRCGTARRPDSRDGTPLSWWVGRTNETHTSWGGSLPDAQKCTCGLEGNCIDSQYYCNCDAGRNEW

SEQ ID NO: 3166 - protein, 604 aa, Homo Sapiens
MASVAWAVLKVLLLLPTQTWSPVGAGNPPDCDAPLASALPRSSFSSSSELSSSHGPGFSRLNRRDGAGGWTPLVSNKYQWLQIDLGERMEVTAVATQGGYGSSDWVTSYLLMFSDGGRNWKQYRREESIWGFPGNTNADSVVHYRLQPPFEARFLRFLPLAWNPRGRIGMRIEVYGCAYKSEVVYFDGQSALLYRLDKKPLKPIRDVISLKFKAMQSNGILLHREGQHGNHITLELIKGKLVFFLNSGNAKLPSTIAPVTLTLGSLLDDQHWHSVLIELLDTQVNFTVDKHTHHFQAKGDSSYLDLNFEISFGGIPTPGRSRAFRRKSFHGCLENLYYNGVDVTELAKKHKPQILMMGNVSFSCPQPQTVPVTFLSSRSYLALPGNSGEDKVSVTFQFRTWNRAGHLLFGELRRGSGSFVLFLKDGKLKLSLFQPGQSPRNVTAGAGLNDGQWHSVSFSAKWSHMNVVVDDDTAVQPLVAVLIDSGDTYYFGALYEQSCEAHKHRGNPSGLYYIDADGSGPLGPFLVYCNMTDAAWTVVQHGGPDAVTLRGAPSGHPRSAVSFAYAAGAGQLRSAVNLAERCEQRLALRCGTARRPDSRGLVTQ

SEQ ID NO: 3167 - protein, 1039 aa, Homo Sapiens
MEVTAVATQGGYGSSDWVTSYLLMFSDGGRNWKQYRREESIWGFPGNTNADSVVHYRLQPPFEARFLRFLPLAWNPRGRIGMRIEVYGCAYKSEVVYFDGQSALLYRLDKKPLKPIRDVISLKFKAMQSNGILLHREGQHGNHITLELIKGKLVFFLNSGNAKLPSTIAPVTLTLGSLLDDQHWHSVLIELLDTQVNFTVDKHTHHFQAKGDSSYLDLNFEISFGGIPTPGRSRAFRRKSFHGCLENLYYNGVDVTELAKKHKPQILMMGNVSFSCPQPQTVPVTFLSSRSYLALPGNSGEDKVSVTFQFRTWNRAGHLLFGELRRGSGSFVLFLKDGKLKLSLFQPGQSPRNVTAGAGLNDGQWHSVSFSAKWSHMNVVVDDDTAVQPLVAVLIDSGDTYYFGGCLDNSSGSGCKSPLGGFQGCLRLITIGDKAVDPILVQQGALGSFRDLQIDSCGITDRCLPSYCEHGGECSQSWDTFSCDCLGTGYTGETCHSSLYEQSCEAHKHRGNPSGLYYIDADGSGPLGPFLVYCNMTADAAWTVVQHGGPDAVTLRGAPSGHPRSAVSFAYAAGAGQLRSAVNLAERCEQRLALRCGTARRPDSRDGTPLSWWVGRTNETHTSWGGSLPDAQKCTCGLEGNCIDSQYYCNCDAGRNEWTSDTIVLSQKEHLPVTQIVMTDAGRPHSEAAYTLGPLLCRGDQSFWNSASFNTETSYLHFPAFHGELTADVCFFFKTTVSSGVFMENLGITDFIRIELRAPTEVTFSFDVGNGPCEVTVQSPTPFNDNQWHHVRAERNVKGASLQVDQLPQKMQPAPADGHVRLQLNSQLFIGGTATRQRGFLGCIRSLQLNGVALDLEERATVTPGVEPGCAGHCSTYGHLCRNGGRCREKRRGVTCDCAFSAYDGPFCSNEISAYFATGSSMTYHFQEHYTLSENSSSLVSSLHRDVTLTREMITLSFRTTRTPSLLLYVSSFYEEYLSVILANNGSLQIRYKLDRHQNPDAFTFDFKNMADGQLHQVKINREEAVVMVEVIPQMQKSN

SEQ ID NO: 3168 - protein, 380 aa, Homo Sapiens
MASVAWAVLKVLLLLPTQTWSPVGAGNPPDCDSPLASALPRSSFSSSSELSSSHGPGFSRLNRRDGAGGWTPLVSNKYQWLQIDLGERMEVTAVATQGGYGSSDWVTSYLLMFSDGGRNWKQYRREESIWGFPGNTNADSVVHYRLQPPFEARFLRFLPLAWNPRGRIGMRIEVYGCAYKSEVVYFDGQSALLYTLDKKPLKPIRDVISLKFKAMQSNGILLHREGQHGNHITLELIKGKLVFFLNSGNAKLPSTIAPVTLTLGSLLDDQHWHSVLIELLDTQVNFTVDKHTHHFQAKGDSSNLDLNFEISFGGILSPGRSRAFTRKSFHGCLENLYYNGVDVTELAKKHKPQILMMELAHGLQDQNLKISLTVCHQTTQ

SEQ ID NO: 3169 - protein, 745 aa, Homo Sapiens
MASVAWAVLKVLLLLPTQTWSPVGAGNPPDCDSPLASALPRSSFSSSSELSSSHGPGFSRLNRRDGAGGWTPLVSNKYQWLQIDLGERMEVTAVATQGGYGSSDWVTSYLLMFSDGGRNWKQYRREESIWGFPGNTNADSVVHYRLQPPFEARFLRFLPLAWNPRGRIGMRIEVYGCAYKSEVVYFDGQSALLYTLDKKPLKPIRDVISLKFKAMQSNGILLHREGQHGNHITLELIKGKLVFFLNSGNAKLPSTIAPVTLTLGSLLDDQHWHSVLIELLDTQVNFTVDKHTHHFQAKGDSSNLDLNFEISFGGILSPGRSRAFTRKSFHGCLENLYYNGVDVTELAKKHKPQILMMGNVSFSCPQPQTVPVTFLSSRSYLALPGNSGEDKVSVTFQFRTWNRAGHLLFGELQRGSGSFVLFLKDGKLKLSLFQAGQSPRNVTAGAGLNDGQWHSVSFSAKWSHMNVVVDDDTAVQPLVAVLIDSGDTYYFGGCLGNSSGSGCKSPLGGFQGCLRLITIGDKAVDPILVQQGALGSFRDLQIDSCGITDRCLPSYCEHGGECSQSWDTFSCDCLGTGYTGETCHSSLYEQSCEAHKHRGNPSGLYYIDADGSGPLGPFLVYCNMTDSAWTVVRHGGPDAVTLRGAPSGHPLSAVSFAYAAGAGQLRAAVNLAERCEQRLALRCGTARRPDSRDGTPLSWWVGRTNETHTSWGGSLPDAQKCTCGLEGNCIDSQYYCNCDAGQNEW

SEQ ID NO: 3170 - protein, 1288 aa, Homo Sapiens
MASVAWAVLKVLLLLPTQTWSPVGAGNPPDCDSPLASALPRSSFSSSSELSSSHGPGFSRLNRRDGAGGWTPLVSNKYQWLQIDLGERMEVTAVATQGGYGSSDWVTSYLLMFSDGGRNWKQYRREESIWGFPGNTNADSVVHYRLQPPFEARFLRFLPLAWNPRGRIGMRIEVYGCAYKSEVVYFDGQSALLYTLDKKPLKPIRDVISLKFKAMQSNGILLHREGQHGNHITLELIKGKLVFFLNSGNAKLPSTIAPVTLTLGSLLDDQHWHSVLIELLDTQVNFTVDKHTHHFQAKGDSSNLDLNFEISFGGILSPGRSRAFTRKSFHGCLENLYYNGVDVTELAKKHKPQILMMGNVSFSCPQPQTVPVTFLSSRSYLALPGNSGEDKVSVTFQFRTWNRAGHLLFGELQRGSGSFVLFLKDGKLKLSLFQAGQSPRNVTAGAGLNDGQWHSVSFSAKWSHMNVVVDDDTAVQPLVAVLIDSGDTYYFGGCLGNSSGSGCKSPLGGFQGCLRLITIGDKAVDPILVQQGALGSFRDLQIDSCGITDRCLPSYCEHGGECSQSWDTFSCDCLGTGYTGETCHSSLYEQSCEAHKHRGNPSGLYYIDADGSGPLGPFLVYCNMTADSAWTVVRHGGPDAVTLRGAPSGHPLSAVSFAYAAGAGQLRAAVNLAERCEQRLALRCGTARRPDSRDGTPLSWWVGRTNETHTSWGGSLPDAQKCTCGLEGNCIDSQYYCNCDAGQNEWTSDTIVLSQKEHLPVTQIVMTDTGQPHSEADYTLGPLLCRGDKSFWNSASFNTETSYLHFPAFHGELTADVCFFFKTTVSSGVFMENLGITDFIRIELRAPTEVTFSFDVGNGPCEVTVQSPTPFNDNQWHHVRAERNVKGASLQVDQLPQKMQPAPADGHVRLQLNSQLFIGGTATRQRGFLGCIRSLQLNGVALDLEERATVTPGVEPGCAGHCSTYGHLCRNGGRCREKRRGVTCDCAFSAYDGPFCSNEISAYFATGSSMTYHFQEHYTLSENSSSLVSSLHRDVTLTREMITLSFRTTRTPSLLLYVSSFYEEYLSVILANNGSLQIRYKLDRHQNPDAFTFDFKNMADGQLHQVKINREEAVVMVEVNQSAKKQVILSSGTEFNAVKSLILGKVLEAAGADPDTRRAATSGFTGCLSAVRFGCAAPLKAALRPSGPSRVTVRGHVAPMARCAAGAASGSPARELAPRLAGGAGRSGPVDEGEPLVNADRRDSAVIGGVIAVEIFILLCITAIAIRIYQQRKLRKENESKVSKKEEC

SEQ ID NO: 3171 - protein, 605 aa, Homo Sapiens
MASVAWAVLKVLLLLPTQTWSPVGAGNPPDCDSPLASALPRSSFSSSSELSSSHGPGFSRLNRRDGAGGWTPLVSNKYQWLQIDLGERMEVTAVATQGGYGSSDWVTSYLLMFSDGGRNWKQYRREESIWGFPGNTNADSVVHYRLQPPFEARFLRFLPLAWNPRGRIGMRIEVYGCAYKSEVVYFDGQSALLYTLDKKPLKPIRDVISLKFKAMQSNGILLHREGQHGNHITLELIKGKLVFFLNSGNAKLPSTIAPVTLTLGSLLDDQHWHSVLIELLDTQVNFTVDKHTHHFQAKGDSSNLDLNFEISFGGILSPGRSRAFTRKSFHGCLENLYYNGVDVTELAKKHKPQILMMGNVSFSCPQPQTVPVTFLSSRSYLALPGNSGEDKVSVTFQFRTWNRAGHLLFGELQRGSGSFVLFLKDGKLKLSLFQAGQSPRNVTAGAGLNDGQWHSVSFSAKWSHMNVVVDDDTAVQPLVAVLIDSGDTYYFGALYEQSCEAHKHRGNPSGLYYIDADGSGPLGPFLVYCNMTADSAWTVVRHGGPDAVTLRGAPSGHPLSAVSFAYAAGAGQLRAAVNLAERCEQRLALRCGTARRPDSRGLVTQ

SEQ ID NO: 3172 - protein, 1207 aa, Homo Sapiens
MASVAWAVLKVLLLLPTQTWSPVGAGNPPDCDSPLASALPRSSFSSSSELSSSHGPGFSRLNRRDGAGGWTPLVSNKYQWLQIDLGERMEVTAVATQGGYGSSDWVTSYLLMFSDGGRNWKQYRREESIWGFPGNTNADSVVHYRLQPPFEARFLRFLPLAWNPRGRIGMRIEVYGCAYKSEVVYFDGQSALLYTLDKKPLKPIRDVISLKFKAMQSNGILLHREGQHGNHITLELIKGKLVFFLNSGNAKLPSTIAPVTLTLGSLLDDQHWHSVLIELLDTQVNFTVDKHTHHFQAKGDSSNLDLNFEISFGGILSPGRSRAFTRKSFHGCLENLYYNGVDVTELAKKHKPQILMMGNVSFSCPQPQTVPVTFLSSRSYLALPGNSGEDKVSVTFQFRTWNRAGHLLFGELQRGSGSFVLFLKDGKLKLSLFQAGQSPRNVTAGAGLNDGQWHSVSFSAKWSHMNVVVDDDTAVQPLVAVLIDSGDTYYFGGCLGNSSGSGCKSPLGGFQGCLRLITIGDKAVDPILVQQGALGSFRDLQIDSCGITDRCLPSYCEHGGECSQSWDTFSCDCLGTGYTGETCHSSLYEQSCEAHKHRGNPSGLYYIDADGSGPLGPFLVYCNMTDSAWTVVRHGGPDAVTLRGAPSGHPLSAVSFAYAAGAGQLRAAVNLAERCEQRLALRCGTARRPDSRDGTPLSWWVGRTNETHTSWGGSLPDAQKCTCGLEGNCIDSQYYCNCDAGQNEWTSDTIVLSQKEHLPVTQIVMTDTGQPHSEADYTLGPLLCRGDKSFWNSASFNTETSYLHFPAFHGELTADVCFFFKTTVSSGVFMENLGITDFIRIELRAPTEVTFSFDVGNGPCEVTVQSPTPFNDNQWHHVRAERNVKGASLQVDQLPQKMQPAPADGHVRLQLNSQLFIEISAYFATGSSMTYHFQEHYTLSENSSSLVSSLHRDVTLTREMITLSFRTTRTPSLLLYVSSFYEEYLSVILANNGSLQIRYKLDRHQNPDAFTFDFKNMADGQLHQVKINREEAVVMVEVNQSAKKQVILSSGTEFNAVKSLILGKVLEAAGADPDTRRAATSGFTGCLSAVRFGCAAPLKAALRPSGPSRVTVRGHVAPMARCAAGAASGSPARELAPRLAGGAGRSGPVDEGEPLVNADRRDSAVIGGVIAVEIFILLCITAIAIRIYQQRKLRKENESKVSKKEEC

SEQ ID NO: 3173 - protein, 652 aa, Homo Sapiens
MASVAWAVLKVLLLLPTQTWSPVGAGNPPDCDSPLASALPRSSFSSSSELSSSHGPGFSRLNRRDGAGGWTPLVSNKYQWLQIDLGERMEVTAVATQGGYGSSDWVTSYLLMFSDGGRNWKQYRREESIWGFPGNTNADSVVHYRLQPPFEARFLRFLPLAWNPRGRIGMRIEVYGCAYKSEVVYFDGQSALLYTLDKKPLKPIRDVISLKFKAMQSNGILLHREGQHGNHITLELIKGKLVFFLNSGNAKLPSTIAPVTLTLGSLLDDQHWHSVLIELLDTQVNFTVDKHTHHFQAKGDSSNLDLNFEISFGGILSPGRSRAFTRKSFHGCLENLYYNGVDVTELAKKHKPQILMMGNVSFSCPQPQTVPVTFLSSRSYLALPGNSGEDKVSVTFQFRTWNRAGHLLFGELQRGSGSFVLFLKDGKLKLSLFQAGQSPRNVTAGAGLNDGQWHSVSFSAKWSHMNVVVDDDTAVQPLVAVLIDSGDTYYFGALYEQSCEAHKHRGNPSGLYYIDADGSGPLGPFLVYCNMTDSAWTVVRHGGPDAVTLRGAPSGHPLSAVSFAYAAGAGQLRAAVNLAERCEQRLALRCGTARRPDSRDGTPLSWWVGRTNETHTSWGGSLPDAQKCTCGLEGNCIDSQYYCNCDAGQNEW

SEQ ID NO: 3174 - protein, 966 aa, Homo Sapiens
MASVAWAVLKVLLLLPTQTWSPVGAGNPPDCDSPLASALPRSSFSSSSELSSSHGPGFSRLNRRDGAGGWTPLVSNKYQWLQIDLGERMEVTAVATQGGYGSSDWVTSYLLMFSDGGRNWKQYRREESIWGFPGNTNADSVVHYRLQPPFEARFLRFLPLAWNPRGRIGMRIEVYGCAYKSEVVYFDGQSALLYTLDKKPLKPIRDVISLKFKAMQSNGILLHREGQHGNHITLELIKGKLVFFLNSGNAKLPSTIAPVTLTLGSLLDDQHWHSVLIELLDTQVNFTVDKHTHHFQAKGDSSNLDLNFEISFGGILSPGRSRAFTRKSFHGCLENLYYNGVDVTELAKKHKPQILMMGNVSFSCPQPQTVPVTFLSSRSYLALPGNSGEDKVSVTFQFRTWNRAGHLLFGELQRGSGSFVLFLKDGKLKLSLFQAGQSPRNVTAGAGLNDGQWHSVSFSAKWSHMNVVVDDDTAVQPLVAVLIDSGDTYYFGALYEQSCEAHKHRGNPSGLYYIDADGSGPLGPFLVYCNMTDSAWTVVRHGGPDAVTLRGAPSGHPLSAVSFAYAAGAGQLRAAVNLAERCEQRLALRCGTARRPDSRDGTPLSWWVGRTNETHTSWGGSLPDAQKCTCGLEGNCIDSQYYCNCDAGQNEWTSDTIVLSQKEHLPVTQIVMTDTGQPHSEADYTLGPLLCRGDKSFWNSASFNTETSYLHFPAFHGELTADVCFFFKTTVSSGVFMENLGITDFIRIELRAPTEVTFSFDVGNGPCEVTVQSPTPFNDNQWHHVRAERNVKGASLQVDQLPQKMQPAPADGHVRLQLNSQLFIGGTATRQRGFLGCIRSLQLNGVALDLEERATVTPGVEPGCAGHCSTYGHLCRNGGRCREKRRGVTCDCAFSAYDGPFCSNEISAYFATGSSMTYHFQEHYTLSENSSSLVSSLHRDVTLTREMITLSFRTTRTPSLLLKFAD

SEQ ID NO: 3175 - protein, 180 aa, Homo Sapiens
  misc_feature (1)..(1): Xaa can be any naturally occurring amino acid
XRDVTLTREMITLSFRTTRTPSLLLYVSSFYEEYLSVILANNGSLQIRYKLDRHQNPDAFTFDFKNMADGQLHQVKINREEAVVMVEVNQSAKKQVILSSGTEFNAVKSLILGKVLGRSGPVDEGEPLVNADRRDSAVIGGVIAVEIFILLCITAIAIRIYQQRKLRKENESKVSKKEEC

SEQ ID NO: 3176 - protein, 167 aa, Homo Sapiens
  misc_feature (1)..(1): Xaa can be any naturally occurring amino acid
XSAAPGLTRTSDTIVLSQKEHLPVTQIVMTDTGQPHSEADYTLGPLLCRGDTRLLKVWRRESVIFEIFPSLFGRLRWEDGLSQGVQHKPGQDESFWNSASFNTETSYLHFPAFHGELTADVCFFFKTTVSSGVFMENLGITDFIRIELRGRLATLDKSQGTHYLAIK

SEQ ID NO: 3177 - protein, 116 aa, Homo Sapiens
MAINRFRLENDLEELALYQIQLLKDLRHTENEEDKVSSSSFRQRMLGNLLRPPYERPELPTCLYVIGLTGISGSGKSSIAQRLKGLGAFVIDSDHLGHRAYAPGGPAYQPVVEAFG

SEQ ID NO: 3178 - protein, 91 aa, Homo Sapiens
MAVFRSGLLVLTTPLASLAPRLASILTSAARLVNHTLYVHLQPGMSLEGPAQPQSSPVQATFEVLDFITHLYAGADVHRHLDVRILLTNIR

SEQ ID NO: 3179 - protein, 147 aa, Homo Sapiens
MAVFRSGLLVLTTPLASLAPRLASILTSAARLVNHTLYVHLQPGMSLEGPAQPQSSPVQATFEVLDFITHLYAGADVHRHLDVRILLTNIRTKSTFLPPLPTSVQNLAHPPEVVLTDFQTLDGSQYNPVKQQLVRYATSCYSCCPRL

SEQ ID NO: 3180 - protein, 219 aa, Homo Sapiens
MAVFRSGLLVLTTPLASLAPRLASILTSAARLVNHTLYVHLQPGMSLEGPAQPQSSPVQATFEVLDFITHLYAGADVHRHLDVRILLTNIRTKSTFLPPLPTSVQNLAHPPEVVLTDFQTLDGSQYNPVKQQLVRYATSCYSCCPRLASVLLYSDYGIGEVPVEPLDVPLPSTIRPASPVAGSPKQPVRGYYRGAVGGTFDRLHNAHKVLLSVACILAQ

SEQ ID NO: 3181 - protein, 564 aa, Homo Sapiens
MAVFRSGLLVLTTPLASLAPRLASILTSAARLVNHTLYVHLQPGMSLEGPAQPQSSPVQATFEVLDFITHLYAGADVHRHLDVRILLTNIRTKSTFLPPLPTSVQNLAHPPEVVLTDFQTLDGSQYNPVKQQLVRYATSCYSCCPRLASVLLYSDYGIGEVPVEPLDVPLPSTIRPASPVAGSPKQPVRGYYRGAVGGTFDRLHNAHKVLLSVACILAQEQLVVGVADKDLLKSKLLPELLQPYTERVEHLSEFLVDIKPSLTFDVIPLLDPYGPAGSDPSLEFLVVSEETYRGGMAINRFRLENDLEELALYQIQLLKDLRHTENEEDKVSSSSFRQRMLGNLLRPPYERPELPTCLYVIGLTGISGSGKSSIAQRLKGLGAFVIDSDHLGHRAYAPGGPAYQPVVEAFGTDILHKDGIINRKVLGSRVFGNKKQLKILTDIMWPIIAKLAREEMDRAVAEGKRVCVIDAAVLLEAGWQNLVHEVWTAVIPETEAVRRIVERDGLSEAAAQSRLQSQMSGQQLVEQSHVVLSTLWEPHITQRQVEKAWALLQKRIPKTHQALD

SEQ ID NO: 3182 - protein, 564 aa, Homo Sapiens; identical to SEQ ID NO: 3181

SEQ ID NO: 3183 - protein, 98 aa, Homo Sapiens
MRTPRLRAQPRGAVYQAPSPPPAPVGLGSMAVFRSGLLVLTTPLASLAPRLASILTSAARLVNHTLYVHLQPGMSLEGPAQPQSSPVQATFEVLDFIT

SEQ ID NO: 3184 - protein, 128 aa, Homo Sapiens
MRTPRLRAQPRGAVYQAPSPPPAPVGLGSMAVFRSGLLVLTTPLASLAPRLASILTSAARLVNHTLYVHLQPGMSLEGPAQPQSSPVQATFEVLDFITHLYAGADVHRHLDVRILLTNIRTKSTFLPP

SEQ ID NO: 3185 - protein, 593 aa, Homo Sapiens
MRTPRLRAQPRGAVYQAPSPPPAPVGLGSMAVFRSGLLVLTTPLASLAPRLASILTSAARLVNHTLYVHLQPGMSLEGPAQPQSSPVQATFEVLDFITHLYAGADVHRHLDVRILLTNIRTKSTFLPPLPTSVQNLAHPPEVVLTDFQTLDGSQYNPVKQQLVRYATSCYSCCPRLASVLLYSDYGIGEVPVEPLDVPLPSTIRPASPVAGSPKQPVRGYYRGAVGGTFDRLHNAHKVLLSVACILAQEQLVVGVADKDLLKSKLLPELLQPYTERVEHLSEFLVDIKPSLTFDVIPLLDPYGPAGSDPSLEFLVVSEETYRGGMAINRFRLENDLEELALYQIQLLKDLRHTENEEDKVSSSSFRQRMLGNLLRPPYERPELPTCLYVIGLTGISGSGKSSIAQRLKGLGAFVIDSDHLGHRAYAPGGPAYQPVVEAFGTDILHKDGIINRKVLGSRVFGNKKQLKILTDIMWPIIAKLAREEMDRAVAEGKRVCVIDAAVLLEAGWQNLVHEVWTAVIPETEAVRRIVERDGLSEAAAQSRLQSQMSGQQLVEQSHVVLSTLWEPHITQRQVEKAWALLQKRIPKTHQALD

SEQ ID NO: 3186 - protein, 96 aa, Homo Sapiens
MRTPRLRAQPRGAVYQAPSPPPAPVVQNLAHPPEVVLTDFQTLDGSQYNPVKQQLVRYATSCYSCCPRLASVLLYSDYGIGEVPVEPLDVPLPSTI

SEQ ID NO: 3187 - protein, 438 aa, Homo Sapiens
MLSRWSASFTVTKGKSSTQEATGQAVSTAHPPTGKRLKKTPEKKTGNKDCKADIAFLIDGSFNIGQRRFNLQKNFVGKVALMLGIGTEGPHVGLVQASEHPKIEFYLKNFTSAKDVLFAIKEVGFRGGNSNTGKALKHTAQKFFTVDAGVRKGIPKVVVVFIDGWPSDDIEEAGIVAREFGVNVFIVSVAKPIPEELGMVQDVTFVDKAVCRNNGFFSYHMPNWFGTTKYVKPLVQKLCTHEQMMCSKTCYNSVNIAFLIDGSSSVGDSNFRLMLEFVSNIAKTFEISDIGAKIAAVQFTYDQRTEFSFTDYSTKENVLAVIRNIRYMSGGTATGDAISFTVRNVFGPIRESPNKNFLVIVTDGQSYDDVQGPAAAAHDAGITIFSVGVAWAPLDDLKDMASKPKESHAFFTREFTGLEPIVSDVIRGICRDFLESQQ

SEQ ID NO: 3188 - protein, 193 aa, Homo Sapiens
MSAAWIPALGLAPIAITCFTRGLDIRKEKADVLCPGGCPLEEFSVYGNIVYASVSSICGAAVHRGVISNSGGPVRVYSLPGRENYSSVDANGIQSQMLSRWSASFTVTKGKSSTQEATGQAVSTAHPPTGKRLKKTPEKKTGNKDCKADIAFLIDGSFNIGQRRFNLQKNFVGKVALMLGIGTEGPHVGLVQA

SEQ ID NO: 3189 - protein, 80 aa, Homo Sapiens
MSAAWIPALGLGVCLLLLPGPAGSEGAAPIAITCFTRGLDIRKEKADVLCPGGCPLEEFSVYGNIVYASVSSICGAAVHR

SEQ ID NO: 3190 - protein, 513 aa, Homo Sapiens
MSAAWIPALGLGVCLLLLPGPAGSEGAAPIAITCFTRGLDIRKEKADVLCPGGCPLEEFSVYGNIVYASVSSICGAAVHRGVISNSGGPVRVYSLPGRENYSSVDANGIQSQMLSRWSASFTVTKGKSSTQEATGQAVSTAHPPTGKRLKKTPEKKTGNKDCKADIAFLIDGSFNIGQRRFNLQKNFVGKVALMLGIGTEGPHVGLVQASEHPKIEFYLKNFTSAKDVLFAIKEVGFRGGNSNTDVAERMSSTTVDSEERLLRGKALKHTAQKFFTVDAGVRKGIPKVVVVFIDGWPSDDIEEAGIVAREFGVNVFIVSVAKPIPEELGMVQDVTFVDKAVCRNNGFFSYHMPNWFGTTKYVKPLVQKLCTHEQMMCSKTCYNSVNIAFLIDGSSSVGDSNFRLMLEFVSNIAKTFEISDIGAKIAAVQFTYDQRTEFSFTDYSTKENVLAVIRNIRYMSGGTATGDAISFTVRNVFGPIRESPNKNFLVIVTDGQSYDDVQGPAAAAHDAAK

SEQ ID NO: 3191 - protein, 550 aa, Homo Sapiens
MSAAWIPALGLGVCLLLLPGPAGSEGAAPIAITCFTRGLDIRKEKADVLCPGGCPLEEFSVYGNIVYASVSSICGAAVHRGVISNSGGPVRVYSLPGRENYSSVDANGIQSQMLSRWSASFTVTKGKSSTQEATGQAVSTAHPPTGKRLKKTPEKKTGNKDCKADIAFLIDGSFNIGQRRFNLQKNFVGKVALMLGIGTEGPHVGLVQASEHPKIEFYLKNFTSAKDVLFAIKEVGFRGGNSNTGKALKHTAQKFFTVDAGVRKGIPKVVVVFIDGWPSDDIEEAGIVAREFGVNVFIVSVAKPIPEELGMVQDVTFVDKAVCRNNGFFSYHMPNWFGTTKYVKPLVQKLCTHEQMMCSKTCYNSVNIAFLIDGSSSVGDSNFRLMLEFVSNIAKTFEISDIGAKIAAVQFTYDQRTEFSFTDYSTKENVLAVIRNIRYMSGGTATGDAISFTVRNVFGPIRESPNKNFLVIVTDGQSYDDVQGPAAAAHDAGITIFSVGVAWAPLDDLKDMASKPKESHAFFTREFTGLEPIVSDVIRGICRDFLESQQ

SEQ ID NO: 3192 - protein, 494 aa, Homo Sapiens
MSAAWIPALGLGVCLLLLPGPAGSEGAAPIAITCFTRGLDIRKEKADVLCPGGCPLEEFSVYGNIVYASVSSICGAAVHRGVISNSGGPVRVYSLPGRENYSSVDANGIQSQMLSRWSASFTVTKGKSSTQEATGQAVSTAHPPTGKRLKKTPEKKTGNKDCKADIAFLIDGSFNIGQRRFNLQKNFVGKVALMLGIGTEGPHVGLVQASEHPKIEFYLKNFTSAKDVLFAIKEVGFRGGNSNTGKALKHTAQKFFTVDAGVRKGIPKVVVVFIDGWPSDDIEEAGIVAREFGVNVFIVSVAKPIPEELGMVQDVTFVDKAVCRNNGFFSYHMPNWFGTTKYVKPLVQKLCTHEQMMCSKTCYNSVNIAFLIDGSSSVGDSNFRLMLEFVSNIAKTFEISDIGAKIAAVQFTYDQRTEFSFTDYSTKENVLAVIRNIRYMSGGTATGDAISFTVRNVFGPIRESPNKNFLVIVTDGQSYDDVQGPAAAAHDAAK

SEQ ID NO: 3193 - protein, 550 aa, Homo Sapiens; identical to SEQ ID NO: 3191

SEQ ID NO: 3194 - protein, 550 aa, Homo Sapiens; identical to SEQ ID NO: 3191

SEQ ID NO: 3195 - protein, 615 aa, Homo Sapiens
MSAAWIPALGLGVCLLLLPGPAGSEGAGEWGSWGASRRSQGLSTSGYKRDSDPAPWASALPPEEEGAKVEPPRGAPALTPAADLLLLTCFSHAPIAITCFTRGLDIRKEKADVLCPGGCPLEEFSVYGNIVYASVSSICGAAVHRGVISNSGGPVRVYSLPGRENYSSVDANGIQSQMLSRWSASFTVTKGKSSTQEATGQAVSTAHPPTGKRLKKTPEKKTGNKDCKADIAFLIDGSFNIGQRRFNLQKNFVGKVALMLGIGTEGPHVGLVQASEHPKIEFYLKNFTSAKDVLFAIKEVGFRGGNSNTGKALKHTAQKFFTVDAGVRKGIPKVVVVFIDGWPSDDIEEAGIVAREFGVNVFIVSVAKPIPEELGMVQDVTFVDKAVCRNNGFFSYHMPNWFGTTKYVKPLVQKLCTHEQMMCSKTCYNSVNIAFLIDGSSSVGDSNFRLMLEFVSNIAKTFEISDIGAKIAAVQFTYDQRTEFSFTDYSTKENVLAVIRNIRYMSGGTATGDAISFTVRNVFGPIRESPNKNFLVIVTDGQSYDDVQGPAAAAHDAGITIFSVGVAWAPLDDLKDMASKPKESHAFFTREFTGLEPIVSDVIRGICRDFLESQQ

SEQ ID NO: 3196 - protein, 202 aa, Homo Sapiens
MSAAWIPALGLGVCLLLLPGPAGSEGAGKRLKKTPEKKTGNKDCKADIAFLIDGSFNIGQRRFNLQKNFVGKVALMLGIGTEGPHVGLVQASEHPKIEFYLKNFTSAKDVLFAIKEVGFRGGNSNTGKALKHTAQKFFTVDAGVRKGIPKVVVVFIDGWPSDDIEEAGIVAREFGVNVFIVSVAKPIPEELGMVQDVTFVDK

SEQ ID NO: 3197 - protein, 55 aa, Homo Sapiens
PIAITCFTRGLDIRKEKADVLCPGGCPLEEFSVYGNIVYASVSSICGAAVHRRQK

SEQ ID NO: 3198 - protein, 434 aa, Homo Sapiens
  misc_feature (1)..(1): Xaa can be any naturally occurring amino acid
XCKADIAFLIDGSFNIGQRRFNLQKNFVGKVALMLGIGTEGPHVGLVQASEHPKIEFYLKNFTSAKDVLFAIKEVGFRGGNSNTDITLEKYLFVMLKRSENQQTYLMNADVAERMSSTTVDSEERLLRGKALKHTAQKFFTVDAGVRKGIPKVVVVFIDGWPSDDIEEAGIVAREFGVNVFIVSVAKPIPEELGMVQDVTFVDKAVCRNNGFFSYHMPNWFGTTKYVKPLVQKLCTHEQMMCSKTCYNSVNIAFLIDGSSSVGDSNFRLMLEFVSNIAKTFEISDIGAKIAAVQFTYDQRTEFSFTDYSTKENVLAVIRNIRYMSGGTATGDAISFTVRNVFGPIRESPNKNFLVIVTDGQSYDDVQGPAAAAHDAGITIFSVGVAWAPLDDLKDMASKPKESHAFFTREFTGLEPIVSDVIRGICRDFLESQQ

SEQ ID NO: 3199 - protein, 828 aa, Homo Sapiens
MAEAALLLLPEAAAERDAREKLALWDRRPDTTAPLTDRQTDSVLELKAAAENLPVPAELPIEDLCSLTSQSLPIELTSVVPESTEDILLKGFTSLGMEEERIETAQQFFSWFAKLQTQMDQDEGTKYRQMRDYLSGFQEQCDAILNDVNSALQHLESLQKQYLFVSNKTGTLHEACEQLLKEQSELVDLAENIQQKLSYFNELETINTKLNSPTLSVNSDGFIPMLAKLDDCITYISSHPNFKDYPIYLLKFKQCLSKALHLMKTYTVNTLQTLTSQLLKRDPSSVPNADNAFTLFYVKFRAAAPKVRTLIEQIELRSEKIPEYQQLLNDIHQCYLDQRELLLGPSIACTVAELTSQNNRDHCALVRSGCAFMVHVCQDEHQLYNEFFTKPTSKLDELLEKLCVSLYDVFRPLIIHVIHLETLSELCGILKNEVLEDHVQNNAEQLGAFAAGVKQMLEDVQERLVYRTHIYIQTDITGYKPAPGDLAYPDKLVMMEQIAQSLKDEQKKVPSEASFSDVHLEEGESNSLTKSGSTESLNPRPQTTISPADLHGMWYPTVRRTLVCLSKLYRCIDRAVFQGLSQEALSACIQSLLGASESISKNKTQIDGQLFLIKHLLILREQIAPFHTEFTIKEISLDLKKTRDAAFKILNPMTVPRFFRLNSNNALIEFLLEGTPEIREHYLDSKKDVDRHLKSACEQFIQQQTKLFVEQLEEFMTKVSALKTMASQGGPKYTLSQQPWAQPAKVNDLAATAYKTIKTKLPVTLRSMSLYLSNKDTEFILFKPVRNNIQQVFQKFHALLKEEFSPEDIQIIACPSMEQLSLLLLVSK

SEQ ID NO: 3200 - protein, 444 aa, Homo Sapiens
MAEAALLLLPEAAAERDAREKLALWDRRPDTTAPLTDRQTDSVLELKAAAENLPVPAELPIEDLCSLTSQSLPIELTSVVPESTEDILLKGFTSLGMEEERIETAQQFFSWFAKLQTQMDQDEGTKYRQMRDYLSGFQEQCDAILNDVNSALQHLESLQKQYLFVSNKTGTLHEACEQLLKEQSELVDLAENIQQKLSYFNELETINTKLNSPTLSVNSDGFIPMLAKLDDCITYISSHPNFKDYPIYLLKFKQCLSKALHLMKTYTVNTLQTLTSQLLKRDPSSVPNADNAFTLFYVKFRAAAPKVRTLIEQIELRSEKIPEYQQLLNDIHQCYLDQRELLLGPSIACTVAELTSQNNRDHCALVRSGCAFMVHVCQDEHQLYNEFFTKPTSKLDELLEKLCVSLYDVFRPLIIHVIHLETLSELCGILKNEVLEDHVQNNGK

SEQ ID NO: 3201 - protein, 85 aa, Homo Sapiens
PEAAAERDAREKLALWDRRPDTTAPLTDRQTDSVLELKAAAENLPVPAEDMVPEVDLKSMKAQVEISLAQLSNSFIPWIIKVVCS

SEQ ID NO: 3202 - protein, 68 aa, Homo Sapiens
  misc_feature (1)..(1): Xaa can be any naturally occurring amino acid
XIDGQLFLIKHLLILREQIAPFHTEFTIKEISLDLKKTRGFSVKNNGQSGRPQVYSLTAALGTTSKGQ

SEQ ID NO: 3203 - protein, 51 aa, Homo Sapiens
MLPQIPFLLLVSLNLVHGVFYAERYQMPTGIKGPLPNTKTQFFIPYTIKSK

SEQ ID NO: 3204 - protein, 216 aa, Homo Sapiens
MLPQIPFLLLVSLNLVHGVFYAERYQMPTGIKGPLPNTKTQFFIPYTIKSKGIAVRGEQGTPGPPGPAGPRGHPGPSGPPGKPGYGSPGLQGEPGLPGPPGPSAVGKPGVPGLPGKPGERGPYGPKGDVGPAGLPGPRGPPGPPGIPGPAGISVPGKPGQQGPTGAPGPRGFPGEKGAPGVPGMNGQKGEMGYGAPGRPGERGLPGPQGPTGPSGP

SEQ ID NO: 3205 - protein, 680 aa, Homo Sapiens
MLPQIPFLLLVSLNLVHGVFYAERYQMPTGIKGPLPNTKTQFFIPYTIKSKGIAVRGEQGTPGPPGPAGPRGHPGPSGPPGKPGYGSPGLQGEPGLPGPPGPSAVGKPGVPGLPGKPGERGPYGPKGDVGPAGLPGPRGPPGPPGIPGPAGISVPGKPGQQGPTGAPGPRGFPGEKGAPGVPGMNGQKGEMGYGAPGRPGERGLPGPQGPTGPSGPPGVGKRGENGVPGQPGIKGDRGFPGEMGPIGPPGPQGPPGERGPEGIGKPGAAGAPGQPGIPGTKGLPGAPGIAGPPGPPGFGKPGLPGLKGERGPAGLPGGPGAKGEQGPAGLPGKPGLTGPPGNMGPQGPKGIPGSHGLPGPKGETGPAGPAGYPGAKGERGSPGSDGKPGYPGKPGLDGPKGNPGLPGPKGDPGVGGPPGLPGPVGPAGAKGMPGHNGEAGPRGAPGIPGTRGPIGPPGIPGFPGSKGDPGSPGPPGPAGIATKGLNGPTGPPGPPGPRGHSGEPGLPGPPGPPGPPGQAVMPEGFIKAGQRPSLSGTPLVSANQGVTGMPVSAFTVILSKAYPAIGTPIPFDKILYNRQQHYDPRTGIFTCQIPGIYYFSYHVHVKGTHVWVGLYKNGTPVMYTYDEYTKGYLDQASGSAIIDLTENDQVWLQLPNAESNGLYSSEYVHSSFSGFLVAPM

SEQ ID NO: 3206 - protein, 680 aa, Homo Sapiens; identical to SEQ ID NO: 3205

SEQ ID NO: 3207 - protein, 1767 aa, Homo Sapiens
MEPWSSRWKTKRWLWDFTVTTLALTFLFQAREVRGAAPVDVLKALDFHNSPEGISKTTGFCTNRKNSKGSDTAYRVSKQAQLSAPTKQLFPGGTFPEDFSILFTVKPKKGIQSFLLSIYNEHGIQQIGVEVGRSPVFLFEDHTGKPAPEDYPLFRTVNIADGKWHRVAISVEKKTVTMIVDCKKKTTKPLDRSERAIVDTNGITVFGTRILDEEVFEGDIQQFLITGDPKAAYDYCEHYSPDCDSSAPKAAQAQEPQIDEANIVDDFQEYNYGTMESYQTEAPRHVSGTNEPNPVEEIFTEEYLTGEDYDSQRKNSEDTLYENKEIDGRDSDLLVDGDLGEYDFYEYKEYEDKPTSPPNEEFGPGVPAETDITETSINGHGAYGEKGQKGEPAVVEPGMLVEGPPGPAGPAGIMGPPGLQGPTGPPGDPGDRGPPGRPGLPGADGLPGPPGTMLMLPFRYGGDGSKGPTISAQEAQAQAILQQARIALRGPPGPMGLTGRPGPVGGPGSSGAKGESGDPGPQGPRGVQGPPGPTGKPGKRGRPGADGGRGMPGEPGAKGDRGFDGLPGLPGDKGHRGERGPQGPPGPPGDDGMRGEDGEIGPRGLPGEAGPRGLLGPRGTPGAPGQPGMAGVDGPPGPKGNMGPQGEPGPPGQQGNPGPQGLPGPQGPIGPPGEKGPQGKPGLAGLPGADGPPGHPGKEGQSGEKGALGPPGPQGPIGYPGPRGVKGADGVRGLKGSKGEKGEDGFPGFKGDMGLKGDRGEVGQIGPRGEDGPEGPKGRAGPTGDPGPSGQAGEKGKLGVPGLPGYPGRQGPKGSTGFPGFPGANGEKGARGVAGKPGPRGQRGPTGPRGSRGARGPTGKPGPKGTSGGDGPPGPPGERGPQGPQGPVGFPGPKGPPGPPGKDGLPGHPGQRGETGFQGKTGPPGPGGVVGPQGPTGETGPIGERGHPGPPGPPGEQGLPGAAGKEGAKGDPGPQGISGKDGPAGLRGFPGERGLPGAQGAPGLKGGEGPQGPPGPVGSPGERGSAGTAGPIGLPGRPGPQGPPGPAGEKGAPGEKGPQGPAGRDGVQGPVGLPGPAGPAGSPGEDGDKGEIGEPGQKGSKGDKGENGPPGPPGLQGPVGAPGIAGGDGEPGPRGQQGMFGQKGDEGARGFPGPPGPIGLQGLPGPPGEKGENGDVGPMGPPGPPGPRGPQGPNGADGPQGPPGSVGSVGGVGEKGEPGEAGNPGPPGEAGVGGPKGERGEKGEAGPPGAAGPPGAKGPPGDDGPKGNPGPVGFPGDPGPPGEPGPAGQDGVGGDKGEDGDPGQPGPPGPSGEAGPPGPPGKRGPPGAAGAEGRQGEKGAKGEAGAEGPPGKTGPVGPQGPAGKPGPEGLRGIPGPVGEQGLPGAAGQDGPPGPMGPPGLPGLKGDPGSKGEKGHPGLIGLIGPPGEQGEKGDRGLPGTQGSPGAKGDGGIPGPAGPLGPPGPPGLPGPQGPKGNKGSTGPAGQKGDSGLPGPPGSPGPPGEVIQPLPILSSKKTRRHTEGMQADADDNILDYSDGMEEIFGSLNSLKQDIEHMKFPMGTQTNPARTCKDLQLSHPDFPDGEYWIDPNQGCSGDSFKVYCNFTSGGETCIYPDKKSEGVRISSWPKEKPGSWFSEFKRGKLLSYLDVEGNSINMVQMTFLKLLTASARQNFTYHCHQSAAWYDVSSGSYDKALRFLGSNDEEMSYDNNPFIKTLYDGCASRKGYEKTVIEINTPKIDQVPIVDVMINDFGDQNQKFGFEVGPVCFLG

SEQ ID NO: 3208 - protein, 1806 aa, Homo Sapiens
MEPWSSRWKTKRWLWDFTVTTLALTFLFQAREVRGAAPVDVLKALDFHNSPEGISKTTGFCTNRKNSKGSDTAYRVSKQAQLSAPTKQLFPGGTFPEDFSILFTVKPKKGIQSFLLSIYNEHGIQQIGVEVGRSPVFLFEDHTGKPAPEDYPLFRTVNIADGKWHRVAISVEKKTVTMIVDCKKKTTKPLDRSERAIVDTNGITVFGTRILDEEVFEGDIQQFLITGDPKAAYDYCEHYSPDCDSSAPKAAQAQEPQIDEYAPEDIIEYDYEYGEAEYKEAESVTEGPTVTEETIAQTEANIVDDFQEYNYGTMESYQTEAPRHVSGTNEPNPVEEIFTEEYLTGEDYDSQRKNSEDTLYENKEIDGRDSDLLVDGDLGEYDFYEYKEYEDKPTSPPNEEFGPGVPAETDITETSINGHGAYGEKGQKGEPAVVEPGMLVEGPPGPAGPAGIMGPPGLQGPTGPPGDPGDRGPPGRPGLPGADGLPGPPGTMLMLPFRYGGDGSKGPTISAQEAQAQAILQQARIALRGPPGPMGLTGRPGPVGGPGSSGAKGESGDPGPQGPRGVQGPPGPTGKPGKRGRPGADGGRGMPGEPGAKGDRGFDGLPGLPGDKGHRGERGPQGPPGPPGDDGMRGEDGEIGPRGLPGEAGPRGLLGPRGTPGAPGQPGMAGVDGPPGPKGNMGPQGEPGPPGQQGNPGPQGLPGPQGPIGPPGEKGPQGKPGLAGLPGADGPPGHPGKEGQSGEKGALGPPGPQGPIGYPGPRGVKGADGVRGLKGSKGEKGEDGFPGFKGDMGLKGDRGEVGQIGPRGEDGPEGPKGRAGPTGDPGPSGQAGEKGKLGVPGLPGYPGRQGPKGSTGFPGFPGANGEKGARGVAGKPGPRGQRGPTGPRGSRGARGPTGKPGPKGTSGGDGPPGPPGERGPQGPQGPVGFPGPKGPPGPPGKDGLPGHPGQRGETGFQGKTGPPGPGGVVGPQGPTGETGPIGERGHPGPPGPPGEQGLPGAAGKEGAKGDPGPQGISGKDGPAGLRGFPGERGLPGAQGAPGLKGGEGPQGPPGPVGSPGERGSAGTAGPIGLPGRPGPQGPPGPAGEKGAPGEKGPQGPAGRDGVQGPVGLPGPAGPAGSPGEDGDKGEIGEPGQKGSKGDKGENGPPGPPGLQGPVGAPGIAGGDGEPGPRGQQGMFGQKGDEGARGFPGPPGPIGLQGLPGPPGEKGENGDVGPMGPPGPPGPRGPQGPNGADGPQGPPGSVGSVGGVGEKGEPGEAGNPGPPGEAGVGGPKGERGEKGEAGPPGAAGPPGAKGPPGDDGPKGNPGPVGFPGDPGPPGEPGPAGQDGVGGDKGEDGDPGQPGPPGPSGEAGPPGPPGKRGPPGAAGAEGRQGEKGAKGEAGAEGPPGKTGPVGPQGPAGKPGPEGLRGIPGPVGEQGLPGAAGQDGPPGPMGPPGLPGLKGDPGSKGEKGHPGLIGLIGPPGEQGEKGDRGLPGTQGSPGAKGDGGIPGPAGPLGPPGPPGLPGPQGPKGNKGSTGPAGQKGDSGLPGPPGSPGPPGEVIQPLPILSSKKTRRHTEGMQADADDNILDYSDGMEEIFGSLNSLKQDIEHMKFPMGTQTNPARTCKDLQLSHPDFPDGEYWIDPNQGCSGDSFKVYCNFTSGGETCIYPDKKSEGVRISSWPKEKPGSWFSEFKRGKLLSYLDVEGNSINMVQMTFLKLLTASARQNFTYHCHQSAAWYDVSSGSYDKALRFLGSNDEEMSYDNNPFIKTLYDGCASRKGYEKTVIEINTPKIDQVPIVDVMINDFGDQNQKFGFEVGPVCFLG

SEQ ID NO: 3209 - protein, 1818 aa, Homo Sapiens
MEPWSSRWKTKRWLWDFTVTTLALTFLFQAREVRGAAPVDVLKALDFHNSPEGISKTTGFCTNRKNSKGSDTAYRVSKQAQLSAPTKQLFPGGTFPEDFSILFTVKPKKGIQSFLLSIYNEHGIQQIGVEVGRSPVFLFEDHTGKPAPEDYPLFRTVNIADGKWHRVAISVEKKTVTMIVDCKKKTTKPLDRSERAIVDTNGITVFGTRILDEEVFEGDIQQFLITGDPKAAYDYCEHYSPDCDSSAPKAAQAQEPQIDEKKKSNFKKKMRTVATKSKEKSKKFTPPKSEKFSSKKKKSYQASAKAKLGVKANIVDDFQEYNYGTMESYQTEAPRHVSGTNEPNPVEEIFTEEYLTGEDYDSQRKNSEDTLYENKEIDGRDSDLLVDGDLGEYDFYEYKEYEDKPTSPPNEEFGPGVPAETDITETSINGHGAYGEKGQKGEPAVVEPGMLVEGPPGPAGPAGIMGPPGLQGPTGPPGDPGDRGPPGRPGLPGADGLPGPPGTMLMLPFRYGGDGSKGPTISAQEAQAQAILQQARIALRGPPGPMGLTGRPGPVGGPGSSGAKGESGDPGPQGPRGVQGPPGPTGKPGKRGRPGADGGRGMPGEPGAKGDRGFDGLPGLPGDKGHRGERGPQGPPGPPGDDGMRGEDGEIGPRGLPGEAGPRGLLGPRGTPGAPGQPGMAGVDGPPGPKGNMGPQGEPGPPGQQGNPGPQGLPGPQGPIGPPGEKGPQGKPGLAGLPGADGPPGHPGKEGQSGEKGALGPPGPQGPIGYPGPRGVKGADGVRGLKGSKGEKGEDGFPGFKGDMGLKGDRGEVGQIGPRGEDGPEGPKGRAGPTGDPGPSGQAGEKGKLGVPGLPGYPGRQGPKGSTGFPGFPGANGEKGARGVAGKPGPRGQRGPTGPRGSRGARGPTGKPGPKGTSGGDGPPGPPGERGPQGPQGPVGFPGPKGPPGPPGKDGLPGHPGQRGETGFQGKTGPPGPGGVVGPQGPTGETGPIGERGHPGPPGPPGEQGLPGAAGKEGAKGDPGPQGISGKDGPAGLRGFPGERGLPGAQGAPGLKGGEGPQGPPGPVGSPGERGSAGTAGPIGLPGRPGPQGPPGPAGEKGAPGEKGPQGPAGRDGVQGPVGLPGPAGPAGSPGEDGDKGEIGEPGQKGSKGDKGENGPPGPPGLQGPVGAPGIAGGDGEPGPRGQQGMFGQKGDEGARGFPGPPGPIGLQGLPGPPGEKGENGDVGPMGPPGPPGPRGPQGPNGADGPQGPPGSVGSVGGVGEKGEPGEAGNPGPPGEAGVGGPKGERGEKGEAGPPGAAGPPGAKGPPGDDGPKGNPGPVGFPGDPGPPGEPGPAGQDGVGGDKGEDGDPGQPGPPGPSGEAGPPGPPGKRGPPGAAGAEGRQGEKGAKGEAGAEGPPGKTGPVGPQGPAGKPGPEGLRGIPGPVGEQGLPGAAGQDGPPGPMGPPGLPGLKGDPGSKGEKGHPGLIGLIGPPGEQGEKGDRGLPGTQGSPGAKGDGGIPGPAGPLGPPGPPGLPGPQGPKGNKGSTGPAGQKGDSGLPGPPGSPGPPGEVIQPLPILSSKKTRRHTEGMQADADDNILDYSDGMEEIFGSLNSLKQDIEHMKFPMGTQTNPARTCKDLQLSHPDFPDGEYWIDPNQGCSGDSFKVYCNFTSGGETCIYPDKKSEGVRISSWPKEKPGSWFSEFKRGKLLSYLDVEGNSINMVQMTFLKLLTASARQNFTYHCHQSAAWYDVSSGSYDKALRFLGSNDEEMSYDNNPFIKTLYDGCASRKGYEKTVIEINTPKIDQVPIVDVMINDFGDQNQKFGFEVGPVCFLG

SEQ ID NO: 3210 - protein, 780 aa, Homo Sapiens
MEPWSSRWKTKRWLWDFTVTTLALTFLFQAREVRGAAPVDVLKALDFHNSPEGISKTTGFCTNRKNSKGSDTAYRVSKQAQLSAPTKQLFPGGTFPEDFSILFTVKPKKGIQSFLLSIYNEHGIQQIGVEVGRSPVFLFEDHTGKPAPEDYPLFRTVNIADGKWHRVAISVEKKTVTMIVDCKKKTTKPLDRSERAIVDTNGITVFGTRILDEEVFEGDIQQFLITGDPKAAYDYCEHYSPDCDSSAPKAAQAQEPQIDEYAPEDIIEYDYEYGEAEYKEAESVTEGPTVTEETIAQTEKKKSNFKKKMRTVATKSKEKSKKFTPPKSEKFSSKKKKSYQASAKAKLGVKANIVDDFQEYNYGTMESYQTEAPRHVSGTNEPNPVEEIFTEEYLTGEDYDSQRKNSEDTLYENKEIDGRDSDLLVDGDLGEYDFYEYKEYEDKPTSPPNEEFGPGVPAETDITETSINGHGAYGEKGQKGEPAVVEPGMLVEGPPGPAGPAGIMGPPGLQGPTGPPGDPGDRGPPGRPGLPGADGLPGPPGTMLMLPFRYGGDGSKGPTISAQEAQAQAILQQARIALRGPPGPMGLTGRPGPVGGPGSSGAKGESGDPGPQGPRGVQGPPGPTGKPGKRGRPGADGGRGMPGEPGAKGDRGFDGLPGLPGDKGHRGERGPQGPPGPPGDDGMRGEDGEIGPRGLPGEAGPRGLLGPRGTPGAPGQPGMAGVDGPPGPKGNMGPQGEPGPPGQQGNPGPQGLPGPQGPIGPPGEKMCCNLSFGILIPLQK

SEQ ID NO: 3211 - protein, 570 aa, Homo Sapiens
MEPWSSRWKTKRWLWDFTVTTLALTFLFQAREVRGAAPVDVLKALDFHNSPEGISKTTGFCTNRKNSKGSDTAYRVSKQAQLSAPTKQLFPGGTFPEDFSILFTVKPKKGIQSFLLSIYNEHGIQQIGVEVGRSPVFLFEDHTGKPAPEDYPLFRTVNIADGKWHRVAISVEKKTVTMIVDCKKKTTKPLDRSERAIVDTNGITVFGTRILDEEVFEGDIQQFLITGDPKAAYDYCEHYSPDCDSSAPKAAQAQEPQIDEKKKSNFKKKMRTVATKSKEKSKKFTPPKSEKFSSKKKKSYQASAKAKLGVKANIVDDFQEYNYGTMESYQTEAPRHVSGTNEPNPVEEIFTEEYLTGEDYDSQRKNSEDTLYENKEIDGRDSDLLVDGDLGEYDFYEYKEYEDKPTSPPNEEFGPGVPAETDITETSINGHGAYGEKGQKGEPAVVEPGMLVEGPPGPAGPAGIMGPPGLQGPTGPPGDPGDRGPPGRPGLPGADGLPGPPGTMLMLPFRYGGDGSKGPTISAQEAQAQAILQQARIALRGPPGPMGLTGRPGPVGGPGSSGAKGESGDP

SEQ ID NO: 3212 - protein, 1690 aa, Homo Sapiens
MEPWSSRWKTKRWLWDFTVTTLALTFLFQAREVRGAAPVDVLKALDFHNSPEGISKTTGFCTNRKNSKGSDTAYRVSKQAQLSAPTKQLFPGGTFPEDFSILFTVKPKKGIQSFLLSIYNEHGIQQIGVEVGRSPVFLFEDHTGKPAPEDYPLFRTVNIADGKWHRVAISVEKKTVTMIVDCKKKTTKPLDRSERAIVDTNGITVFGTRILDEEVFEGDIQQFLITGDPKAAYDYCEHYSPDCDSSAPKAAQAQEPQIDEYAPEDIIEYDYEYGEAEYKEAESVTEGPTVTEETIAQTEINGHGAYGEKGQKGEPAVVEPGMLVEGPPGPAGPAGIMGPPGLQGPTGPPGDPGDRGPPGRPGLPGADGLPGPPGTMLMLPFRYGGDGSKGPTISAQEAQAQAILQQARIALRGPPGPMGLTGRPGPVGGPGSSGAKGESGDPGPQGPRGVQGPPGPTGKPGKRGRPGADGGRGMPGEPGAKGDRGFDGLPGLPGDKGHRGERGPQGPPGPPGDDGMRGEDGEIGPRGLPGEAGPRGLLGPRGTPGAPGQPGMAGVDGPPGPKGNMGPQGEPGPPGQQGNPGPQGLPGPQGPIGPPGEKGPQGKPGLAGLPGADGPPGHPGKEGQSGEKGALGPPGPQGPIGYPGPRGVKGADGVRGLKGSKGEKGEDGFPGFKGDMGLKGDRGEVGQIGPRGEDGPEGPKGRAGPTGDPGPSGQAGEKGKLGVPGLPGYPGRQGPKGSTGFPGFPGANGEKGARGVAGKPGPRGQRGPTGPRGSRGARGPTGKPGPKGTSGGDGPPGPPGERGPQGPQGPVGFPGPKGPPGPPGKDGLPGHPGQRGETGFQGKTGPPGPGGVVGPQGPTGETGPIGERGHPGPPGPPGEQGLPGAAGKEGAKGDPGPQGISGKDGPAGLRGFPGERGLPGAQGAPGLKGGEGPQGPPGPVGSPGERGSAGTAGPIGLPGRPGPQGPPGPAGEKGAPGEKGPQGPAGRDGVQGPVGLPGPAGPAGSPGEDGDKGEIGEPGQKGSKGDKGENGPPGPPGLQGPVGAPGIAGGDGEPGPRGQQGMFGQKGDEGARGFPGPPGPIGLQGLPGPPGEKGENGDVGPMGPPGPPGPRGPQGPNGADGPQGPPGSVGSVGGVGEKGEPGEAGNPGPPGEAGVGGPKGERGEKGEAGPPGAAGPPGAKGPPGDDGPKGNPGPVGFPGDPGPPGEPGPAGQDGVGGDKGEDGDPGQPGPPGPSGEAGPPGPPGKRGPPGAAGAEGRQGEKGAKGEAGAEGPPGKTGPVGPQGPAGKPGPEGLRGIPGPVGEQGLPGAAGQDGPPGPMGPPGLPGLKGDPGSKGEKGHPGLIGLIGPPGEQGEKGDRGLPGTQGSPGAKGDGGIPGPAGPLGPPGPPGLPGPQGPKGNKGSTGPAGQKGDSGLPGPPGSPGPPGEVIQPLPILSSKKTRRHTEGMQADADDNILDYSDGMEEIFGSLNSLKQDIEHMKFPMGTQTNPARTCKDLQLSHPDFPDGEYWIDPNQGCSGDSFKVYCNFTSGGETCIYPDKKSEGVRISSWPKEKPGSWFSEFKRGKLLSYLDVEGNSINMVQMTFLKLLTASARQNFTYHCHQSAAWYDVSSGSYDKALRFLGSNDEEMSYDNNPFIKTLYDGCASRKGYEKTVIEINTPKIDQVPIVDVMINDFGDQNQKFGFEVGPVCFLG

SEQ ID NO: 3213 - protein, 736 aa, Homo Sapiens
MEPWSSRWKTKRWLWDFTVTTLALTFLFQAREVRGAAPVDVLKALDFHNSPEGISKTTGFCTNRKNSKGSDTAYRVSKQAQLSAPTKQLFPGGTFPEDFSILFTVKPKKGIQSFLLSIYNEHGIQQIGVEVGRSPVFLFEDHTGKPAPEDYPLFRTVNIADGKWHRVAISVEKKTVTMIVDCKKKTTKPLDRSERAIVDTNGITVFGTRILDEEVFEGDIQQFLITGDPKAAYDYCEHYSPDCDSSAPKAAQAQEPQIDEYAPEDIIEYDYEYGEAEYKEAESVTEGPTVTEETIAQTEANIVDDFQEYNYGTMESYQTEAPRHVSGTNEPNPVEEIFTEEYLTGEDYDSQRKNSEDTLYENKEIDGRDSDLLVDGDLGEYDFYEYKEYEDKPTSPPNEEFGPGVPAETDITETSINGHGAYGEKGQKGEPAVVEPGMLVEGPPGPAGPAGIMGPPGLQGPTGPPGDPGDRGPPGRPGLPGADGLPGPPGTMLMLPFRYGGDGSKGPTISAQEAQAQAILQQARIALRGPPGPMGLTGRPGPVGGPGSSGAKGESGDPGPQGPRGVQGPPGPTGKPGKRGRPGADGGRGMPGEPGAKGDRGFDGLPGLPGDKGHRGERGPQGPPGPPGDDGMRGEDGEIGPRGLPGEAGPRGLLGPRGTPGAPGQPGMAGVDGPPGPKGNMGPQGEPGPPGQQGNPGPQGLPGPQGPIGPPGEKVSYSVVLVKPGEHVCFSNLRQV

SEQ ID NO: 3214 - protein, 729 aa, Homo Sapiens
MEPWSSRWKTKRWLWDFTVTTLALTFLFQAREVRGAAPVDVLKALDFHNSPEGISKTTGFCTNRKNSKGSDTAYRVSKQAQLSAPTKQLFPGGTFPEDFSILFTVKPKKGIQSFLLSIYNEHGIQQIGVEVGRSPVFLFEDHTGKPAPEDYPLFRTVNIADGKWHRVAISVEKKTVTMIVDCKKKTTKPLDRSERAIVDTNGITVFGTRILDEEVFEGDIQQFLITGDPKAAYDYCEHYSPDCDSSAPKAAQAQEPQIDEYAPEDIIEYDYEYGEAEYKEAESVTEGPTVTEETIAQTEANIVDDFQEYNYGTMESYQTEAPRHVSGTNEPNPVEEIFTEEYLTGEDYDSQRKNSEDTLYENKEIDGRDSDLLVDGDLGEYDFYEYKEYEDKPTSPPNEEFGPGVPAETDITETSINGHGAYGEKGQKGEPAVVEPGMLVEGPPGPAGPAGIMGPPGLQGPTGPPGDPGDRGPPGRPGLPGADGLPGPPGTMLMLPFRYGGDGSKGPTISAQEAQAQAILQQARIALRGPPGPMGLTGRPGPVGGPGSSGAKGESGDPGPQGPRGVQGPPGPTGKPGKRGRPGADGGRGMPGEPGAKGDRGFDGLPGLPGDKGHRGERGPQGPPGPPGDDGMRGEDGEIGPRGLPGEAGPRGLLGPRGTPGAPGQPGMAGVDGPPGPKGNMGPQGEPGPPGQQGNPGPQGLPGPQGPIGPPGEKMCCNLSFGILIPLQK

SEQ ID NO: 3215 - protein, 756 aa, Homo Sapiens
MEPWSSRWKTKRWLWDFTVTTLALTFLFQAREVRGAAPVDVLKALDFHNSPEGISKTTGFCTNRKNSKGSDTAYRVSKQAQLSAPTKQLFPGGTFPEDFSILFTVKPKKGIQSFLLSIYNEHGIQQIGVEVGRSPVFLFEDHTGKPAPEDYPLFRTVNIADGKWHRVAISVEKKTVTMIVDCKKKTTKPLDRSERAIVDTNGITVFGTRILDEEVFEGDIQQFLITGDPKAAYDYCEHYSPDCDSSAPKAAQAQEPQIDEYAPEDIIEYDYEYGEAEYKEAESVTEGPTVTEETIAQTEANIVDDFQEYNYGTMESYQTEAPRHVSGTNEPNPVEEIFTEEYLTGEDYDSQRKNSEDTLYENKEIDGRDSDLLVDGDLGEYDFYEYKEYEDKPTSPPNEEFGPGVPAETDITETSINGHGAYGEKGQKGEPAVVEPGMLVEGPPGPAGPAGIMGPPGLQGPTGPPGDPGDRGPPGRPGLPGADGLPGPPGTMLMLPFRYGGDGSKGPTISAQEAQAQAILQQARIALRGPPGPMGLTGRPGPVGGPGSSGAKGESGDPGPQGPRGVQGPPGPTGKPGKRGRPGADGGRGMPGEPGAKGDRGFDGLPGLPGDKGHRGERGPQGPPGPPGDDGMRGEDGEIGPRGLPGEAGPRGLLGPRGTPGAPGQPGMAGVDGPPGPKGNMGPQGEPGPPGQQGNPGPQGLPGPQGPIGPPGEKVSFSFSLFYKKVIKFACDKRFVGRHDERKVVKLSLPLYLIYE

SEQ ID NO: 3216 - protein, 694 aa, Homo Sapiens
  misc_feature (1)..(1): Xaa can be any naturally occurring amino acid
XPKAAYDYCEHYSPDCDSSAPKAAQAQEPQIDEYAPEDIIEYDYEYGEAEYKEAESVTEGPTVTEETIAQTEANIVDDFQEYNYGTMESYQTEAPRHVSGTNEPNPVEEIFTEEYLTGEDYDSQRKNSEDTLYENKEIDGRDSDLLVDGDLGEYDFYEYKEYEDKPTSPPNEEFGPGVPAETDITETSINGHGAYGEKGQKGEPAVVEPGMLVEGPPGPAGPAGIMGPPGLQGPTGPPGDPGDRGPPGRPGLPGADGLPGPPGTMLMLPFRYGGDGSKGPTISAQEAQAQAILQQARIALRGPPGPMGLTGRPGPVGGPGSSGAKGESGDPGPQGPRGVQGPPGPTGKPGKRGRPGADGGRGMPGEPGAKGDRGFDGLPGLPGDKGHRGERGPQGPPGPPGDDGMRGEDGEIGPRGLPGEAGPRGLLGPRGTPGAPGQPGMAGVDGPPGPKGNMGPQGEPGPPGQQGNPGPQGLPGPQGPIGPPGEKGPQGKPGLAGLPGADGPPGHPGKEGQSGEKGALGPPGPQGPIGYPGPRGVKGADGVRGLKGSKGEKGEDGFPGFKGDMGLKGDRGEVGQIGPRGEDGPEGPKGRAGPTGDPGPSGQAGEKGKLGVPGLPGYPGRQGPKDFRCHWFHWIPWVSRCQWRERCTGSSWQTRPSGSAWSNGSSRFKRCKRSHWETWAKGHFRWRWPSWPSR

SEQ ID NO: 3217 - protein, 200 aa, Homo Sapiens
YRVSKQAQLSAPTKQLFPGGTFPEDFSILFTVKPKKGIQSFLLSIYNEHGIQQIGVEVGRSPVFLFEDHTGKPAPEDYPLFRTVNIADGKWHRVAISVEKKTVTMIVDCKKKTTKPLDRSERAIVDTNGITVFGTRILDEEVFEGDIQQFLITGDPKAAYDYCEHYSPDCDSSAPKAAQAQEPQIDEVRSTRPEKVFVFQ

SEQ ID NO: 3218 - protein, 1736 aa, Homo Sapiens
MERCSRCHRLLLLLPLVLGLSAAPGWAGAPPVDVLRALRFPSLPDGVRRAKGICPADVAYRVARPAQLSAPTRQLFPGGFPKDFSLLTVVRTRPGLQAPLLTLYSAQGVRQLGLELGRPVRFLYEDQTGRPQPPSQPVFRGLSLADGKWHRVAVAVKGQSVTLIVDCKKRVTRPLPRSARPVLDTHGVIIFGARILDEEVFEGDVQELAIVPGVQAAYESCEQKELECEGGQRERPQNQQPHRAQRSPQQQPSRLHRPQNQEPQSQPTESLYYDYEPPYYDVMTTGTTPDYQDPTPGEEEEILESSLLPPLEEEQTDLQVPPTADRFQAEEYGEGGTDPPEGPYDYTYGYGDDYREETELGPALSAETAHSGAAAHGPRGLKGEKGEPAVLEPGMLVEGPPGPEGPAGLIGPPGIQGNPGPVGDPGERGPPGRAGLPGSDGAPGPPGTSLMLPFRFGSGGGDKGPVVAAQEAQAQAILQQARLALRGPPGPMGYTGRPGPLGQPGSPGLKGESGDLGPQGPRGPQGLTGPPGKAGRRGRAGADGARGMPGDPGVKGDRGFDGLPGLPGEKGHRGDTGAQGLPGPPGEDGERGDDGEIGPRGLPGESGPRGLLGPKGPPGIPGPPGVRGMDGPQGPKGSLGPQGEPGPPGQQGTPGTQGLPGPQGAIGPHGEKGPQGKPGLPGMPGSDGPPGHPGKEGPPGTKGNQGPSGPQGPLGYPGPRGVKGVDGIRGLKGHKGEKGEDGFPGFKGDIGVKGDRGEVGVPGSRGEDGPEGPKGRTGPTGDPGPPGLMGEKGKLGVPGLPGYPGRQGPKGSLGFPGFPGASGEKGARGLSGKSGPRGERGPTGPRGQRGPRGATGKSGAKGTSGGDGPHGPPGERGLPGPQGPNGFPGPKGPPGPPGKDGLPGHPGQRGEVGFQGKTGPPGPPGVVGPQGAAGETGPMGERGHPGPPGPPGEQGLPGTAGKEGTKGDPGPPGAPGKDGPAGLRGFPGERGLPGTAGGPGLKGNEGPSGPPGPAGSPGERGAAGSGGPIGPPGRPGPQGPPGAAGEKGVPGEKGPIGPTGRDGVQGPVGLPGPAGPPGVAGEDGDKGEVGDPGQKGTKGNKGEHGPPGPPGPIGPVGQPGAAGADGEPGARGPQGHFGAKGDEGTRGFNGPPGPIGLQGLPGPSGEKGETGDVGPMGPPGPPGPRGPAGPNGADGPQGPPGGVGNLGPPGEKGEPGESGSPGIQGEPGVKGPRGERGEKGESGQPGEPGPPGPKGPTGDDGPKGNPGPVGFPGDPGPPGEGGPRGQDGAKGDRGEDGEPGQPGSPGPTGENGPPGPLGKRGPAGSPGSEGRQGGKGAKGDPGAIGAPGKTGPVGPAGPAGKPGPDGLRGLPGSVGQQGRPGATGQAGPPGPVGPPGLPGLRGDAGAKGEKGHPGLIGLIGPPGEQGEKGDRGLPGPQGSPGQKGEMGIPGASGPIGPGGPPGLPGPAGPKGAKGATGPGGPKGEKGVQGPPGHPGPPGEVIQPLPIQMPKKTRRSVDGSRLMQEDEAIPTGGAPGSPGGLEEIFGSLDSLREEIEQMRRPTGTQDSPARTCQDLKLCHPELPDGEYWVDPNQGCARDAFRVFCNFTAGGETCVTPRDDVTQFSYVDSEGSPVGVVQLTFLRLLSVSAHQDVSYPCSGAARDGPLRLRGANEDELSPETSPYVKEFRDGCQTQQGRTVLEVRTPVLEQLPVLDASFSDLGAPPRRGGVLLGPVCFMG

SEQ ID NO: 3219 - protein, 1629 aa, Homo Sapiens
MERCSRCHRLLLLLPLVLGLSAAPGWAGAPPVDVLRALRFPSLPDGVRRAKGICPADVAYRVARPAQLSAPTRQLFPGGFPKDFSLLTVVRTRPGLQAPLLTLYSAQGVRQLGLELGRPVRFLYEDQTGRPQPPSQPVFRGLSLADGKWHRVAVAVKGQSVTLIVDCKKRVTRPLPRSARPVLDTHGVIIFGARILDEEVFEGDVQELAIVPGVQAAYESCEQKELECEGGQRERPQNQQPHRAQRSPQQQPSRLHRPQNQEPQSQAAHGPRGLKGEKGEPAVLEPGMLVEGPPGPEGPAGLIGPPGIQGNPGPVGDPGERGPPGRAGLPGSDGAPGPPGTSLMLPFRFGSGGGDKGPVVAAQEAQAQAILQQARLALRGPPGPMGYTGRPGPLGQPGSPGLKGESGDLGPQGPRGPQGLTGPPGKAGRRGRAGADGARGMPGDPGVKGDRGFDGLPGLPGEKGHRGDTGAQGLPGPPGEDGERGDDGEIGPRGLPGESGPRGLLGPKGPPGIPGPPGVRGMDGPQGPKGSLGPQGEPGPPGQQGTPGTQGLPGPQGAIGPHGEKGPQGKPGLPGMPGSDGPPGHPGKEGPPGTKGNQGPSGPQGPLGYPGPRGVKGVDGIRGLKGHKGEKGEDGFPGFKGDIGVKGDRGEVGVPGSRGEDGPEGPKGRTGPTGDPGPPGLMGEKGKLGVPGLPGYPGRQGPKGSLGFPGFPGASGEKGARGLSGKSGPRGERGPTGPRGQRGPRGATGKSGAKGTSGGDGPHGPPGERGLPGPQGPNGFPGPKGPPGPPGKDGLPGHPGQRGEVGFQGKTGPPGPPGVVGPQGAAGETGPMGERGHPGPPGPPGEQGLPGTAGKEGTKGDPGPPGAPGKDGPAGLRGFPGERGLPGTAGGPGLKGNEGPSGPPGPAGSPGERGAAGSGGPIGPPGRPGPQGPPGAAGEKGVPGEKGPIGPTGRDGVQGPVGLPGPAGPPGVAGEDGDKGEVGDPGQKGTKGNKGEHGPPGPPGPIGPVGQPGAAGADGEPGARGPQGHFGAKGDEGTRGFNGPPGPIGLQGLPGPSGEKGETGDVGPMGPPGPPGPRGPAGPNGADGPQGPPGGVGNLGPPGEKGEPGESGSPGIQGEPGVKGPRGERGEKGESGQPGEPGPPGPKGPTGDDGPKGNPGPVGFPGDPGPPGEGGPRGQDGAKGDRGEDGEPGQPGSPGPTGENGPPGPLGKRGPAGSPGSEGRQGGKGAKGDPGAIGAPGKTGPVGPAGPAGKPGPDGLRGLPGSVGQQGRPGATGQAGPPGPVGPPGLPGLRGDAGAKGEKGHPGLIGLIGPPGEQGEKGDRGLPGPQGSPGQKGEMGIPGASGPIGPGGPPGLPGPAGPKGAKGATGPGGPKGEKGVQGPPGHPGPPGEVIQPLPIQMPKKTRRSVDGSRLMQEDEAIPTGGAPGSPGGLEEIFGSLDSLREEIEQMRRPTGTQDSPARTCQDLKLCHPELPDGEYWVDPNQGCARDAFRVFCNFTAGGETCVTPRDDVTQFSYVDSEGSPVGVVQLTFLRLLSVSAHQDVSYPCSGAARDGPLRLRGANEDELSPETSPYVKEFRDGCQTQQGRTVLEVRTPVLEQLPVLDASFSDLGAPPRRGGVLLGPVCFMG

SEQ ID NO: 3220 - protein, 290 aa, Homo Sapiens
MERCSRCHRLLLLLPLVLGLSAAPGWAGAPPVDVLRALRFPSLPDGVRRAKGICPADVAYRVARPAQLSAPTRQLFPGGFPKDFSLLTVVRTRPGLQAPLLTLYSAQGVRQLGLELGRPVRFLYEDQTGRPQPPSQPVFRGLSLADGKWHRVAVAVKGQSVTLIVDCKKRVTRPLPRSARPVLDTHGVIIFGARILDEEVFEGDVQELAIVPGVQAAYESCEQKELECEGGQRERPQNQQPHRAQRSPQQQPSRLHRPQNQEPQSQVRELGEPPSAAHPREGRHPGISPP

SEQ ID NO: 3221 - protein, 1650 aa, Homo Sapiens
MERCSRCHRLLLLLPLVLGLSAAPGWAGAPPVDVLRALRFPSLPDGVRRAKGICPADVAYRVARPAQLSAPTRQLFPGGFPKDFSLLTVVRTRPGLQAPLLTLYSAQGVRQLGLELGRPVRFLYEDQTGRPQPPSQPVFRGLSLADGKWHRVAVAVKGQSVTLIVDCKKRVTRPLPRSARPVLDTHGVIIFGARILDEEVFEGDVQELAIVPGVQAAYESCEQKELECEGGQRERPQNQQPHRAQRSPQQQPSRLHRPQNQEPQSQDPTPGEEEEILESSLLPPLEEAAHGPRGLKGEKGEPAVLEPGMLVEGPPGPEGPAGLIGPPGIQGNPGPVGDPGERGPPGRAGLPGSDGAPGPPGTSLMLPFRFGSGGGDKGPVVAAQEAQAQAILQQARLALRGPPGPMGYTGRPGPLGQPGSPGLKGESGDLGPQGPRGPQGLTGPPGKAGRRGRAGADGARGMPGDPGVKGDRGFDGLPGLPGEKGHRGDTGAQGLPGPPGEDGERGDDGEIGPRGLPGESGPRGLLGPKGPPGIPGPPGVRGMDGPQGPKGSLGPQGEPGPPGQQGTPGTQGLPGPQGAIGPHGEKGPQGKPGLPGMPGSDGPPGHPGKEGPPGTKGNQGPSGPQGPLGYPGPRGVKGVDGIRGLKGHKGEKGEDGFPGFKGDIGVKGDRGEVGVPGSRGEDGPEGPKGRTGPTGDPGPPGLMGEKGKLGVPGLPGYPGRQGPKGSLGFPGFPGASGEKGARGLSGKSGPRGERGPTGPRGQRGPRGATGKSGAKGTSGGDGPHGPPGERGLPGPQGPNGFPGPKGPPGPPGKDGLPGHPGQRGEVGFQGKTGPPGPPGVVGPQGAAGETGPMGERGHPGPPGPPGEQGLPGTAGKEGTKGDPGPPGAPGKDGPAGLRGFPGERGLPGTAGGPGLKGNEGPSGPPGPAGSPGERGAAGSGGPIGPPGRPGPQGPPGAAGEKGVPGEKGPIGPTGRDGVQGPVGLPGPAGPPGVAGEDGDKGEVGDPGQKGTKGNKGEHGPPGPPGPIGPVGQPGAAGADGEPGARGPQGHFGAKGDEGTRGFNGPPGPIGLQGLPGPSGEKGETGDVGPMGPPGPPGPRGPAGPNGADGPQGPPGGVGNLGPPGEKGEPGESGSPGIQGEPGVKGPRGERGEKGESGQPGEPGPPGPKGPTGDDGPKGNPGPVGFPGDPGPPGEGGPRGQDGAKGDRGEDGEPGQPGSPGPTGENGPPGPLGKRGPAGSPGSEGRQGGKGAKGDPGAIGAPGKTGPVGPAGPAGKPGPDGLRGLPGSVGQQGRPGATGQAGPPGPVGPPGLPGLRGDAGAKGEKGHPGLIGLIGPPGEQGEKGDRGLPGPQGSPGQKGEMGIPGASGPIGPGGPPGLPGPAGPKGAKGATGPGGPKGEKGVQGPPGHPGPPGEVIQPLPIQMPKKTRRSVDGSRLMQEDEAIPTGGAPGSPGGLEEIFGSLDSLREEIEQMRRPTGTQDSPARTCQDLKLCHPELPDGEYWVDPNQGCARDAFRVFCNFTAGGETCVTPRDDVTQFSYVDSEGSPVGVVQLTFLRLLSVSAHQDVSYPCSGAARDGPLRLRGANEDELSPETSPYVKEFRDGCQTQQGRTVLEVRTPVLEQLPVLDASFSDLGAPPRRGGVLLGPVCFMG

SEQ ID NO: 3222 - protein, 624 aa, Homo Sapiens
MERCSRCHRLLLLLPLVLGLSAAPGWAGAPPVDVLRALRFPSLPDGVRRAKGICPADVAYRVARPAQLSAPTRQLFPGGFPKDFSLLTVVRTRPGLQAPLLTLYSAQGVRQLGLELGRPVRFLYEDQTGRPQPPSQPVFRGLSLADGKWHRVAVAVKGQSVTLIVDCKKRVTRPLPRSARPVLDTHGVIIFGARILDEEVFEGDVQELAIVPGVQAAYESCEQKELECEGGQRERPQNQQPHRAQRSPQQQPSRLHRPQNQEPQSQPTESLYYDYEPPYYDVMTTGTTPDYQDPTPGEEEEILESSLLPPLEEEQTDLQVPPTADRFQAEEYGEGGTDPPEGPYDYTYGYGDDYREETELGPALSAETAHSGAAAHGPRGLKGEKGEPAVLEPGMLVEGPPGPEGPAGLIGPPGIQGNPGPVGDPGERGPPGRAGLPGSDGAPGPPGTSLMLPFRFGSGGGDKGPVVAAQEAQAQAILQQARLALRGPPGPMGYTGRPGPLGQPGSPGLKGESGDLGPQGPRGPQGLTGPPGKAGRRGRAGADGARGMPGDPGVKGDRGFDGLPGLPGEKGHRGDTGAQGLPGPPGEDGERGDDGEIGPRGLPGESGPRGLLGPKGPPGIPGPP

SEQ ID NO: 3223 - protein, 1874 aa, Homo Sapiens
MECLTRAEADIVLLVDGSWSIGRANFRTVRSFISRIVEVFDIGPKRVQIALAQYSGDPRTEWQLNAHRDKKSLLQAVANLPYKGGNTLTGMALNFIRQQNFRTQAGMRPRARKIGVLITDGKSQDDVEAPSKKLKDEGVELFAIGIKNADEVELKMIATDPDDTHAYNVADFESLSRIVDDLTINLCNSVKGPGDLEAPSNLVISERTHRSFRVSWTPPSDSVDRYKVEYYPVSGGKRQEFYVSRMETSTVLKDLKPETEYVVNVYSVVEDEYSEPLKGTEKTLPVPVVSLNIYDVGPTTMHVQWQPVGGATGYILSYKPVKDTEPTRPKEVRLGPTVNDMQLTDLVPNTEYAVTVQAVLHDLTSEPVTVREVTLPLPRPQDLKLRDVTHSTMNVFWEPVPGKVRKYIVRYKTPEEDVKEVEVDRSETSTSLKDLFSQTLYTVSVSAVHDEGESPPVTAQETTRPVPAPTNLKITEVTSEGFRGTWDHGASDVSLYRITWAPFGSSDKMETILNGDENTLVFENLNPNTIYEVSITAIYPDESESDDLIGSERTLPILTTQAPKSGPRNLQVYNATSNSLTVKWDPASGRVQKYRITYQPSTGEGNEQTTTIGGRQNSVVLQKLKPDTPYTITVSSLYPDGEGGRMTGRGKTKPLNTVRNLRVYDPSTSTLNVRWDHAEGNPRQYKLFYAPAAGGPEELVPIPGNTNYAILRNLQPDTSYTVTVVPVYTEGDGGRTSDTGRTLMRGLARNVQVYNPTPNSLDVRWDPAPGPVLQYRVVYSPVDGTRPSESIVVPGNTRMVHLERLIPDTLYSVNLVALYSDGEGNPSPAQGRTLPRSGPRNLRVFGETTNSLSVAWDHADGPVQQYRIIYSPTVGDPIDEYTTVPGRRNNVILQPLQPDTPYKITVIAVYEDGDGGHLTGNGRTVGLLPPQNIHISDEWYTRFRVSWDPSPSPVLGYKIVYKPVGSNEPMEAFVGEMTSYTLHNLNPSTTYDVNVYAQYDSGLSVPLTDQGTTLYLNVTDLKTYQIGWDTFCVKWSPHRAATSYRLKLSPADGTRGQEITVRGSETSHCFTGLSPDTDYGVTVFVQTPNLEGPGVSVKEHTTVKPTEAPTEPPTPPPPPTIPPARDVCKGAKADIVFLTDASWSIGDDNFNKVVKFIFNTVGGFDEISPAGIQVSFVQYSDEVKSEFKLNTYNDKALALGALQNIRYRGGNTRTGKALTFIKEKVLTWESGMRKNVPKVLVVVTDGRSQDEVKKAALVIQHSRFSVFVVGVADVDYNELANIASKPSERHVFIVDDFESFEKIEDNLITFVCETATSSCPLIYLDGYTSPGFKMLEAYNLTEKNFASVQGVSLESGSFPSYSAYRIQKNAFVNQPTADLHPNGLPPSYTIILLFRLLPETPSDPFAIWQITDRDYKPQVGVIADPSSKTLSFFNKDTRGEVQTVTFDTEEVKTLFYGSFHKVHIVVTSKSVKIYIDCYEIIEKDIKEAGNITTDGYEILGKLLKGERKSAAFQIQSFDIVCSPVWTSRDRCCDIPSRRDEGKCPAFPNSCTCTQDSVGPPGPPGPAGGPGAKGPRGERGISGAIGPPGPRGDIGPPGPQGPPGPQGPNGLSIPGEQGRQGMKGDAGEPGLPGRTGTPGLPGPPGPMGPPGDRGFTGKDGAMGPRGPPGPPGSPGSPGVTGPSGKPGKPGDHGRPGPSGLKGEKGDRGDIASQNMMRAVARQVCEQLISGQMNRFNQMLNQIPNDYQSSRNQPGPPGPPGPPGSAGARGEPGPGGRPGFPGTPGMQGPPGERGLPGEKGERGTGSSGPRGLPGPPGPQGESRTGPPGSTGSRGPPGPPGRPGNSGIRGPPGPPGYCDSSQCASIPYNGQGYPGSG

SEQ ID NO: 3224 - protein, 1899 aa, Homo Sapiens
MRSRLPPALAALGAALLLSSIEAEGMECLTRAEADIVLLVDGSWSIGRANFRTVRSFISRIVEVFDIGPKRVQIALAQYSGDPRTEWQLNAHRDKKSLLQAVANLPYKGGNTLTGMALNFIRQQNFRTQAGMRPRARKIGVLITDGKSQDDVEAPSKKLKDEGVELFAIGIKNADEVELKMIATDPDDTHAYNVADFESLSRIVDDLTINLCNSVKGPGDLEAPSNLVISERTHRSFRVSWTPPSDSVDRYKVEYYPVSGGKRQEFYVSRMETSTVLKDLKPETEYVVNVYSVVEDEYSEPLKGTEKTLPVPVVSLNIYDVGPTTMHVQWQPVGGATGYILSYKPVKDTEPTRPKEVRLGPTVNDMQLTDLVPNTEYAVTVQAVLHDLTSEPVTVREVTLPLPRPQDLKLRDVTHSTMNVFWEPVPGKVRKYIVRYKTPEEDVKEVEVDRSETSTSLKDLFSQTLYTVSVSAVHDEGESPPVTAQETTRPVPAPTNLKITEVTSEGFRGTWDHGASDVSLYRITWAPFGSSDKMETILNGDENTLVFENLNPNTIYEVSITAIYPDESESDDLIGSERTLPILTTQAPKSGPRNLQVYNATSNSLTVKWDPASGRVQKYRITYQPSTGEGNEQTTTIGGRQNSVVLQKLKPDTPYTITVSSLYPDGEGGRMTGRGKTKPLNTVRNLRVYDPSTSTLNVRWDHAEGNPRQYKLFYAPAAGGPEELVPIPGNTNYAILRNLQPDTSYTVTVVPVYTEGDGGRTSDTGRTLMRGLARNVQVYNPTPNSLDVRWDPAPGPVLQYRVVYSPVDGTRPSESIVVPGNTRMVHLERLIPDTLYSVNLVALYSDGEGNPSPAQGRTLPRSGPRNLRVFGETTNSLSVAWDHADGPVQQYRIIYSPTVGDPIDEYTTVPGRRNNVILQPLQPDTPYKITVIAVYEDGDGGHLTGNGRTVGLLPPQNIHISDEWYTRFRVSWDPSPSPVLGYKIVYKPVGSNEPMEAFVGEMTSYTLHNLNPSTTYDVNVYAQYDSGLSVPLTDQGTTLYLNVTDLKTYQIGWDTFCVKWSPHRAATSYRLKLSPADGTRGQEITVRGSETSHCFTGLSPDTDYGVTVFVQTPNLEGPGVSVKEHTTVKPTEAPTEPPTPPPPPTIPPARDVCKGAKADIVFLTDASWSIGDDNFNKVVKFIFNTVGGFDEISPAGIQVSFVQYSDEVKSEFKLNTYNDKALALGALQNIRYRGGNTRTGKALTFIKEKVLTWESGMRKNVPKVLVVVTDGRSQDEVKKAALVIQQSGFSVFVVGVADVDYNELANIASKPSERHVFIVDDFESFEKIEDNLITFVCETATSSCPLIYLDGYTSPGFKMLEAYNLTEKNFASVQGVSLESGSFPSYSAYRIQKNAFVNQPTADLHPNGLPPSYTIILLFRLLPETPSDPFAIWQITDRDYKPQVGVIADPSSKTLSFFNKDTRGEVQTVTFDTEEVKTLFYGSFHKVHIVVTSKSVKIYIDCYEIIEKDIKEAGNITTDGYEILGKLLKGERKSAAFQIQSFDIVCSPVWTSRDRCCDIPSRRDEGKCPAFPNSCTCTQDSVGPPGPPGPAGGPGAKGPRGERGISGAIGPPGPRGDIGPPGPQGPPGPQGPNGLSIPGEQGRQGMKGDAGEPGLPGRTGTPGLPGPPGPMGPPGDRGFTGKDGAMGPRGPPGPPGSPGSPGVTGPSGKPGKPGDHGRPGPSGLKGEKGDRGDIASQNMMRAVARQVCEQLISGQMNRFNQMLNQIPNDYQSSRNQPGPPGPPGPPGSAGARGEPGPGGRPGFPGTPGMQGPPGERGLPGEKGERGTGSSGPRGLPGPPGPQGESRTGPPGSTGSRGPPGPPGRPGNSGIRGPPGPPGYCDSSQCASIPYNGQGYPGSG

SEQ ID NO: 3225 - protein, 3063 aa, Homo Sapiens
MRSRLPPALAALGAALLLSSIEAEVDPPSDLNFKIIDENTVHMSWAKPVDPIVGYRITVDPTTDGPTKEFTLSASTTETLLSELVPETEYVVTITSYDEVEESVPVIGQLTIQTGSSTKPVEKKPGKTEIQKCSVSAWTDLVFLVDGSWSVGRNNFKYILDFIAALVSAFDIGEEKTRVGVVQYSSDTRTEFNLNQYYQRDELLAAIKKIPYKGGNTMTGDAIDYLVKNTFTESAGARVGFPKVAIIITDGKSQDEVEIPARELRNVGVEVFSLGIKAADAKELKQIASTPSLNHVFNVANFDAIVDIQNEIISQVCSGVDEQLGELVSGEEVVEPPSNLIAMEVSSKYVKLNWNPSPSPVTGYKVILTPMTAGSRQHALSVGPQTTTLSVRDLSADTEYQISVSAMKGMTSSEPISIMEKTQPMKVQVECSRGVDIKADIVFLVDGSYSIGIANFVKVRAFLEVLVKSFEISPNRVQISLVQYSRDPHTEFTLKKFTKVEDIIEAINTFPYRGGSTNTGKAMTYVREKIFVPSKGSRSNVPKVMILITDGKSSDAFRDPAIKLRNSDVEIFAVGVKDAVRSELEAIASPPAETHVFTVEDFDAFQRISFELTQSICLRIEQELAAIKKKAYVPPKDLSFSEVTSYGFKTNWSPAGENVFSYHITYKEAAGDDEVTVVEPASSTSVVLSSLKPETLYLVNVTAEYEDGFSIPLAGEETTEEVKGAPRNLKVTDETTDSFKITWTQAPGRVLRYRIIYRPVAGGESREVTTPPNQRRRTLENLIPDTKYEVSVIPEYFSGPGTPLTGNAATEEVRGNPRDLRVSDPTTSTMKLSWSGAPGKVKQYLVTYTPVAGGETQEVTVRGDTTNTVLQGLKEGTQYALSVTALYASGAGDALFGEGTTLEERGSPQDLVTKDITDTSIGAYWTSAPGMVRGYRVSWKSLYDDVDTGEKNLPEDAIHTMIENLQPETKYRISVFATYSSGEGEPLTGDATTELSQDSKTLKVDEETENTMRVTWKPAPGKVVNYRVVYRPHGRGKQMVAKVPPTVTSTVLKRLQPQTTYDITVLPIYKMGEGKLRQGSGTTASRFKSPRNLKTSDPTMSSFRVTWEPAPGEVKGYKVTFHPTGDDRRLGELVVGPYDNTVVLEELRAGTTYKVNVFGMFDGGESSPLVGQEMTTLSDTTVMPILSSGMECLTRAEADIVLLVDGSWSIGRANFRTVRSFISRIVEVFDIGPKRVQIALAQYSGDPRTEWQLNAHRDKKSLLQAVANLPYKGGNTLTGMALNFIRQQNFRTQAGMRPRARKIGVLITDGKSQDDVEAPSKKLKDEGVELFAIGIKNADEVELKMIATDPDDTHAYNVADFESLSRIVDDLTINLCNSVKGPGDLEAPSNLVISERTHRSFRVSWTPPSDSVDRYKVEYYPVSGGKRQEFYVSRMETSTVLKDLKPETEYVVNVYSVVEDEYSEPLKGTEKTLPVPVVSLNIYDVGPTTMHVQWQPVGGATGYILSYKPVKDTEPTRPKEVRLGPTVNDMQLTDLVPNTEYAVTVQAVLHDLTSEPVTVREVTLPLPRPQDLKLRDVTHSTMNVFWEPVPGKVRKYIVRYKTPEEDVKEVEVDRSETSTSLKDLFSQTLYTVSVSAVHDEGESPPVTAQETTRPVPAPTNLKITEVTSEGFRGTWDHGASDVSLYRITWAPFGSSDKMETILNGDENTLVFENLNPNTIYEVSITAIYPDESESDDLIGSERTLPILTTQAPKSGPRNLQVYNATSNSLTVKWDPASGRVQKYRITYQPSTGEGNEQTTTIGGRQNSVVLQKLKPDTPYTITVSSLYPDGEGGRMTGRGKTKPLNTVRNLRVYDPSTSTLNVRWDHAEGNPRQYKLFYAPAAGGPEELVPIPGNTNYAILRNLQPDTSYTVTVVPVYTEGDGGRTSDTGRTLMRGLARNVQVYNPTPNSLDVRWDPAPGPVLQYRVVYSPVDGTRPSESIVVPGNTRMVHLERLIPDTLYSVNLVALYSDGEGNPSPAQGRTLPRSGPRNLRVFGETTNSLSVAWDHADGPVQQYRIIYSPTVGDPIDEYTTVPGRRNNVILQPLQPDTPYKITVIAVYEDGDGGHLTGNGRTVGLLPPQNIHISDEWYTRFRVSWDPSPSPVLGYKIVYKPVGSNEPMEAFVGEMTSYTLHNLNPSTTYDVNVYAQYDSGLSVPLTDQGTTLYLNVTDLKTYQIGWDTFCVKWSPHRAATSYRLKLSPADGTRGQEITVRGSETSHCFTGLSPDTDYGVTVFVQTPNLEGPGVSVKEHTTVKPTEAPTEPPTPPPPPTIPPARDVCKGAKADIVFLTDASWSIGDDNFNKVVKFIFNTVGGFDEISPAGIQVSFVQYSDEVKSEFKLNTYNDKALALGALQNIRYRGGNTRTGKALTFIKEKVLTWESGMRKNVPKVLVVVTDGRSQDEVKKAALVIQQSGFSVFVVGVADVDYNELANIASKPSERHVFIVDDFESFEKIEDNLITFVCETATSSCPLIYLDGYTSPGFKMLEAYNLTEKNFASVQGVSLESGSFPSYSAYRIQKNAFVNQPTADLHPNGLPPSYTIILLFRLLPETPSDPFAIWQITDRDYKPQVGVIADPSSKTLSFFNKDTRGEVQTVTFDTEEVKTLFYGSFHKVHIVVTSKSVKIYIDCYEIIEKDIKEAGNITTDGYEILGKLLKGERKSAAFQIQSFDIVCSPVWTSRDRCCDIPSRRDEGKCPAFPNSCTCTQDSVGPPGPPGPAGGPGAKGPRGERGISGAIGPPGPRGDIGPPGPQGPPGPQGPNGLSIPGEQGRQGMKGDAGEPGLPGRTGTPGLPGPPGPMGPPGDRGFTGKDGAMGPRGPPGPPGSPGSPGVTGPSGKPGKPGDHGRPGPSGLKGEKGDRGDIASQNMMRAVARQVCEQLISGQMNRFNQMLNQIPNDYQSSRNQPGPPGPPGPPGSAGARGEPGPGGRPGFPGTPGMQGPPGERGLPGEKGERGTGSSGPRGLPGPPGPQGESRTGPPGSTGSRGPPGPPGRPGNSGIRGPPGPPGYCDSSQCASIPYNGQGYPGSG

SEQ ID NO: 3226 - protein, 3062 aa, Homo Sapiens
MRSRLPPALAALGAALLLSSIEAEVDPPSDLNFKIIDENTVHMSWAKPVDPIVGYRITVDPTTDGPTKEFTLSASTTETLLSELVPETEYVVTITSYDEVEESVPVIGQLTIQTGSSTKPVEKKPGKTEIQKCSVSAWTDLVFLVDGSWSVGRNNFKYILDFIAALVSAFDIGEEKTRVGVVQYSSDTRTEFNLNQYYQRDELLAAIKKIPYKGGNTMTGDAIDYLVKNTFTESAGARVGFPKVAIIITDGKSQDEVEIPARELRNVGVEVFSLGIKAADAKELKQIASTPSLNHVFNVANFDAIVDIQNEIISQVCSGVDEQLGELVSGEEVVEPPSNLIAMEVSSKYVKLNWNPSPSPVTGYKVILTPMTAGSRQHALSVGPQTTTLSVRDLSADTEYQISVSAMKGMTSSEPISIMEKTQPMKVQVECSRGVDIKADIVFLVDGSYSIGIANFVKVRAFLEVLVKSFEISPNRVQISLVQYSRDPHTEFTLKKFTKVEDIIEAINTFPYRGGSTNTGKAMTYVREKIFVPSKGSRSNVPKVMILITDGKSSDAFRDPAIKLRNSDVEIFAVGVKDAVRSELEAIASPPAETHVFTVEDFDAFQRISFELTQSICLRIEQELAAIKKKAYVPPKDLSFSEVTSYGFKTNWSPAGENVFSYHITYKEAAGDDEVTVVEPASSTSVVLSSLKPETLYLVNVTAEYEDGFSIPLAGEETTEEVKGAPRNLKVTDETTDSFKITWTQAPGRVLRYRIIYRPVAGGESREVTTPPNQRRRTLENLIPDTKYEVSVIPEYFSGPGTPLTGNAATEEVRGNPRDLRVSDPTTSTMKLSWSGAPGKVKQYLVTYTPVAGGETQEVTVRGDTTNTVLQGLKEGTQYALSVTALYASGAGDALFGEGTTLEERGSPQDLVTKDITDTSIGAYWTSAPGMVRGYRVSWKSLYDDVDTGEKNLPEDAIHTMIENLQPETKYRISVFATYSSGEGEPLTGDATTELSQDSKTLKVDEETENTMRVTWKPAPGKVVNYRVVYRPHGRGKQMVAKVPPTVTSTVLKRLQPQTTYDITVLPIYKMGEGKLRQGSGTTASRFKSPRNLKTSDPTMSSFRVTWEPAPGEVKGYKVTFHPTGDDRRLGELVVGPYDNTVVLEELRAGTTYKVNVFGMFDGGESSPLVGQEMTTLSDTTVMPILSSGMECLTRAEADIVLLVDGSWSIGRANFRTVRSFISRIVEVFDIGPKRVQIALAQYSGDPRTEWQLNAHRDKKSLLQAVANLPYKGGNTLTGMALNFIRQQNFRTQAGMRPRARKIGVLITDGKSQDDVEAPSKKLKDEGVELFAIGIKNADEVELKMIATDPDDTHAYNVADFESLSRIVDDLTINLCNSVKGPGDLEAPSNLVISERTHRSFRVSWTPPSDSVDRYKVEYYPVSGGKRQEFYVSRMETSTVLKDLKPETEYVVNVYSVVEDEYSEPLKGTEKTLPVPVVSLNIYDVGPTTMHVQWQPVGGATGYILSYKPVKDTEPTRPKEVRLGPTVNDMQLTDLVPNTEYAVTVQAVLHDLTSEPVTVREVTLPLPRPQDLKLRDVTHSTMNVFWEPVPGKVRKYIVRYKTPEEDVKEVEVDRSETSTSLKDLFSQTLYTVSVSAVHDEGESPPVTAQETTRPVPAPTNLKITEVTSEGFRGTWDHGASDVSLYRITWAPFGSSDKMETILNGDENTLVFENLNPNTIYEVSITAIYPDESESDDLIGSERTLPILTTQAPKSGPRNLQVYNATSNSLTVKWDPASGRVQKYRITYQPSTGEGNEQTTTIGGRQNSVVLQKLKPDTPYTITVSSLYPDGEGGRMTGRGKTKPLNTVRNLRVYDPSTSTLNVRWDHAEGNPRQYKLFYAPAAGGPEELVPIPGNTNYAILRNLQPDTSYTVTVVPVYTEGDGGRTSDTGRTLMRGLARNVQVYNPTPNSLDVRWDPAPGPVLQYRVVYSPVDGTRPSESIVVPGNTRMVHLERLIPDTLYSVNLVALYSDGEGNPSPAQGRTLPRSGPRNLRVFGETTNSLSVAWDHADGPVQQYRIIYSPTVGDPIDEYTTVPGRRNNVILQPLQPDTPYKITVIAVYEDGDGGHLTGNGRTVGLLPPQNIHISDEWYTRFRVSWDPSPSPVLGYKIVYKPVGSNEPMEAFVGEMTSYTLHNLNPSTTYDVNVYAQYDSGLSVPLTDQGTTLYLNVTDLKTYQIGWDTFCVKWSPHRAATSYRLKLSPADGTRGQEITVRGSETSHCFTGLSPDTDYGVTVFVQTPNLEGPGVSVKEHTTVKPTEAPTEPPTPPPPPTIPPARDVCKGAKADIVFLTDASWSIGDDNFNKVVKFIFNTVGGFDEISPAGIQVSFVQYSDEVKSEFKLNTYNDKALALGALQNIRYRGGNTRTGKALTFIKEKVLTWESGMRKNVPKVLVVVTDGRSQDEVKKAALVIQQSGFSVFVVGVADVDYNELANIASKPSERHVFIVDDFESFEKIEDNLITFVCETATSSCPLIYLDGYTSPGFKMLEAYNLTEKNFASVQGVSLESGSFPSYSAYRIQKNAFVNQPTADLHPNGLPPSYTIILLFRLLPETPSDPFAIWQITDRDYKPQVGVIADPSSKTLSFFNKDTRGEVQTVTFDTEEVKTLFYGSFHKVHIVVTSKSVKIYIDCYEIIEKDIKEAGNITTDGYEILGKLLKGERKSAAFQIQSFDIVCSPVWTSRDRCCDIPSRRDEGKCPAFPNSCTCTQDSVGPPGPPGPAGGPGAKGPRGERGISGAIGPPGPRGDIGPPGPQGPPGPQGPNGLSIPGEQGRQGMKGDAGEPGLPGRTGTPGLPGPPGPMGPPGDRGFTGKDGAMGPRGPPGPGSPGVTGPSGKPGKPGDHGRPGPSGLKGEKGDRGDIASQNMMRAVARQVCEQLISGQMNRFNQMLNQIPNDYQSSRNQPGPPGPPGPPGSAGARGEPGPGGRPGFPGTPGMQGPPGERGLPGEKGERGTGSSGPRGLPGPPGPQGESRTGPPGSTGSRGPPGPPGRPGNSGIRGPPGPPGYCDSSQCASIPYNGQGYPGTLLPL

SEQ ID NO: 3227 - protein, 2987 aa, Homo Sapiens
MRSRLPPALAALGAALLLSSIEAEVDPPSDLNFKIIDENTVHMSWAKPVDPIVGYRITVDPTTDGPTKEFTLSASTTETLLSELVPETEYVVTITSYDEVEESVPVIGQLTIQTGSSTKPVEKKPGKTEIQKCSVSAWTDLVFLVDGSWSVGRNNFKYILDFIAALVSAFDIGEEKTRVGVVQYSSDTRTEFNLNQYYQRDELLAAIKKIPYKGGNTMTGDAIDYLVKNTFTESAGARVGFPKVAIIITDGKSQDEVEIPARELRNVGVEVFSLGIKAADAKELKQIASTPSLNHVFNVANFDAIVDIQNEIISQVCSGVDEQLGELVSGEEVVEPPSNLIAMEVSSKYVKLNWNPSPSPVTGYKVILTPMTAGSRQHALSVGPQTTTLSVRDLSADTEYQISVSAMKGMTSSEPISIMEKTQPMKVQVECSRGVDIKADIVFLVDGSYSIGIANFVKVRAFLEVLVKSFEISPNRVQISLVQYSRDPHTEFTLKKFTKVEDIIEAINTFPYRGGSTNTGKAMTYVREKIFVPSKGSRSNVPKVMILITDGKSSDAFRDPAIKLRNSDVEIFAVGVKDAVRSELEAIASPPAETHVFTVEDFDAFQRISFELTQSICLRIEQELAAIKKKAYVPPKDLSFSEVTSYGFKTNWSPAGENVFSYHITYKEAAGDDEVTVVEPASSTSVVLSSLKPETLYLVNVTAEYEDGFSIPLAGEETTEEVKGAPRNLKVTDETTDSFKITWTQAPGRVLRYRIIYRPVAGGESREVTTPPNQRRRTLENLIPDTKYEVSVIPEYFSGPGTPLTGNAATEEVRGNPRDLRVSDPTTSTMKLSWSGAPGKVKQYLVTYTPVAGGETQEVTVRGDTTNTVLQGLKEGTQYALSVTALYASGAGDALFGEGTTLEERGSPQDLVTKDITDTSIGAYWTSAPGMVRGYRVSWKSLYDDVDTGEKNLPEDAIHTMIENLQPETKYRISVFATYSSGEGEPLTGDATTELSQDSKTLKVDEETENTMRVTWKPAPGKVVNYRVVYRPHGRGKQMVAKVPPTVTSTVLKRLQPQTTYDITVLPIYKMGEGKLRQGSGTTASRFKSPRNLKTSDPTMSSFRVTWEPAPGEVKGYKVTFHPTGDDRRLGELVVGPYDNTVVLEELRAGTTYKVNVFGMFDGGESSPLVGQEMTTLSDTTVMPILSSGMECLTRAEADIVLLVDGSWSIGRANFRTVRSFISRIVEVFDIGPKRVQIALAQYSGDPRTEWQLNAHRDKKSLLQAVANLPYKGGNTLTGMALNFIRQQNFRTQAGMRPRARKIGVLITDGKSQDDVEAPSKKLKDEGVELFAIGIKNADEVELKMIATDPDDTHAYNVADFESLSRIVDDLTINLCNSVKGPGDLEAPSNLVISERTHRSFRVSWTPPSDSVDRYKVEYYPVSGGKRQEFYVSRMETSTVLKDLKPETEYVVNVYSVVEDEYSEPLKGTEKTLPVPVVSLNIYDVGPTTMHVQWQPVGGATGYILSYKPVKDTEPTRPKEVRLGPTVNDMQLTDLVPNTEYAVTVQAVLHDLTSEPVTVREVTLPLPRPQDLKLRDVTHSTMNVFWEPVPGKVRKYIVRYKTPEEDVKEVEVDRSETSTSLKDLFSQTLYTVSVSAVHDEGESPPVTAQETTRPVPAPTNLKITEVTSEGFRGTWDHGASDVSLYRITWAPFGSSDKMETILNGDENTLVFENLNPNTIYEVSITAIYPDESESDDLIGSERTLPILTTQAPKSGPRNLQVYNATSNSLTVKWDPASGRVQKYRITYQPSTGEGNEQTTTIGGRQNSVVLQKLKPDTPYTITVSSLYPDGEGGRMTGRGKTKPLNTVRNLRVYDPSTSTLNVRWDHAEGNPRQYKLFYAPAAGGPEELVPIPGNTNYAILRNLQPDTSYTVTVVPVYTEGDGGRTSDTGRTLMRGLARNVQVYNPTPNSLDVRWDPAPGPVLQYRVVYSPVDGTRPSESIVVPGNTRMVHLERLIPDTLYSVNLVALYSDGEGNPSPAQGRTLPRSGPRNLRVFGETTNSLSVAWDHADGPVQQYRIIYSPTVGDPIDEYTTVPGRRNNVILQPLQPDTPYKITVIAVYEDGDGGHLTGNGRTVGLLPPQNIHISDEWYTRFRVSWDPSPSPVLGYKIVYKPVGSNEPMEAFVGEMTSYTLHNLNPSTTYDVNVYAQYDSGLSVPLTDQGTTLYLNVTDLKTYQIGWDTFCVKWSPHRAATSYRLKLSPADGTRGQEITVRGSETSHCFTGLSPDTDYGVTVFVQTPNLEGPGVSVKEHTTVKPTEAPTEPPTPPPPPTIPPARDVCKGAKADIVFLTDASWSIGDDNFNKVVKFIFNTVGGFDEISPAGIQVSFVQYSDEVKSEFKLNTYNDKALALGALQNIRYRGGNTRTGKALTFIKEKVLTWESGMRKNVPKVLVVVTDGRSQDEVKKAALVIQQSGFSVFVVGVADVDYNELANIASKPSERHVFIVDDFESFEKIEDNLITFVCETATSSCPLIYLDGYTSPGFKMLEAYNLTEKNFASVQGVSLESGSFPSYSAYRIQKNAFVNQPTADLHPNGLPPSYTIILLFRLLPETPSDPFAIWQITDRDYKPQVGVIADPSSKTLSFFNKDTRGEVQTVTFDTEEVKTLFYGSFHKRDEGKCPAFPNSCTCTQDSVGPPGPPGPAGGPGAKGPRGERGISGAIGPPGPRGDIGPPGPQGPPGPQGPNGLSIPGEQGRQGMKGDAGEPGLPGRTGTPGLPGPPGPMGPPGDRGFTGKDGAMGPRGPPGPPGSPGSPGVTGPSGKPGKPGDHGRPGPSGLKGEKGDRGDIASQNMMRAVARQVCEQLISGQMNRFNQMLNQIPNDYQSSRNQPGPPGPPGPPGSAGARGEPGPGGRPGFPGTPGMQGPPGERGLPGEKGERGTGSSGPRGLPGPPGPQGESRTGPPGSTGSRGPPGPPGRPGNSGIRGPPGPPGYCDSSQCASIPYNGQGYPGSG

SEQ ID NO: 3228 - protein, 207 aa, Homo Sapiens
VIQQSGFSVFVVGVADVDYNELANIASKPSERHVFIVDDFESFEKIEDNLITFVCETATSSCPLIYLDGYTSPGFKMLEAYNLTEKNFASVQGVSLESGSFPSYSAYRIQKNAFVNQPTADLHPNGLPPSYTIILLFRLLPETPSDPFAIWQITDRDYKPQVGVIADPSSKTLSFFNKDTRGEVQTVTFDTEEVKTLFYGSFHKVKT

SEQ ID NO: 3229 - protein, 756 aa, Homo Sapiens
VSFVQYSDEVKSEFKLNTYNDKALALGALQNIRYRGGNTRTGKALTFIKEKVLTWESGMRKNVPKVLVVVTDGRSQDEVKKAALVIQQSGFSVFVVGVADVDYNELANIASKPSERHVFIVDDFESFEKIEDNLITFVCETATSSCPLIYLDGYTSPGFKMLEAYNLTEKNFASVQGVSLESGSFPSYSAYRIQKNAFVNQPTADLHPNGLPPSYTIILLFRLLPETPSDPFAIWQITDRDYKPQVGVIADPSSKTLSFFNKDTRGEVQTVTFDTEEVKTLFYGSFHKVHIVVTSKSVKIYIDCYEIIEKDIKEAGNITTDGYEILGKLLKGERKSAAFQIQSFDIVCSPVWTSRDRCCDIPSRRDEGKCPAFPNSCTCTQDSVGPPGPPGPAGGPGAKGPRGERGISGAIGPPGPRGDIGPPGPQGPPGPQGPNGLSIPGEQGRQGMKGDAGEPGLPGRTGTPGLPGPPGPMGPPGDRGFTGKDGAMGPRGPPGPPGSPGSPGVTGPSGKPGKPGDHGRPGPSGLKGEKGDRGDIASQNMMRAVARQVCEQLISGQMNRFNQMLNQIPNDYQSSRNQPGPPGPPGPPGSAGARGEPGPGGRPGFPGTPGMQGPPGERGLPGEKGERGTGSSGPRGLPGPPGPQGESRTGPPGSTGSRGPPGPPGRPGNSGIRGPPGPPGYCDSSQCASIPYNGQGYPEPYVPEGGAYLPEREPFIVPVEPERTAEYEDYGADEPAEEPPEPHRRWRRALPHGPGQ

SEQ ID NO: 3230 - protein, 638 aa, Homo Sapiens
  misc_feature (1)..(1): Xaa can be any naturally occurring amino acid
XKSLLQAVANLPYKGGNTLTGMALNFIRQQNFRTQAGMRPRARKIGVLITDGKSQDDVEAPSKKLKDEGVELFAIGIKNADEVELKMIATDPDDTHAYNVADFESLSRIVDDLTINLCNSVKGPGDLEAPSNLVISERTHRSFRVSWTPPSDSVDRYKVEYYPVSGGKRQEFYVSRMETSTVLKDLKPETEYVVNVYSVVEDEYSEPLKGTEKTLPVPVVSLNIYDVGPTTMHVQWQPVGGATGYILSYKPVKDTEPTRPKEVRLGPTVNDMQLTDLVPNTEYAVTVQAVLHDLTSEPVTVREVTLPLPRPQDLKLRDVTHSTMNVFWEPVPGKVRKYIVRYKTPEEDVKEVEVDRSETSTSLKDLFSQTLYTVSVSAVHDEGESPPVTAQETTRPVPAPTNLKITEVTSEGFRGTWDHGASDVSLYRITWAPFGSSDKMETILNGDENTLVFENLNPNTIYEVSITAIYPDESESDDLIGSERTPPKSGPRNLQVYNATSNSLTVKWDPASGRVQKYRITYQPSTGEGNEQTTTIGGRQNSVVLQKLKPDTPYTITVSSLYPDGEGGRMTGRGKTKPLNTVRNLRVYDPSTSTLNVRWDHAEGNPRQYKLFYAPAAGGPEELVPIPGNTNYAILRNL

SEQ ID NO: 3231 - protein, 843 aa, Homo Sapiens
FDVGSEKTRIGLAQYSGDPRIEWHLNAFSTKDEVIEAVRNLPYKGGNTLTGLALNYIFENSFKPEAGSRTGVSKIGILITDGKSQDDIIPPSRNLRESGVELFAIGVKNADVNELQEIASEPDSTHVYNVAEFDLMHTVVESLTRTLCSRVEEQDREIKASAHAITGPPTELITSEVTARSFMVNWTHAPGNVEKYRVVYYPTRGGKPDEVVVDGTVSSTVLKNLMSLTEYQIAVFAIYAHTASEGLRGTETTLALPMASDLLLYDVTENSMRVKWDAVPGASGYLILYAPLTEGLAGDEKEMKIGETHTDIELSGLLPNTEYTVTVYAMFGEEASDPVTGQETTLALSPPRNLRISNVGSNSARLTWDPTSRQINGYRIVYNNADGTEINEVEVDPITTFPLKGLTPLTEYTIAIFSIYDEGQSEPLTGVFTTEEVPAQQYLEIDEVTTDSFRVTWHPLSADEGLHKLMWIPVYGGKTEEVVLKEEQDSHVIEGLEPGTEYEVSLLAVLDDGSESEVVTAVGTTLDSFWTEPATTIVPTTSVTSVFQTGIRNLVVGDETTSSLRVKWDISDSDVQQFRVTYMTAQGDPEEEVIGTVMVPGSQNNLLLKPLLPDTEYKVTVTPIYTDGEGVSVSAPGKTLPSSGPQNLRVSEEWYNRLRITWDPPSSPVKGYRIVYKPVSVPGPTLETFVGADINTILITNLLSGMDYNVKIFASQASGFSDALTGMVKTLFLGVTNLQAKHVEMTSLCAHWQVHRHATAYRVVIESLQDRQKQESTVGGGTTRHCFYGLQPDSEYKISVYTKLQEIEGPSVSIMEKTQSLPTRPPTFPPTIPPAKEGKRIIE

SEQ ID NO: 3232 - protein, 149 aa, Homo Sapiens
GPPGEPGRPGSPGAPGEQGPPGTPGFPGNAGVPGTPGERGLTGIKGEKGNPGVGTQGPRGPPGPAGPSGESRPGSPGPPGSPGPRGPPGHLGVPGPQGPSGQPGYCDPSSCSAYGVRGWMGIFLLDHPTLPSSPDHLPSLLFPGDGLLT

SEQ ID NO: 3233 - protein, 757 aa, Homo Sapiens [sequence omitted]

SEQ ID NO: 3234 - protein, 1796 aa, Homo Sapiens
MKIFQRKMRYWLLPPFLAIVYFCTIVQGQVAPPTRLRYNVISHDSIQISWKAPRGKFGGYKLLVTPTSGGKTNQLNLQNTATKAIIQGLMPDQNYTVQIIAYNKDKESKPAQGQFRIKDLEKRKDPKPRVKVVDRGNGSRPSSPEEVKFVCQTPAIADIVILVDGSWSIGRFNFRLVRHFLENLVTAFDVGSEKTRIGLAQYSGDPRIEWHLNAFSTKDEVIEAVRNLPYKGGNTLTGLALNYIFENSFKPEAGSRTGVSKIGILITDGKSQDDIIPPSRNLRESGVELFAIGVKNADVNELQEIASEPDSTHVYNVAEFDLMHTVVESLTRTLCSRVEEQDREIKASAHAITGPPTELITSEVTARSFMVNWTHAPGNVEKYRVVYYPTRGGKPDEVVVDGTVSSTVLKNLMSLTEYQIAVFAIYAHTASEGLRGTETTLALPMASDLLLYDVTENSMRVKWDAVPGASGYLILYAPLTEGLAGDEKEMKIGETHTDIELSGLLPNTEYTVTVYAMFGEEASDPVTGQETTLALSPPRNLRISNVGSNSARLTWDPTSRQINGYRIVYNNADGTEINEVEVDPITTFPLKGLTPLTEYTIAIFSIYDEGQSEPLTGVFTTEEVPAQQYLEIDEVTTDSFRVTWHPLSADEGLHKLMWIPVYGGKTEEVVLKEEQDSHVIEGLEPGTEYEVSLLAVLDDGSESEVVTAVGTTLDSFWTEPATTIVPTTSVTSVFQTGIRNLVVGDETTSSLRVKWDISDSDVQQFRVTYMTAQGDPEEEVIGTVMVPGSQNNLLLKPLLPDTEYKVTVTPIYTDGEGVSVSAPGKTLPSSGPQNLRVSEEWYNRLRITWDPPSSPVKGYRIVYKPVSVPGPTLETFVGADINTILITNLLSGMDYNVKIFASQASGFSDALTGMVKTLFLGVTNLQAKHVEMTSLCAHWQVHRHATAYRVVIESLQDRQKQESTVGGGTTRHCFYGLQPDSEYKISVYTKLQEIEGPSVSIMEKTQSLPTRPPTFPPTIPPAKEVCKAAKADLVFMVDGSWSIGDENFNKIISFLYSTVGALNKIGTDGTQVAMVQFTDDPRTEFKLNAYKTKETLLDAIKHISYKGGNTKTGKAIKYVRDTLFTAESGTRRGIPKVIVVITDGRSQDDVNKISREMQLDGYSIFAIGVADADYSELVSIGSKPSARHVFFVDDFDAFKKIEDELITFVCETASATCPVVHKDGIDLAGFKMMEMFGLVEKDFSSVEGVSMEPGTFNVFPCYQLHKDALVSQPTRYLHPEGLPSDYTISFLFRILPDTPQEPFALWEILNKNSDPLVGVILDNGGKTLTYFNYDQSGDFQTVTFEGPEIRKIFYGSFHKLHIVVSETLVKVVIDCKQVGEKAMNASANITSDGVEVLGKMVRSRGPGGNSAPFQLQMFDIVCSTSWANTDKCCELPGLRDDESCPDLPHSCSCSETNEVALGPAGPPGGPGLRGPKGQQGEPGPKGPDGPRGEIGLPGPQGPPGPQGPSGLSIQGMPGMPGEKGEKGDTGLPGPQGIPGGVGSPGRDGSPGQRGLPGKDGSSGPPGPPGPIGIPGTPGVPGITGSMGPQGALGPPGVPGAKGERGERGDLQSQAMVRSVARQVCEQLIQSHMARYTAILNQIPSHSSSIRTVQGPPGEPGRPGSPGAPGEQGPPGTPGFPGNAGVPGTPGERGLTGIKGEKGNPGVGTQGPRGPPGPAGPSGESRPGSPGPPGSPGPRGPPGHLGVPGPQGPSGQPGYCDPSSCSAYGVRAPHPDQPEFTPVQDELEAMELWGPGV

SEQ ID NO: 3235 - protein, 1780 aa, Homo Sapiens
MKIFQRKMRYWLLPPFLAIVYFCTIVQGQVAPPTRLRYNVISHDSIQISWKAPRGKFGGYKLLVTPTSGGKTNQLNLQNTATKAIIQGLMPDQNYTVQIIAYNKDKESKPAQGQFRIKDLEKRKDPKPRVKVVDRGNGSRPSSPEEVKFVCQTPAIADIVILVDGSWSIGRFNFRLVRHFLENLVTAFDVGSEKTRIGLAQYSGDPRIEWHLNAFSTKDEVIEAVRNLPYKGGNTLTGLALNYIFENSFKPEAGSRTGVSKIGILITDGKSQDDIIPPSRNLRESGVELFAIGVKNADVNELQEIASEPDSTHVYNVAEFDLMHTVVESLTRTLCSRVEEQDREIKASAHAITGPPTELITSEVTARSFMVNWTHAPGNVEKYRVVYYPTRGGKPDEVVVDGTVSSTVLKNLMSLTEYQIAVFAIYAHTASEGLRGTETTLALPMASDLLLYDVTENSMRVKWDAVPGASGYLILYAPLTEGLAGDEKEMKIGETHTDIELSGLLPNTEYTVTVYAMFGEEASDPVTGQETTLALSPPRNLRISNVGSNSARLTWDPTSRQINGYRIVYNNADGTEINEVEVDPITTFPLKGLTPLTEYTIAIFSIYDEGQSEPLTGVFTTEEVPAQQYLEIDEVTTDSFRVTWHPLSADEGLHKLMWIPVYGGKTEEVVLKEEQDSHVIEGLEPGTEYEVSLLAVLDDGSESEVVTAVGTTLDSFWTEPATTIVPTTSVTSVFQTGIRNLVVGDETTSSLRVKWDISDSDVQQFRVTYMTAQGDPEEEVIGTVMVPGSQNNLLLKPLLPDTEYKVTVTPIYTDGEGVSVSAPGKTLPSSGPQNLRVSEEWYNRLRITWDPPSSPVKGYRIVYKPVSVPGPTLETFVGADINTILITNLLSGMDYNVKIFASQASGFSDALTGMVKTLFLGVTNLQAKHVEMTSLCAHWQVHRHATAYRVVIESLQDRQKQESTVGGGTTRHCFYGLQPDSEYKISVYTKLQEIEGPSVSIMEKTQSLPTRPPTFPPTIPPAKEVCKAAKADLVFMVDGSWSIGDENFNKIISFLYSTVGALNKIGTDGTQVAMVQFTDDPRTEFKLNAYKTKETLLDAIKHISYKGGNTKTGKAIKYVRDTLFTAESGTRRGIPKVIVVITDGRSQDDVNKISREMQLDGYSIFAIGVADADYSELVSIGSKPSARHVFFVDDFDAFKKIEDELITFVCETASATCPVVHKDGIDLAGFKMMEMFGLVEKDFSSVEGVSMEPGTFNVFPCYQLHKDALVSQPTRYLHPEGLPSDYTISFLFRILPDTPQEPFALWEILNKNSDPLVGVILDNGGKTLTYFNYDQSGDFQTVTFEGPEIRKIFYGSFHKLHIVVSETLVKVVIDCKQVGEKAMNASANITSDGVEVLGKMVRSRGPGGNSAPFQLQMFDIVCSTSWANTDKCCELPGLRDDESCPDLPHSCSCSETNEVALGPAGPPGGPGLRGPKGQQGEPGPKGPDGPRGEIGLPGPQGPPGPQGPSGLSIQGMPGMPGEKGEKGDTGLPGPQGIPGGVGSPGRDGSPGQRGLPGKDGSSGPPGPPGPIGIPGTPGVPGITGSMGPQGALGPPGVPGAKGERGERGDLQSQAMVRSVARQVCEQLIQSHMARYTAILNQIPSHSSSIRTVQGPPGEPGRPGSPGAPGEQGPPGTPGFPGNAGVPGTPGERGLTGIKGEKGNPGVGTQGPRGPPGPAGPSGESRPGSPGPPGSPGPRGPPGHLGVPGPQGPSGQPGYCDPSSCSAYGVRDLIPYNDYQH

SEQ ID NO: 3236 - protein, 534 aa, Homo Sapiens
MKIFQRKMRYWLLPPFLAIVYFCTIVQGQVAPPTRLRYNVISHDSIQISWKAPRGKFGGYKLLVTPTSGGKTNQLNLQNTATKAIIQGLMPDQNYTVQIIAYNKDKESKPAQGQFRIKDLEKRKDPKPRVKVVDRGNGSRPSSPEEVKFVCQTPAIADIVILVDGSWSIGRFNFRLVRHFLENLVTAFDVGSEKTRIGLAQYSGDPRIEWHLNAFSTKDEVIEAVRNLPYKGGNTLTGLALNYIFENSFKPEAGSRTGVSKIGILITDGKSQDDIIPPSRNLRESGVELFAIGVKNADVNELQEIASEPDSTHVYNVAEFDLMHTVVESLTRTLCSRVEEQDREIKASAHAITGPPTELITSEVTARSFMVNWTHAPGNVEKYRVVYYPTRGGKPDEVVVDGTVSSTVLKNLMSLTEYQIAVFAIYAHTASEGLRGTETTLALPMASDLLLYDVTENSMRVKWDAVPGASGYLILYAPLTEGLAGDEKEMKIGETHTDIELSGLLPNTEYTVTVYAMFGEEASDPVTGQETTSP

SEQ ID NO: 3237 - protein, 534 aa, Homo Sapiens; identical to SEQ ID NO: 3236

SEQ ID NO: 3238 - protein, 337 aa, Homo Sapiens
  misc_feature (1)..(1): Xaa can be any naturally occurring amino acid
XVCQTPAIADIVILVDGSWSIGRFNFRLVRHFLENLVTAFDVGSEKTRIGVKNADVNELQEIASEPDSTHVYNVAEFDLMHTVVESLTRTLCSRVEEQDREIKASAHAITGPPTELITSEVTARSFMVNWTHAPGNVEKYRVVYYPTRGGKPDEVVVDGTVSSTVLKNLMSLTEYQIAVFAIYAHTASEGLRGTETTLALPMASDLLLYDVTENSMRVKWDAVPGASGYLILYAPLTEGLAGDEKEMKIGETHTDIELSGLLPNTEYTVTVYAMFGEEASDPVTGQETTLALSPPRNLRISNVGSNSARLTWDPTSRQINGYRIVYNNADGTEINEV

SEQ ID NO: 3239 - protein, 1388 aa, Homo Sapiens
MAPRRNNGQCWCLLMLLSVSTPLPAVTQTRGATETASQGHLDLTQLIGVPLPSSVSFVTGYGGFPAYSFGPGANVGRPARTLIPSTFFRDFAISVVVKPSSTRGGVLFAITDAFQKVIYLGLRLSGVEDGHQRIILYYTEPGSHVSQEAAAFSVPVMTHRWNRFAMIVQGEEVTLLVNCEEHSRIPFQRSSQALAFESSAGIFMGNAGATGLERFTGSLQQLTVHPDPRTPEELCDPEESSASGETSGLQEADGVAEILEAVTYTQASPKEAKVEPINTPPTPSSPFEDMELSGEPVPEGTLETTNMSIIQHSSPKQGSGEILNDTLEGVHSVDGDPITDSGSGAGAFLDIAEEKNLAATAAGLAEVPISTAGEAEASSVPTGGPTLSMSTENPEEGVTPGPDNEERLAATAAGEAEALASMPGEVEASGVAPGELDLSMSAQSLGEEATVGPSSEDSLTTAAAATEVSLSTFEDEEASGVPTDGLAPLTATMAPERAVTSGPGDEEDLAAATTEEPLITAGGEESGSPPPDGPPLPLPTVAPERWITPAQREHVGMKGQAGPKGEKGDAGEELPGPPEPSGPVGPTAGAEAEGSGLGWGSDVGSGSGDLVGSEQLLRGPPGPPGPPGLPGIPGKPGTDVFMGPPGSPGEDGPAGEPGPPGPEGQPGVDGATGLPGMKGEKGARGPNGSVGEKGDPGNRGLPGPPGKKGQAGPPGVMGPPGPPGPPGPPGPGCTMGLGFEDTEGSGSTQLLNEPKLSRPTAAIGLKGEKGDRGPKGERGMDGASIVGPPGPRGPPGHIKVLSNSLINITHGFMNFSDIPELVGPPGPDGLPGLPGFPGPRGPKGDTGLPGFPGLKGEQGEKGEPGAILTEDIPLERLMGKKGEPGMHGAPGPMGPKGPPGHKGEFGLPGRPGRPGLNGLKGTKGDPGVIMQGPPGLPGPPGPPGPPGAVINIKGAIFPIPVRPHCKMPVDTAHPGSPELITFHGVKGEKGSWGLPGSKGEKGDQGAQGPPGPPLDLAYLRHFLNNLKGENGDKGFKGEKGEKGDINGSFLMSGPPGLPGNPGPAGQKGETVVGPQGPPGAPGLPGPPGFGRPGDPGPPGPPGPPGPPAILGAAVALPGPPGPPGQPGLPGSRNLVTAFSNMDDMLQKAHLVIEGTFIYLRDSTEFFIRVRDGWKKLQLGELIPIPADSPPPPALSSNPHQLLPPPNPISSANYEKPALHLAALNMPFSGDIRADFQCFKQARAAGLLSTYRAFLSSHLQDLSTIVRKAERYSLPIVNLKGQVLFNNWDSIFSGHGGQFNMHIPIYSFDGRDIMTDPSWPQKVIWHGSSPHGVRLVDNYCEAWRTADTAVTGLASPLSTGKILDQKAYSCANRLIVLCIENSFMTDARK

SEQ ID NO: 3240 - protein, 1374 aa, Homo Sapiens
MLLSVSTPLPAVTQTRGATETASQGHLDLTQLIGVPLPSSVSFVTGYGGFPAYSFGPGANVGRPARTLIPSTFFRDFAISVVVKPSSTRGGVLFAITDAFQKVIYLGLRLSGVEDGHQRIILYYTEPGSHVSQEAAAFSVPVMTHRWNRFAMIVQGEEVTLLVNCEEHSRIPFQRSSQALAFESSAGIFMGNAGATGLERFTGSLQQLTVHPDPRTPEELCDPEESSASGETSGLQEADGVAEILEAVTYTQASPKEAKVEPINTPPTPSSPFEDMELSGEPVPEGTLETTNMSIIQHSSPKQGKGAILNDTLEGVHSVDGDPITDSGSGAGAFLDIAEEKNLAATAAGLAEVPISTAGEAEASSVPTGGPTLSMSTENPEEGVTPGPDNEERLAATAAGEAEALASMPGEVEASGVAPGELDLSMSAQSLGEEATVGPSSEDSLTTAAAATEVSLSTFEDEEASGVPTDGLAPLTATMAPERAVTSGPGDEEDLAAATTEEPLITAGGEESGSPPPDGPPLPLPTVAPERWITPAQREHVGMKGQAGPKGEKGDAGEELPGPPEPSGPVGPTAGAEAEGSGLGWGSDVGSGSGDLVGSEQLLRGPPGPPGPPGLPGIPGKPGTDVFMGPPGSPGEDGPAGEPGPPGPEGQPGVDGATGLPGMKGEKGARGPNGSVGEKGDPGNRGLPGPPGKKGQAGPPGVMGPPGPPGPPGPPGPGCTMGLGFEDTEGSGSTQLLNEPKLSRPTAAIGLKGEKGDRGPKGERGMDGASIVGPPGPRGPPGHIKVLSNSLINITHGFMNFSDIPELVGPPGPDGLPGLPGFPGPRGPKGDTGLPGFPGLKGEQGEKGEPGAILTEDIPLERLMGKKGEPGMHGAPGPMGPKGPPGHKGEFGLPGRPGRPGLNGLKGTKGDPGVIMQGPPGLPGPPGPPGPPGAVINIKGAIFPIPVRPHCKMPVDTAHPGSPELITFHGVKGEKGSWGLPGSKGEKGDQGAQGPPGPPLDLAYLRHFLNNLKGENGDKGFKGEKGEKGDINGSFLMSGPPGLPGNPGPAGQKGETVVGPQGPPGAPGLPGPPGFGRPGDPGPPGPPGPPGPPAILGAAVALPGPPGPPGQPGLPGSRNLVTAFSNMDDMLQKAHLVIEGTFIYLRDSTEFFIRVRDGWKKLQLGELIPIPADSPPPPALSSNPHQLLPPPNPISSANYEKPALHLAALNMPFSGDIRADFQCFKQARAAGLLSTYRAFLSSHLQDLSTIVRKAERYSLPIVNLKGQVLFNNWDSIFSGHGGQFNMHIPIYSFDGRDIMTDPSWPQKVIWHGSSPHGVRLVDNYCEAWRTADTAVTGLASPLSTGKILDQKAYSCANRLIVLCIENSFMTDARK

SEQ ID NO: 3241 - protein, 235 aa, Homo Sapiens
GEPGPPGRGVQGPQGEPGAPGLPGIQGLPGPRGPPGPTGEKGAQGSPGVKGATGPVGPPGASVSGPPGRDGQQGQTGLRGTPGEKGPRGEKGEPGECSCPSQGDLIFSGMPGPPGIPGPPGPPGVPGLQGVPGNNGLPGQPGLTAELGSLPIEQHLLKSICGDCVQGQRAHPGYLVEKGEKGDQGIPGVPGLDNCAQCFLSLERPRAEEARGDNSEGDPGCVGSPGLPGPPGLPG

SEQ ID NO: 3242 - protein, 224 aa, Homo Sapiens
GPPGSEGLPGPPGPAGPRGERGPQGNSGEKGDQGFQGQPGFPGPPGPPGFPGKVGSPGPPGPQAEKGPAGLDGLDGKDGKPGLRGDPGPAGPPGLMGPPGFKGKTGHPGLPGPKGDCGKPGPPGSTGRPGAEGEPGAMGPQGRPGPPGHVGPPGPPGQPGPAGISAVGLKGDRGATGERGLAGLPGQPGPPGHPGPPGEPGTDGAAGKEGPPGKQGFYGPPGPK

SEQ ID NO: 3243 - protein, 308 aa, Homo Sapiens
KVYTRCFCLEEPQNSEVDAQLTGRISQKAERGAKVHQETAADECPPCVHGARDSNGGKGERGLPGPPGSKGEKGARGNDCVRISPDAPLQCAEGPKGEKGESGALGPSGLPGSTGEKGQKGEKGDGGIKGVPGKPGRDGRPGEICVIGPKGQKGDPGFVGPEGLAGEPGPPGLPGPPGIGLPGTPGDPGGPPGPKGDKGSSGIPGKEGPGGKPGKPGVKGEKGDPCEVCPTLPEGFQNFVGLPGKPGPKGEPGDPVPARGDPGIQGIKGEKGEPCLSCSSVVGAQHLVSSTGASGDVGSPGFGLPGLP

SEQ ID NO: 3244 - protein, 1604 aa, Homo Sapiens
MWVSWAPGLWLLGLWATFGHGANTGAQCPPSQQEGLKLEHSSSLPANVTGFNLIHRLSLMKTSAIKKIRNPKGPLILRLGAAPVTQPTRRVFPRGLPEEFALVLTLLLKKHTHQKTWYLFQVTDANGYPQISLEVNSQERSLELRAQGQDGDFVSCIFPVPQLFDLRWHKLMLSVAGRVASVHVDCSSASSQPLGPRRPMRPVGHVFLGLDAEQGKPVSFDLQQVHIYCDPELVLEEGCCEILPAGCPPETSKARRDTQSNELIEINPQSEGKVYTRCFCLEEPQNSEVDAQLTGRISQKAERGAKVHQETAADECPPCVHGARDSNVTLAPSGPKGGKGERGLPGPPGSKGEKGARGNDCVRISPDAPLQCAEGPKGEKGESGALGPSGLPGSTGEKGQKGEKGDGGIKGVPGKPGRDGRPGEICVIGPKGQKGDPGFVGPEGLAGEPGPPGLPGPPGIGLPGTPGDPGGPPGPKGDKGSSGIPGKEGPGGKPGKPGVKGEKGDPCEVCPTLPEGFQNFVGLPGKPGPKGEPGDPVPARGDPGIQGIKGEKGEPCLSCSSVVGAQHLVSSTGASGDVGSPGFGLPGLPGRAGVPGLKGEKGNFGEAGPAGSPGPPGPVGPAGIKGAKGEPCEPCPALSNLQDGDVRVVALPGPSGEKGEPGPPGFGLPGKQGKAGERGLKGQKGDAGNPGDPGTPGTTGRPGLSGEPGVQGPAGPKGEKGDGCTACPSLQGTVTDMAGRPGQPGPKGEQGPEGVGRPGKPGQPGLPGVQGPPGLKGVQGEPGPPGRGVQGPQGEPGAPGLPGIQGLPGPRGPPGPTGEKGAQGSPGVKGATGPVGPPGASVSGPPGRDGQQGQTGLRGTPGEKGPRGEKGEPGECSCPSQGDLIFSGMPGAPGLWMGSSWQPGPQGPPGIPGPPGPPGVPGLQGVPGNNGLPGQPGLTAELGSLPIEQHLLKSICGDCVQGQRAHPGYLVEKGEKGDQGIPGVPGLDNCAQCFLSLERPRAEEARGDNSEGDPGCVGSPGLPGPPGLPGQRGEEGPPGMRGSPGPPGPIGPPGFPGAVGSPGLPGLQGERGLTGLTGDKGEPGPPGQPGYPGATGPPGLPGIKGERGYTGSAGEKGEPGPPGSEGLPGPPGPAGPRGERGPQGNSGEKGDQGFQGQPGFPGPPGPPGFPGKVGSPGPPGPQAEKGSEGIRGPSGLPGSPGPPGPPGIQGPAGLDGLDGKDGKPGLRGDPGPAGPPGLMGPPGFKGKTGHPGLPGPKGDCGKPGPPGSTGRPGAEGEPGAMGPQGRPGPPGHVGPPGPPGQPGPAGISAVGLKGDRGATGERGLAGLPGQPGPPGHPGPPGEPGTDGAAGKEGPPGKQGFYGPPGPKGDPGAAGQKGQAGEKGRAGMPGGPGKSGSMGPVGPPGPAGERGHPGAPGPSGSPGLPGVPGSMGDMVNYDEIKRFIRQEIIKMFDERMAYYTSRMQFPMEMAAAPGRPGPPGKDGAPGRPGAPGSPGLPGQIGREGRQGLPGVRGLPGTKGEKGDIGIGIAGENGLPGPPGPQGPPGYGKMGATGPMGQQGIPGIPGPPGPMGQPGKAGHCNPSDCFGAMPMEQQYPPMKTMKGPFG

SEQ ID NO: 3245 - protein, 966 aa, Homo Sapiens
MWVSWAPGLWLLGLWATFGHGANTGAQCPPSQQEGLKLEHSSSLPANVTGFNLIHRLSLMKTSAIKKIRNPKGPLILRLGAAPVTQPTRRVFPRGLPEEFALVLTLLLKKHTHQKTWYLFQVTDANGYPQISLEVNSQERSLELRAQGQDGDFVSCIFPVPQLFDLRWHKLMLSVAGRVASVHVDCSSASSQPLGPRRPMRPVGHVFLGLDAEQGKPVSFDLQQVHIYCDPELVLEEGCCEILPAGCPPETSKARRDTQSNELIEINPQSEGKVYTRCFCLEEPQNSEVDAQLTGRISQKAERGAKVHQETAADECPPCVHGARDSNVTLAPSGPKGGKGERGLPGPPGSKGEKGARGNDCVRISPDAPLQCAEGPKGEKGESGALGPSGLPGSTGEKGQKGEKGDGGIKGVPGKPGRDGRPGEICVIGPKGQKGDPGFVGPEGLAGEPGPPGLPGPPGIGLPGTPGDPGGPPGPKGDKGSSGIPGKEGPGGKPGKPGVKGEKGDPCEVCPTLPEGFQNFVGLPGKPGPKGEPGDPVPARGDPGIQGIKGEKGEPCLSCSSVVGAQHLVSSTGASGDVGSPGFGLPGLPGRAGVPGLKGEKGNFGEAGPAGSPGPPGPVGPAGIKGAKGEPCEPCPALSNLQDGDVRVVALPGPSGEKGEPGPPGFGLPGKQGKAGERGLKGQKGDAGNPGDPGTPGTTGRPGLSGEPGVQGPAGPKGEKGDGCTACPSLQGTVTDMAGRPGQPGPKGEQGPEGVGRPGKPGQPGLPGVQGPPGLKGVQGEPGPPGRGVQGPQGEPGAPGLPGIQGLPGPRGPPGPTGEKGAQGSPGVKGATGPVGPPGASVSGPPGRDGQQGQTGLRGTPGEKGPRGEKGEPGECSCPSQGDLIFSGMPGPPGIPGPPGPPGVPGLQVKGEKRMRSLGGRAHGSGWLLPAGPQGCCSPTPKTQTCHFSLLCLPASQGGKEGPLSL

SEQ ID NO: 3246 - protein, 687 aa, Homo Sapiens
GEVGADGVPGFPGLPGREGIAGPQGPKGDRGSRGEKGDPGKDGVGQPGLPGPPGPPGPVVYVSEQDGSVLSVPGPEGRPGFAGFPGPAGPKGNLGSKGERGSPGPKGEKGEPGSIFSPDGGALGPAQKGAKGEPGFRGPPGPYGRPGYKGEIGFPGRPGRPGMNGLKGEKGEPGDASLGFGMRGMPGPPGPPGPPGPPGTPVYDSNVFAESSRPGPPGLPGNQGPPGPKGAKGEVGPPGPPGQFPFDFLQLEAEMKGEKGDRGDAGQKGERGEPGGGGFFGSSLPGPPGPPGPPGPRGYPGIPGPKGESIRGQPGPPGPQGPPGIGYEGRQGPPGPPGPPGPPSFPGPHRQTISVPGPPGPPGPPGPPGTMGASSGQVRLWATRQAMLGQVHEVPEGWLIFVAEQEELYVRVQNGFRKVQLEARTPLPRGTDNEVAALQPPVVQLHDSNPYPRREHPHPTARPWRADDILASPPRLPEPQPYPGAPHHSSYVHLRPARPTSPPAHSHRDFQPVLHLVALNSPLSGGMRGIRGADFQCFQQARAVGLAGTFRAFLSSRLQDLYSIVRRADRAAVPIVNLKDELLFPSWEALFSGSEGPLKPGARIFSFDGKDVLRHPTWPQKSVWHGSDPNGRRLTESYCETWRTEAPSATGQASSLLGGRLLGQSAASCHHAYIVLCIENSFMTASK

SEQ ID NO: 3247 - protein, 1339 aa, Homo Sapiens
MAPRCPWPWPRRRRLLDVLAPLVLLLGVRAASAEPERISEEVGLLQLLGDPPPQQVTQTDDPDVGLAYVFGPDANSGQVARYHFPSLFFRDFSLLFHIRPATEGPGVLFAITDSAQAMVLLGVKLSGVQDGHQDISLLYTEPGAGQTHTAASFRLPAFVGQWTHLALSVAGGFVALYVDCEEFQRMPLARSSRGLELEPGAGLFVAQAGGADPDKFQGVIAELKVRRDPQVSPMHCLDEEGDDSDGASGDSGSGLGDARELLREETGAALKPRLPAPPPVTTPPLAGGSSTEDSRSEEVEEQTTVASLGAQTLPGSDSVSTWDGSVRTPGGRVKEGGLKGQKGEPGVPGPPGRAGPPGSPCLPGPPGLPCPVSPLGPAGPALQTVPGPQGPPGPPGRDGTPGRDGEPGDPGEDGKPGDTGPQGFPGTPGDVGPKGDKGDPGVGERGPPGPQGPPGPPGPSFRHDKLTFIDMEGSGFGGDLEALRGPRGFPGPPGPPGVPGLPGEPGRFGVNSSDVPGPAGLPGVPGREGPPGFPGLPGPPGPPGREGPPGRTGQKGSLGEAGAPGHKGSKGAPGPAGARGESGLAGAPGPAGPPGPPGPPGPPGPGLPAGFDDMEGSGGPFWSTARSADGPQGPPGLPGLKGDPGVPGLPGAKGEVGADGVPGFPGLPGREGIAGPQGPKGDRGSRGEKGDPGKDGVGQPGLPGPPGPPGPVVYVSEQDGSVLSVPGPEGRPGFAGFPGPAGPKGNLGSKGERGSPGPKGEKGEPGSIFSPDGGALGPAQKGAKGEPGFRGPPGPYGRPGYKGEIGFPGRPGRPGMNGLKGEKGEPGDASLGFGMRGMPGPPGPPGPPGPPGTPVYDSNVFAESSRPGPPGLPGNQGPPGPKGAKGEVGPPGPPGQFPFDFLQLEAEMKGEKGDRGDAGQKGERGEPGGGGFFGSSLPGPPGPPGPPGPRGYPGIPGPKGESIRGQPGPPGPQGPPGIGYEGRQGPPGPPGPPGPPSFPGPHRQTISVPGPPGPPGPPGPPGTMGASSGVRLWATRQAMLGQVHEVPEGWLIFVAEQEELYVRVQNGFRKVQLEARTPLPRGTDNEVAALQPPVVQLHDSNPYPRREHPHPTARPWRADDILASPPRLPEPQPYPGAPHHSSYVHLRPARPTSPPAHSHRDFQPVLHLVALNSPLSGGMRGIRGADFQCFQQARAVGLAGTFRAFLSSRLQDLYSIVRRADRAAVPIVNLKDELLFPSWEALFSGSEGPLKPGARIFSFDGKDVLRHPTWPQKSVWHGSDPNGRRLTESYCETWRTEAPSATGQASSLLGGRLLGQSAASCHHAYIVLCIENSFMTASK

SEQ ID NO: 3248 - protein, 1519 aa, Homo Sapiens
MAPYPCGCHILLLLFCCLAAARANLLNLNWLWFNNEDTSHAATTIPEPQGPLPVQPTADTTTHVTPRNGSTEPATAPGSPEPPSELLEDGQDTPTSAESPDAPEENIAGVGAEILNVAKGIRSFVQLWNDTVPTESLARAETLVLETPVGPLALAGPSSTPQENGTTLWPSRGIPSSPGAHTTEAGTLPAPTPSPPSLGRPWAPLTGPSVPPPSSERISEEVGLLQLLGDPPPQQVTQTDDPDVGLAYVFGPDANSGQVARYHFPSLFFRDFSLLFHIRPATEGPGVLFAITDSAQAMVLLGVKLSGVQDGHQDISLLYTEPGAGQTHTAASFRLPAFVGQWTHLALSVAGGFVALYVDCEEFQRMPLARSSRGLELEPGAGLFVAQAGGADPDKFQGVIAELKVRRDPQVSPMHCLDEEGDDSDGASGDSGSGLGDARELLREETGAALKPRLPAPPPVTTPPLAGGSSTEDSRSEEVEEQTTVASLGAQTLPGSDSVSTWDGSVRTPGGRVKEGGLKGQKGEPGVPGPPGRAGPPGSPCLPGPPGLPCPVSPLGPAGPALQTVPGPQGPPGPPGRDGTPGRDGEPGDPGEDGKPGDTGPQGFPGTPGDVGPKGDKGDPGVGERGPPGPQGPPGPPGPSFRHDKLTFIDMEGSGFGGDLEALRGPRGFPGPPGPPGVPGLPGEPGRFGVNSSDVPGPAGLPGVPGREGPPGFPGLPGPPGPPGREGPPGRTGQKGSLGEAGAPGHKGSKGAPGPAGARGESGLAGAPGPAGPPGPPGPPGPPGPGLPAGFDDMEGSGGPFWSTARSADGPQGPPGLPGLKGDPGVPGLPGAKGEVGADGVPGFPGLPGREGIAGPQGPKGDRGSRGEKGDPGKDGVGQPGLPGPPGPPGPVVYVSEQDGSVLSVPGPEGRPGFAGFPGPAGPKGNLGSKGERGSPGPKGEKGEPGSIFSPDGGALGPAQKGAKGEPGFRGPPGPYGRPGYKGEIGFPGRPGRPGMNGLKGEKGEPGDASLGFGMRGMPGPPGPPGPPGPPGTPVYDSNVFAESSRPGPPGLPGNQGPPGPKGAKGEVGPPGPPGQFPFDFLQLEAEMKGEKGDRGDAGQKGERGEPGGGGFFGSSLPGPPGPPGPPGPRGYPGIPGPKGESIRGQPGPPGPQGPPGIGYEGRQGPPGPPGPPGPPSFPGPHRQTISVPGPPGPPGPPGPPGTMGASSGVRLWATRQAMLGQVHEVPEGWLIFVAEQEELYVRVQNGFRKVQLEARTPLPRGTDNEVAALQPPVVQLHDSNPYPRREHPHPTARPWRADDILASPPRLPEPQPYPGAPHHSSYVHLRPARPTSPPAHSHRDFQPVLHLVALNSPLSGGMRGIRGADFQCFQQARAVGLAGTFRAFLSSRLQDLYSIVRRADRAAVPIVNLKDELLFPSWEALFSGSEGPLKPGARIFSFDGKDVLRHPTWPQKSVWHGSDPNGRRLTESYCETWRTEAPSATGQASSLLGGRLLGQSAASCHHAYIVLCIENSFMTASK

SEQ ID NO: 3249 - protein, 1754 aa, Homo Sapiens
MAPYPCGCHILLLLFCCLAAARANLLNLNWLWFNNEDTSHAATTIPEPQGPLPVQPTADTTTHVTPRNGSTEPATAPGSPEPPSELLEDGQDTPTSAESPDAPEENIAGVGAEILNVAKGIRSFVQLWNDTVPTESLARAETLVLETPVGPLALAGPSSTPQENGTTLWPSRGIPSSPGAHTTEAGTLPAPTPSPPSLGRPWAPLTGPSVPPPSSGRASLSSLLGGAPPWGSLQDPDSQGLSPAAAAPSQQLQRPDVRLRTPLLHPLVMGSLGKHAAPSAFSSGLPGALSQVAVTTLTRDSGAWVSHVANSVGPGLANNSALLGADPEAPAGRCLPLPPSLPVCGHLGISRFWLPNHLHHESGEQVRAGARAWGGLLQTHCHPFLAWFFCLLLVPPCGSVPPPAPPPCCQFCEALQDACWSRLGGGRLPVACASLPTQEDGYCVLIGPAAERISEEVGLLQLLGDPPPQQVTQTDDPDVGLAYVFGPDANSGQVARYHFPSLFFRDFSLLFHIRPATEGPGVLFAITDSAQAMVLLGVKLSGVQDGHQDISLLYTEPGAGQTHTAASFRLPAFVGQWTHLALSVAGGFVALYVDCEEFQRMPLARSSRGLELEPGAGLFVAQAGGADPDKFQGVIAELKVRRDPQVSPMHCLDEEGDDSDGASGDSGSGLGDARELLREETGAALKPRLPAPPPVTTPPLAGGSSTEDSRSEEVEEQTTVASLGAQTLPGSDSVSTWDGSVRTPGGRVKEGGLKGQKGEPGVPGPPGRAGPPGSPCLPGPPGLPCPVSPLGPAGPALQTVPGPQGPPGPPGRDGTPGRDGEPGDPGEDGKPGDTGPQGFPGTPGDVGPKGDKGDPGVGERGPPGPQGPPGPPGPSFRHDKLTFIDMEGSGFGGDLEALRGPRGFPGPPGPPGVPGLPGEPGRFGVNSSDVPGPAGLPGVPGREGPPGFPGLPGPPGPPGREGPPGRTGQKGSLGEAGAPGHKGSKGAPGPAGARGESGLAGAPGPAGPPGPPGPPGPPGPGLPAGFDDMEGSGGPFWSTARSADGPQGPPGLPGLKGDPGVPGLPGAKGEVGADGVPGFPGLPGREGIAGPQGPKGDRGSRGEKGDPGKDGVGQPGLPGPPGPPGPVVYVSEQDGSVLSVPGPEGRPGFAGFPGPAGPKGNLGSKGERGSPGPKGEKGEPGSIFSPDGGALGPAQKGAKGEPGFRGPPGPYGRPGYKGEIGFPGRPGRPGMNGLKGEKGEPGDASLGFGMRGMPGPPGPPGPPGPPGTPVYDSNVFAESSRPGPPGLPGNQGPPGPKGAKGEVGPPGPPGQFPFDFLQLEAEMKGEKGDRGDAGQKGERGEPGGGGFFGSSLPGPPGPPGPPGPRGYPGIPGPKGESIRGQPGPPGPQGPPGIGYEGRQGPPGPPGPPGPPSFPGPHRQTISVPGPPGPPGPPGPPGTMGASSGVRLWATRQAMLGQVHEVPEGWLIFVAEQEELYVRVQNGFRKVQLEARTPLPRGTDNEVAALQPPVVQLHDSNPYPRREHPHPTARPWRADDILASPPRLPEPQPYPGAPHHSSYVHLRPARPTSPPAHSHRDFQPVLHLVALNSPLSGGMRGIRGADFQCFQQARAVGLAGTFRAFLSSRLQDLYSIVRRADRAAVPIVNLKDELLFPSWEALFSGSEGPLKPGARIFSFDGKDVLRHPTWPQKSVWHGSDPNGRRLTESYCETWRTEAPSATGQASSLLGGRLLGQSAASCHHAYIVLCIENSFMTASK

SEQ ID NO: 3250 - protein, 280 aa, Homo Sapiens
  misc_feature (1)..(1): Xaa can be any naturally occurring amino acid
XISVPGPPGPPGPPGPPGTMGASSGVRLWATRQAMLGQVHEVPEGWLIFVAEQEELYVRVQNGFRKVQDNEVAALQPPVVQLHDSNPYPRREHPHPTARPWRADDILASPPRLPEPQPYPGAPHHSSYVHLRPARPTSPPAHSHRDFQPVLHLVALNSPLSGGMRGIRGADFQCFQQARAVGLAGTFRAFLSSRLQDLYSIVRRADRAAVPIVNLKDELLFPSWEALFSGSEGPLKPGARIFSFDGKDVLRHPTWPQKSVWHGSDPNGRRLTESYCETWR

SEQ ID NO: 3251 - protein, 36 aa, Homo Sapiens
GPPGIQGIHQTLGGYYNKDNKGNDEHEAGGLKGDKV

SEQ ID NO: 3252 - protein, 1142 aa, Homo Sapiens
MRLTGPWKLWLWMSIFLLPASTSVTVRDKTEESCPILRIEGHQLTYDNINKLEVSGFDLGDSFSLRRAFCESDKTCFKLGSALLIRDTIKIFPKGLPEEYSVAAMFRVRRNAKKERWFLWQVLNQQNIPQISIVVDGGKKVVEFMFQATEGDVLNYIFRNRELRPLFDRQWHKLGISIQSQVISLYMDCNLIARRQTDEKDTVDFHGRTVIATRASDGKPVDIELHQLKIYCSANLIAQETCCEISDTKCPEQDGFGNIASSWVTAHASKMSSYLPAKQELKDQCQCIPNKGEAGLPGAPGSPGQKGHKGEPGENGLHGAPGFPGQKGEQGFEGSKGETGEKGEQGEKGDPALAGLNGENGLKGDLGPHGPPGPKGEKGDTGPPGPPALPGSLGIQGPQGPPGKEGQRGRRGKTGPPGKPGPPGPPGPPGIQGIHQTLGGYYNKDNKGNDEHEAGGLKGDKGETGLPGFPGSVGPKGQKGEPGEPFTKGEKGDRGEPGVIGSQGVKGEPGDPGPPGLIGSPGLKGQQGSAGSMGPRGPPGDVGLPGEHGIPGKQGIKGEKGDPGGIIGPPGLPGPKGEAGPPGKSLPGEPGLDGNPGAPGPRGPKGERGLPGVHGSPGDIGPQGIGIPGRTGAQGPAGEPGIQGPRGLPGLPGTPGTPGNDGVPGRDGKPGLPGPPGDPIALPLLGDIGALLKNFCGNCQASVPGLKSNKGEEGGAGEPGKYDSMARKGDIGPRGPPGIPGREGPKGSKGERGYPGIPGEKGDEGLQGIPGIPGAPGPTGPPGLMGRTGHPGPTGAKGEKGSDGPPGKPGPPGPPGIPFNERNGMSSLYKIKGGVNVPSYPGPPGPPGPKGDPGPVGEPGAMGLPGLEGFPGVKGDRGPAGPPGIAGMSGKPGAPGPPGVPGEPGERGPVGDIGFPGPEGPSGKPGINGKDGIPGAQGIMGKPGDRGPKGERGDQGIPGDRGSQGERGKPGLTGMKGAIGPMGPPGNKGSMGSPGHQGPPGSPGIPGIPADAVSFEEIKKYINQEVLRIFEERMAVFLSQLKLPAAMLAAQAYGRPGPPGKDGLPGPPGDPGPQGYRGQKGERGEPGIGLPGSPGLPGTSALGLPGSPGAPGPQGPPGPSGRCNPEDCLYPVSHAHQRTGGN

SEQ ID NO: 3253 - protein, 60 aa, Homo Sapiens
MRLTGPWKLWLWMSIFLLPASTSVTVRDKTGIQANSLPNHQMLFIAFKSLKQILLRLKRP

SEQ ID NO: 3254 - protein, 1464 aa, Homo Sapiens
MFSFVDLRLLLLLAATALLTHGQEEGQVEGQDEDIPPITCVQNGLRYHDRDVWKPEPCRICVCDNGKVLCDDVICDETKNCPGAEVPEGECCPVCPDGSESPTDQETTGVEGPKGDTGPRGPRGPAGPPGRDGIPGQPGLPGPPGPPGPPGPPGLGGNFAPQLSYGYDEKSTGGISVPGPMGPSGPRGLPGPPGAPGPQGFQGPPGEPGEPGASGPMGPRGPPGPPGKNGDDGEAGKPGRPGERGPPGPQGARGLPGTAGLPGMKGHRGFSGLDGAKGDAGPAGPKGEPGSPGENGAPGQMGPRGLPGERGRPGAPGPAGARGNDGATGAAGPPGPTGPAGPPGFPGAVGAKGEAGPQGPRGSEGPQGVRGEPGPPGPAGAAGPAGNPGADGQPGAKGANGAPGIAGAPGFPGARGPSGPQGPGGPPGPKGNSGEPGAPGSKGDTGAKGEPGPVGVQGPPGPAGEEGKRGARGEPGPTGLPGPPGERGGPGSRGFPGADGVAGPKGPAGERGSPGPAGPKGSPGEAGRPGEAGLPGAKGLTGSPGSPGPDGKTGPPGPAGQDGRPGPPGPPGARGQAGVMGFPGPKGAAGEPGKAGERGVPGPPGAVGPAGKDGEAGAQGPPGPAGPAGERGEQGPAGSPGFQGLPGPAGPPGEAGKPGEQGVPGDLGAPGPSGARGERGFPGERGVQGPPGPAGPRGANGAPGNDGAKGDAGAPGAPGSQGAPGLQGMPGERGAAGLPGPKGDRGDAGPKGADGSPGKDGVRGLTGPIGPPGPAGAPGDKGESGPSGPAGPTGARGAPGDRGEPGPPGPAGFAGPPGADGQPGAKGEPGDAGAKGDAGPPGPAGPAGPPGPIGNVGAPGAKGARGSAGPPGATGFPGAAGRVGPPGPSGNAGPPGPPGPAGKEGGKGPRGETGPAGRPGEVGPPGPPGPAGEKGSPGADGPAGAPGTPGPQGIAGQRGVVGLPGQRGERGFPGLPGPSGEPGKQGPSGASGERGPPGPMGPPGLAGPPGESGREGAPGAEGSPGRDGSPGAKGDRGETGPAGPPGAPGAPGAPGPVGPAGKSGDRGETGPAGPAGPVGPVGARGPAGPQGPRGDKGETGEQGDRGIKGHRGFSGLQGPPGPPGSPGEQGPSGASGPAGPRGPPGSAGAPGKDGLNGLPGPIGPPGPRGRTGDAGPVGPPGPPGPPGPPGPPSAGFDFSFLPQPPQEKAHDGGRYYRADDANVVRDRDLEVDTTLKSLSQQIENIRSPEGSRKNPARTCRDLKMCHSDWKSGEYWIDPNQGCNLDAIKVFCNMETGETCVYPTQPSVAQKNWYISKNPKDKRHVWFGESMTDGFQFEYGGQGSDPADVAIQLTFLRLMSTEASQNITYHCKNSVAYMDQQTGNLKKALLLQGSNEIEIRAEGNSRFTYSVTVDGCTSHTGAWGKTVIEYKTTKTSRLPIIDVAPLDVGAPDQEFGFDVGPVCFL

SEQ ID NO: 3255 - protein, 154 aa, Homo Sapiens
MRSRRAFKDLRKEERGEGREVKNPSVPLRPGGKVVKLGVAVTTDNAPLPPVPVPPITCVQNGLRYHDRDVWKPEPCRICVCDNGKVLCDDVICDETKNCPGAEVPEGECCPVCPDGSESPTDQETTGVEGPKGDTGPRGPRGPAGPPGRDGIPG

SEQ ID NO: 3256 - protein, 1364 aa, Homo Sapiens
MLSFVDTRTLLLLAVTLCLATCQFFETVRKGPAGDRGPRGERGPPGPPGRDGEDGPTGPPGPPGPPGPPGLGGNFAAQYDGKGVGLGPGPMGLMGPRGPPGAAGAPGPQGFQGPAGEPGEPGQTGPAGARGPAGPPGKAGEDGHPGKPGRPGERGVVGPQGARGFPGTPGLPGFKGIRGHNGLDGLKGQPGAPGVKGEPGAPGENGTPGQTGARGLPGERGRVGAPGPAGARGSDGSVGPVGPAGPIGSAGPPGFPGAPGPKGEIGAVGNAGPAGPAGPRGEVGLPGLSGPVGPPGNPGANGLTGAKGAAGLPGVAGAPGLPGPRGIPGPVGAAGATGARGLVGEPGPAGSKGESGNKGEPGSAGPQGPPGPSGEEGKRGPNGEAGSAGPPGPPGLRGSPGSRGLPGADGRAGVMGPPGSRGASGPAGVRGPNGDAGRPGEPGLMGPRGLPGSPGNIGPAGKEGPVGLPGIDGRPGPIGPAGARGEPGNIGFPGPKGPTGDPGKNGDKGHAGLAGARGAPGPDGNNGAQGPPGPQGVQGGKGEQGPPGPPGFQGLPGPSGPAGEVGKPGERGLHGEFGLPGPAGPRGERGPPGESGAAGPTGPIGSRGPSGPPGPDGNKGEPGVVGAVGTAGPSGPSGLPGERGAAGIPGGKGEKGEPGLRGEIGNPGRDGARGAPGAVGAPGPAGATGDRGEAGAAGPAGPAGPRGSPGERGEVGPAGPNGFAGPAGAAGQPGAKGERGAKGPKGENGVVGPTGPVGAAGPAGPNGPPGPAGSRGDGGPPGMTGFPGAAGRTGPPGPSGISGPPGPPGPAGKEGLRGPRGDQGPVGRTGEVGAVGPPGFAGEKGPSGEAGTAGPPGTPGPQGLLGAPGILGLPGSRGERGLPGVAGAVGEPGPLGIAGPPGARGPPGAVGSPGVNGAPGEAGRDGNPGNDGPPGRDGQPGHKGERGYPGNIGPVGAAGAPGPHGPVGPAGKHGNRGETGPSGPVGPAGAVGPRGPSGPQGIRGDKGEPGEKGPRGLPGLKGHNGLQGLPGIAGHHGDQGAPGSVGPAGPRGPAGPSGPAGKDGRTGHPGTVGPAGIRGPQGHQGPAGPPGPPGPPGPPGVSGGGYDFGYDGDFYRADQPRSAPSLRPKDYEVDATLKSLNNQIETLLTPEGSRKNPARTCRDLRLSHPEWSSGYYWIDPNQGCTMDAIKVYCDFSTGETCIRAQPENIPAKNWYRSSKDKKHVWLGETINAGSQFEYNVEGVTSKEMATQLAFMRLLANYASQNITYHCKNSIAYMDEETGNLKKAVILQGSNDVELVAEGNSRFTYTVLVDGCSKKTNEWGKTIIEYKTNKPSRLPFLDIAPLDIGGADQEFFVDIGPVCFK

SEQ ID NO: 3257 - protein, 1366 aa, Homo Sapiens
MLSFVDTRTLLLLAVTLCLATCQSLQEETVRKGPAGDRGPRGERGPPGPPGRDGEDGPTGPPGPPGPPGPPGLGGNFAAQYDGKGVGLGPGPMGLMGPRGPPGAAGAPGPQGFQGPAGEPGEPGQTGPAGARGPAGPPGKAGEDGHPGKPGRPGERGVVGPQGARGFPGTPGLPGFKGIRGHNGLDGLKGQPGAPGVKGEPGAPGENGTPGQTGARGLPGERGRVGAPGPAGARGSDGSVGPVGPAGPIGSAGPPGFPGAPGPKGEIGAVGNAGPAGPAGPRGEVGLPGLSGPVGPPGNPGANGLTGAKGAAGLPGVAGAPGLPGPRGIPGPVGAAGATGARGLVGEPGPAGSKGESGNKGEPGSAGPQGPPGPSGEEGKRGPNGEAGSAGPPGPPGLRGSPGSRGLPGADGRAGVMGPPGSRGASGPAGVRGPNGDAGRPGEPGLMGPRGLPGSPGNIGPAGKEGPVGLPGIDGRPGPIGPAGARGEPGNIGFPGPKGPTGDPGKNGDKGHAGLAGARGAPGPDGNNGAQGPPGPQGVQGGKGEQGPPGPPGFQGLPGPSGPAGEVGKPGERGLHGEFGLPGPAGPRGERGPPGESGAAGPTGPIGSRGPSGPPGPDGNKGEPGVVGAVGTAGPSGPSGLPGERGAAGIPGGKGEKGEPGLRGEIGNPGRDGARGAPGAVGAPGPAGATGDRGEAGAAGPAGPAGPRGSPGERGEVGPAGPNGFAGPAGAAGQPGAKGERGAKGPKGENGVVGPTGPVGAAGPAGPNGPPGPAGSRGDGGPPGMTGFPGAAGRTGPPGPSGISGPPGPPGPAGKEGLRGPRGDQGPVGRTGEVGAVGPPGFAGEKGPSGEAGTAGPPGTPGPQGLLGAPGILGLPGSRGERGLPGVAGAVGEPGPLGIAGPPGARGPPGAVGSPGVNGAPGEAGRDGNPGNDGPPGRDGQPGHKGERGYPGNIGPVGAAGAPGPHGPVGPAGKHGNRGETGPSGPVGPAGAVGPRGPSGPQGIRGDKGEPGEKGPRGLPGLKGHNGLQGLPGIAGHHGDQGAPGSVGPAGPRGPAGPSGPAGKDGRTGHPGTVGPAGIRGPQGHQGPAGPPGPPGPPGPPGVSGGGYDFGYDGDFYRADQPRSAPSLRPKDYEVDATLKSLNNQIETLLTPEGSRKNPARTCRDLRLSHPEWSSGYYWIDPNQGCTMDAIKVYCDFSTGETCIRAQPENIPAKNWYRSSKDKKHVWLGETINAGSQFEYNVEGVTSKEMATQLAFMRLLANYASQNITYHCKNSIAYMDEETGNLKKAVILQGSNDVELVAEGNSRFTYTVLVDGCSKKTNEWGKTIIEYKTNKPSRLPFLDIAPLDIGGADQEFFVDIGPVCFK

SEQ ID NO: 3258 - protein, 401 aa, Homo Sapiens
EHTIVFLVRLLPETPREAFALWQMTAEDFQPLLGVLLDAGKKSLTYFHRDPRAALQEATFDPQEVRKIFFGSFHKVHVAVGRSKVRLYVDCRKVAERPLGEMGSPPAAGFVTLGRLAKARGPRSSSAAFQLQMLQIVCSDTWADEDRCCELPASRDGETCPAFVSACSCSSETPGPPGPQGPPGLPGRNGTPGEQGFPGPRGEPGPPGQMGPEGPGGQQGSPGTQGRAVQGPVGPPGVKGEKGDHGLPGLQGHPGHQGIPGRVGLQGPKGMRGLEGTAGLPGPPGPRGFQGMAGARGTSGERGPPGTVGPTGLPGPKGERGEKGEPQSLATLYQLVSQACESAIQTHVSKFDSFHENTRPPMPILEQKLEPGTEPLGSPGTRSKALVPGEWGRGGRHLEGR

SEQ ID NO: 3259 - protein, 250 aa, Homo Sapiens
ERPLGEMGSPPAAGFVTLGRLAKARGPRSSSAAFQLQMLQIVCSDTWADEDRCCELPASRDGETCPAFVSACSCSSETPGPPGPQGPPGPPGVKGEKGDHGLPGLQGHPGHQGIPGRVGLQGPKGMRGLEGTAGLPGPPGPRGFQGMAGARGTSGERGPPGTVGPTGLPGPKGERGEKGEPQSLATLYQLVSQACESAIQTHVSKFDSFHENTRPPMPILEQKLEPGTEPLGSPGTRSKALVPGEWGRGG

SEQ ID NO: 3260 - protein, 1284 aa, Homo Sapiens
MSSGDPAHLGLCLWLWLGATLGREQVQASGLLRLAVLPEDRLQMKWRESEGSGLGYLVQVKPMAGDSEQEVILTTKTPKATVGGLSPSKGYTLQIFELTGSGRFLLARREFVIEDLKSSSLDRSSQRPLGSGAPEPTPSHTGSPDPEQASEPQVAFTPSQDPRTPAGPQFRCLPPVPADMVFLVDGSWSIGHSHFQQVKDFLASVIAPFEIGPDKVQVGLTQYSGDAQTEWDLNSLSTKEQVLAAVRRLRYKGGNTFTGLALTHVLGQNLQPAAGLRPEAAKVVILVTDGKSQDDVHTAARVLKDLGVNVFAVGVKNADEAELRLLASPPRDITVHSVLDFLQLGALAGLLSRLICQRLQGGSPRQGPAAAPALDTLPAPTSLVLSQVTSSSIRLSWTPAPRHPLKYLIVWRASRGGTPREVVVEGPAASTELHNLASRTEYLVSVFPIYEGGVGEGLRGLVTTAPLPPPRALTLAAVTPRTVHLTWQPSAGATHYLVRCSPASPKGEEEEREVQVGRPEVLLDGLEPGRDYEVSVQSLRGPEGSEARGIRARTPTLAPPRHLGFSDVSHDAARVFWEGAPRPVRLVRVTYVSSEGGHSGQTEAPGNATSATLGPLSSSTTYTVRVTCLYPGGGSSTLTGRVTTKKAPSPSQLSMTELPGDAVQLAWVAAAPSGVLVYQITWTPLGEGKAHEISVPGNLGTAVLPGLGRHTEYDVTILAYYRDGARSDPVSLRYTPSTVSRSPPSNLALASETPDSLQVSWTPPLGRVLHYWLTYAPASGLGPEKSVSVPGARSHVTLPDLQAATKYRVLVSAIYAAGRSEAVSATGQTACPALRPDGSLPGFDLMVAFSLVEKAYASIRGVAMEPSAFGGTPTFTLFKDAQLTRRVSDVYPAPLPPEHTIVFLVRLLPETPREAFALWQMTAEDFQPLLGVLLDAGKKSLTYFHRDPRAALQEATFDPQEVRKIFFGSFHKVHVAVGRSKVRLYVDCRKVAERPLGEMGSPPAAGFVTLGRLAKARGPRSSSAAFQLQMLQIVCSDTWADEDRCCELPASRDGETCPAFVSACSCSSETPGPPGPQGPPGLPGRNGTPGEQGFPGPRGPPGVKGEKGDHGLPGLQGHPGHQGIPGRVGLQGPKGMRGLEGTAGLPGPPGPRGFQGMAGARGTSGERGPPGTVGPTGLPGPKGERGEKGEPQSLATLYQLVSQASHVSKFDSFHENTRPPMPILEQKLEPGTEPLGSPGTRSKALVPGEWGRGGRHLEGRGEPGAVGQMGSPGQQGASTQGLWE

SEQ ID NO: 3261 - protein, 1297 aa, Homo Sapiens
MSSGDPAHLGLCLWLWLGATLGREQVQASGLLRLAVLPEDRLQMKWRESEGSGLGYLVQVKPMAGDSEQEVILTTKTPKATVGGLSPSKGYTLQIFELTGSGRFLLARREFVIEDLKSSSLDRSSQRPLGSGAPEPTPSHTGSPDPEQASEPQVAFTPSQDPRTPGGSEWRETGPQFRCLPPVPADMVFLVDGSWSIGHSHFQQVKDFLASVIAPFEIGPDKVQVGLTQYSGDAQTEWDLNSLSTKEQVLAAVRRLRYKGGNTFTGLALTHVLGQNLQPAAGLRPEAAKVVILVTDGKSQDDVHTAARVLKDLGVNVFAVGVKNADEAELRLLASPPRDITVHSVLDFLQLGALAGLLSRLICQRLQGGSPRQGPAAAPALDTLPAPTSLVLSQVTSSSIRLSWTPAPRHPLKYLIVWRASRGGTPREVVVEGPAASTELHNLASRTEYLVSVFPIYEGGVGEGLRGLVTTAPLPPPRALTLAAVTPRTVHLTWQPSAGATHYLVRCSPASPKGEEEEREVQVGRPEVLLDGLEPGRDYEVSVQSLRGPEGSEARGIRARTPTLAPPRHLGFSDVSHDAARVFWEGAPRPVRLVRVTYVSSEGGHSGQTEAPGNATSATLGPLSSSTTYTVRVTCLYPGGGSSTLTGRVTTKKAPSPSQLSMTELPGDAVQLAWVAAAPSGVLVYQITWTPLGEGKAHEISVPGNLGTAVLPGLGRHTEYDVTILAYYRDGARSDPVSLRYTPSTVSRSPPSNLALASETPDSLQVSWTPPLGRVLHYWLTYAPASGLGPEKSVSVPGARSHVTLPDLQAATKYRVLVSAIYAAGRSEAVSATGQTACPALRPDGSLPGFDLMVAFSLVEKAYASIRGVAMEPSAFGGTPTFTLFKDAQLTRRVSDVYPAPLPPEHTIVFLVRLLPETPREAFALWQMTAEDFQPLLGVLLDAGKKSLTYFHRDPRAALQEATFDPQEVRKIFFGSFHKVHVAVGRSKVRLYVDCRKVAERPLGEMGSPPAAGFVTLGRLAKARGPRSSSAAFQLQMLQIVCSDTWADEDRCCELPASRDGETCPAFVSACSCSSETPGPPGPQGPPGLPGRNGTPGEQGFPGPRGPPGVKGEKGDHGLPGLQGHPGHQGIPGRVGLQGPKGMRGLEGTAGLPGPPGPRGFQGMAGARGTSGERGPPGTVGPTGLPGPKGERGEKGEPQSLATLYQLVSQACESAIQTHVSKFDSFHENTRPPMPILEQKLEPGTEPLGSPGTRSKALVPGEWGRGGRHLEGRGEPGAVGQMGSPGQQGASTQGLWE

SEQ ID NO: 3262 - protein, 79 aa, Homo Sapiens
AKGDKGSPGFYGKKGAKGEKGNAGFPGLPGPAGEPGRHGKDGLMGSPGFKGEAGSPGAPGQDGTRGEPTCAYEFSHVKE

SEQ ID NO: 3263 - protein, 136 aa, Homo Sapiens
MAHYITFLCMVLVLLLQNSVLAEDGEVRSSCRTAPTDLVFILDGSYSVGPENFEIVKKWLVNITKNFDIGPKFIQVGVVQYSDYPVLEIPLGSYDSGEHLTAAVESILYLGGNTKTGKAIQFALDYLFAKSSRFLT

SEQ ID NO: 3264 - protein, 957 aa, Homo Sapiens
MAHYITFLCMVLVLLLQNSVLAEDGEVRSSCRTAPTDLVFILDGSYSVGPENFEIVKKWLVNITKNFDIGPKFIQVGVVQYSDYPVLEIPLGSYDSGEHLTAAVESILYLGGNTKTGKAIQFALDYLFAKSSRFLTKIAVVLTDGKSQDDVKDAAQAARDSKITLFAIGVGSETEDAELRAIANKPSSTYVFYVEDYIAISKIREVMKQKLCEESVCPTRIPVAARDERGFDILLGLDVNKKVKKRIQLSPKKIKGYEVTSKVDLSELTSNVFPEGLPPSYVFVSTQRFKVKKIWDLWRILTIDGRPQIAVTLNGVDKILLFTTTSVINGSQVVTFANPQVKTLFDEGWHQIRLLVTEQDVTLYIDDQQIENKPLHPVLGILINGQTQIGKYSGKEETVQFDVQKLRIYCDPEQNNRETACEIPGFNGECLNGPSDVGSTPAPCICPPGKPGLQGPKGDPGLPGNPGYPGQPGQDGKPGYQGIAGTPGVPGSPGIQGARGLPGYKGEPGRDGDKGDRGLPGFPGLHGMPGSKGEMGAKGDKGSPGFYGKKGAKGEKGNAGFPGLPGPAGEPGRHGKDGLMGSPGFKGEAGSPGAPGQDGTRGEPGIPGFPGNRGLMGQKGEIGPPGQQGKKGAPGMPGLMGSNGSPGQPGTPGSKGSKGEPGIQGMPGASGLKGEPGATGSPGEPGYMGLPGIQGKKGDKGNQGEKGIQGQKGENGRQGIPGQQGIQGHHGAKGERGEKGEPGVRGAIGSKGESGVDGLMGPAGPKGQPGDPGPQGPPGLDGKPGREFSEQFIRQVCTDVIRAQLPVLLQSGRIRNCDHCLSQHGSPGIPGPPGPIGPEGPRGLPGLPGRDGVPGLVGVPGRPGVRGLKGLPGRNGEKGSQGFGYPGEQGPPGPPGPEGPPGISKEGPPGDPGLPGKDGDHGKPGIQGQPGPPGICDPSLCFSVIARRDPFRKGPNY

SEQ ID NO: 3265 - protein, 954 aa, Homo Sapiens
MAHYITFLCMVLVLLLQNSVLAEDGEVRSSCRTAPTDLVFILDGSYSVGPENFEIVKKWLVNITKNFDIGPKFIQVGVVQYSDYPVLEIPLGSYDSGEHLTAAVESILYLGGNTKTGKAIQFALDYLFAKSSRFLTKIAVVLTDGKSQDDVKDAAQAARDSKITLFAIGVGSETEDAELRAIANKPSSTYVFYVEDYIAISKIREVMKQKLCEESVCPTRIPVAARDERGFDILLGLDVNKKVKKRIQLSPKKIKGYEVTSKVDLSELTSNVFPEGLPPSYVFVSTQRFKVKKIWDLWRILTIDGRPQIAVTLNGVDKILLFTTTSVINGSQVVTFANPQVKTLFDEGWHQIRLLVTEQDVTLYIDDQQIENKPLHPVLGILINGQTQIGKYSGKEETVQFDVQKLRIYCDPEQNNRETACEIPGFCLNGPSDVGSTPAPCICPPGKPGLQGPKGDPGLPGNPGYPGQPGQDGKPGYQGIAGTPGVPGSPGIQGARGLPGYKGEPGRDGDKGDRGLPGFPGLHGMPGSKGEMGAKGDKGSPGFYGKKGAKGEKGNAGFPGLPGPAGEPGRHGKDGLMGSPGFKGEAGSPGAPGQDGTRGEPGIPGFPGNRGLMGQKGEIGPPGQQGKKGAPGMPGLMGSNGSPGQPGTPGSKGSKGEPGIQGMPGASGLKGEPGATGSPGEPGYMGLPGIQGKKGDKGNQGEKGIQGQKGENGRQGIPGQQGIQGHHGAKGERGEKGEPGVRGAIGSKGESGVDGLMGPAGPKGQPGDPGPQGPPGLDGKPGREFSEQFIRQVCTDVIRAQLPVLLQSGRIRNCDHCLSQHGSPGIPGPPGPIGPEGPRGLPGLPGRDGVPGLVGVPGRPGVRGLKGLPGRNGEKGSQGFGYPGEQGPPGPPGPEGPPGISKEGPPGDPGLPGKDGDHGKPGIQGQPGPPGICDPSLCFSVIARRDPFRKGPNY

SEQ ID NO: 3266 - protein, 956 aa, Homo Sapiens [sequence omitted]

SEQ ID NO: 3267 - protein, 125 aa, Homo Sapiens
  misc_feature (1)..(1): Xaa can be any naturally occurring amino acid
XRETACEIPGFNGECLNGPSDVGSTPAPCICPPGKPGLQGPKGYQGIAGTPGVPGSPGIQGARGLPGYKGEPGRDGDKGDRGLPGFPGLHGMPGSKGEMGAKGDKGSPGFYGKKGSIDHTTKYSY

SEQ ID NO: 3268 - protein, 65 aa, Homo Sapiens
GEPGELGEPGLPGEVGMRGPQGPPGLPGPPGRVGAPVSEGTCLGRGSTPSPGIKNQVLASSSTCI

SEQ ID NO: 3269 - protein, 1626 aa, Homo Sapiens
MAGLRGNAVAGLLWMLLLWSGGGGCQAQRAGCKSVHYDLVFLLDTSSSVGKEDFEKVRQWVANLVDTFEVGPDRTRVGVVRYSDRPTTAFELGLFGSQEEVKAAARRLAYHGGNTNTGDALRYITARSFSPHAGGRPRDRAYKQVAILLTDGRSQDLVLDAAAAAHRAGIRIFAVGVGEALKEELEEIASEPKSAHVFHVSDFNAIDKIRGKLRRRLCENVLCPSVRVEGDRFKHTNGGTKEITGFDLMDLFSVKEILGKRENGAQSSYVRMGSFPVVQSTEDVFPQGLPDEYAFVTTFRFRKTSRKEDWYIWQVIDQYSIPQVSIRLDGENKAVEYNAVGAMKDAVRVVFRGSRVNDLFDRDWHKMALSIQAQNVSLHIDCALVQTLPIEERENIDIQGKTVIGKRLYDSVPIDFDLQRIVIYCDSRHAELETCCDIPSGPCQVTVVTEPPPPPPPQRPPTPGSEQIGFLKTINCSCPAGEKGEMGVAGPMGLPGPKGDIGAIGPVGAPGPKGEKGDVGIGPFGQGEKGEKGSLGLPGPPGRDGSKGMRGEPGELGEPGLPGEVGMRGPQGPPGLPGPPGRVGAPGLQGERGEKGTRGEKGERGLDGFPGKPGDTGQQGRPGPSGVAGPQGEKGDVGPAGPPGVPGSVVQQEGLKGEQGAPGPRGHQGAPGPPGARGPIGPEGRDGPPGLQGLRGKKGDMGPPGIPGLLGLQGPPGPPGVPGPPGPGGSPGLPGEIGFPGKPGPPGPTGPPGKDGPNGPPGPPGTKGEPGERGEDGLPGKPGLRGEIGEQGLAGRPGEKGEAGLPGAPGFPGVRGEKGDQGEKGELGLPGLKGDRGEKGEAGPAGPPGLPGTTSLFTPHPRMPGEQGPKGEKGDPGLPGEPGLQGRPGELGPQGPTGPPGAKGQEGAHGAPGAAGNPGAPGHVGAPGPSGPPGSVGAPGLRGTPGKDGERGEKGAAGEEGSPGPVGPRGDPGAPGLPGPPGKGKDGEPGLRGSPGLPGPLGTKAACGKVRGSENCALGGQCVKGDRGAPGIPGSPGSRGDPGIGVAGPPGPSGPPGDKGSPGSRGLPGFPGPQGPAGRDGAPGNPGERGPPGKPGLSSLLSPGDINLLAKDVCNDCPPGPPGLPGLPGFKGDKGVPGKPGREGTEGKKGEAGPPGLPGPPGIAGPQGSQGERGADGEVGQKGDQGHPGVPGFMGPPGNPGPPGADGIAGAAGPPGIQGSPGKEGPPGPQGPSGLPGIPGEEGKEGRDGKPGPPGEPGKAGEPGLPGPEGARGPPGFKGHTGDSGAPGPRGESGAMGLPGQEGLPGKDGDTGPTGPQGPQGPRGPPGKNGSPGSPGEPGPSGTPGQKGSKGENGSPGLPGFLGPRGPPGEPGEKGVPGKEGVPGKPGEPGFKGERGDPGIKGDKGPPGGKGQPGDPGIPGHKGHTGLMGPQGLPGENGPVGPPGPPGQPGFPGLRGESPSMETLRRLIQEELGKQLETRLAYLLAQMPPAYMKSSQGRPGPPGPPGKDGLPGRAGPMGEPGRPGQGGLEGPSGPIGPKGERGAKGDPGAPGVGLRGEMGPPGIPGQPGEPGYAKDGLPGIPGPQGETGPAGHPGLPGPPGPPGQCDPSQCAYFASLAARPGNVKGP

SEQ ID NO: 3270 - protein, 1319 aa, Homo Sapiens
MAGLRGNAVAGLLWMLLLWSGGGGCQAQRAGCKSVHYDLVFLLDTSSSVGKEDFEKVRQWVANLVDTFEVGPDRTRVGVVRYSDRPTTAFELGLFGSQEEVKAAARRLAYHGGNTNTGDALRYITARSFSPHAGGRPRDRAYKQVAILLTDGRSQDLVLDAAAAAHRAGIRIFAVGVGEALKEELEEIASEPKSAHVFHVSDFNAIDKIRGKLRRRLCENVLCPSVRVEGDRFKHTNGGTKEITGFDLMDLFSVKEILGKRENGAQSSYVRMGSFPVVQSTEDVFPQGLPDEYAFVTTFRFRKTSRKEDWYIWQVIDQYSIPQVSIRLDGENKAVEYNAVAGPQGEKGDVGPAGPPGVPGSVVQQEGLKGEQGAPGPRGHQGAPGPPGARGPIGPEGRDGPPGLQGLRGKKGDMGPPGIPGLLGLQGPPGPPGVPGPPGPGGSPGLPGEIGFPGKPGPPGPTGPPGKDGPNGPPGPPGTKGEPGERGEDGLPGKPGLRGEIGEQGLAGRPGEKGEAGLPGAPGFPGVRGEKGDQGEKGELGLPGLKGDRGEKGEAGPAGPPGLPGTTSLFTPHPRMPGEQGPKGEKGDPGLPGEPGLQGRPGELGPQGPTGPPGAKGQEGAHGAPGAAGNPGAPGHVGAPGPSGPPGSVGAPGLRGTPGKDGERGEKGAAGEEGSPGPVGPRGDPGAPGLPGPPGKGKDGEPGLRGSPGLPGPLGTKGDRGAPGIPGSPGSRGDPGIGVAGPPGPSGPPGDKGSPGSRGLPGFPGPQGPAGRDGAPGNPGERGPPGKPGLSSLLSPGDINLLAKDVCNDCPPGPPGLPGLPGFKGDKGVPGKPGREGTEGKKGEAGPPGLPGPPGIAGPQGSQGERGADGEVGQKGDQGHPGVPGFMGPPGNPGPPGADGIAGAAGPPGIQGSPGKEGPPGPQGPSGLPGIPGEEGKEGRDGKPGPPGEPGKAGEPGLPGPEGARGPPGFKGHTGDSGAPGPRGESGAMGLPGQEGLPGKDGDTGPTGPQGPQGPRGPPGKNGSPGSPGEPGPSGTPGQKGSKGENGSPGLPGFLGPRGPPGEPGEKGVPGKEGVPGKPGEPGFKGERGDPGIKGDKGPPGGKGQPGDPGIPGHKGHTGLMGPQGLPGENGPVGPPGPPGQPGFPGLRGESPSMETLRRLIQEELGKQLETRLAYLLAQMPPAYMKSSQGRPGPPGPPGKDGLPGRAGPMGEPGRPGQGGLEGPSGPIGPKGERGAKGDPGAPGVGLRGEMGPPGIPGQPGEPGYAKDGLPGIPGPQGETGPAGHPGLPGPPGPPGQCDPSQCAYFASLAARPGNVKGP

SEQ ID NO: 3271 - protein, 81 aa, Homo Sapiens
MHLRAHRTRRGKVSPTAKTKSLLHFIVLCVAGVVVHAQEQGIDILHQLGLGGKDVRHSSPATAVPSASTPLPQGVHLTESG

SEQ ID NO: 3272 - protein, 1714 aa, Homo Sapiens
MHLRAHRTRRGKVSPTAKTKSLLHFIVLCVAGVVVHAQEQGIDILHQLGLGGKDVRHSSPATAVPSASTPLPQGVHLTESGVIFKNDAYIETPFVKILPVNLGQPFTILTGLQSHRVNNAFLFSIRNKNRLQLGVQLLPKKLVVHIRGKQPAVFNYSVHDEQWHSFAITIRNQSVSMFVECGKKYFSTETIPEVQTFDSNSVFTLGSMNNNSIHFEGIVCQLDIIPSAEASADYCRYVKQQCRQADKYQPETSIPCTTLIPTKIPEHSPPPKLFAEKVLSEDTFTEGKSIPNIIKNDSETVYKRQEHQISRSQLSSLQSGNVSAVDLTNHGIQAKEMITEEDTQTNFSLSVTTHRISEAKMNTKEKFSSLLNMSDNITQHDDRVTGLSLFKKMPSILPQIKQDTITNLKKAITANLHTNELMEMQPILNTSLHRVTNEPSVDNHLDLRKEGEFYPDATYPIENSYETELYDYYYYEDLNTMLEMEYLRGPKGDTGPPGPPGPAGIPGPSGKRGPRGIPGPHGNPGLPGLPGPKGPKGDPGFSPGQPVPGEKGDQGLSGLMGPPGMQGDKGLKGHPGLPGLPGEQGIPGFAGNIGSPGYPGRQGLAGPEGNPGPKGAQGFIGSPGEAGQLGPEGERGIPGIRGKKGFKGRQGFPGDFGDRGPAGLDGSPGLVGGTGPPGFPGLRGSVGPVGPIGPAGIPGPMGLSGNKGLPGIKGDKGEQGTAGELGEPGYPGDKGAVGLPGPPGMRGKSGPSGQTGDPGLQGPSGPPGPEGFPGDIGIPGQNGPEGPKGLLGNRGPPGPPGLKGTQGEEGPIGAFGELGPRGKPGQKGYAGEPGPEGLKGEVGDQGNIGKIGETGPVGLPGEVGMTGSIGEKGERGSPGPLGPQGEKGVMGYPGPPGVPGPIGPLGLPGHVGARGPPGSQGPKGQRGSRGPDGLLGEQGIQGAKGEKGDQGKRGPHGLIGKTGNPGERGFQGKPGLQGLPGSTGDRGLPGEPGLRGLQGDVGPPGEMGMEGPPGTEGESGLQGEPGAKGDVGTAGSVGGTGEPGLRGEPGAPGEEGLQGKDGLKGVPGGRGLPGEDGEKGEMGLPGIIGPLGRSGQTGLPGPEGIVGIPGQRGRPGKKGDKGQIGPTGEVGSRGPPGKIGKSGPKGARGTRGAVGHLGLMGPDGEPGIPGYRGHQGQPGPSGLPGPKGEKGYPGEDSTVLGPPGPRGEPGPVGDQGERGEPGAEGYKGHVGVPGLRGATGQQGPPGEPGDQGEQGLKGERGSEGNKGKKGAPGPSGKPGIPGLQGLLGPKGIQGYHGADGISGNPGKIGPPGKQGLPGIRGGPGRTGLAGAPGPPGVKGSSGLPGSPGIQGPKGEQGLPGQPGIQGKRGHRGAQGDQGPCGDPGLKGQPGEYGVQGLTGFQGFPGPKGPEGDAGIVGISGPKGPIGHRGNTGPLGREGIIGPTGRTGPRGEKGFRGETGPQGPRGQPGPPGPPGAPGPRKQMDINAAIQALIESNTALQMESYQNTEVTLIDHSEEIFKTLNYLSNLLHSIKNPLGTRDNPARICKDLLNCEQKVSDGKYWIDPNLGCPSDAIEVFCNFSAGGQTCLPPVSVTKLEFGVGKVQMNFLHLLSSEATHIITIHCLNTPRWTSTQTSGPGLPIGFKGWNGQIFKVNTLLEPKVLSDDCKIQDGSWHKATFLFHTQEPNQLPVIEVQKLPHLKTERKYYIDSSSVCFL

SEQ ID NO: 3273 - protein, 890 aa, Homo Sapiens
MHLRAHRTRRGKVSPTAKTKSLLHFIVLCVAGVVVHAQEQGIDILHQLGLGGKDVRHSSPATAVPSASTPLPQGVHLTESGVIFKNDAYIETPFVKILPVNLGQPFTILTGLQSHRVNNAFLFSIRNKNRLQLGVQLLPKKLVVHIRGKQPAVFNYSVHDEQWHSFAITIRNQSVSMFVECGKKYFSTETIPEVQTFDSNSVFTLGSMNNNSIHFEGIVCQLDIIPSAEASADYCRYVKQQCRQADKYQPETSIPCTTLIPTKIPEHSPPPKLFAEKVLSEDTFTEGKSIPNIIKNDSETVYKRQEHQISRSQLSSLQSGNVSAVDLTNHGIQAKEMITEEDTQTNFSLSVTTHRISEAKMNTKEKFSSLLNMSDNITQHDDRVTGLSLFKKMPSILPQIKQDTITNLKKAITANLHTNELMEMQPILNTSLHRVTNEPSVDNHLDLRKEGEFYPDATYPIENSYETELYDYYYYEDLNTMLEMEYLRGPKGDTGPPGPPGPAGIPGPSGKRGPRGIPGPHGNPGLPGLPGPKGPKGDPGFSPGQPVPGEKGDQGLSGLMGPPGMQGDKGLKGHPGLPGLPGEQGIPGFAGNIGSPGYPGRQGLAGPEGNPGPKGAQGFIGSPGEAGQLGPEGERGIPGIRGKKGFKGRQGFPGDFGDRGPAGLDGSPGLVGGTGPPGFPGLRGSVGPVGPIGPAGIPGPMGLSGNKGLPGIKGDKGEQGTAGELGEPGYPGDKGAVGLPGPPGMRGKSGPSGQTGDPGLQGPSGPPGPEGFPGDIGIPGQNGPEGPKGLLGNRGPPGPPGLKGTQGEEGPIGAFGELGPRGKPGQKGYAGEPGPEGLKGEVGDQGNIGKIGETMESCSVTQAGAQWHDLGSLHPLPPGFKRFSCLSLPG

SEQ ID NO: 3274 - protein, 166 aa, Homo Sapiens
  misc_feature (1)..(1): Xaa can be any naturally occurring amino acid
XIKNPLGTRDNPARICKDLLNCEQKVSDGKYWIDPNLGCPSDAIEVFCNFSAGGQTCLPPVSVTKAFTIITPEIEEGRILPFLGNHEPLIKSSMIVLLPKYPHHHPHSSGSWHRIIIEGKKMGLCELCRGNRSSGEADSSCFHDQITSLISLIHKLNPRKTREVLG

SEQ ID NO: 3275 - protein, 439 aa, Homo Sapiens
MKLALLLPWACCCLCGSALATGFLYPFSAAALQQHGYPEPGAGSPGSGYASRRHWCHHTVTRTVSCQVQNGSETVVQRVYQSCRWPGPCANLVRTLIRPTYRVSYRTVTVLEWRCCPGFTGSNCDEECMNCTRLSDMSERLTTLEAKVLLLEAAERPSSPDNDLPAPESTPPTWNEDFLPDAIPLAHPVPRQRRPTGPAGPPGQTGPPGPAGPPGSKGDRGQTGEKGPAGPPGLLGPPGPRGLPGEMGRPGPPGPPGPAGNPGPSPNSPQGALYSLQPPTDKDNGDSRLASAIVDTVLAGVPGPRGPPGPPGPPGPRGPPGPPGTPGSQGLAGERGTVGPSGEPGVKGEEGEKAATAEGEGVQQLREALKILAERVLILEHMIGIHDPLASPEGGSGQDAALRANLKMKRGGAQPDGVLAALLGPDPGQKSVDQASSRK

SEQ ID NO: 3276 - protein, 441 aa, Homo Sapiens
MKLALLLPWACCCLCGSALATGFLYPFSAAALQQHGYPEPGAGSPGSGYASRRHWCHHTVTRTVSCQVQNGSETVVQRVYQSCRWPGPCANLVSYRTLIRPTYRVSYRTVTVLEWRCCPGFTGSNCDEECMNCTRLSDMSERLTTLEAKVLLLEAAERPSSPDNDLPAPESTPPTWNEDFLPDAIPLAHPVPRQRRPTGPAGPPGQTGPPGPAGPPGSKGDRGQTGEKGPAGPPGLLGPPGPRGLPGEMGRPGPPGPPGPAGNPGPSPNSPQGALYSLQPPTDKDNGDSRLASAIVDTVLAGVPGPRGPPGPPGPPGPRGPPGPPGTPGSQGLAGERGTVGPSGEPGVKGEEGEKAATAEGEGVQQLREALKILAERVLILEHMIGIHDPLASPEGGSGQDAALRANLKMKRGGAQPDGVLAALLGPDPGQKSVDQASSRK

SEQ ID NO: 3277 - protein, 714 aa, Homo Sapiens
LSWTKAGSPAPPGVIPFQSGFIFTQRARLQAPTGTVIPAALGTELALVLSLCSHRVNHAFLFAVRSQKRKLQLGLQFLPGKTVVHLGSRRSVAFDLDMHDGRWHHLALELRGRTVTLVTACGQRRVPVLLPFHRDPALDPGGSFLFGKMNPHAVQFEGALCQFSIYPVTQVAHNYCTHLRKQCGQADTYQSPLGPLFSQDSGRPFTFQSDLALLGLENLTTATPALGSLPAGRGPRGTVAPATPTKPQRTSPTNPHQHMAVGGPAQTPLLPAKLSASNALDPMLPASVGGSTRTPRPAAAQPSQKITATKIPKSLPTKPSAPSTSIVPIKSPHPTQKTAPSSFTKSALPTQKQVPPTSRPVPARVSRPAEKPIQRNPGMPRPPPPSTRPLPPTTSSSKKPIPTLARTEAKITSHASKPASARTSTHKPPPFTALSSSPAPTPGSTRSTRPPATMVPPTSGTSTPRTAPAVPTPGSAPTGSKKPIGSEASKKAGPKSSPRKPVPLRPGKAARDVPLSDLTTRPSPRQPQPSQQTTPALVLAPAQFLSSSPRPTSSGYSIFHLAGSTPFPLLMGPPGPKGDCGLPGPPGLPGLPGIPGARGPRGPPGPYGNPGLPGPPGAKGDMGLPGLSGNPGPPGRKGLPGPVGDPGPKGSRGYIGLPGLFGLPGSDGERGLPGVPGKRGKMGMPVLLPQSSEARGGNSMPSEGALAGRHGSHL

SEQ ID NO: 3278 - protein, 1860 aa, Homo Sapiens
MGAGSARGARGTAAAAAARGGGFLFSWILVSFACHLASTQGAPEDVDILQRLGLSWTKAGSPAPPGVIPFQSGFIFTQRARLQAPTGTVIPAALGTELALVLSLCSHRVNHAFLFAVRSQKRKLQLGLQFLPGKTVVHLGSRRSVAFDLDMHDGRWHHLALELRGRTVTLVTACGQRRVPVLLPFHRDPALDPGGSFLFGKMNPHAVQFEGALCQFSIYPVTQVAHNYCTHLRKQCGQADTYQSPLGPLFSQDSGRPFTFQSDLALLGLENLTTATPALGSLPAGRGPRGTVAPATPTKPQRTSPTNPHQHMAVGGPAQTPLLPAKLSASNALDPMLPASVGGSTRTPRPAAAQPSQKITATKIPKSLPTKPSAPSTSIVPIKSPHPTQKTAPSSFTKSALPTQKQVPPTSRPVPARVSRPAEKPIQRNPGMPRPPPPSTRPLPPTTSSSKKPIPTLARTEAKITSHASKPASARTSTHKPPPFTALSSSPAPTPGSTRSTRPPATMVPPTSGTSTPRTAPAVPTPGSAPTGSKKPIGSEASKKAGPKSSPRKPVPLRPGKAARDVPLSDLTTRPSPRQPQPSQQTTPALVLAPAQFLSSSPRPTSSGYSIFHLAGSTPFPLLMGPPGPKGDCGLPGPPGLPGLPGIPGARGPRGPPGPYGNPGLPGPPGAKGQKGDPGLSPGKAHDGAKGDMGLPGLSGNPGPPGRKGHKGYPGPAGHPGEQGQPGPEGSPGAKGYPGRQGLPGPVGDPGPKGSRGYIGLPGLFGLPGSDGERGLPGVPGKRGKMGMPGFPGVFGERGPPGLDGNPGELGLPGPPGVPGLIGDLGVLGPIGYPGPKGMKGLMGSVGEPGLKGDKGEQGVPGVSGDPGFQGDKGSQGLPGFPGARGKPGPLGKVGDKGSIGFPGPPGPEGFPGDIGPPGDNGPEGMKGKPGARGLPGPRGQLGPEGDEGPMGPPGAPGLEGQPGRKGFPGRPGLDGVKGEPGDPGRPGPVGEQGFMGFIGLVGEPGIVGEKGDRGMMGPPGVPGPKGSMGHPGMPGGMGTPGEPGPQGPPGSRGPPGMRGAKGRRGPRGPDGPAGEQGSRGLKGPPGPQGRPGRPGQQGVAGERGHLGSRGFPGIPGPSGPPGTKGLPGEPGPQGPQGPIGPPGEMGPKGPPGAVGEPGLPGEAGMKGDLGPLGTPGEQGLIGQRGEPGLEGDSGPMGPDGLKGDRGDPGPDGEHGEKGQEGLMGEDGPPGPPGVTGVRGPEGKSGKQGEKGRTGAKGAKGYQGQLGEMGVPGDPGPPGTPGPKGSRGSLGPTGAPGRMGAQGEPGLAGYDGHKGIVGPLGPPGPKGEKGEQGEDGKAEGPPGPPGDRGPVGDRGDRGEPGDPGYPGQEGVQGLRGKPGQQGQPGHPGPRGWPGPKGSKGAEGPKGKQGKAGAPGRRGVQGLQGLPGPRGVVGRQGLEGIAGPDGLPGRDGQAGQQGEQGDDGDPGPMGPAGKRGNPGVAGLPGAQGPPGFKGESGLPGQLGPPGKRGTEGRTGLPGNQGEPGSKGQPGDSGEMGFPGMAGLFGPKGPPGDIGFKGIQGPRGPPGLMGKEGIVGPLGILGPSGLPGPKGDKGSRGDWGLQGPRGPPGPRGRPGPPGPPGGPIQLQQDDLGAAFQTWMDTSGALRPESYSYPDRLVLDQGGEIFKTLHYLSNLIQSIKTPLGTKENPARVCRDLMDCEQKMVDGTYWVDPNLGCSSDTIEVSCNFTHGGQTCLKPITASKVEFAISRVQMNFLHLLSSEVTQHITIHCLNMTVWQEGTGQTPAKQAVRFRAWNGQIFEAGGQFRPEVSMDGCKVQDGRWHQTLFTFRTQDPQQLPIISVDNLPPASSGKQYRLEVGPACFL

SEQ ID NO: 3279 - protein, 485 aa, Homo Sapiens
  misc_feature (1)..(1): Xaa can be any naturally occurring amino acid
XAAQPSQKITATKIPKSLPTKPSAPSTSIVPIKSPHPTQKTAPSSFTKSALPTQKQVPPTSRPVPARVSRPAEKPIQRNPGMPRPPPPSTRPLPPTTSSSKKPIPTLARTEAKITSHASKPASARTSTHKPPPFTALSSSPAPTPGSTRSTRPPATMVPPTSGTSTPRTAPAVPTPGSAPTGSKKPIGSEASKKAGPKSSPRKPVPLRPGKAARDVPLSDLTTRPSPRQPQPSQQTTPALVLAPAQFLSSSPRPTSSGYSIFHLAGSTPFPLLMGPPGPKGDCGLPGPPGLPGLPGIPGARGPRGPPGPYGNPGLPGPPGAKGDMGLPGLSGNPGPPGRKGHKGYPGPAGHPGEQGQPGPEGSPGAKGYPGRQGLPGPVGDPGPKGSRGYIGLPGLFGLPGSDGERGLPGVPGKRGKMGMPGFPGVFGERGPPGLDGNPGELGLPGPPGVPGLIGDLGVLGPIGYPGPKGMKGLMGSVGEPGLKG

SEQ ID NO: 3280 - protein, 80 aa, Homo Sapiens
ATTSSEATTTPRPLLSTPVDGAEDPRCLEALKPGNCGEYVVRWYYDKQVNSCARFWFSGCNGSGNRFNSEKECQETCIQG

SEQ ID NO: 3281 - protein, 142 aa, Homo Sapiens
FDSYLVQIFGSSSPQPGFGMSGEELSESTPEPQKEISESLSVTRDQDEDDKAPEPTWADDLPATTSSEATTTPRPLLSTPVDGAEDPRCLEALKPGNCGEYVVRWYYDKQVNSCARFWFSGCNGSGNRFNSEKECQETCIQG

SEQ ID NO: 3282 - protein, 130 aa, Homo Sapiens
GMPGTSIPGPPGPKGDRGGPGIPGFKGEPGLSIRGPKGVQGPRGPVGAPGLKGDGYPGVPGPRGLPGPPGPMGLRGVGDTGAKTLNTSHGLEDPSCPDCSFCHFSLAADIQPKWPALLQLIPASGTRQDG

SEQ ID NO: 3283 - protein, 67 aa, Homo Sapiens
KGNPGNAQKGEAGERGPGGIPGYKGDKQYSREDREVEHNNEKYVACLLPSPALLQQSSLTHHGTCSH

SEQ ID NO: 3284 - protein, 1125 aa, Homo Sapiens
MWNRYFVFYLLLLSAFTSQTVSGQRKKGPKSNLLARKSDVQGSICFIDIVFIVDSSESSKIALFDKQKDFVDSLSDKIFQLTPGRSLEYDIKLAALQFSSSVQIDPPFSSWKDLQTFKQKVKSMNLIGQGTFSYYAISNATRLLKREGRKDGVKVVLLMTDGIDHPKNPDVQSISEDARISGISFITIALSTVVNEAKLRLISGDSSSEPTLLLSDPTLVDKIQDRLDILFEKKCERKICECEKGDPGDPGPPGTHGNPGIKGERGPKGNPGNAQKGEAGERGPGGIPGYKGDKGERGECGKPGIKGDKGSPGPYGPKGPRGIQGITGPPGDPGPKGFQGNKGEPGPPGPYGSPGAPGIGQQGIKGERGQEGRPGAPGPIGVGEPGQPGPRGPEGVPGERGLPGEGFPGPKGEKGSEGPTGPQGLQGLSIKGEKGDIGPVGPQGPMGIPGIGSQGEQGIQGPIGPPGPQGPAGQGLPGSKGEVGQMGPTGPRGPVGIGVQGPKGEPGSIGLPGQPGVPGEDGAAGKKGEAGLPGARGPEGPPGKGQPGPKGDEGKKGSKGNQGQRGLPGPEGPKGEPGIMGPFGMPGTSIPGPPGPKGDRGGPGIPGFKGEPGLSIRGPKGVQGPRGPVGAPGLKGDGYPGVPGPRGLPGPPGPMGLRGVGDTGAKGEPGVRGPPGPSGPRGVGTQGPKGDTGQKGLPGPPGPPGYGSQGIKGEQGPQGFPGPKGTMGHGLPGQKGEHGERGDVGKKGDKGEIGEPGSPGKQGLQGPKGDLGLTKEEIIKLITEICGCGPKCKETPLELVFVIDSSESVGPENFQIIKNFVKTMADRVALDLATARIGIINYSHKVEKVANLKQFSSKDDFKLAVDNMQYLGEGTYTATALQAANDMFEDARPGVKKVALVITDGQTDSRDKEKLTEVVKNASDTNVEIFVIGVVKKNDPNFEIFHKEMNLIATDPEHVYQFDDFFTLQDTLKQKLFQKICEDFDSYLVQIFGSSSPQPGFGMSGEELSESTPEPQKEISESLSVTRDQDEDDKAPEPTWADDLPATTSSEATTTPRPLLSTPVDGAEDPRCLEALKPGNCGEYVVRWYYDKQVNSCARFWFSGCNGSGNRFNSEKECQETCIQG

SEQ ID NO: 3285 - protein, 1487 aa, Homo Sapiens
MIRLGAPQTLVLLTLLVAAVLRCQGQDVQEAGSCVQDGQRYNDKDVWKPEPCRICVCDTGTVLCDDIICEDVKDCLSPEIPFGECCPICPTDLATASGQPGPKGQKGEPGDIKDIVGPKGPPGPQGPAGEQGPRGDRGDKGEKGAPGPRGRDGEPGTPGNPGPPGPPGPPGPPGLGGNFAAQMAGGFDEKAGGAQLGVMQGPMGPMGPRGPPGPAGAPGPQGFQGNPGEPGEPGVSGPMGPRGPPGPPGKPGDDGEAGKPGKAGERGPPGPQGARGFPGTPGLPGVKGHRGYPGLDGAKGEAGAPGVKGESGSPGENGSPGPMGPRGLPGERGRTGPAGAAGARGNDGQPGPAGPPGPVGPAGGPGFPGAPGAKGEAGPTGARGPEGAQGPRGEPGTPGSPGPAGASGNPGTDGIPGAKGSAGAPGIAGAPGFPGPRGPPGPQGATGPLGPKGQTGEPGIAGFKGEQGPKGEPGPAGPQGAPGPAGEEGKRGARGEPGGVGPIGPPGERGAPGNRGFPGQDGLAGPKGAPGERGPSGLAGPKGANGDPGRPGEPGLPGARGLTGRPGDAGPQGKVGPSGAPGEDGRPGPPGPQGARGQPGVMGFPGPKGANGEPGKAGEKGLPGAPGLRGLPGKDGETGAAGPPGPAGPAGERGEQGAPGPSGFQGLPGPPGPPGEGGKPGDQGVPGEAGAPGLVGPRGERGFPGERGSPGAQGLQGPRGLPGTPGTDGPKGASGPAGPPGAQGPPGLQGMPGERGAAGIAGPKGDRGDVGEKGPEGAPGKDGGRGLTGPIGPPGPAGANGEKGEVGPPGPAGSAGARGAPGERGETGPPGPAGFAGPPGADGQPGAKGEQGEAGQKGDAGAPGPQGPSGAPGPQGPTGVTGPKGARGAQGPPGATGFPGAAGRVGPPGSNGNPGPPGPPGPSGKDGPKGARGDSGPPGRAGEPGLQGPAGPPGEKGEPGDDGPSGAEGPPGPQGLAGQRGIVGLPGQRGERGFPGLPGPSGEPGKQGAPGASGDRGPPGPVGPPGLTGPAGEPGREGSPGADGPPGRDGAAGVKGDRGETGAVGAPGAPGPPGSPGPAGPTGKQGDRGEAGAQGPMGPSGPAGARGIQGPQGPRGDKGEAGEPGERGLKGHRGFTGLQGLPGPPGPSGDQGASGPAGPSGPRGPPGPVGPSGKDGANGIPGPIGPPGPRGRSGETGPAGPPGNPGPPGPPGPPGPGIDMSAFAGLGPREKGPDPLQYMRADQAAGGLRQHDAEVDATLKSLNNQIESIRSPEGSRKNPARTCRDLKLCHPEWKSGDYWIDPNQGCTLDAMKVFCNMETGETCVYPNPANVPKKNWWSSKSKEKKHIWFGETINGGFHFSYGDDNLAPNTANVQMTFLRLLSTEGSQNITYHCKNSIAYLDEAAGNLKKALLIQGSNDVEIRAEGNSRFTYTALKDGCTKHTGKWGKTVIEYRSQKTSRLPIIDIAPMDIGGPEQEFGVDIGPVCFL

SEQ ID NO: 3286 - protein, 1418 aa, Homo Sapiens
MIRLGAPQTLVLLTLLVAAVLRCQGQDVRQPGPKGQKGEPGDIKDIVGPKGPPGPQGPAGEQGPRGDRGDKGEKGAPGPRGRDGEPGTPGNPGPPGPPGPPGPPGLGGNFAAQMAGGFDEKAGGAQLGVMQGPMGPMGPRGPPGPAGAPGPQGFQGNPGEPGEPGVSGPMGPRGPPGPPGKPGDDGEAGKPGKAGERGPPGPQGARGFPGTPGLPGVKGHRGYPGLDGAKGEAGAPGVKGESGSPGENGSPGPMGPRGLPGERGRTGPAGAAGARGNDGQPGPAGPPGPVGPAGGPGFPGAPGAKGEAGPTGARGPEGAQGPRGEPGTPGSPGPAGASGNPGTDGIPGAKGSAGAPGIAGAPGFPGPRGPPGPQGATGPLGPKGQTGEPGIAGFKGEQGPKGEPGPAGPQGAPGPAGEEGKRGARGEPGGVGPIGPPGERGAPGNRGFPGQDGLAGPKGAPGERGPSGLAGPKGANGDPGRPGEPGLPGARGLTGRPGDAGPQGKVGPSGAPGEDGRPGPPGPQGARGQPGVMGFPGPKGANGEPGKAGEKGLPGAPGLRGLPGKDGETGAAGPPGPAGPAGERGEQGAPGPSGFQGLPGPPGPPGEGGKPGDQGVPGEAGAPGLVGPRGERGFPGERGSPGAQGLQGPRGLPGTPGTDGPKGASGPAGPPGAQGPPGLQGMPGERGAAGIAGPKGDRGDVGEKGPEGAPGKDGGRGLTGPIGPPGPAGANGEKGEVGPPGPAGSAGARGAPGERGETGPPGPAGFAGPPGADGQPGAKGEQGEAGQKGDAGAPGPQGPSGAPGPQGPTGVTGPKGARGAQGPPGATGFPGAAGRVGPPGSNGNPGPPGPPGPSGKDGPKGARGDSGPPGRAGEPGLQGPAGPPGEKGEPGDDGPSGAEGPPGPQGLAGQRGIVGLPGQRGERGFPGLPGPSGEPGKQGAPGASGDRGPPGPVGPPGLTGPAGEPGREGSPGADGPPGRDGAAGVKGDRGETGAVGAPGAPGPPGSPGPAGPTGKQGDRGEAGAQGPMGPSGPAGARGIQGPQGPRGDKGEAGEPGERGLKGHRGFTGLQGLPGPPGPSGDQGASGPAGPSGPRGPPGPVGPSGKDGANGIPGPIGPPGPRGRSGETGPAGPPGNPGPPGPPGPPGPGIDMSAFAGLGPREKGPDPLQYMRADQAAGGLRQHDAEVDATLKSLNNQIESIRSPEGSRKNPARTCRDLKLCHPEWKSGDYWIDPNQGCTLDAMKVFCNMETGETCVYPNPANVPKKNWWSSKSKEKKHIWFGETINGGFHFSYGDDNLAPNTANVQMTFLRLLSTEGSQNITYHCKNSIAYLDEAAGNLKKALLIQGSNDVEIRAEGNSRFTYTALKDGCTKHTGKWGKTVIEYRSQKTSRLPIIDIAPMDIGGPEQEFGVDIGPVCFL

SEQ ID NO: 3287 - protein, 1466 aa, Homo Sapiens
MMSFVQKGSWLLLALLHPTIILAQQEAVEGGCSHLGQSYADRDVWKPEPCQICVCDSGSVLCDDIICDDQELDCPNPEIPFGECCAVCPQPPTAPTRPPNGQGPQGPKGDPGPPGIPGRNGDPGIPGQPGSPGSPGPPGICESCPTGPQNYSPQYDSYDVKSGVAVGGLAGYPGPAGPPGPPGPPGTSGHPGSPGSPGYQGPPGEPGQAGPSGPPGPPGAIGPSGPAGKDGESGRPGRPGERGLPGPPGIKGPAGIPGFPGMKGHRGFDGRNGEKGETGAPGLKGENGLPGENGAPGPMGPRGAPGERGRPGLPGAAGARGNDGARGSDGQPGPPGPPGTAGFPGSPGAKGEVGPAGSPGSNGAPGQRGEPGPQGHAGAQGPPGPPGINGSPGGKGEMGPAGIPGAPGLMGARGPPGPAGANGAPGLRGGAGEPGKNGAKGEPGPRGERGEAGIPGVPGAKGEDGKDGSPGEPGANGLPGAAGERGAPGFRGPAGPNGIPGEKGPAGERGAPGPAGPRGAAGEPGRDGVPGGPGMRGMPGSPGGPGSDGKPGPPGSQGESGRPGPPGPSGPRGQPGVMGFPGPKGNDGAPGKNGERGGPGGPGPQGPPGKNGETGPQGPPGPTGPGGDKGDTGPPGPQGLQGLPGTGGPPGENGKPGEPGPKGDAGAPGAPGGKGDAGAPGERGPPGLAGAPGLRGGAGPPGPEGGKGAAGPPGPPGAAGTPGLQGMPGERGGLGSPGPKGDKGEPGGPGADGVPGKDGPRGPTGPIGPPGPAGQPGDKGEGGAPGLPGIAGPRGSPGERGETGPPGPAGFPGAPGQNGEPGGKGERGAPGEKGEGGPPGVAGPPGGSGPAGPPGPQGVKGERGSPGGPGAAGFPGARGLPGPPGSNGNPGPPGPSGSPGKDGPPGPAGNTGAPGSPGVSGPKGDAGQPGEKGSPGAQGPPGAPGPLGIAGITGARGLAGPPGMPGPRGSPGPQGVKGESGKPGANGLSGERGPPGPQGLPGLAGTAGEPGRDGNPGSDGLPGRDGSPGGKGDRGENGSPGAPGAPGHPGPPGPVGPAGKSGDRGESGPAGPAGAPGPAGSRGAPGPQGPRGDKGETGERGAAGIKGHRGFPGNPGAPGSPGPAGQQGAIGSPGPAGPRGPVGPSGPPGKDGTSGHPGPIGPPGPRGNRGERGSEGSPGHPGQPGPPGPPGAPGPCCGGVGAAAIAGIGGEKAGGFAPYYGDEPMDFKINTDEIMTSLKSVNGQIESLISPDGSRKNPARNCRDLKFCHPELKSGEYWVDPNQGCKLDAIKVFCNMETGETCISANPLNVPRKHWWTDSSAEKKHVWFGESMDGGFQFSYGNPELPEDVLDVHLAFLRLLSSRASQNITYHCKNSIAYMDQASGNVKKALKLMGSNEGEFKAEGNSKFTYTVLEDGCTKHTGEWSKTVFEYRTRKAVRLPIVDIAPYDIGGPDQEFGVDVGPVCFL

SEQ ID NO: 3288 - protein, 1163 aa, Homo Sapiens
MMSFVQKGSWLLLALLHPTIILAQQEAVEGGCSHLGQSYADRDVWKPEPCQICVCDSGSVLCDDIICDDQELDCPNPEIPFGECCAVCPQPPTAPTRPPNGQGPQGPKGDPGPPGIPGRNGDPGIPGQPGSPGSPGPPGICESCPTGPQNYSPQYDSYDVKSGVAVGGLAGYPGPAGPPGPPGPPGTSGHPGSPGSPGYQGPPGEPGQAGPSGPPGPPGAIGPSGPAGKDGESGRPGRPGERGLPGPPGIKGPAGIPGFPGMKGHRGFDGRNGEKGETGAPGLKGENGLPGENGAPGPMGPRGAPGERGRPGLPGAAGARGNDGARGSDGQPGPPGPPGTAGFPGSPGAKGEVGPAGSPGSNGAPGQRGEPGPQGHAGAQGPPGPPGINGSPGGKGEMGPAGIPGAPGLMGARGPPGPAGANGAPGLRGGAGEPGKNGAKGEPGPRGERGEAGIPGVPGAKGEDGKDGSPGEPGANGLPGAAGERGAPGFRGPAGPNGIPGEKGPAGERGAPGPAGPRGAAGEPGRDGVPGGPGMRGMPGSPGGPGSDGKPGPPGSQGESGRPGPPGPSGPRGQPGVMGFPGPKGNDGAPGKNGERGGPGGPGPQGPPGKNGETGPQGPPGPTGPGGDKGDTGPPGPQGLQGLPGTGGPPGENGKPGEPGPKGDAGAPGAPGGKGDAGAPGERGPPGLAGAPGLRGGAGPPGPEGGKGAAGPPGPPGAAGTPGLQGMPGERGGLGSPGPKGDKGEPGGPGADGVPGKDGPRGPTGPIGPPGPAGQPGDKGEGGAPGLPGIAGPRGSPGERGETGPPGPAGFPGAPGQNGEPGGKGERGAPGEKGEGGPPGVAGPPGKDGTSGHPGPIGPPGPRGNRGERGSEGSPGHPGQPGPPGPPGAPGPCCGGVGAAAIAGIGGEKAGGFAPYYGDEPMDFKINTDEIMTSLKSVNGQIESLISPDGSRKNPARNCRDLKFCHPELKSGEYWVDPNQGCKLDAIKVFCNMETGETCISANPLNVPRKHWWTDSSAEKKHVWFGESMDGGFQFSYGNPELPEDVLDVHLAFLRLLSSRASQNITYHCKNSIAYMDQASGNVKKALKLMGSNEGEFKAEGNSKFTYTVLEDGCTKHTGEWSKTVFEYRTRKAVRLPIVDIAPYDIGGPDQEFGVDVGPVCFL

SEQ ID NO: 3289 - protein, 90 aa, Homo Sapiens
  misc_feature (1)..(1): Xaa can be any naturally occurring amino acid
XRGAPGERGRPGLPGAAGARGNDGARGSDGQPGPPGPPGTAGFPGSPGAKGPPGINGSPGGKGEMGPAGIPGAPGLMGARGPPGPAGANG

SEQ ID NO: 3290 - protein, 1669 aa, Homo Sapiens
MGPRLSVWLLLLPAALLLHEEHSRAAAKGGCAGSGCGKCDCHGVKGQKGERGLPGLQGVIGFPGMQGPEGPQGPPGQKGDTGEPGLPGTKGTRGPPGASGYPGNPGLPGIPGQDGPPGPPGIPGCNGTKGERGPLGPPGLPGFAGNPGPPGLPGMKGDPGEILGHVPGMLLKGERGFPGIPGTPGPPGLPGLQGPVGPPGFTGPPGPPGPPGPPGEKGQMGLSFQGPKGDKGDQGVSGPPGVPGQAQVQEKGDFATKGEKGQKGEPGFQGMPGVGEKGEPGKPGPRGKPGKDGDKGEKGSPGFPGEPGYPGLIGRQGPQGEKGEAGPPGPPGIVIGTGPLGEKGERGYPGTPGPRGEPGPKGFPGLPGQPGPPGLPVPGQAGAPGFPGERGEKGDRGFPGTSLPGPSGRDGLPGPPGSPGPPGQPGYTNGIVECQPGPPGDQGPPGIPGQPGFIGEIGEKGQKGESCLICDIDGYRGPPGPQGPPGEIGFPGQPGAKGDRGLPGRDGVAGVPGPQGTPGLIGQPGAKGEPGEFYFDLRLKGDKGDPGFPGQPGMPGRAGSPGRDGHPGLPGPKGSPGSVGLKGERGPPGGVGFPGSRGDTGPPGPPGYGPAGPIGDKGQAGFPGGPGSPGLPGPKGEPGKIVPLPGPPGAEGLPGSPGFPGPQGDRGFPGTPGRPGLPGEKGAVGQPGIGFPGPPGPKGVDGLPGDMGPPGTPGRPGFNGLPGNPGVQGQKGEPGVGLPGLKGLPGLPGIPGTPGEKGSIGVPGVPGEHGAIGPPGLQGIRGEPGPPGLPGSVGSPGVPGIGPPGARGPPGGQGPPGLSGPPGIKGEKGFPGFPGLDMPGPKGDKGAQGLPGITGQSGLPGLPGQQGAPGIPGFPGSKGEMGVMGTPGQPGSPGPVGAPGLPGEKGDHGFPGSSGPRGDPGLKGDKGDVGLPGKPGSMDKVDMGSMKGQKGDQGEKGQIGPIGEKGSRGDPGTPGVPGKDGQAGQPGQPGPKGDPGISGTPGAPGLPGPKGSVGGMGLPGTPGEKGVPGIPGPQGSPGLPGDKGAKGEKGQAGPPGIGIPGLRGEKGDQGIAGFPGSPGEKGEKGSIGIPGMPGSPGLKGSPGSVGYPGSPGLPGEKGDKGLPGLDGIPGVKGEAGLPGTPGPTGPAGQKGEPGSDGIPGSAGEKGEPGLPGRGFPGFPGAKGDKGSKGEVGFPGLAGSPGIPGSKGEQGFMGPPGPQGQPGLPGSPGHATEGPKGDRGPQGQPGLPGLPGPMGPPGLPGIDGVKGDKGNPGWPGAPGVPGPKGDPGFQGMPGIGGSPGITGSKGDMGPPGVPGFQGPKGLPGLQGIKGDQGDQGVPGAKGLPGPPGPPGPYDIIKGEPGLPGPEGPPGLKGLQGLPGPKGQQGVTGLVGIPGPPGIPGFDGAPGQKGEMGPAGPTGPRGFPGPPGPDGLPGSMGPPGTPSVDHGFLVTRHSQTIDDPQCPSGTKILYHGYSLLYVQGNERAHGQDLGTAGSCLRKFSTMPFLFCNINNVCNFASRNDYSYWLSTPEPMPMSMAPITGENIRPFISRCAVCEAPAMVMAVHSQTIQIPPCPSGWSSLWIGYSFVMHTSAGAEGSGQALASPGSCLEEFRSAPFIECHGRGTCNYYANAYSFWLATIERSEMFKKPTPSTLKAGELRTHVSRCQVCMRRT

SEQ ID NO: 3291 - protein, 519 aa, Homo Sapiens
MGPRLSVWLLLLPAALLLHEEHSRAAAKGGCAGSGCGKCDCHGVKGQKGERGLPGLQGVIGFPGMQGPEGPQGPPGQKGDTGEPGLPGTKGTRGPPGASGYPGNPGLPGIPGQDGPPGPPGIPGCNGTKGERGPLGPPGLPGFAGNPGPPGLPGMKGDPGEILGHVPGMLLKGERGFPGIPGTPGPPGLPGLQGPVGPPGFTGPPGPPGPPGPPGEKGQMGLSFQGPKGDKGDQGVSGPPGVPGQAQVQEKGDFATKGEKGQKGEPGFQGMPGVGEKGEPGKPGPRGKPGKDGDKGEKGSPGFPGEPGYPGLIGRQGPQGEKGEAGPPGPPGIVIGTGPLGEKGERGYPGTPGPRGEPGPKGFPGLPGQPGPPGLPVPGQAGAPGFPGERGEKGDRGFPGTSLPGPSGRDGLPGPPGSPGPPGQPGYTNGIVECQPGPPGDQGPPGIPGQPGFIGEIGEKGQKGESCLICDIDGYRGPPGPQGPPGEIGFPGQPGAKGDRGLPGRDGVAGVPLLFQIHK

SEQ ID NO: 3292 - protein, 223 aa, Homo Sapiens
MQGPEGPQGPPGQKGDTGEPGLPGTKGTRGPPGASGYPGNPGLPGIPGQDGPPGPPGIPGCNGTKGERGPLGPPGLPGFAGNPGPPGLPGMKGDPGEILGHVPGMLLKGERGFPGIPGTPGPPGLPGLQGPVGPPGFTGPPGPPGPPGPPGEKGQMGLSFQGPKGDKGDQGVSGPPGVPGQAQVQEKGDFATKGEKGQKGEPGFQGMPGVGEKGEPGKPGPRV

SEQ ID NO: 3293 - protein, 105 aa, Homo Sapiens
MGRDQRAVAGPALRRWLLLGTVTVGFLAQSVLAGVKKFDVPCGGRDCSGGCQCYPEKGGRGQPGPVGPQGYNGPPGLQGFPGLQGRKGDKGERGAPGVTGPKGDV

SEQ ID NO: 3294 - protein, 1712 aa, Homo Sapiens
MGRDQRAVAGPALRRWLLLGTVTVGFLAQSVLAGVKKFDVPCGGRDCSGGCQCYPEKGGRGQPGPVGPQGYNGPPGLQGFPGLQGRKGDKGERGAPGVTGPKGDVGARGVSGFPGADGIPGHPGQGGPRGRPGYDGCNGTQGDSGPQGPPGSEGFTGPPGPQGPKGQKGEPYALPKEERDRYRGEPGEPGLVGFQGPPGRPGHVGQMGPVGAPGRPGPPGPPGPKGQQGNRGLGFYGVKGEKGDVGQPGPNGIPSDTLHPIIAPTGVTFHPDQYKGEKGSEGEPGIRGISLKGEEGIMGFPGLRGYPGLSGEKGSPGQKGSRGLDGYQGPDGPRGPKGEAGDPGPPGLPAYSPHPSLAKGARGDPGFPGAQGEPGSQGEPGDPGLPGPPGLSIGDGDQRRGLPGEMGPKGFIGDPGIPALYGGPPGPDGKRGPPGPPGLPGPPGPDGFLFGLKGAKGRAGFPGLPGSPGARGPKGWKGDAGECRCTEGDEAIKGLPGLPGPKGFAGINGEPGRKGDRGDPGQHGLPGFPGLKGVPGNIGAPGPKGAKGDSRTITTKGERGQPGVPGVPGMKGDDGSPGRDGLDGFPGLPGPPGDGIKGPPGDPGYPGIPGTKGTPGEMGPPGLGLPGLKGQRGFPGDAGLPGPPGFLGPPGPAGTPGQIDCDTDVKRAVGGDRQEAIQPGCIGGPKGLPGLPGPPGPTGAKGLRGIPGFAGADGGPGPRGLPGDAGREGFPGPPGFIGPRGSKGAVGLPGPDGSPGPIGLPGPDGPPGERGLPGEVLGAQPGPRGDAGVPGQPGLKGLPGDRGPPGFRGSQGMPGMPGLKGQPGLPGPSGQPGLYGPPGLHGFPGAPGQEGPLGLPGIPGREGLPGDRGDPGDTGAPGPVGMKGLSGDRGDAGFTGEQGHPGSPGFKGIDGMPGTPGLKGDRGSPGMDGFQGMPGLKGRPGFPGSKGEAGFFGIPGLKGLAGEPGFKGSRGDPGPPGPPPVILPGMKDIKGEKGDEGPMGLKGYLGAKGIQGMPGIPGLSGIPGLPGRPGHIKGVKGDIGVPGIPGLPGFPGVAGPPGITGFPGFIGSRGDKGAPGRAGLYGEIGATGDFGDIGDTINLPGRPGLKGERGTTGIPGLKGFFGEKGTEGDIGFPGITGVTGVQGPPGLKGQTGFPGLTGPPGSQGELGRIGLPGGKGDDGWPGAPGLPGFPGLRGIRGLHGLPGTKGFPGSPGSDIHGDPGFPGPPGERGDPGEANTLPGPVGVPGQKGDQGAPGERGPPGSPGLQGFPGITPPSNISGAPGDKGAPGIFGLKGYRGPPGPPGSAALPGSKGDTGNPGAPGTPGTKGWAGDSGPQGRPGVFGLPGEKGPRGEQGFMGNTGPTGAVGDRGPKGPKGDPGFPGAPGTVGAPGIAGIPQKIAVQPGTVGPQGRRGPPGAPGEMGPQGPPGEPGFRGAPGKAGPQGRGGVSAVPGFRGDEGPIGHQGPIGQEGAPGRPGSPGLPGMPGRSVSIGYLLVKHSQTDQEPMCPVGMNKLWSGYSLLYFEGQEKAHNQDLGLAGSCLARFSTMPFLYCNPGDVCYYASRNDKSYWLSTTAPLPMMPVAEDEIKPYISRCSVCEAPAIAIAVHSQDVSIPHCPAGWRSLWIGYSFLMHTAAGDEGGGQSLVSPGSCLEDFRATPFIECNGGRGTCHYYANKYSFWLTTIPEQSFQGSPSADTLKAGLIRTHISRCQVCMKNL

SEQ ID NO: 3295 - protein, 42 aa, Homo Sapiens
  misc_feature (1)..(1): Xaa can be any naturally occurring amino acid
XGDPGQHGLPGFPGLKVRSNFIMKLARHSEASPGVPFLPFIS

SEQ ID NO: 3296 - protein, 199 aa, Homo Sapiens
ATWTTRGFVFTRHSQTTAIPSCPEGTVPLYSGFSFLFVQGNQRAHGQDLGTLGSCLQRFTTMPFLFCNVNDVCNFASRNDYSYWLSTPALMPMNMAPITGRALEPYISRCTVCEGPAIAIAVHSQTTDIPPCPHGWISLWKGFSFIMKAYSINCESWGIRKNNKSLSGVHEEKTLKLKKTAELLFFILKNKVMTEHAVI

SEQ ID NO: 3297 - protein, 156 aa, Homo Sapiens
GNPGEKGNRGVPGMPGLKGLKGLPGPAGPPGPRGDLGSTGNPGEPGLRGIPGSMGNMGMPGSKGKRGTLGFPGRAGRPGLPGIHGLQGDKGEPGYSEGTRPGPPGPTGDPGLPGDMGKKGEMGQPGPPGHLGPAGPEGAPGSPGSPGLPVPAAPSL

SEQ ID NO: 3298 - protein, 1670 aa, Homo Sapiens
MSARTAPRPQVLLLPLLLVLLAAAPAASKGCVCKDKGQCFCDGAKGEKGEKGFPGPPGSPGQKGFTGPEGLPGPQGPKGFPGLPGLTGSKGVRGISGLPGFSGSPGLPGTPGNTGPYGLVGVPGCSGSKGEQGFPGLPGTLGYPGIPGAAGLKGQKGAPAKEEDIELDAKGDPGLPGAPGPQGLPGPPGFPGPVGPPGPPGFFGFPGAMGPRGPKGHMGERVIGHKGERGVKGLTGPPGPPGTVIVTLTGPDNRTDLKGEKGDKGAMGEPGPPGPSGLPGESYGSEKGAPGDPGLQGKPGKDGVPGFPGSEGVKGNRGFPGLMGEDGIKGQKGDIGPPGFRGPTEYYDTYQEKGDEGTPGPPGPRGARGPQGPSGPPGVPGSPGSSRPGLRGAPGWPGLKGSKGERGRPGKDAMGTPGSPGCAGSPGLPGSPGPPGPPGDIVFRKGPPGDHGLPGYLGSPGIPGVDGPKGEPGLLCTQCPYIPGPPGLPGLPGLHGVKGIPGRQGAAGLKGSPGSPGNTGLPGFPGFPGAQGDPGLKGEKGETLQPEGQVGVPGDPGLRGQPGRKGLDGIPGTPGVKGLPGPKGELALSGEKGDQGPPGDPGSPGSPGPAGPAGPPGYGPQGEPGLQGTQGVPGAPGPPGEAGPRGELSVSTPVPGPPGPPGPPGHPGPQGPPGIPGSLGKCGDPGLPGPDGEPGIPGIGFPGPPGPKGDQGFPGTKGSLGCPGKMGEPGLPGKPGLPGAKGEPAVAMPGGPGTPGFPGERGNSGEHGEIGLPGLPGLPGTPGNEGLDGPRGDPGQPGPPGEQGPPGRCIEGPRGAQGLPGLNGLKGQQGRRGKTGPKGDPGIPGLDRSGFPGETGSPGIPGHQGEMGPLGQRGYPGNPGILGPPGEDGVIGMMGFPGAIGPPGPPGNPGTPGQRGSPGIPGVKGQRGTPGAKGEQGDKGNPGPSEISHVIGDKGEPGLKGFAGNPGEKGNRGVPGMPGLKGLKGLPGPAGPPGPRGDLGSTGNPGEPGLRGIPGSMGNMGMPGSKGKRGTLGFPGRAGRPGLPGIHGLQGDKGEPGYSEGTRPGPPGPTGDPGLPGDMGKKGEMGQPGPPGHLGPAGPEGAPGSPGSPGLPGKPGPHGDLGFKGIKGLLGPPGIRGPPGLPGFPGSPGPMGIRGDQGRDGIPGPAGEKGETGLLRAPPGPRGNPGAQGAKGDRGAPGFPGLPGRKGAMGDAGPRGPTGIEGFPGPPGLPGAIIPGQTGNRGPPGSRGSPGAPGPPGPPGSHVIGIKGDKGSMGHPGPKGPPGTAGDMGPPGRLGAPGTPGLPGPRGDPGFQGFPGVKGEKGNPGFLGSIGPPGPIGPKGPPGVRGDPGTLKIISLPGSPGPPGTPGEPGMQGEPGPPGPPGNLGPCGPRGKPGKDGKPGTPGPAGEKGNKGSKGEPGPAGSDGLPGLKGKRGDSGSPATWTTRGFVFTRHSQTTAIPSCPEGTVPLYSGFSFLFVQGNQRAHGQDLGTLGSCLQRFTTMPFLFCNVNDVCNFASRNDYSYWLSTPALMPMNMAPITGRALEPYISRCTVCEGPAIAIAVHSQTTDIPPCPHGWISLWKGFSFIMFTSAGSEGTGQALASPGSCLEEFRASPFLECHGRGTCNYYSNSYSFWLASLNPERMFRKPIPSTVKAGELEKIISRCQVCMKKRH

SEQ ID NO: 3299 - protein, 155 aa, Homo Sapiens
VRGDPGTLKIISLPGSPGPPGTPGEPGMQGEPGPPGPPGNLGPCGPRGKPGKDGKPGTPGPAGEKGNKGSKGEPGPAGSDGLPGLKGKRGDSGSPATWTTRGFVFTRHSQTTAIPSCPEGTVPLYSGFSFLFVQGNQRAHGQDLDALFVKVLRSP

SEQ ID NO: 3300 - protein, 1690 aa, Homo Sapiens
MWSLHIVLMRCSFRLTKSLATGPWSLILILFSVQYVYGSGKKYIGPCGGRDCSVCHCVPEKGSRGPPGPPGPQGPIGPLGAPGPIGLSGEKGMRGDRGPPGAAGDKGDKGPTGVPGFPGLDGIPGHPGPPGPRGKPGMSGHNGSRGDPGFPGGRGALGPGGPLGHPGEKGEKGNSVFILGAVKGIQGDRGDPGLPGLPGSWGAGGPAGPTGYPGEPGLVGPPGQPGRPGLKGNPGVGVKGQMGDPGEVGQQGSPGPTLLVEPPDFCLYKGEKGIKGIPGMVGLPGPPGRKGESGIGAKGEKGIPGFPGPRGDPGSYGSPGFPGLKGELGLVGDPGLFGLIGPKGDPGNRGHPGPPGVLVTPPLPLKGPPGDPGFPGRYGETGDVGPPGPPGLLGRPGEACAGMIGPPGPQGFPGLPGLPGEAGIPGRPDSAPGKPGKPGSPGLPGAPGLQGLPGSSVIYCSVGNPGPQGIKGKVGPPGGRGPKGEKGNEGLCACEPGPMGPPGPPGLPGRQGSKGDLGLPGWLGTKGDPGPPGAEGPPGLPGKHGASGPPGNKGAKGDMVVSRVKGHKGERGPDGPPGFPGQPGSHGRDGHAGEKGDPGPPGDHEDATPGGKGFPGPLGPPGKAGPVGPPGLGFPGPPGERGHPGVPGHPGVRGPDGLKGQKGDTISCNVTYPGRHGPPGFDGPPGPKGFPGPQGAPGLSGSDGHKGRPGTPGTAEIPGPPGFRGDMGDPGFGGEKGSSPVGPPGPPGSPGVNGQKGIPGDPAFGHLGPPGKRGLSGVPGIKGPRGDPGCPGAEGPAGIPGFLGLKGPKGREGHAGFPGVPGPPGHSCERGAPGIPGQPGLPGYPGSPGAPGGKGQPGDVGPPGPAGMKGLPGLPGRPGAHGPPGLPGIPGPFGDDGLPGPPGPKGPRGLPGFPGFPGERGKPGAEGCPGAKGEPGEKGMSGLPGDRGLRGAKGAIGPPGDEGEMAIISQKGTPGEPGPPGDDGFPGERGDKGTPGMQGRRGEPGRYGPPGFHRGEPGEKGQPGPPGPPGPPGSTGLRGFIGFPGLPGDQGEPGSPGPPGFSGIDGARGPKGNKGDPASHFGPPGPKGEPGSPGCPGHFGASGEQGLPGIQGPRGSPGRPGPPGSSGPPGCPGDHGMPGLRGQPGEMGDPGPRGLQGDPGIPGPPGIKGPSGSPGLNGLHGLKGQKGTKGASGLHDVGPPGPVGIPGLKGERGDPGSPGISPPGPRGKKGPPGPPGSSGPPGPAGATGRAPKDIPDPGPPGDQGPPGPDGPRGAPGPPGLPGSVDLLRGEPGDCGLPGPPGPPGPPGPPGYKGFPGCDGKDGQKGPVGFPGPQGPHGFPGPPGEKGLPGPPGRKGPTGLPGPRGEPGPPADVDDCPRIPGLPGAPGMRGPEGAMGLPGMRGPSGPGCKGEPGLDGRRGVDGVPGSPGPPGRKGDTGEDGYPGGPGPPGPIGDPGPKGFGPGYLGGFLLVLHSQTDQEPTCPLGMPRLWTGYSLLYLEGQEKAHNQDLGLAGSCLPVFSTLPFAYCNIHQVCHYAQRNDRSYWLASAAPLPMMPLSEEAIRPYVSRCAVCEAPAQAVAVHSQDQSIPPCPQTWRSLWIGYSFLMHTGAGDQGGGQALMSPGSCLEDFRAAPFLECQGRQGTCHFFANKYSFWLTTVKADLQFSSAPAPDTLKESQAQRQKISRCQVCVKYS

SEQ ID NO: 3301 - protein, 296 aa, Homo Sapiens
MWSLHIVLMRCSFRLTKSLATGPWSLILILFSVQYVYGSGKKYIGPCGGRDCSVCHCVPEKGSRGPPGPPGPQGPIGPLGAPGPIGLSGEKGMRGDRGPPGAAGDKGDKGPTGVPGFPGLDGIPGHPGPPGPRGKPGMSGHNGSRGDPGFPGGRGALGPGGPLGHPGEKGEKGNSVFILGAVKGIQGDRGDPGLPGLPGSWGAGGPAGPTGYPGEPGLVGPPGQPGRPGLKGNPGVGVKGQMGDPGEVGQQGSPGPTLLVEPPDFCLYKGEKGIKGIPGMVGLPGPPGRKGESGIG

SEQ ID NO: 3302 - protein, 73 aa, Homo Sapiens
FASRNDYSYWLSTPEPMPMSMQPLKGQSIQPFISRCAVCEAPAVVIAVHSQTIQIPHCPQGWDSLWIGYSFMM

SEQ ID NO: 3303 - protein, 695 aa, Homo Sapiens
MGPPGPPGFPGERGQKGDEGPPGISIPGPPGLDGQPGAPGLPGPPGPAGPHIPPSDEICEPGPPGPPGSPGDKGLQGEQGVKGDKGDTCFNCIGTGISGPPGQPGLPGLPGPPGSLGFPGQKGEKGQAGATGPKGLPGIPGAPGAPGFPGSKGEPGDILTFPGMKGDKGELGSPGAPGLPGLPGTPGQDGLPGLPGPKGEPGGITFKGERGPPGNPGLPGLPGNIGPMGPPGFGPPGPVGEKGIQGVAGNPGQPGIPGPKGDPGQTITQPGKPGLPGNPGRDGDVGLPGDPGLPGQPGLPGIPGSKGEPGIPGIGLPGPPGPKGFPGIPGPPGAPGTPGRIGLEGPPGPPGFPGPKGEPGFALPGPPGPPGLPGFKGALGPKGDRGFPGPPGPPGRTGLDGLPGPKGDVGPNGQPGPMGPPGLPGIGVQGPPGPPGIPGPIGQPGLHGIPGEKGDPGPPGLDVPGPPGERGSPGIPGAPGPIGPPGSPGLPGKAGASGFPGTKGEMGMMGPPGPPGPLGIPGRSGVPGLKGDDGLQGQPGLPGPTGEKGSKGEPGLPGPPGPMDPNLLGSKGEKGEPGLPGIPGVSGPKGYQGLPGDPGQPGLSGQPGLPGPPGPKGNPGLPGQPGLIGPPGLKGTIGDMGFPGPQGVEGPPGPSGVPGQPGSPGLPGQKGDKGDPGISSIGLPGLPGPKVIFGI

SEQ ID NO: 3304 - protein, 1691 aa, Homo Sapiens
MKLRGVSLAAGLFLLALSLWGQPAEAAACYGCSPGSKCDCSGIKGEKGERGFPGLEGHPGLPGFPGPEGPPGPRGQKGDDGIPGPPGPKGIRGPPGLPGFPGTPGLPGMPGHDGAPGPQGIPGCNGTKGERGFPGSPGFPGLQGPPGPPGIPGMKGEPGSIIMSSLPGPKGNPGYPGPPGIQGLPGPTGIPGPIGPPGPPGLMGPPGPPGLPGPKGNMGLNFQGPKGEKGEQGLQGPPGPPGQISEQKRPIDVEFQKGDQGLPGDRGPPGPPGIRGPPGPPGGEKGEKGEQGEPGKRGKPGKDGENGQPGIPGLPGDPGYPGEPGRDGEKGQKGDTGPPGPPGLVIPRPGTGITIGEKGNIGLPGLPGEKGERGFPGIQGPPGLPGPPGAAVMGPPGPPGFPGERGQKGDEGPPGISIPGPPGLDGQPGAPGLPGPPGPAGPHIPPSDEICEPGPPGPPGSPGDKGLQGEQGVKGDKGDTCFNCIGTGISGPPGQPGLPGLPGPPGSLGFPGQKGEKGQAGATGPKGLPGIPGAPGAPGFPGSKGEPGDILTFPGMKGDKGELGSPGAPGLPGLPGTPGQDGLPGLPGPKGEPGGITFKGERGPPGNPGLPGLPGNIGPMGPPGFGPPGPVGEKGIQGVAGNPGQPGIPGPKGDPGQTITQPGKPGLPGNPGRDGDVGLPGDPGLPGQPGLPGIPGSKGEPGIPGIGLPGPPGPKGFPGIPGPPGAPGTPGRIGLEGPPGPPGFPGPKGEPGFALPGPPGPPGLPGFKGALGPKGDRGFPGPPGPPGRTGLDGLPGPKGDVGPNGQPGPMGPPGLPGIGVQGPPGPPGIPGPIGQPGLHGIPGEKGDPGPPGLDVPGPPGERGSPGIPGAPGPIGPPGSPGLPGKAGASGFPGTKGEMGMMGPPGPPGPLGIPGRSGVPGLKGDDGLQGQPGLPGPTGEKGSKGEPGLPGPPGPMDPNLLGSKGEKGEPGLPGIPGVSGPKGYQGLPGDPGQPGLSGQPGLPGPPGPKGNPGLPGQPGLIGPPGLKGTIGDMGFPGPQGVEGPPGPSGVPGQPGSPGLPGQKGDKGDPGISSIGLPGLPGPKGEPGLPGYPGNPGIKGSVGDPGLPGLPGTPGAKGQPGLPGFPGTPGPPGPKGISGPPGNPGLPGEPGPVGGGGHPGQPGPPGEKGKPGQDGIPGPAGQKGEPGQPGFGNPGPPGLPGLSGQKGDGGLPGIPGNPGLPGPKGEPGFHGFPGVQGPPGPPGSPGPALEGPKGNPGPQGPPGRPGPTGFQGLPGPEGPPGLPGNGGIKGEKGNPGQPGLPGLPGLKGDQGPPGLQGNPGRPGLNGMKGDPGLPGVPGFPGMKGPSGVPGSAGPEGEPGLIGPPGPPGLPGPSGQSIIIKGDAGPPGIPGQPGLKGLPGPQGPQGLPGPTGPPGDPGRNGLPGFDGAGGRKGDPGLPGQPGTRGLDGPPGPDGLQGPPGPPGTSSVAHGFLITRHSQTTDAPQCPQGTLQVYEGFSLLYVQGNKRAHGQDLGTAGSCLRRFSTMPFMFCNINNVCNFASRNDYSYWLSTPEPMPMSMQPLKGQSIQPFISRCAVCEAPAVVIAVHSQTIQIPHCPQGWDSLWIGYSFMMHTSAGAEGSGQALASPGSCLEEFRSAPFIECHGRGTCNYYANSYSFWLATVDVSDMFSKPQSETLKAGDLRTRISRCQVCMKRT

SEQ ID NO: 3305 - protein, 1685 aa, Homo Sapiens
MKLRGVSLAAGLFLLALSLWGQPAEAAACYGCSPGSKCDCSGIKGEKGERGFPGLEGHPGLPGFPGPEGPPGPRGQKGDDGIPGPPGPKGIRGPPGLPGFPGTPGLPGMPGHDGAPGPQGIPGCNGTKGERGFPGSPGFPGLQGPPGPPGIPGMKGEPGSIIMSSLPGPKGNPGYPGPPGIQGLPGPTGIPGPIGPPGPPGLMGPPGPPGLPGPKGNMGLNFQGPKGEKGEQGLQGPPGPPGQISEQKRPIDVEFQKGDQGLPGDRGPPGPPGIRGPPGPPGGEKGEKGEQGEPGKRGKPGKDGENGQPGIPGLPGDPGYPGEPGRDGEKGQKGDTGPPGPPGLVIPRPGTGITIGEKGNIGLPGLPGEKGERGFPGIQGPPGLPGPPGAAVMGPPGPPGFPGERGQKGDEGPPGISIPGPPGLDGQPGAPGLPGPPGPAGPHIPPSDEICEPGPPGPPGSPGDKGLQGEQGVKGDKGDTCFNCIGTGISGPPGQPGLPGLPGPPGSLGFPGQKGEKGQAGATGPKGLPGIPGAPGAPGFPGSKGEPGDILTFPGMKGDKGELGSPGAPGLPGLPGTPGQDGLPGLPGPKGEPGGITFKGERGPPGNPGLPGLPGNIGPMGPPGFGPPGPVGEKGIQGVAGNPGQPGIPGPKGDPGQTITQPGKPGLPGNPGRDGDVGLPGDPGLPGQPGLPGIPGSKGEPGIPGIGLPGPPGPKGFPGIPGPPGAPGTPGRIGLEGPPGPPGFPGPKGEPGFALPGPPGPPGLPGFKGALGPKGDRGFPGPPGPPGRTGLDGLPGPKGDVGPNGQPGPMGPPGLPGIGVQGPPGPPGIPGPIGQPGLHGIPGEKGDPGPPGLDVPGPPGERGSPGIPGAPGPIGPPGSPGLPGKAGASGFPGTKGEMGMMGPPGPPGPLGIPGRSGVPGLKGDDGLQGQPGLPGPTGEKGSKGEPGLPGPPGPMDPNLLGSKGEKGEPGLPGIPGVSGPKGYQGLPGDPGQPGLSGQPGLPGPPGPKGNPGLPGQPGLIGPPGLKGTIGDMGFPGPQGVEGPPGPSGVPGQPGSPGLPGQKGDKGDPGISSIGLPGLPGPKGEPGLPGYPGNPGIKGSVGDPGLPGLPGTPGAKGQPGLPGFPGTPGPPGPKGISGPPGNPGLPGEPGPVGGGGHPGQPGPPGEKGKPGQDGIPGPAGQKGEPGQPGFGNPGPPGLPGLSGQKGDGGLPGIPGNPGLPGPKGEPGFHGFPGVQGPPGPPGSPGPALEGPKGNPGPQGPPGRPGLPGPEGPPGLPGNGGIKGEKGNPGQPGLPGLPGLKGDQGPPGLQGNPGRPGLNGMKGDPGLPGVPGFPGMKGPSGVPGSAGPEGEPGLIGPPGPPGLPGPSGQSIIIKGDAGPPGIPGQPGLKGLPGPQGPQGLPGPTGPPGDPGRNGLPGFDGAGGRKGDPGLPGQPGTRGLDGPPGPDGLQGPPGPPGTSSVAHGFLITRHSQTTDAPQCPQGTLQVYEGFSLLYVQGNKRAHGQDLGTAGSCLRRFSTMPFMFCNINNVCNFASRNDYSYWLSTPEPMPMSMQPLKGQSIQPFISRCAVCEAPAVVIAVHSQTIQIPHCPQGWDSLWIGYSFMMHTSAGAEGSGQALASPGSCLEEFRSAPFIECHGRGTCNYYANSYSFWLATVDVSDMFSKPQSETLKAGDLRTRISRCQVCMKRT

SEQ ID NO: 3306 - protein, 40 aa, Homo Sapiens
MKLRGVSLAAGLFLLALSLWGQPAEAAEETLFATPVTQAF

SEQ ID NO: 3307 - protein, 174 aa, Homo Sapiens
  misc_feature (1)..(1): Xaa can be any naturally occurring amino acid
XDDGLQGQPGLPGPTGEKGSKGEPGLPGPPGPMDPNLLGSKGEKGEPGLPGIPGVSGPKGYQGLPGDPGQPGLSGQPGLPGPPGPKGNPGLPGQPGLIGPPGLKGTIGDMGFPGPQGVEGPPGPSGVPGQPGSPGLPGQKGDKGDPGISSIGLPGLPGPKMIRRYVLGFVASPK

SEQ ID NO: 3308 - protein, 115 aa, Homo Sapiens
  misc_feature (1)..(1): Xaa can be any naturally occurring amino acid
XGLPGPTGPPGDPGRNGLPGFDGAGGRKGDPGLPGQPGTRGLDGPPGPDGLQGPPGPPGTSSVAHGFLITRHSQTTDAPQCPQGTLQVYEGFSLLYVQGNKRAHGQDLVNLSQKR

SEQ ID NO: 3309 - protein, 1690 aa, Homo Sapiens
MHPGLWLLLVTLCLTEELAAAGEKSYGKPCGGQDCSGSCQCFPEKGARGRPGPIGIQGPTGPQGFTGSTGLSGLKGERGFPGLLGPYGPKGDKGPMGVPGFLGINGIPGHPGQPGPRGPPGLDGCNGTQGAVGFPGPDGYPGLLGPPGLPGQKGSKGDPVLAPGSFKGMKGDPGLPGLDGITGPQGAPGFPGAVGPAGPPGLQGPPGPPGPLGPDGNMGLGFQGEKGVKGDVGLPGPAGPPPSTGELEFMGFPKGKKGSKGEPGPKGFPGISGPPGFPGLGTTGEKGEKGEKGIPGLPGPRGPMGSEGVQGPPGQQGKKGTLGFPGLNGFQGIEGQKGDIGLPGPDVFIDIDGAVISGNPGDPGVPGLPGLKGDEGIQGLRGPSGVPGLPALSGVPGALGPQGFPGLKGDQGNPGRTTIGAAGLPGRDGLPGPPGPPGPPSPEFETETLHNKESGFPGLRGEQGPKGNLGLKGIKGDSGFCACDGGVPNTGPPGEPGPPGPWGLIGLPGLKGARGDRGSGGAQGPAGAPGLVGPLGPSGPKGKKGEPILSTIQGMPGDRGDSGSQGFRGVIGEPGKDGVPGLPGLPGLPGDGGQGFPGEKGLPGLPGEKGHPGPPGLPGNGLPGLPGPRGLPGDKGKDGLPGQQGLPGSKGITLPCIIPGSYGPSGFPGTPGFPGPKGSRGLPGTPGQPGSSGSKGEPGSPGLVHLPELPGFPGPRGEKGLPGFPGLPGKDGLPGMIGSPGLPGSKGATGDIFGAENGAPGEQGLQGLTGHKGFLGDSGLPGLKGVHGKPGLLGPKGERGSPGTPGQVGQPGTPGSSGPYGIKGKSGLPGAPGFPGISGHPGKKGTRGKKGPPGSIVKKGLPGLKGLPGNPGLVGLKGSPGSPGVAGLPALSGPKGEKGSVGFVGFPGIPGLPGIPGTRGLKGIPGSTGKMGPSGRAGTPGEKGDRGNPGPVGIPSPRRPMSNLWLKGDKGSQGSAGSNGFPGPRGDKGEAGRPGPPGLPGAPGLPGIIKGVSGKPGPPGFMGIRGLPGLKGSSGITGFPGMPGESGSQGIRGSPGLPGASGLPGLKGDNGQTVEISGSPGPKGQPGESGFKGTKGRDGLIGNIGFPGNKGEDGKVGVSGDVGLPGAPGFPGVAGMRGEPGLPGSSGHQGAIGPLGSPGLIGPKGFPGFPGLHGLNGLPGTKGTHGTPGPSITGVPGPAGLPGPKGEKGYPGIGIGAPGKPGLRGQKGDRGFPGLQGPAGLPGAPGISLPSLIAGQPGDPGRPGLDGERGRPGPAGPPGPPGPSSNQGDTGDPGFPGIPGPKGPKGDQGIPGFSGLPGELGLKGMRGEPGFMGTPGKVGPPGDPGFPGMKGKAGPRGSSGLQGDPGQTPTAEAVQVPPGPLGLPGIDGIPGLTGDPGAQGPVGLQGSKGLPGIPGKDGPSGLPGPPGALGDPGLPGLQGPPGFEGAPGQQGPFGMPGMPGQSMRVGYTLVKHSQSEQVPPCPIGMSQLWVGYSLLFVEGQEKAHNQDLGFAGSCLPRFSTMPFIYCNINEVCHYARRNDKSYWLSTTAPIPMMPVSQTQIPQYISRCSVCEAPSQAIAVHSQDITIPQCPLGWRSLWIGYSFLMHTAAGAEGGGQSLVSPGSCLEDFRATPFIECSGARGTCHYFANKYSFWLTTVEERQQFGELPVSETLKAGQLHTRVSRCQVCMKSL

SEQ ID NO: 3310 - protein, 1707 aa, Homo Sapiens
MHPGLWLLLVTLCLTEELAAAGEKSYGKPCGGQDCSGSCQCFPEKGARGRPGPIGIQGPTGPQGFTGSTGLSGLKGERGFPGLLGPYGPKGDKGPMGVPGFLGINGIPGHPGQPGPRGPPGLDGCNGTQGAVGFPGPDGYPGLLGPPGLPGQKGSKGDPVLAPGSFKGMKGDPGLPGLDGITGPQGAPGFPGAVGPAGPPGLQGPPGPPGPLGPDGNMGLGFQGEKGVKGDVGLPGPAGPPPSTGELEFMGFPKGKKGSKGEPGPKGFPGISGPPGFPGLGTTGEKGEKGEKGIPGLPGPRGPMGSEGVQGPPGQQGKKGTLGFPGLNGFQGIEGQKGDIGLPGPDVFIDIDGAVISGNPGDPGVPGLPGLKGDEGIQGLRGPSGVPGLPALSGVPGALGPQGFPGLKGDQGNPGRTTIGAAGLPGRDGLPGPPGPPGPPSPEFETETLHNKESGFPGLRGEQGPKGNLGLKGIKGDSGFCACDGGVPNTGPPGEPGPPGPWGLIGLPGLKGARGDRGSGGAQGPAGAPGLVGPLGPSGPKGKKGEPILSTIQGMPGDRGDSGSQGFRGVIGEPGKDGVPGLPGLPGLPGDGGQGFPGEKGLPGLPGEKGHPGPPGLPGNGLPGLPGPRGLPGDKGKDGLPGQQGLPGSKGDCCCREVGKGDLDTERGITLPCIIPGSYGPSGFPGTPGFPGPKGSRGLPGTPGQPGSSGSKGEPGSPGLVHLPELPGFPGPRGEKGLPGFPGLPGKDGLPGMIGSPGLPGSKGATGDIFGAENGAPGEQGLQGLTGHKGFLGDSGLPGLKGVHGKPGLLGPKGERGSPGTPGQVGQPGTPGSSGPYGIKGKSGLPGAPGFPGISGHPGKKGTRGKKGPPGSIVKKGLPGLKGLPGNPGLVGLKGSPGSPGVAGLPALSGPKGEKGSVGFVGFPGIPGLPGIPGTRGLKGIPGSTGKMGPSGRAGTPGEKGDRGNPGPVGIPSPRRPMSNLWLKGDKGSQGSAGSNGFPGPRGDKGEAGRPGPPGLPGAPGLPGIIKGVSGKPGPPGFMGIRGLPGLKGSSGITGFPGMPGESGSQGIRGSPGLPGASGLPGLKGDNGQTVEISGSPGPKGQPGESGFKGTKGRDGLIGNIGFPGNKGEDGKVGVSGDVGLPGAPGFPGVAGMRGEPGLPGSSGHQGAIGPLGSPGLIGPKGFPGFPGLHGLNGLPGTKGTHGTPGPSITGVPGPAGLPGPKGEKGYPGIGIGAPGKPGLRGQKGDRGFPGLQGPAGLPGAPGISLPSLIAGQPGDPGRPGLDGERGRPGPAGPPGPPGPSSNQGDTGDPGFPGIPGPKGPKGDQGIPGFSGLPGELGLKGMRGEPGFMGTPGKVGPPGDPGFPGMKGKAGPRGSSGLQGDPGQTPTAEAVQVPPGPLGLPGIDGIPGLTGDPGAQGPVGLQGSKGLPGIPGKDGPSGLPGPPGALGDPGLPGLQGPPGFEGAPGQQGPFGMPGMPGQSMRVGYTLVKHSQSEQVPPCPIGMSQLWVGYSLLFVEGQEKAHNQDLGFAGSCLPRFSTMPFIYCNINEVCHYARRNDKSYWLSTTAPIPMMPVSQTQIPQYISRCSVCEAPSQAIAVHSQDITIPQCPLGWRSLWIGYSFLMHTAAGAEGGGQSLVSPGSCLEDFRATPFIECSGARGTCHYFANKYSFWLTTVEERQQFGELPVSETLKAGQLHTRVSRCQVCMKSL

SEQ ID NO: 3311 - protein, 1633 aa, Homo Sapiens
MHPGLWLLLVTLCLTEELAAAGEKSYGKPCGGQDCSGSCQCFPEKGARGRPGPIGIQGPTGPQGFTGSTGLSGLKGERGFPGLLGPYGPKGDKGPMGVPGFLGINGIPGHPGQPGPRGPPGLDGCNGTQGAVGFPGPDGYPGLLGPPGLPGQKGSKGDPVLAPGSFKGMKGDPGLPGLDGITGPQGAPGFPGAVGPAGPPGLQGPPGPPGPLGPDGNMGLGFQGEKGVKGDVGLPGPAGPPPSTGELEFMGFPKGKKGSKGEPGPKGFPGISGPPGFPGLGTTGEKGEKGEKGIPGLPGPRGPMGSEGVQGPPGQQGKKGTLGFPGLNGFQGIEGQKGDIGLPGPDVFIDIDGAVISGNPGDPGVPGLPGLKGDEGIQGLRGPSGVPGLPALSGVPGALGPQGFPGLKGDQGNPGRTTIGAAGLPGRDGLPGPPGPPGPPSPEFETETLHNKESGFPGLRGEQGPKGNLGLKGIKGDSGFCACDGGVPNTGPPGEPGPPGPWGLIGLPGLKGARGDRGSGGAQGPAGAPGLVGPLGPSGPKGKKGEPILSTIQGMPGDRGDSGSQGFRGVIGEPGKDGVPGLPGLPGLPGDGGQGFPGEKGLPGLPGEKGHPGPPGLPGNGLPGLPGPRGLPGDKGKDGLPGQQGLPGSKGITLPCIIPGSYGPSGFPGTPGFPGPKGSRGLPGTPGQPGSSGSKGEPGSPGLVHLPELPGFPGPRGEKGLPGFPGLPGKDGLPGMIGSPGLPGSKGATGDIFGAENGAPGEQGLQGLTGHKGFLGDSGLPGLKGVHGKPGLLGPKGERGSPGTPGQVGQPGTPGSSGPYGIKGKSGLPGAPGFPGISGHPGKKGTRGKKGPPGSIVKKGLPGLKGLPGNPGLVGLKGSPGSPGVAGLPALSGPKGEKGSVGFVGFPGIPGLPGIPGTRGLKGIPGSTGKMGPSGRAGTPGEKGDRGNPGPVGIPSPRRPMSNLWLKGDKGSQGSAGSNGFPGPRGDKGEAGRPGPPGLPGAPGLPGIIKGVSGKPGPPGFMGIRGLPGLKGSSGITGFPGMPGESGSQGIRGSPGLPGASGLPGLKGDNGQTVEISGSPGPKGQPGESGFKGTKGRDGLIGNIGFPGNKGEDGKVGVSGDVGLPGAPGFPGVAGMRGEPGLPGSSGHQGAIGPLGSPGLIGPKGPSITGVPGPAGLPGPKGEKGYPGIGIGAPGKPGLRGQKGDRGFPGLQGPAGLPGAPGISLPSLIAGQPGDPGRPGLDGERGRPGPAGPPGPPGPSSNQGDTGDPGFPGIPGPKGPKGDQGIPGFSGLPGELGLKGSSGLQGDPGQTPTAEAVQVPPGPLGLPGIDGIPGLTGDPGAQGPVGLQGSKGLPGIPGKDGPSGLPGPPGALGDPGLPGLQGPPGFEGAPGQQGPFGMPGMPGQSMRVGYTLVKHSQSEQVPPCPIGMSQLWVGYSLLFVEGQEKAHNQDLGFAGSCLPRFSTMPFIYCNINEVCHYARRNDKSYWLSTTAPIPMMPVSQTQIPQYISRCSVCEAPSQAIAVHSQDITIPQCPLGWRSLWIGYSFLMHTAAGAEGGGQSLVSPGSCLEDFRATPFIECSGARGTCHYFANKYSFWLTTVEERQQFGELPVSETLKAGQLHTRVSRCQVCMKSL

SEQ ID NO: 3312 - protein, 1678 aa, Homo Sapiens
MHPGLWLLLVTLCLTEELAAAGEKSYGKPCGGQDCSGSCQCFPEKGARGRPGPIGIQGPTGPQGFTGSTGLSGLKGERGFPGLLGPYGPKGDKGPMGVPGFLGINGIPGHPGQPGPRGPPGLDGCNGTQGAVGFPGPDGYPGLLGPPGLPGQKGSKGDPVLAPGSFKGMKGDPGLPGLDGITGPQGAPGFPGAVGPAGPPGLQGPPGPPGPLGPDGNMGLGFQGEKGVKGDVGLPGPAGPPPSTGELEFMGFPKGKKGSKGEPGPKGFPGISGPPGFPGLGTTGEKGEKGEKGIPGLPGPRGPMGSEGVQGPPGQQGKKGTLGFPGLNGFQGIEGQKGDIGLPGPDVFIDIDGAVISGNPGDPGVPGLPGLKGDEGIQGLRGPSGVPGLPALSGVPGALGPQGFPGLKGDQGNPGRTTIGAAGLPGRDGLPGPPGPPGPPSPEFETETLHNKESGFPGLRGEQGPKGNLGLKGIKGDSGFCACDGGVPNTGPPGEPGPPGPWGLIGLPGLKGARGDRGSGGAQGPAGAPGLVGPLGPSGPKGKKGEPILSTIQGMPGDRGDSGSQGFRGVIGEPGKDGVPGLPGLPGLPGDGGQGFPGEKGLPGLPGEKGHPGPPGLPGNGLPGLPGPRGLPGDKGKDGLPGQQGLPGSKGITLPCIIPGSYGPSGFPGTPGFPGPKGSRGLPGTPGQPGSSGSKGEPGSPGLVHLPELPGFPGPRGEKGLPGFPGLPGKDGLPGMIGSPGLPGSKGATGDIFGAENGAPGEQGLQGLTGHKGFLGDSGLPGLKGVHGKPGLLGPKGERGSPGTPGQVGQPGTPGSSGPYGIKGKSGLPGAPGFPGISGHPGKKGTRGKKGPPGSIVKKGLPGLKGLPGNPGLVGLKGSPGSPGVAGLPALSGPKGEKGSVGFVGFPGIPGLPGIPGTRGLKGIPGSTGKMGPSGRAGTPGEKGDRGNPGPVGIPSPRRPMSNLWLKGDKGSQGSAGSNGFPGPRGDKGEAGRPGPPGLPGAPGLPGIIKGVSGKPGPPGFMGIRGLPGLKGSSGITGFPGMPGESGSQGIRGSPGLPGASGLPGLKGDNGQTVEISGSPGPKGQPGESGFKGTKGRDGLIGNIGFPGNKGEDGKVGVSGDVGLPGAPGFPGVAGMRGEPGLPGSSGHQGAIGPLGSPGLIGPKGFPGFPGLHGLNGLPGTKGTHGTPGPSITGVPGPAGLPGPKGEKGYPGIGIGAPGKPGLRGQKGDRGFPGLQGPAGLPGAPGISLPSLIAGQPGDPGRPGLDGERGRPGPAGPPGPPGPSSNQGDTGDPGFPGIPGFSGLPGELGLKGMRGEPGFMGTPGKVGPPGDPGFPGMKGKAGPRGSSGLQGDPGQTPTAEAVQVPPGPLGLPGIDGIPGLTGDPGAQGPVGLQGSKGLPGIPGKDGPSGLPGPPGALGDPGLPGLQGPPGFEGAPGQQGPFGMPGMPGQSMRVGYTLVKHSQSEQVPPCPIGMSQLWVGYSLLFVEGQEKAHNQDLGFAGSCLPRFSTMPFIYCNINEVCHYARRNDKSYWLSTTAPIPMMPVSQTQIPQYISRCSVCEAPSQAIAVHSQDITIPQCPLGWRSLWIGYSFLMHTAAGAEGGGQSLVSPGSCLEDFRATPFIECSGARGTCHYFANKYSFWLTTVEERQQFGELPVSETLKAGQLHTRVSRCQVCMKSL

SEQ ID NO: 3313 - protein, 1666 aa, Homo Sapiens
MHPGLWLLLVTLCLTEELAAAGEKSYGKPCGGQDCSGSCQCFPEKGARGRPGPIGIQGPTGPQGFTGSTGLSGLKGERGFPGLLGPYGPKGDKGPMGVPGFLGINGIPGHPGQPGPRGPPGLDGCNGTQGAVGFPGPDGYPGLLGPPGLPGQKGSKGDPVLAPGSFKGMKGDPGLPGLDGITGPQGAPGFPGAVGPAGPPGLQGPPGPPGPLGPDGNMGLGFQGEKGVKGDVGLPGPAGPPPSTGELEFMGFPKGKKGSKGEPGPKGFPGISGPPGFPGLGTTGEKGEKGEKGIPGLPGPRGPMGSEGVQGPPGQQGKKGTLGFPGLNGFQGIEGQKGDIGLPGPDVFIDIDGAVISGNPGDPGVPGLPGLKGDEGIQGLRGPSGVPGLPALSGVPGALGPQGFPGLKGDQGNPGRTTIGAAGLPGRDGLPGPPGPPGPPSPEFETETLHNKESGFPGLRGEQGPKGNLGLKGIKGDSGFCACDGGVPNTGPPGEPGPPGPWGLIGLPGLKGARGDRGSGGAQGPAGAPGLVGPLGPSGPKGKKGEPILSTIQGMPGDRGDSGSQGFRGVIGEPGKDGVPGLPGLPGLPGDGGQGFPGEKGLPGLPGEKGHPGPPGLPGNGLPGLPGPRGLPGDKGKDGLPGQQGLPGSKGITLPCIIPGSYGPSGFPGTPGFPGPKGSRGLPGTPGQPGSSGSKGEPGSPGLVHLPELPGFPGPRGEKGLPGFPGLPGKDGLPGMIGSPGLPGSKGATGDIFGAENGAPGEQGLQGLTGHKGFLGDSGLPGLKGVHGKPGLLGPKGERGSPGTPGQVGQPGTPGSSGPYGIKGKSGLPGAPGFPGISGHPGKKGTRGKKGPPGSIVKKGLPGLKGLPGNPGLVGLKGSPGSPGVAGLPALSGPKGEKGSVGFVGFPGIPGLPGIPGTRGLKGIPGSTGKMGPSGRAGTPGEKGDRGNPGPVGIPSPRRPMSNLWLKGDKGSQGSAGSNGFPGPRGDKGEAGRPGPPGLPGAPGLPGIIKGVSGKPGPPGFMGIRGLPGLKGSSGITGFPGMPGESGSQGIRGSPGLPGASGLPGLKGDNGQTVEISGSPGPKGQPGESGFKGTKGRDGLIGNIGFPGNKGEDGKVGVSGDVGLPGAPGFPGVAGMRGEPGLPGSSGHQGAIGPLGSPGLIGPKGPSITGVPGPAGLPGPKGEKGYPGIGIGAPGKPGLRGQKGDRGFPGLQGPAGLPGAPGISLPSLIAGQPGDPGRPGLDGERGRPGPAGPPGPPGPSSNQGDTGDPGFPGIPGPKGPKGDQGIPGFSGLPGELGLKGMRGEPGFMGTPGKVGPPGDPGFPGMKGKAGPRGSSGLQGDPGQTPTAEAVQVPPGPLGLPGIDGIPGLTGDPGAQGPVGLQGSKGLPGIPGKDGPSGLPGPPGALGDPGLPGLQGPPGFEGAPGQQGPFGMPGMPGQSMRVGYTLVKHSQSEQVPPCPIGMSQLWVGYSLLFVEGQEKAHNQDLGFAGSCLPRFSTMPFIYCNINEVCHYARRNDKSYWLSTTAPIPMMPVSQTQIPQYISRCSVCEAPSQAIAVHSQDITIPQCPLGWRSLWIGYSFLMHTAAGAEGGGQSLVSPGSCLEDFRATPFIECSGARGTCHYFANKYSFWLTTVEERQQFGELPVSETLKAGQLHTRVSRCQVCMKSL

SEQ ID NO: 3314 - protein, 1691 aa, Homo Sapiens
MLINKLWLLLVTLCLTEELAAAGEKSYGKPCGGQDCSGSCQCFPEKGARGRPGPIGIQGPTGPQGFTGSTGLSGLKGERGFPGLLGPYGPKGDKGPMGVPGFLGINGIPGHPGQPGPRGPPGLDGCNGTQGAVGFPGPDGYPGLLGPPGLPGQKGSKGDPVLAPGSFKGMKGDPGLPGLDGITGPQGAPGFPGAVGPAGPPGLQGPPGPPGPLGPDGNMGLGFQGEKGVKGDVGLPGPAGPPPSTGELEFMGFPKGKKGSKGEPGPKGFPGISGPPGFPGLGTTGEKGEKGEKGIPGLPGPRGPMGSEGVQGPPGQQGKKGTLGFPGLNGFQGIEGQKGDIGLPGPDVFIDIDGAVISGNPGDPGVPGLPGLKGDEGIQGLRGPSGVPGLPALSGVPGALGPQGFPGLKGDQGNPGRTTIGAAGLPGRDGLPGPPGPPGPPSPEFETETLHNKESGFPGLRGEQGPKGNLGLKGIKGDSGFCACDGGVPNTGPPGEPGPPGPWGLIGLPGLKGARGDRGSGGAQGPAGAPGLVGPLGPSGPKGKKGEPILSTIQGMPGDRGDSGSQGFRGVIGEPGKDGVPGLPGLPGLPGDGGQGFPGEKGLPGLPGEKGHPGPPGLPGNGLPGLPGPRGLPGDKGKDGLPGQQGLPGSKGITLPCIIPGSYGPSGFPGTPGFPGPKGSRGLPGTPGQPGSSGSKGEPGSPGLVHLPELPGFPGPRGEKGLPGFPGLPGKDGLPGMIGSPGLPGSKGATGDIFGAENGAPGEQGLQGLTGHKGFLGDSGLPGLKGVHGKPGLLGPKGERGSPGTPGQVGQPGTPGSSGPYGIKGKSGLPGAPGFPGISGHPGKKGTRGKKGPPGSIVKKGLPGLKGLPGNPGLVGLKGSPGSPGVAGLPALSGPKGEKGSVGFVGFPGIPGLPGIPGTRGLKGIPGSTGKMGPSGRAGTPGEKGDRGNPGPVGIPSPRRPMSNLWLKGDKGSQGSAGSNGFPGPRGDKGEAGRPGPPGLPGAPGLPGIIKGVSGKPGPPGFMGIRGLPGLKGSSGITGFPGMPGESGSQGIRGSPGLPGASGLPGLKGDNGQTVEISGSPGPKGQPGESGFKGTKGRDGLIGNIGFPGNKGEDGKVGVSGDVGLPGAPGFPGVAGMRGEPGLPGSSGHQGAIGPLGSPGLIGPKGFPGFPGLHGLNGLPGTKGTHGTPGPSITGVPGPAGLPGPKGEKGYPGIGIGAPGKPGLRGQKGDRGFPGLQGPAGLPGAPGISLPSLIAGQPGDPGRPGLDGERGRPGPAGPPGPPGPSSNQGDTGDPGFPGIPGPKGPKGDQGIPGFSGLPGELGLKGMRGEPGFMGTPGKVGPPGDPGFPGMKGKAGPRGSSGLQGDPGQTPTAEAVQVPPGPLGLPGIDGIPGLTGDPGAQGPVGLQGSKGLPGIPGKDGPSGLPGPPGALGDPGLPGLQGPPGFEGAPGQQGPFGMPGMPGQSMRVGYTLVKHSQSEQVPPCPIGMSQLWVGYSLLFVEGQEKAHNQDLGFAGSCLPRFSTMPFIYCNINEVCHYARRNDKSYWLSTTAPIPMMPVSQTQIPQYISRCSVCEAPSQAIAVHSQDITIPQCPLGWRSLWIGYSFLMHTAAGAEGGGQSLVSPGSCLEDFRATPFIECSGARGTCHYFANKYSFWLTTVEERQQFGELPVSETLKAGQLHTRVSRCQVCMKSL

SEQ ID NO: 3315 - protein, 1838 aa, Homo Sapiens
MDVHTRWKARSALRPGAPLLPPLLLLLLWAPPPSRAAQPADLLKVLDFHNLPDGITKTTGFCATRRSSKGPDVAYRVTKDAQLSAPTKQLYPASAFPEDFSILTTVKAKKGSQAFLVSIYNEQGIQQIGLELGRSPVFLYEDHTGKPGPEDYPLFRGINLSDGKWHRIALSVHKKNVTLILDCKKKTTKFLDRSDHPMIDINGIIVFGTRILDEEVFEGDIQQLLFVSDHRAAYDYCEHYSPDCDTAVPDTPQSQDPNPDEYYTEGDGEGETYYYEYPYYEDPEDLGKEPTPSKKPVEAAKETTEVPEELTPTPTEAAPMPETSEGAGKEEDVGIGDYDYVPSEDYYTPSPYDDLTYGEGEENPDQPTDPGAGAEIPTSTADTSNSSNPAPPPGEGADDLEGEFTEETIRNLDENYYDPYYDPTSSPSEIGPGMPANQDTIYEGIGGPRGEKGQKGEPAIIEPGMLIEGPPGPEGPAGLPGPPGTMGPTGQVGDPGERGPPGRPGLPGADGLPGPPGTMLMLPFRFGGGGDAGSKGPMVSAQESQAQAILQQARLALRGPAGPMGLTGRPGPVGPPGSGGLKGEPGDVGPQGPRGVQGPPGPAGKPGRRGRAGSDGARGMPGQTGPKGDRGFDGLAGLPGEKGHRGDPGPSGPPGPPGDDGERGDDGEVGPRGLPGEPGPRGLLGPKGPPGPPGPPGVTGMDGQPGPKGNVGPQGEPGPPGQQGNPGAQGLPGPQGAIGPPGEKGPLGKPGLPGMPGADGPPGHPGKEGPPGEKGGQGPPGPQGPIGYPGPRGVKGADGIRGLKGTKGEKGEDGFPGFKGDMGIKGDRGEIGPPGPRGEDGPEGPKGRGGPNGDPGPLGPPGEKGKLGVPGLPGYPGRQGPKGSIGFPGFPGANGEKGGRGTPGKPGPRGQRGPTGPRGERGPRGITGKPGPKGNSGGDGPAGPPGERGPNGPQGPTGFPGPKGPPGPPGKDGLPGHPGQRGETGFQGKTGPPGPPGVVGPQGPTGETGPMGERGHPGPPGPPGEQGLPGLAGKEGTKGDPGPAGLPGKDGPPGLRGFPGDRGLPGPVGALGLKGNEGPPGPPGPAGSPGERGPAGAAGPIGIPGRPGPQGPPGPAGEKGAPGEKGPQGPAGRDGLQGPVGLPGPAGPVGPPGEDGDKGEIGEPGQKGSKGDKGEQGPPGPTGPQGPIGQPGPSGADGEPGPRGQQGLFGQKGDEGPRGFPGPPGPVGLQGLPGPPGEKGETGDVGQMGPPGPPGPRGPSGAPGADGPQGPPGGIGNPGAVGEKGEPGEAGEPGLPGEGGPPGPKGERGEKGESGPSGAAGPPGPKGPPGDDGPKGSPGPVGFPGDPGPPGEPGPAGQDGPPGDKGDDGEPGQTGSPGPTGEPGPSGPPGKRGPPGPAGPEGRQGEKGAKGEAGLEGPPGKTGPIGPQGAPGKPGPDGLRGIPGPVGEQGLPGSPGPDGPPGPMGPPGLPGLKGDSGPKGEKGHPGLIGLIGPPGEQGEKGDRGLPGPQGSSGPKGEQGITGPSGPIGPPGPPGLPGPPGPKGAKGSSGPTGPKGEAGHPGPPGPPGPPGEVIQPLPIQASRTRRNIDASQLLDDGNGENYVDYADGMEEIFGSLNSLKLEIEQMKRPLGTQQNPARTCKDLQLCHPDFPDGEYWVDPNQGCSRDSFKVYCNFTAGGSTCVFPDKKSEGARITSWPKENPGSWFSEFKRGKLLSYVDAEGNPVGVVQMTFLRLLSASAHQNVTYHCYQSVAWQDAATGSYDKALRFLGSNDEEMSYDNNPYIRALVDGCATKKGYQKTVLEIDTPKVEQVPIVDIMFNDFGEASQKFGFEVGPACFMG

SEQ ID NO: 3316 - protein, 1838 aa, Homo Sapiens
MDVHTRWKARSALRPGAPLLPPLLLLLLWAPPPSRAAQPADLLKVLDFHNLPDGITKTTGFCATRRSSKGPDVAYRVTKDAQLSAPTKQLYPASAFPEDFSILTTVKAKKGSQAFLVSIYNEQGIQQIGLELGRSPVFLYEDHTGKPGPEDYPLFRGINLSDGKWHRIALSVHKKNVTLILDCKKKTTKFLDRSDHPMIDINGIIVFGTRILDEEVFEGDIQQLLFVSDHRAAYDYCEHYSPDCDTAVPDTPQSQDPNPDEYYTEGDGEGETYYYEYPYYEDPEDLGKEPTPSKKPVEAAKETTEVPEELTPTPTEAAPMPETSEGAGKEEDVGIGDYDYVPSEDYYTPSPYDDLTYGEGEENPDQPTDPGAGAEIPTSTADTSNSSNPAPPPGEGADDLEGEFTEETIRNLDENYYDPYYDPTSSPSEIGPGMPANQDTIYEGIGGPRGEKGQKGEPAIIEPGMLIEGPPGPEGPAGLPGPPGTMGPTGQVGDPGERGPPGRPGLPGADGLPGPPGTMLMLPFRFGGGGDAGSKGPMVSAQESQAQAILQQARLALRGPAGPMGLTGRPGPVGPPGSGGLKGEPGDVGPQGPRGVQGPPGPAGKPGRRGRAGSDGARGMPGQTGPKGDRGFDGLAGLPGEKGHRGDPGPSGPPGPPGDDGERGDDGEVGPRGLPGEPGPRGLLGPKGPPGPPGPPGVTGMDGQPGPKGNVGPQGEPGPPGQQGNPGAQGLPGPQGAIGPPGEKGPLGKPGLPGMPGADGPPGHPGKEGPPGEKGGQGPPGPQGPIGYPGPRGVKGADGIRGLKGTKGEKGEDGFPGFKGDMGIKGDRGEIGPPGPRGEDGPEGPKGRGGPNGDPGPLGPPGEKGKLGVPGLPGYPGRQGPKGSIGFPGFPGANGEKGGRGTPGKPGPRGQRGPTGPRGERGPRGITGKPGPKGNSGGDGPAGPPGERGPNGPQGPTGFPGPKGPPGPPGKDGLPGHPGQRGETGFQGKTGPPGPPGVVGPQGPTGETGPMGERGHPGPPGPPGEQGLPGLAGKEGTKGDPGPAGLPGKDGPPGLRGFPGDRGLPGPVGALGLKGNEGPPGPPGPAGSPGERGPAGAAGPIGIPGRPGPQGPPGPAGEKGAPGEKGPQGPAGRDGLQGPVGLPGPAGPVGPPGEDGDKGEIGEPGQKGSKGDKGEQGPPGPTGPQGPIGQPGPSGADGEPGPRGQQGLFGQKGDEGPRGFPGPPGPVGLQGLPGPPGEKGETGDVGQMGPPGPPGPRGPSGAPGADGPQGPPGGIGNPGAVGEKGEPGEAGEPGLPGEGGPPGPKGERGEKGESGPSGAAGPPGPKGPPGDDGPKGSPGPVGFPGDPGPPGEPGPAGQDGPPGDKGDDGEPGQTGSPGPTGEPGPSGPPGKRGPPGPAGPEGRQGEKGAKGEAGLEGPPGKTGPIGPQGAPGKPGPDGLRGIPGPVGEQGLPGSPGPDGPPGPMGPPGLPGLKGDSGPKGEKGHPGLIGLIGPPGEQGEKGDRGLPGPQGSSGPKGEQGITGPSGPIGPPGPPGLPGPPGPKGAKGSSGPTGPKGEAGHPGPPGPPGPPGEVIQPLPIQASRTRRNIDASQLLDDGNGENYVDYADGMEEIFGSLNSLKLEIEQMKRPLGTQQNPARTCKDLQLCHPDFPDGEYWVDPNQGCSRDSFKVYCNFTAGGSTCVFPDKKSEGSKMARWPKEQPSTWYSQYKRGSLLSYVDAEGNPVGVVQMTFLRLLSASAHQNVTYHCYQSVAWQDAATGSYDKALRFLGSNDEEMSYDNNPYIRALVDGCATKKGYQKTVLEIDTPKVEQVPIVDIMFNDFGEASQKFGFEVGPACFMG

SEQ ID NO: 3317 - protein, 210 aa, Homo Sapiens
  misc_feature (1)..(1): Xaa can be any naturally occurring amino acid
XRTRRNIDASQLLDDGNGENYVDYADGMEEIFGSLNSLKLEIEQMKRPLGTQQNPARTCKDLQLCHPDFPDGEYWVDPNQGCSRDSFKVYCNFTAGGSTCVFPDKKSEGSKMARWPKEQPSTWYSQYKRGSLLSYVDAEGNPVGVVQMTFLRLLSASAHQNVTYHCYQSVAWQDAATGSYDKALRFLGSNDEEMSYDNNPYIRALVDGCA

SEQ ID NO: 3318 - protein, 1499 aa, Homo Sapiens
MMANWAEARPLLILIVLLGQFVSIKAQEEDEDEGYGEEIACTQNGQMYLNRDIWKPAPCQICVCDNGAILCDKIECQDVLDCADPVTPPGECCPVCSQTPGGGNTNFGRGRKGQKGEPGLVPVVTGIRGRPGPAGPPGSQGPRGERGPKGRPGPRGPQGIDGEPGVPGQPGAPGPPGHPSHPGPDGLSRPFSAQMAGLDEKSGLGSQVGLMPGSVGPVGPRGPQGLQGQQGGAGPTGPPGEPGDPGPMGPIGSRGPEGPPGKPGEDGEPGRNGNPGEVGFAGSPGARGFPGAPGLPGLKGHRGHKGLEGPKGEVGAPGSKGEAGPTGPMGAMGPLGPRGMPGERGRLGPQGAPGQRGAHGMPGKPGPMGPLGIPGSSGFPGNPGMKGEAGPTGARGPEGPQGQRGETGPPGPVGSPGLPGAIGTDGTPGAKGPTGSPGTSGPPGSAGPPGSPGPQGSTGPQGIRGQPGDPGVPGFKGEAGPKGEPGPHGIQGPIGPPGEEGKRGPRGDPGTVGPPGPVGERGAPGNRGFPGSDGLPGPKGAQGERGPVGSSGPKGSQGDPGRPGEPGLPGARGLTGNPGVQGPEGKLGPLGAPGEDGRPGPPGSIGIRGQPGSMGLPGPKGSSGDPGKPGEAGNAGVPGQRGAPGKDGEVGPSGPVGPPGLAGERGEQGPPGPTGFQGLPGPPGPPGEGGKPGDQGVPGDPGAVGPLGPRGERGNPGERGEPGITGLPGEKGMAGGHGPDGPKGSPGPSGTPGDTGPPGLQGMPGERGIAGTPGPKGDRGGIGEKGAEGTAGNDGARGLPGPLGPPGPAGPTGEKGEPGPRGLVGPPGSRGNPGSRGENGPTGAVGFAGPQGPDGQPGVKGEPGEPGQKGDAGSPGPQGLAGSPGPHGPNGVPGLKGGRGTQGPPGATGFPGSAGRVGPPGPAGAPGPAGPLGEPGKEGPPGLRGDPGSHGRVGDRGPAGPPGGPGDKGDPGEDGQPGPDGPPGPAGTTGQRGIVGMPGQRGERGMPGLPGPAGTPGKVGPTGATGDKGPPGPVGPPGSNGPVGEPGPEGPAGNDGTPGRDGAVGERGDRGDPGPAGLPGSQGAPGTPGPVGAPGDAGQRGDPGSRGPIGPPGRAGKRGLPGPQGPRGDKGDHGDRGDRGQKGHRGFTGLQGLPGPPGPNGEQGSAGIPGPFGPRGPPGPVGPSGKEGNPGPLGPIGPPGVRGSVGEAGPEGPPGEPGPPGPPGPPGHLTAALGDIMGHYDESMPDPLPEFTEDQAAPDDKNKTDPGVHATLKSLSSQIETMRSPDGSKKHPARTCDDLKLCHSAKQSGEYWIDPNQGSVEDAIKVYCNMETGETCISANPSSVPRKTWWASKSPDNKPVWYGLDMNRGSQFAYGDHQSPNTAITQMTFLRLLSKEASQNITYICKNSVGYMDDQAKNLKKAVVLKGANDLDIKAEGNIRFRYIVLQDTCSKRNGNVGKTVFEYRTQNVARLPIIDLAPVDVGGTDQEFGVEIGPVCFV

SEQ ID NO: 3319 - protein, 1112 aa, Homo Sapiens
MPGSVGPVGPRGPQGLQGQQGGAGPTGPPGEPGDPGPMGPIGSRGPEGPPGKPGEDGEPGRNGNPGEVGFAGSPGARGFPGAPGLPGLKGHRGHKGLEGPKGEVGAPGSKGEAGPTGPMGDPGTVGPPGPVGERGAPGNRGFPGSDGLPGPKGAQGERGPVGSSGPKGSQGDPGRPGEPGLPGARGLTGNPGVQGPEGKLGPLGAPGEDGRPGPPGSIGIRGQPGSMGLPGPKGSSGDPGKPGEAGNAGVPGQRGAPGKDGEVGPSGPVGPPGLAGERGEQGPPGPTGFQGLPGPPGPPGEGGKPGDQGVPGDPGAVGPLGPRGERGNPGERGEPGITGLPGEKGMAGGHGPDGPKGSPGPSGTPGDTGPPGLQGMPGERGIAGTPGPKGDRGGIGEKGAEGTAGNDGARGLPGPLGPPGPAGPTGEKGEPGPRGLVGPPGSRGNPGSRGENGPTGAVGFAGPQGPDGQPGVKGEPGEPGQKGDAGSPGPQGLAGSPGPHGPNGVPGLKGGRGTQGPPGATGFPGSAGRVGPPGPAGAPGPAGPLGEPGKEGPPGLRGDPGSHGRVGDRGPAGPPGGPGDKGDPGEDGQPGPDGPPGPAGTTGQRGIVGMPGQRGERGMPGLPGPAGTPGKVGPTGATGDKGPPGPVGPPGSNGPVGEPGPEGPAGNDGTPGRDGAVGERGDRGDPGPAGLPGSQGAPGTPGPVGAPGDAGQRGDPGSRGPIGPPGRAGKRGLPGPQGPRGDKGDHGDRGDRGQKGHRGFTGLQGLPGPPGPNGEQGSAGIPGPFGPRGPPGPVGPSGKEGNPGPLGPIGPPGVRGSVGEAGPEGPPGEPGPPGPPGPPGHLTAALGDIMGHYDESMPDPLPEFTEDQAAPDDKNKTDPGVHATLKSLSSQIETMRSPDGSKKHPARTCDDLKLCHSAKQSGEYWIDPNQGSVEDAIKVYCNMETGETCISANPSSVPRKTWWASKSPDNKPVWYGLDMNRGSQFAYGDHQSPNTAITQMTFLRLLSKEASQNITYICKNSVGYMDDQAKNLKKAVVLKGANDLDIKAEGNIRFRYIVLQDTCSKRNGNVGKTVFEYRTQNVARLPIIDLAPVDVGGTDQEFGVEIGPVCFV

SEQ ID NO: 3320 - protein, 1745 aa, Homo Sapiens
MGNRRDLGQPRAGLCLLLAALQLLPGTQADPVDVLKALGVQGGQAGVPEGPGFCPQRTPEGDRAFRIGQASTLGIPTWELFPEGHFPENFSLLITLRGQPANQSVLLSIYDERGARQLGLALGPALGLLGDPFRPLPQQVNLTDGRWHRVAVSIDGEMVTLVADCEAQPPVLGHGPRFISIAGLTVLGTQDLGEKTFEGDIQELLISPDPQAAFQACERYLPDCDNLAPAATVAPQGEPETPRPRRKGKGKGRKKGRGRKGKGRKKNKEIWTSSPPPDSAENQTSTDIPKTETPAPNLPPTPTPLVVTSTVTTGLNATILERSLDPDSGTELGTLETKAAREDEEGDDSTMGPDFRAAEYPSRTQFQIFPGAGEKGAKGEPAVIEKGQQFEGPPGAPGPQGVVGPSGPPGPPGFPGDPGPPGPAGLPGIPGIDGIRGPPGTVIMMPFQFAGGSFKGPPVSFQQAQAQAVLQQTQLSMKGPPGPVGLTGRPGPVGLPGHPGLKGEEGAEGPQGPRGLQGPHGPPGRVGKMGRPGADGARGLPGDTGPKGDRGFDGLPGLPGEKGQRGDFGHVGQPGPPGEDGERGAEGPPGPTGQAGEPGPRGLLGPRGSPGPTGRPGVTGIDGAPGAKGNVGPPGEPGPPGQQGNHGSQGLPGPQGLIGTPGEKGPPGNPGIPGLPGSDGPLGHPGHEGPTGEKGAQGPPGSAGPPGYPGPRGVKGTSGNRGLQGEKGEKGEDGFPGFKGDVGLKGDQGKPGAPGPRGEDGPEGPKGQAGQAGEEGPPGSAGEKGKLGVPGLPGYPGRPGPKGSIGFPGPLGPIGEKGKSGKTGQPGLEGERGPPGSRGERGQPGATGQPGPKGDVGQDGAPGIPGEKGLPGLQGPPGFPGPKGPPGHQGKDGRPGHPGQRGELGFQGQTGPPGPAGVLGPQGKTGEVGPLGERGPPGPPGPPGEQGLPGLEGREGAKGELGPPGPLGKEGPAGLRGFPGPKGGPGDPGPTGLKGDKGPPGPVGANGSPGERGPLGPAGGIGLPGQSGSEGPVGPAGKKGSRGERGPPGPTGKDGIPGPLGPLGPPGAAGPSGEEGDKGDVGAPGHKGSKGDKGDAGPPGQPGIRGPAGHPGPPGADGAQGRRGPPGLFGQKGDDGVRGFVGVIGPPGLQGLPGPPGEKGEVGDVGSMGPHGAPGPRGPQGPTGSEGTPGLPGGVGQPGAVGEKGERGDAGDPGPPGAPGIPGPKGDIGEKGDSGPSGAAGPPGKKGPPGEDGAKGSVGPTGLPGDLGPPGDPGVSGIDGSPGEKGDPGDVGGPGPPGASGEPGAPGPPGKRGPSGHMGREGREGEKGAKGEPGPDGPPGRTGPMGARGPPGRVGPEGLRGIPGPVGEPGLLGAPGQMGPPGPLGPSGLPGLKGDTGPKGEKGHIGLIGLIGPPGEAGEKGDQGLPGVQGPPGPKGDPGPPGPIGSLGHPGPPGVAGPLGQKGSKGSPGSMGPRGDTGPAGPPGPPGAPAELHGLRRRRRFVPVPLPVVEGGLEEVLASLTSLSLELEQLRRPPGTAERPGLVCHELHRNHPHLPDGEYWIDPNQGCARDSFRVFCNFTAGGETCLYPDKKFEIVKLASWSKEKPGGWYSTFRRGKKFSYVDADGSPVNVVQLNFLKLLSATARQNFTYSCQNAAAWLDEATGDYSHSARFLGTNGEELSFNQTTAATVSVPQDGCRLRKGQTKTLFEFSSSRAGFLPLWDVAATDFGQTNQKFGFELGPVCFSS

SEQ ID NO: 3321 - protein, 1028 aa, Homo Sapiens
MRAARALLPLLLQACWTAAQDEPETPRAVAFQDCPVDLFFVLDTSESVALRLKPYGALVDKVKSFTKRFIDNLRDRYYRCDRNLVWNAGALHYSDEVEIIQGLTRMPGGRDALKSSVDAVKYFGKGTYTDCAIKKGLEQLLVGGSHLKENKYLIVVTDGHPLEGYKEPCGGLEDAVNEAKHLGVKVFSVAITPDHLEPRLSIIATDHTYRRNFTAADWGQSRDAEEAISQTIDTIVDMIKNNVEQVCCSFECQPARGPPGLRGDPGFEGERGKPGLPGEKGEAGDPGRPGDLGPVGYQGMKGEKGSRGEKGSRGPKGYKGEKGKRGIDGVDGVKGEMGYPGLPGCKGSPGFDGIQGPPGPKGDPGAFGLKGEKGEPGADGEAGRPGSSGPSGDEGQPGEPGPPGEKGEAGDEGNPGPDGAPGERGGPGERGPRGTPGTRGPRGDPGEAGPQGDQGREGPVGVPGDPGEAGPIGPKGYRGDEGPPGSEGARGAPGPAGPPGDPGLMGERGEDGPAGNGTEGFPGFPGYPGNRGAPGINGTKGYPGLKGDEGEAGDPGDDNNDIAPRGVKGAKGYRGPEGPQGPPGHQGPPGPDECEILDIIMKMCSCCECKCGPIDLLFVLDSSESIGLQNFEIAKDFVVKVIDRLSRDELVKFEPGQSYAGVVQYSHSQMQEHVSLRSPSIRNVQELKEAIKSLQWMAGGTFTGEALQYTRDQLLPPSPNNRIALVITDGRSDTQRDTTPLNVLCSPGIQVVSVGIKDVFDFIPGSDQLNVISCQGLAPSQGRPGLSLVKENYAELLEDAFLKNVTAQICIDKKCPDYTCPITFSSPADITILLDGSASVGSHNFDTTKRFAKRLAERFLTAGRTDPAHDVRVAVVQYSGTGQQRPERASLQFLQNYTALASAVDAMDFINDATDVNDALGYVTRFYREASSGAAKKRLLLFSDGNSQGATPAAIEKAVQEAQRAGIEIFVVVVGRQVNEPHIRVLVTGKTAEYDVAYGESHLFRVPSYQALLRGVFHQTVSRKVALG

SEQ ID NO: 3322 - protein, 1026 aa, Homo Sapiens [sequence omitted]

SEQ ID NO: 3323 - protein, 250 aa, Homo Sapiens
GNKGAKGDRGLPGPRGPQGALGEPGKQGSRGDPGDAGPRGDSGQPGPKGDPGRPGFSYPGPRGAPGEKGEPGPRGPEGGRGDFGLKGEPGRKGEKGEPADPGPPGEPGPRGPRGVPGPEGEPGPPGDPGLTECDVMTYVRETCGCCGSEVSPVPPDDPATPPDCEKRCGALDVVFVIDSSESIGYTNFTLEKNFVINVVNRLGAIAKDPKSETGTRVGVVQYSHEGTFEAIQLDDERIDSLSSFKEAVKN

SEQ ID NO: 3324 - protein, 180 aa, Homo Sapiens
MLQGTCSVLLLWGILGAIQAQQQEVISPDTTERNNNCPEKTDCPIHVYFVLDTSESVTMQSPTDILLFHMKQFVPQFISQLQNEFYLDQVALSWRYGGLHFSDQVEVFSPPGSDRASFIKNLQGISSFRRGTFTDCALANMTEQIRQDRSKGTVHFAVVITDGHVTGSPCGGIKLQAERA

SEQ ID NO: 3325 - protein, 1019 aa, Homo Sapiens
MLQGTCSVLLLWGILGAIQAQQQEVISPDTTERNNNCPEKTDCPIHVYFVLDTSESVTMQSPTDILLFHMKQFVPQFISQLQNEFYLDQVALSWRYGGLHFSDQVEVFSPPGSDRASFIKNLQGISSFRRGTFTDCALANMTEQIRQDRSKGTVHFAVVITDGHVTGSPCGGIKLQAERAREEGIRLFAVAPNQNLKEQGLRDIASTPHELYRNDYATMLPDSTEIDQDTINRIIKVMKHEAYGECYKVSCLEIPGPSGPKGYRGQKGAKGNMGEPGEPGQKGRQGDPGIEGPIGFPGPKGVPGFKGEKGEFGADGRKGAPGLAGKNGTDGQKGKLGRIGPPGCKGDPGNRGPDGYPGEAGSPGERGDQGGKGDPGRPGRRGPPGEIGAKGSKGYQGNSGAPGSPGVKGAKGGPGPRGPKGEPGRRGDPGTKGSPGSDGPKGEKGDPGPEGPRGLAGEVGNKGAKGDRGLPGPRGPQGALGEPGKQGSRGDPGDAGPRGDSGQPGPKGDPGRPGFSYPGPRGAPGEKGEPGPRGPEGGRGDFGLKGEPGRKGEKGEPADPGPPGEPGPRGPRGVPGPEGEPGPPGDPGLTECDVMTYVRETCGCCDCEKRCGALDVVFVIDSSESIGYTNFTLEKNFVINVVNRLGAIAKDPKSETGTRVGVVQYSHEGTFEAIQLDDERIDSLSSFKEAVKNLEWIAGGTWTPSALKFAYDRLIKESRRQKTRVFAVVITDGRHDPRDDDLNLRALCDRDVTVTAIGIGDMFHEKHESENLYSIACDKPQQVRNMTLFSDLVAEKFIDDMEDVLCPDPQIVCPDLPCQTELSVAQCTQRPVDIVFLLDGSERLGEQNFHKARRFVEQVARRLTLARRDDDPLNARVALLQFGGPGEQQVAFPLSHNLTAIHEALETTQYLNSFSHVGAGVVHAINAIVRSPRGGARRHAELSFVFLTDGVTGNDSLHESAHSMRKQNVVPTVLALGSDVDMDVLTTLSLGDRAAVFHEKDYDSLAQPGFFDRFIRWIC

SEQ ID NO: 3326 - protein, 828 aa, Homo Sapiens
MLQGTCSVLLLWGILGAIQAQQQEVISPDTTERNNNCPEKTDCPIHVYFVLDTSESVTMQSPTDILLFHMKQFVPQFISQLQNEFYLDQVALSWRYGGLHFSDQVEVFSPPGSDRASFIKNLQGISSFRRGTFTDCALANMTEQIRQDRSKGTVHFAVVITDGHVTGSPCGGIKLQAERAREEGIRLFAVAPNQNLKEQGLRDIASTPHELYRNDYATMLPDSTEIDQDTINRIIKVMKHEAYGECYKVSCLEIPGPSGPKGYRGQKGAKGNMGEPGEPGQKGRQGDPGIEGPIGFPGPKGVPGFKGEKGEFGADGRKGAPGLAGKNGTDGQKGKLGRIGPPGCKGDPGNRGPDGYPGEAGSPGERGDQGGKGDPGRPGRRGPPGEIGAKGSKGYQGNSGAPGSPGVKGAKGGPGPRGPKGEPGRRGDPGTKGSPGSDGPKGEKGDPGPEGPRGLAGEVGNKGAKGDRGLPGPRGPQGALGEPGKQGSRGDPGDAGPRGDSGQPGPKGDPGRPGFSYPGPRGAPGEKGEPGPRGPEGGRGDFGLKGEPGRKGEKGEPADPGPPGEPGPRGPRGVPGPEGEPGPPGDPGLTECDVMTYVRETCGCCDCEKRCGALDVVFVIDSSESIGYTNFTLEKNFVINVVNRLGAIAKDPKSETGTRVGVVQYSHEGTFEAIQLDDERIDSLSSFKEAVKNLEWIAGGTWTPSALKFAYDRLIKESRRQKTRVFAVVITDGRHDPRDDDLNLRALCDRDVTVTAIGIGDMFHEKHESENLYSIACDKPQQVRNMTLFSDLVAEKFIDDMEDVLCPDPQIVCPDLPCQTGLDGAVLC

SEQ ID NO: 3327 - protein, 918 aa, Homo Sapiens
MLQGTCSVLLLWGILGAIQAQQQEVISPDTTERNNNCPEKTDCPIHVYFVLDTSESVTMQSPTDILLFHMKQFVPQFISQLQNEFYLDQVALSWRYGGLHFSDQVEVFSPPGSDRASFIKNLQGISSFRRGTFTDCALANMTEQIRQDRSKGTVHFAVVITDGHVTGSPCGGIKLQAERAREEGIRLFAVAPNQNLKEQGLRDIASTPHELYRNDYATMLPDSTEIDQDTINRIIKVMKHEAYGECYKVSCLEIPGPSGPKGYRGQKGAKGNMGEPGEPGQKGRQGDPGIEGPIGFPGPKGVPGFKGEKGEFGADGRKGAPGLAGKNGTDGQKGKLGRIGPPGCKGDPGNRGPDGYPGEAGSPGERGDQGGKGDPGRPGRRGPPGEIGAKGSKGYQGNSGAPGSPGVKGAKGGPGPRGPKGEPGRRGDPGTKGSPGSDGPKGEKGDPGPEGPRGLAGEVGNKGAKGDRGLPGPRGPQGALGEPGKQGSRGDPGDAGPRGDSGQPGPKGDPGRPGFSYPGPRGAPGEKGEPGPRGPEGGRGDFGLKGEPGRKGEKGEPADPGPPGEPGPRGPRGVPGPEGEPGPPGDPGLTECDVMTYVRETCGCCDCEKRCGALDVVFVIDSSESIGYTNFTLEKNFVINVVNRLGAIAKDPKSETGTRVGVVQYSHEGTFEAIQLDDERIDSLSSFKEAVKNLEWIAGGTWTPSALKFAYDRLIKESRRQKTRVFAVVITDGRHDPRDDDLNLRALCDRDVTVTAIGIGDMFHEKHESENLYSIACDKPQQVRNMTLFSDLVAEKFIDDMEDVLCPDPQIVCPDLPCQTDAPWPGGEPPVTFLRTEEGPDATFPRTIPLIQQLLNATELTQDPAAYSQLVAVLVYTAERAKFATGVERQDWMELFIDTFKLVHRDIVGDPETALALC

SEQ ID NO: 3328 - protein, 828 aa, Homo Sapiens; identical to SEQ ID NO: 3326

SEQ ID NO: 3329 - protein, 2971 aa, Homo Sapiens
MRKHRHLPLVAVFCLFLSGFPTTHAQQQQAAQDSADIIFLIDGSNNTGSVNFAVILDFLVNLLEKLPIGTQQIRVGVVQFSDEPRTMFSLDTYSTKAQVLGAVKALGFAGGELANIGLALDFVVENHFTRAGGSRVEEGVPQVLVLISAGPSSDEIRYGVVALKQASVFSFGLGAQAASRAELQHIATDDNLVFTVPEFRSFGDLQEKLLPYIVGVAQRHIVLKPPTIVTQVIEVNKRDIVFLVDGSSALGLANFNAIRDFIAKVIQRLEIGQDLIQVAVAQYADTVRPEFYFNTHPTKREVITAVRKMKPLDGSALYTGSALDFVRNNLFTSSAGYRAAEGIPKLLVLITGGKSLDEISQPAQELKRSSIMAFAIGNKGADQAELEEIAFDSSLVFIPAEFRAAPLQGMLPGLLAPLRTLSGTPEVHSNKRDIIFLLDGSANVGKTNFPYVRDFVMNLVNSLDIGNDNIRVGLVQFSDTPVTEFSLNTYQTKSDILGHLRQLQLQGGSGLNTGSALSYVYANHFTEAGGSRIREHVPQLLLLLTAGQSEDSYLQAANALTRAGILTFCVGASQANKAELEQIAFNPSLVYLMDDFSSLPALPQQLIQPLTTYVSGGVEEVPLAQPESKRDILFLFDGSANLVGQFPVVRDFLYKIIDELNVKPEGTRIAVAQYSDDVKVESRFDEHQSKPEILNLVKRMKIKTGKALNLGYALDYAQRYIFVKSAGSRIEDGVLQFLVLLVAGRSSDRVDGPASNLKQSGVVPFIFQAKNADPAELEQIVLSPAFILAAESLPKIGDLHPQIVNLLKSVHNGAPAPVSGEKDVVFLLDGSEGVRSGFPLLKEFVQRVVESLDVGQDRVRVAVVQYSDRTRPEFYLNSYMNKQDVVNAVRQLTLLGGPTPNTGAALEFVLRNILVSSAGSRITEGVPQLLIVLTADRSGDDVRNPSVVVKRGGAVPIGIGIGNADITEMQTISFIPDFAVAIPTFRQLGTVQQVISERVTQLTREELSRLQPVLQPLPSPGVGGKRDVVFLIDGSQSAGPEFQYVRTLIERLVDYLDVGFDTTRVAVIQFSDDPKVEFLLNAHSSKDEVQNAVQRLRPKGGRQINVGNALEYVSRNIFKRPLGSRIEEGVPQFLVLISSGKSDDEVDDPAVELKQFGVAPFTIARNADQEELVKISLSPEYVFSVSTFRELPSLEQKLLTPITTLTSEQIQKLLASTRYPPPAVESDAADIVFLIDSSEGVRPDGFAHIRDFVSRIVRRLNIGPSKVRVGVVQFSNDVFPEFYLKTYRSQAPVLDAIRRLRLRGGSPLNTGKALEFVARNLFVKSAGSRIEDGVPQHLVLVLGGKSQDDVSRFAQVIRSSGIVSLGVGDRNIDRTELQTITNDPRLVFTVREFRELPNIEERIMNSFGPSAATPAPPGVDTPPPSRPEKKKADIVFLLDGSINFRRDSFQEVLRFVSEIVDTVYEDGDSIQVGLVQYNSDPTDEFFLKDFSTKRQIIDAINKVVYKGGRHANTKVGLEHLRVNHFVPEAGSRLDQRVPQIAFVITGGKSVEDAQDVSLALTQRGVKVFAVGVRNIDSEEVGKIASNSATAFRVGNVQELSELSEQVLETLHDAMHETLCPGVTDAAKACNLDVILGFDGSRDQNVFVAQKGFESKVDAILNRISQMHRVSCSGGRSPTVRVSVVANTPSGPVEAFDFDEYQPEMLEKFRNMRSQHPYVLTEDTLKVYLNKFRQSSPDSVKVVIHFTDGADGDLADLHRASENLRQEGVRALILVGLERVVNLERLMHLEFGRGFMYDRPLRLNLLDLDYELAEQLDNIAEKACCGVPCKCSGQRGDRGPIGSIGPKGIPGEDGYRGYPGDEGGPGERGPPGVNGTQGFQGCPGQRGVKGSRGFPGEKGEVGEIGLDGLDGEDGDKGLPGSSGEKGNPGRRGDKGPRGEKGERGDVGIRGDPGNPGQDSQERGPKGETGDLGPMGVPGRDGVPGGPGETGKNGGFGRRGPPGAKGNKGGPGQPGFEGEQGTRGAQGPAGPAGPPGLIGEQGISGPRGSGGAAGAPGERGRTGPLGRKGEPGEPGPKGGIGNRGPRGETGDDGRDGVGSEGRRGKKGERGFPGYPGPKGNPGEPGLNGTTGPKGIRGRRGNSGPPGIVGQKGDPGYPGPAGPKGNRGDSIDQCALIQSIKDKCPCCYGPLECPVFPTELAFALDTSEGVNQDTFGRMRDVVLSIVNDLTIAESNCPRGARVAVVTYNNEVTTEIRFADSKRKSVLLDKIKNLQVALTSKQQSLETAMSFVARNTFKRVRNGFLMRKVAVFFSNTPTRASPQLREAVLKLSDAGITPLFLTRQEDRQLINALQINNTAVGHALVLPAGRDLTDFLENVLTCHVCLDICNIDPSCGFGSWRPSFRDRRAAGSDVDIDMAFILDSAETTTLFQFNEMKKYIAYLVRQLDMSPDPKASQHFARVAVVQHAPSESVDNASMPPVKVEFSLTDYGSKEKLVDFLSRGMTQLQGTRALGSAIEYTIENVFESAPNPRDLKIVVLMLTGEVPEQQLEEAQRVILQAKCKGYFFVVLGIGRKVNIKEVYTFASEPNDVFFKLVDKSTELNEEPLMRFGRLLPSFVSSENAFYLSPDIRKQCDWFQGDQPTKNLVKFGHKQVNVPNNVTSSPTSNPVTTTKPVTTTKPVTTTTKPVTTTTKPVTIINQPSVKPAAAKPAPAKPVAAKPVATKMATVRPPVAVKPATAAKPVAAKPAAVRPPAAAAAKPVATKPEVPRPQAAKPAATKPATTKPMVKMSREVQVFEITENSAKLHWERAEPPGPYFYDLTVTSAHDQSLVLKQNLTVTDRVIGGLLAGQTYHVAVVCYLRSQVRATYHGSFSTKKSQPPPPQPARSASSSTINLMVSTEPLALTETDICKLPKDEGTCRDFILKWYYDPNTKSCARFWYGGCGGNENKFGSQKECEKVCAPVLAKPGVISVMGT

SEQ ID NO: 3330 - protein, 1237 aa, Homo Sapiens
MRKHRHLPLVAVFCLFLSGFPTTHAQQQQAAQDSADIIFLIDGSNNTGSVNFAVILDFLVNLLEKLPIGTQQIRVGVVQFSDEPRTMFSLDTYSTKAQVLGAVKALGFAGGELANIGLALDFVVENHFTRAGGSRVEEGVPQVLVLISAGPSSDEIRYGVVALKQASVFSFGLGAQAASRAELQHIATDDNLVFTVPEFRSFGDLQEKLLPYIVGVAQRHIVLKPPTIVTQVIEVNKRDIVFLVDGSSALGLANFNAIRDFIAKVIQRLEIGQDLIQVAVAQYADTVRPEFYFNTHPTKREVITAVRKMKPLDGSALYTGSALDFVRNNLFTSSAGYRAAEGIPKLLVLITGGKSLDEISQPAQELKRSSIMAFAIGNKGADQAELEEIAFDSSLVFIPAEFRAAPLQGMLPGLLAPLRTLSGTPEVHSNKRDIIFLLDGSANVGKTNFPYVRDFVMNLVNSLDIGNDNIRVGLVQFSDTPVTEFSLNTYQTKSDILGHLRQLQLQGGSGLNTGSALSYVYANHFTEAGGSRIREHVPQLLLLLTAGQSEDSYLQAANALTRAGILTFCVGASQANKAELEQIAFNPSLVYLMDDFSSLPALPQQLIQPLTTYVSGGVEEVPLAQPESKRDILFLFDGSANLVGQFPVVRDFLYKIIDELNVKPEGTRIAVAQYSDDVKVESRFDEHQSKPEILNLVKRMKIKTGKALNLGYALDYAQRYIFVKSAGSRIEDGVLQFLVLLVAGRSSDRVDGPASNLKQSGVVPFIFQAKNADPAELEQIVLSPAFILAAESLPKIGDLHPQIVNLLKSVHNGAPAPVSGEKDVVFLLDGSEGVRSGFPLLKEFVQRVVESLDVGQDRVRVAVVQYSDRTRPEFYLNSYMNKQDVVNAVRQLTLLGGPTPNTGAALEFVLRNILVSSAGSRITEGVPQLLIVLTADRSGDDVRNPSVVVKRGGAVPIGIGIGNADITEMQTISFIPDFAVAIPTFRQLGTVQQVISERVTQLTREELSRLQPVLQPLPSPGVGGKRDVVFLIDGSQSAGPEFQYVRTLIERLVDYLDVGFDTTRVAVIQFSDDPKVEFLLNAHSSKDEVQNAVQRLRPKGGRQINVGNALEYVSRNIFKRPLGSRIEEGVPQFLVLISSGKSDDEVDDPAVELKQFGVAPFTIARNADQEELVKISLSPEYVFSVSTFRELPSLEQKLLTPITTLTSEQIQKLLASTRYPPPGEMGASEVLLGAFSI

SEQ ID NO: 3331 - protein, 2971 aa, Homo Sapiens; identical to SEQ ID NO: 3329

SEQ ID NO: 3332 - protein, 3177 aa, Homo Sapiens
MRKHRHLPLVAVFCLFLSGFPTTHAQQQQADVKNGAAADIIFLVDSSWTIGEEHFQLVREFLYDVVKSLAVGENDFHFALVQFNGNPHTEFLLNTYRTKQEVLSHISNMSYIGGTNQTGKGLEYIMQSHLTKAAGSRAGDGVPQVIVVLTDGHSKDGLALPSAELKSADVNVFAIGVEDADEGALKEIASEPLNMHMFNLENFTSLHDIVGNLVSCVHSSVSPERAGDTETLKDITAQDSADIIFLIDGSNNTGSVNFAVILDFLVNLLEKLPIGTQQIRVGVVQFSDEPRTMFSLDTYSTKAQVLGAVKALGFAGGELANIGLALDFVVENHFTRAGGSRVEEGVPQVLVLISAGPSSDEIRYGVVALKQASVFSFGLGAQAASRAELQHIATDDNLVFTVPEFRSFGDLQEKLLPYIVGVAQRHIVLKPPTIVTQVIEVNKRDIVFLVDGSSALGLANFNAIRDFIAKVIQRLEIGQDLIQVAVAQYADTVRPEFYFNTHPTKREVITAVRKMKPLDGSALYTGSALDFVRNNLFTSSAGYRAAEGIPKLLVLITGGKSLDEISQPAQELKRSSIMAFAIGNKGADQAELEEIAFDSSLVFIPAEFRAAPLQGMLPGLLAPLRTLSGTPEVHSNKRDIIFLLDGSANVGKTNFPYVRDFVMNLVNSLDIGNDNIRVGLVQFSDTPVTEFSLNTYQTKSDILGHLRQLQLQGGSGLNTGSALSYVYANHFTEAGGSRIREHVPQLLLLLTAGQSEDSYLQAANALTRAGILTFCVGASQANKAELEQIAFNPSLVYLMDDFSSLPALPQQLIQPLTTYVSGGVEEVPLAQPESKRDILFLFDGSANLVGQFPVVRDFLYKIIDELNVKPEGTRIAVAQYSDDVKVESRFDEHQSKPEILNLVKRMKIKTGKALNLGYALDYAQRYIFVKSAGSRIEDGVLQFLVLLVAGRSSDRVDGPASNLKQSGVVPFIFQAKNADPAELEQIVLSPAFILAAESLPKIGDLHPQIVNLLKSVHNGAPAPVSGEKDVVFLLDGSEGVRSGFPLLKEFVQRVVESLDVGQDRVRVAVVQYSDRTRPEFYLNSYMNKQDVVNAVRQLTLLGGPTPNTGAALEFVLRNILVSSAGSRITEGVPQLLIVLTADRSGDDVRNPSVVVKRGGAVPIGIGIGNADITEMQTISFIPDFAVAIPTFRQLGTVQQVISERVTQLTREELSRLQPVLQPLPSPGVGGKRDVVFLIDGSQSAGPEFQYVRTLIERLVDYLDVGFDTTRVAVIQFSDDPKVEFLLNAHSSKDEVQNAVQRLRPKGGRQINVGNALEYVSRNIFKRPLGSRIEEGVPQFLVLISSGKSDDEVDDPAVELKQFGVAPFTIARNADQEELVKISLSPEYVFSVSTFRELPSLEQKLLTPITTLTSEQIQKLLASTRYPPPAVESDAADIVFLIDSSEGVRPDGFAHIRDFVSRIVRRLNIGPSKVRVGVVQFSNDVFPEFYLKTYRSQAPVLDAIRRLRLRGGSPLNTGKALEFVARNLFVKSAGSRIEDGVPQHLVLVLGGKSQDDVSRFAQVIRSSGIVSLGVGDRNIDRTELQTITNDPRLVFTVREFRELPNIEERIMNSFGPSAATPAPPGVDTPPPSRPEKKKADIVFLLDGSINFRRDSFQEVLRFVSEIVDTVYEDGDSIQVGLVQYNSDPTDEFFLKDFSTKRQIIDAINKVVYKGGRHANTKVGLEHLRVNHFVPEAGSRLDQRVPQIAFVITGGKSVEDAQDVSLALTQRGVKVFAVGVRNIDSEEVGKIASNSATAFRVGNVQELSELSEQVLETLHDAMHETLCPGVTDAAKACNLDVILGFDGSRDQNVFVAQKGFESKVDAILNRISQMHRVSCSGGRSPTVRVSVVANTPSGPVEAFDFDEYQPEMLEKFRNMRSQHPYVLTEDTLKVYLNKFRQSSPDSVKVVIHFTDGADGDLADLHRASENLRQEGVRALILVGLERVVNLERLMHLEFGRGFMYDRPLRLNLLDLDYELAEQLDNIAEKACCGVPCKCSGQRGDRGPIGSIGPKGIPGEDGYRGYPGDEGGPGERGPPGVNGTQGFQGCPGQRGVKGSRGFPGEKGEVGEIGLDGLDGEDGDKGLPGSSGEKGNPGRRGDKGPRGEKGERGDVGIRGDPGNPGQDSQERGPKGETGDLGPMGVPGRDGVPGGPGETGKNGGFGRRGPPGAKGNKGGPGQPGFEGEQGTRGAQGPAGPAGPPGLIGEQGISGPRGSGGAAGAPGERGRTGPLGRKGEPGEPGPKGGIGNRGPRGETGDDGRDGVGSEGRRGKKGERGFPGYPGPKGNPGEPGLNGTTGPKGIRGRRGNSGPPGIVGQKGDPGYPGPAGPKGNRGDSIDQCALIQSIKDKCPCCYGPLECPVFPTELAFALDTSEGVNQDTFGRMRDVVLSIVNDLTIAESNCPRGARVAVVTYNNEVTTEIRFADSKRKSVLLDKIKNLQVALTSKQQSLETAMSFVARNTFKRVRNGFLMRKVAVFFSNTPTRASPQLREAVLKLSDAGITPLFLTRQEDRQLINALQINNTAVGHALVLPAGRDLTDFLENVLTCHVCLDICNIDPSCGFGSWRPSFRDRRAAGSDVDIDMAFILDSAETTTLFQFNEMKKYIAYLVRQLDMSPDPKASQHFARVAVVQHAPSESVDNASMPPVKVEFSLTDYGSKEKLVDFLSRGMTQLQGTRALGSAIEYTIENVFESAPNPRDLKIVVLMLTGEVPEQQLEEAQRVILQAKCKGYFFVVLGIGRKVNIKEVYTFASEPNDVFFKLVDKSTELNEEPLMRFGRLLPSFVSSENAFYLSPDIRKQCDWFQGDQPTKNLVKFGHKQVNVPNNVTSSPTSNPVTTTKPVTTTKPVTTTTKPVTTTTKPVTIINQPSVKPAAAKPAPAKPVAAKPVATKMATVRPPVAVKPATAAKPVAAKPAAVRPPAAAAAKPVATKPEVPRPQAAKPAATKPATTKPMVKMSREVQVFEITENSAKLHWERAEPPGPYFYDLTVTSAHDQSLVLKQNLTVTDRVIGGLLAGQTYHVAVVCYLRSQVRATYHGSFSTKKSQPPPPQPARSASSSTINLMVSTEPLALTETDICKLPKDEGTCRDFILKWYYDPNTKSCARFWYGGCGGNENKFGSQKECEKVCAPVLAKPGVISVMGT

SEQ ID NO: 3333 - protein, 708 aa, Homo Sapiens
MRKHRHLPLVAVFCLFLSGFPTTHAQQQQADVKNGAAADIIFLVDSSWTIGEEHFQLVREFLYDVVKSLAVGENDFHFALVQFNGNPHTEFLLNTYRTKQEVLSHISNMSYIGGTNQTGKGLEYIMQSHLTKAAGSRAGDGVPQVIVVLTDGHSKDGLALPSAELKSADVNVFAIGVEDADEGALKEIASEPLNMHMFNLENFTSLHDIVGNLVSCVHSSVSPERAGDTETLKDITAQDSADIIFLIDGSNNTGSVNFAVILDFLVNLLEKLPIGTQQIRVGVVQFSDEPRTMFSLDTYSTKAQVLGAVKALGFAGGELANIGLALDFVVENHFTRAGGSRVEEGVPQVLVLISAGPSSDEIRYGVVALKQASVFSFGLGAQAASRAELQHIATDDNLVFTVPEFRSFGDLQEKLLPYIVGVAQRHIVLKPPTIVTQVIEVNKRDIVFLVDGSSALGLANFNAIRDFIAKVIQRLEIGQDLIQVAVAQYADTVRPEFYFNTHPTKREVITAVRKMKPLDGSALYTGSALDFVRNNLFTSSAGYRAAEGIPKLLVLITGGKSLDEISQPAQELKRSSIMAFAIGNKGADQAELEEIAFDSSLVFIPAEFRAAPLQGMLPGLLAPLRTLSGTPEESKRDILFLFDGSANLVGQFPVVRDFLYKIIDELNVKPEGTRIAVAQYSDDVKVESRFDEHQSKPEILNLVKRMKI

SEQ ID NO: 3334 - protein, 2569 aa, Homo Sapiens
MRKHRHLPLVAVFCLFLSGFPTTHAQQQQAVIEVNKRDIVFLVDGSSALGLANFNAIRDFIAKVIQRLEIGQDLIQVAVAQYADTVRPEFYFNTHPTKREVITAVRKMKPLDGSALYTGSALDFVRNNLFTSSAGYRAAEGIPKLLVLITGGKSLDEISQPAQELKRSSIMAFAIGNKGADQAELEEIAFDSSLVFIPAEFRAAPLQGMLPGLLAPLRTLSGTPEESKRDILFLFDGSANLVGQFPVVRDFLYKIIDELNVKPEGTRIAVAQYSDDVKVESRFDEHQSKPEILNLVKRMKIKTGKALNLGYALDYAQRYIFVKSAGSRIEDGVLQFLVLLVAGRSSDRVDGPASNLKQSGVVPFIFQAKNADPAELEQIVLSPAFILAAESLPKIGDLHPQIVNLLKSVHNGAPAPVSGEKDVVFLLDGSEGVRSGFPLLKEFVQRVVESLDVGQDRVRVAVVQYSDRTRPEFYLNSYMNKQDVVNAVRQLTLLGGPTPNTGAALEFVLRNILVSSAGSRITEGVPQLLIVLTADRSGDDVRNPSVVVKRGGAVPIGIGIGNADITEMQTISFIPDFAVAIPTFRQLGTVQQVISERVTQLTREELSRLQPVLQPLPSPGVGGKRDVVFLIDGSQSAGPEFQYVRTLIERLVDYLDVGFDTTRVAVIQFSDDPKVEFLLNAHSSKDEVQNAVQRLRPKGGRQINVGNALEYVSRNIFKRPLGSRIEEGVPQFLVLISSGKSDDEVDDPAVELKQFGVAPFTIARNADQEELVKISLSPEYVFSVSTFRELPSLEQKLLTPITTLTSEQIQKLLASTRYPPPAVESDAADIVFLIDSSEGVRPDGFAHIRDFVSRIVRRLNIGPSKVRVGVVQFSNDVFPEFYLKTYRSQAPVLDAIRRLRLRGGSPLNTGKALEFVARNLFVKSAGSRIEDGVPQHLVLVLGGKSQDDVSRFAQVIRSSGIVSLGVGDRNIDRTELQTITNDPRLVFTVREFRELPNIEERIMNSFGPSAATPAPPGVDTPPPSRPEKKKADIVFLLDGSINFRRDSFQEVLRFVSEIVDTVYEDGDSIQVGLVQYNSDPTDEFFLKDFSTKRQIIDAINKVVYKGGRHANTKVGLEHLRVNHFVPEAGSRLDQRVPQIAFVITGGKSVEDAQDVSLALTQRGVKVFAVGVRNIDSEEVGKIASNSATAFRVGNVQELSELSEQVLETLHDAMHETLCPGVTDAAKACNLDVILGFDGSRDQNVFVAQKGFESKVDAILNRISQMHRVSCSGGRSPTVRVSVVANTPSGPVEAFDFDEYQPEMLEKFRNMRSQHPYVLTEDTLKVYLNKFRQSSPDSVKVVIHFTDGADGDLADLHRASENLRQEGVRALILVGLERVVNLERLMHLEFGRGFMYDRPLRLNLLDLDYELAEQLDNIAEKACCGVPCKCSGQRGDRGPIGSIGPKGIPGEDGYRGYPGDEGGPGERGPPGVNGTQGFQGCPGQRGVKGSRGFPGEKGEVGEIGLDGLDGEDGDKGLPGSSGEKGNPGRRGDKGPRGEKGERGDVGIRGDPGNPGQDSQERGPKGETGDLGPMGVPGRDGVPGGPGETGKNGGFGRRGPPGAKGNKGGPGQPGFEGEQGTRGAQGPAGPAGPPGLIGEQGISGPRGSGGAAGAPGERGRTGPLGRKGEPGEPGPKGGIGNRGPRGETGDDGRDGVGSEGRRGKKGERGFPGYPGPKGNPGEPGLNGTTGPKGIRGRRGNSGPPGIVGQKGDPGYPGPAGPKGNRGDSIDQCALIQSIKDKCPFHGPLECPVFPTELAFALDTSEGVNQDTFGRMRDVVLSIVNDLTIAESNCPRGARVAVVTYNNEVTTEIRFADSKRKSVLLDKIKNLQVALTSKQQSLETAMSFVARNTFKRVRNGFLMRKVAVFFSNTPTRASPQLREAVLKLSDAGITPLFLTRQEDRQLINALQINNTAVGHALVLPAGRDLTDFLENVLTCHVCLDICNIDPSCGFGSWRPSFRDRRAAGSDVDIDMAFILDSAETTTLFQFNEMKKYIAYLVRQLDMSPDPKASQHFARVAVVQHAPSESVDNASMPPVKVEFSLTDYGSKEKLVDFLSRGMTQLQGTRALGSAIEYTIENVFESAPNPRDLKIVVLMLTGEVPEQQLEEAQRVILQAKCKGYFFVVLGIGRKVNIKEVYTFASEPNDVFFKLVDKSTELNEEPLMRFGRLLPSFVSSENAFYLSPDIRKQCDWFQGDQPTKNLVKFGHKQVNVPNNVTSSPTSNPVTTTKPVTTTKPVTTTTKPVTTTTKPVTIINQPSVKPAAAKPAPAKPVAAKPVATKMATVRPPVAVKPATAAKPVAAKPAAVRPPAAAAAKPVATKPEVPRPQAAKPAATKPATTKPMVKMSREVQVFEITENSAKLHWERAEPPGPYFYDLTVTSAHDQSLVLKQNLTVTDRVIGGLLAGQTYHVAVVCYLRSQVRATYHGSFSTKKSQPPPPQPARSASSSTINLMVSTEPLALTETDICKLPKDEGTCRDFILKWYYDPNTKSCARFWYGGCGGNENKFGSQKECEKVCAPVLAKPGVISVMGT

SEQ ID NO: 3335 - protein, 2570 aa, Homo Sapiens
MRKHRHLPLVAVFCLFLSGFPTTHAQQQQAVIEVNKRDIVFLVDGSSALGLANFNAIRDFIAKVIQRLEIGQDLIQVAVAQYADTVRPEFYFNTHPTKREVITAVRKMKPLDGSALYTGSALDFVRNNLFTSSAGYRAAEGIPKLLVLITGGKSLDEISQPAQELKRSSIMAFAIGNKGADQAELEEIAFDSSLVFIPAEFRAAPLQGMLPGLLAPLRTLSGTPEESKRDILFLFDGSANLVGQFPVVRDFLYKIIDELNVKPEGTRIAVAQYSDDVKVESRFDEHQSKPEILNLVKRMKIKTGKALNLGYALDYAQRYIFVKSAGSRIEDGVLQFLVLLVAGRSSDRVDGPASNLKQSGVVPFIFQAKNADPAELEQIVLSPAFILAAESLPKIGDLHPQIVNLLKSVHNGAPAPVSGEKDVVFLLDGSEGVRSGFPLLKEFVQRVVESLDVGQDRVRVAVVQYSDRTRPEFYLNSYMNKQDVVNAVRQLTLLGGPTPNTGAALEFVLRNILVSSAGSRITEGVPQLLIVLTADRSGDDVRNPSVVVKRGGAVPIGIGIGNADITEMQTISFIPDFAVAIPTFRQLGTVQQVISERVTQLTREELSRLQPVLQPLPSPGVGGKRDVVFLIDGSQSAGPEFQYVRTLIERLVDYLDVGFDTTRVAVIQFSDDPKVEFLLNAHSSKDEVQNAVQRLRPKGGRQINVGNALEYVSRNIFKRPLGSRIEEGVPQFLVLISSGKSDDEVDDPAVELKQFGVAPFTIARNADQEELVKISLSPEYVFSVSTFRELPSLEQKLLTPITTLTSEQIQKLLASTRYPPPAVESDAADIVFLIDSSEGVRPDGFAHIRDFVSRIVRRLNIGPSKVRVGVVQFSNDVFPEFYLKTYRSQAPVLDAIRRLRLRGGSPLNTGKALEFVARNLFVKSAGSRIEDGVPQHLVLVLGGKSQDDVSRFAQVIRSSGIVSLGVGDRNIDRTELQTITNDPRLVFTVREFRELPNIEERIMNSFGPSAATPAPPGVDTPPPSRPEKKKADIVFLLDGSINFRRDSFQEVLRFVSEIVDTVYEDGDSIQVGLVQYNSDPTDEFFLKDFSTKRQIIDAINKVVYKGGRHANTKVGLEHLRVNHFVPEAGSRLDQRVPQIAFVITGGKSVEDAQDVSLALTQRGVKVFAVGVRNIDSEEVGKIASNSATAFRVGNVQELSELSEQVLETLHDAMHETLCPGVTDAAKACNLDVILGFDGSRDQNVFVAQKGFESKVDAILNRISQMHRVSCSGGRSPTVRVSVVANTPSGPVEAFDFDEYQPEMLEKFRNMRSQHPYVLTEDTLKVYLNKFRQSSPDSVKVVIHFTDGADGDLADLHRASENLRQEGVRALILVGLERVVNLERLMHLEFGRGFMYDRPLRLNLLDLDYELAEQLDNIAEKACCGVPCKCSGQRGDRGPIGSIGPKGIPGEDGYRGYPGDEGGPGERGPPGVNGTQGFQGCPGQRGVKGSRGFPGEKGEVGEIGLDGLDGEDGDKGLPGSSGEKGNPGRRGDKGPRGEKGERGDVGIRGDPGNPGQDSQERGPKGETGDLGPMGVPGRDGVPGGPGETGKNGGFGRRGPPGAKGNKGGPGQPGFEGEQGTRGAQGPAGPAGPPGLIGEQGISGPRGSGGAAGAPGERGRTGPLGRKGEPGEPGPKGGIGNRGPRGETGDDGRDGVGSEGRRGKKGERGFPGYPGPKGNPGEPGLNGTTGPKGIRGRRGNSGPPGIVGQKGDPGYPGPAGPKGNRGDSIDQCALIQSIKDKCPCCYGPLECPVFPTELAFALDTSEGVNQDTFGRMRDVVLSIVNDLTIAESNCPRGARVAVVTYNNEVTTEIRFADSKRKSVLLDKIKNLQVALTSKQQSLETAMSFVARNTFKRVRNGFLMRKVAVFFSNTPTRASPQLREAVLKLSDAGITPLFLTRQEDRQLINALQINNTAVGHALVLPAGRDLTDFLENVLTCHVCLDICNIDPSCGFGSWRPSFRDRRAAGSDVDIDMAFILDSAETTTLFQFNEMKKYIAYLVRQLDMSPDPKASQHFARVAVVQHAPSESVDNASMPPVKVEFSLTDYGSKEKLVDFLSRGMTQLQGTRALGSAIEYTIENVFESAPNPRDLKIVVLMLTGEVPEQQLEEAQRVILQAKCKGYFFVVLGIGRKVNIKEVYTFASEPNDVFFKLVDKSTELNEEPLMRFGRLLPSFVSSENAFYLSPDIRKQCDWFQGDQPTKNLVKFGHKQVNVPNNVTSSPTSNPVTTTKPVTTTKPVTTTTKPVTTTTKPVTIINQPSVKPAAAKPAPAKPVAAKPVATKMATVRPPVAVKPATAAKPVAAKPAAVRPPAAAAAKPVATKPEVPRPQAAKPAATKPATTKPMVKMSREVQVFEITENSAKLHWERAEPPGPYFYDLTVTSAHDQSLVLKQNLTVTDRVIGGLLAGQTYHVAVVCYLRSQVRATYHGSFSTKKSQPPPPQPARSASSSTINLMVSTEPLALTETDICKLPKDEGTCRDFILKWYYDPNTKSCARFWYGGCGGNENKFGSQKECEKVCAPVLAKPGVISVMGT

SEQ ID NO: 3336 - protein, 1036 aa, Homo Sapiens
MRKHRHLPLVAVFCLFLSGFPTTHAQQQQAVIEVNKRDIVFLVDGSSALGLANFNAIRDFIAKVIQRLEIGQDLIQVAVAQYADTVRPEFYFNTHPTKREVITAVRKMKPLDGSALYTGSALDFVRNNLFTSSAGYRAAEGIPKLLVLITGGKSLDEISQPAQELKRSSIMAFAIGNKGADQAELEEIAFDSSLVFIPAEFRAAPLQGMLPGLLAPLRTLSGTPEVHSNKRDIIFLLDGSANVGKTNFPYVRDFVMNLVNSLDIGNDNIRVGLVQFSDTPVTEFSLNTYQTKSDILGHLRQLQLQGGSGLNTGSALSYVYANHFTEAGGSRIREHVPQLLLLLTAGQSEDSYLQAANALTRAGILTFCVGASQANKAELEQIAFNPSLVYLMDDFSSLPALPQQLIQPLTTYVSGGVEEVPLAQPESKRDILFLFDGSANLVGQFPVVRDFLYKIIDELNVKPEGTRIAVAQYSDDVKVESRFDEHQSKPEILNLVKRMKIKTGKALNLGYALDYAQRYIFVKSAGSRIEDGVLQFLVLLVAGRSSDRVDGPASNLKQSGVVPFIFQAKNADPAELEQIVLSPAFILAAESLPKIGDLHPQIVNLLKSVHNGAPAPVSGEKDVVFLLDGSEGVRSGFPLLKEFVQRVVESLDVGQDRVRVAVVQYSDRTRPEFYLNSYMNKQDVVNAVRQLTLLGGPTPNTGAALEFVLRNILVSSAGSRITEGVPQLLIVLTADRSGDDVRNPSVVVKRGGAVPIGIGIGNADITEMQTISFIPDFAVAIPTFRQLGTVQQVISERVTQLTREELSRLQPVLQPLPSPGVGGKRDVVFLIDGSQSAGPEFQYVRTLIERLVDYLDVGFDTTRVAVIQFSDDPKVEFLLNAHSSKDEVQNAVQRLRPKGGRQINVGNALEYVSRNIFKRPLGSRIEEGVPQFLVLISSGKSDDEVDDPAVELKQFGVAPFTIARNADQEELVKISLSPEYVFSVSTFRELPSLEQKLLTPITTLTSEQIQKLLASTRYPPPGEMGASEVLLGAFSI

SEQ ID NO: 3337 - protein, 173 aa, Homo Sapiens
PIGTQQIRVGVVQFSDEPRTMFSLDTYSTKAQVLGAVKALGFAGGELANIGLALDFVVENHFTRAGGSRVEEGVPQVLVLISAGPSSDEIRYGVVALKQASVFSFGLGAQAASRAELQHIATDDNLVFTVPEFRSFGDLQEKLLPYIVGVAQRHIVLKPPTIVTQEYGLNENW

SEQ ID NO: 3338 - protein, 557 aa, Homo Sapiens
IGRALLWTTENLFPETPYLRKHKVIFVVSAGENYERKEFVKMMALRAKCQGYVIFVISLGSTRKDDMEELASYPLDQHLIQLGRIHKPDLNYIAKFLKPFLYSVRRGFNQYPPPMLEDACRLINLGGENIQNDGFQFVTELQEDFLGGNGFIGQELNSGRESPFVKTEDNGSDYLVYLPSQMFEPQKLMINYEKDQKSAEIASLTSGHENYGRKEEPDHTYEPGDVSLQEYYMDVAFLIDASQRVGSDEFKEVKAFITSVLDYFHIAPTPLTSTLGDRVAVLSYSPPGYMPNTEECPVYLEFDLVTYNSIHQMKHHLQDSQQLNGDVFIGHALQWTIDNVFVGTPNLRKNKVIFVISAGETNSLDKDVLRNVSLRAKCQGYSIFVFSFGPKHNDKELEELASHPLDHHLVQLGRTHKPDWNYIIKFVKPFVHLIRRAINKYPTEDMKATCVNMTSPNPENGGTENTVLLLPGIYEIKTENGDLFDEFDSQAQHLLVLGNNHSSGSETATDLMQKLYLLFSTEKLAMKDKEKAHLEEISALVVDKQQEKEDGEDTRSS

SEQ ID NO: 3339 - protein, 2611 aa, Homo Sapiens
MKILLIIFVLIIWTETLADQSPGPGPVYADVVFLVDSSDHLGPKSFPFVKTFINKMINSLPIEANKYRVALAQYSDEFHSEFHLSTFKGRSPMLNHLKKNFQFIGGSLQIGKALQEAHRTYFSAPINGRDRKQFPPILVVLASAESEDEVEEASKALQKDGVKIISVGVQKASEENLKAMATSHFHFNLRTIRDLSTFSQNMTQIIKDVTKYKEGAVDADMQVHFPISCQKDSLADLVFLVDESLGTGGNLRHLQTFLENITSSMDVKENCMRLGLMSYSNSAKTISFLKSSTTQSEFQQQIKNLSIQVGKSNTGAAIDQMRRDGFSESYGSRRAQGVPQIAVLVTHRPSDDEVHDAALNLRLEDVNVFALSIQGANNTQLEEIVSYPPEQTISTLKSYADLETYSTKFLKKLQNEIWSQISTYAEQRNLDKTGCVDTKEADIHFLIDGSSSIQEKQFEQIKRFMLEVTEMFSIGPDKVRVGVVQYSDDTEVEFYITDYSNDIDLRKAIFNIKQLTGGTYTGKALDYILQIIKNGMKDRMSKVPCYLIVLTDGMSTDRVVEPAKRLRAEQITVHAVGIGAANKIELQEIAGKEERVSFGQNFDALKSIKNEVVREICAEKGCEDMKADIMFLVDSSWSIGNENFRKMKIFMKNLLTKIQIGADKTQIGVVQFSDKTKEEFQLNRYFTQQEISDAIDRMSLINEGTLTGKALNFVGQYFTHSKGARLGAKKFLILITDGVAQDDVRDPARILRGKDVTIFSVGVYNANRSQLEEISGDSSLVFHVENFDHLKALERKLIFRVCALHDCKRITLLDVVFVLDHSGSIKKQYQDHMINLTIHLVKKADVGRDRVQFGALKYSDQPNILFYLNTYSNRSAIIENLRKRRDTGGNTYTAKALKHANALFTEEHGSRIKQNVKQMLIVITDGESHDHDQLNDTALELRNKGITIFAVGVGKANQKELEGMAGNKNNTIYVDNFDKLKDVFTLVQERMCTEAPEVCHLQEADVIFLCDGSDRVSNSDFVTMTTFLSDLIDNFDIQSQRMKIGMAQFGSNYQSIIELKNSLTKTQWKTQIQNVSKSGGFPRIDFALKKVSNMFNLHAGGRRNAGVPQTLVVITSGDPRYDVADAVKTLKDLGICVLVLGIGDVYKEHLLPITGNSEKIITFQDFDKLKNVDVKKRIIREICQSCGKTNCFMDIVVGFDISTHVQGQPLFQGHPQLESYLPGILEDISSIKGVSCGAGTEAQVSLAFKVNSDQGFPAKFQIYQKAVFDSLLQVNVSGPTHLNAQFLRSLWDTFKDKSASRGQVLLIFSDGLQSESNIMLENQSDRLREAGLDALLVVSLNTTAHHEFSSFEFGKRFDYRTHLTIGMRELGKKLSQYLGNIAERTCCCTFCKCPGIPGPHGTRGLQAMKGSQGLKGSRGHRGEDGNPGVRGDTGPQGDKGIAGCPGAWGQKGLKGFSGPKGGHGDDGIDGLDGEEGCHGFPGIKGEKGDPGSQGSPGSRGAPGQYGEKGFPGDPGNPGQNNNIKGQKGSKGEQGRQGRSGQKGVQGSPSSRGSRGREGQRGLRGVSGEPGNPGPTGTLGAEGLQGPQGSQGNPGRKGEKGSQGQKGPQGSPGLMGAKGSTGRPGLLGKKGEPGLPGDLGPVGQTGQRGRQGDSGIPGYGQMGRKGVKGPRGFPGDAGQKGDIGNPGIPGGPGPKGFRGLALTVGLKGEEGSRGLPGPPGQRGIKGMAGQPVYSQCDLIRFLREHSLFKNAYPTELVFALDNSYDVTEESFNKTRDIITSIVNDLNIRENNCPVGARVAMVSYNSGTSYLIRWSDYNRKKQLLQQLSQIKYQDTTEPRDVGNAMRFVTRNVFKRTYAGANVRRVAVFFSNGQTASRSSIITATMEFSALDISPTVFAFDERVFLEAFGFDNTGTFQVIPVPPNGENQTLERLRRCALCYDKCFPNACIREAFLPEDSYMDVVFLIDNSRNIAKDEFKAVKALVSSVIDNFNIASDPLISDSGDRIALLSYSPWESSRRKMGTVKTEFDFITYDNQLLMKNHIQTSFQQLNGEATIGRALLWTTENLFPETPYLRKHKVIFVVSAGENYERKEFVKMMALRAKCQGYVIFVISLGSTRKDDMEELASYPLDQHLIQLGRIHKPDLNYIAKFLKPFLYSVRRGFNQYPPPMLEDACRLINLGGENIQNDGFQFVTELQEDFLGGNGFIGQELNSGRESPFVKTEDNGSDYLVYLPSQMFEPQKLMINYEKDQKSAEIASLTSGHENYGRKEEPDHTYEPGDVSLQEYYMDVAFLIDASQRVGSDEFKEVKAFITSVLDYFHIAPTPLTSTLGDRVAVLSYSPPGYMPNTEECPVYLEFDLVTYNSIHQMKHHLQDSQQLNGDVFIGHALQWTIDNVFVGTPNLRKNKVIFVISAGETNSLDKDVLRNVSLRAKCQGYSIFVFSFGPKHNDKELEELASHPLDHHLVQLGRTHKPDWNYIIKFVKPFVHLIRRAINKYPTEDMKATCVNMTSPNPENGGTENTVLLLPGIYEIKTENGDLFDEFDSQAQHLLVLGNNHSSGSETATDLMQKLYLLFSTEKLAMKDKEKAHLEEISALVVDKQQEKEDKEMEATDI

SEQ ID NO: 3340 - protein, 2615 aa, Homo Sapiens
MKILLIIFVLIIWTETLADQSPGPGPVYADVVFLVDSSDHLGPKSFPFVKTFINKMINSLPIEANKYRVALAQYSDEFHSEFHLSTFKGRSPMLNHLKKNFQFIGGSLQIGKALQEAHRTYFSAPINGRDRKQFPPILVVLASAESEDEVEEASKALQKDGVKIISVGVQKASEENLKAMATSHFHFNLRTIRDLSTFSQNMTQIIKDVTKYKEGAVDADMQVHFPISCQKDSLADLVFLVDESLGTGGNLRHLQTFLENITSSMDVKENCMRLGLMSYSNSAKTISFLKSSTTQSEFQQQIKNLSIQVGKSNTGAAIDQMRRDGFSESYGSRRAQGVPQIAVLVTHRPSDDEVHDAALNLRLEDVNVFALSIQGANNTQLEEIVSYPPEQTISTLKSYADLETYSTKFLKKLQNEIWSQISTYAEQRNLDKTGCVDTKEADIHFLIDGSSSIQEKQFEQIKRFMLEVTEMFSIGPDKVRVGVVQYSDDTEVEFYITDYSNDIDLRKAIFNIKQLTGGTYTGKALDYILQIIKNGMKDRMSKVPCYLIVLTDGMSTDRVVEPAKRLRAEQITVHAVGIGAANKIELQEIAGKEERVSFGQNFDALKSIKNEVVREICAEKGCEDMKADIMFLVDSSWSIGNENFRKMKIFMKNLLTKIQIGADKTQIGVVQFSDKTKEEFQLNRYFTQQEISDAIDRMSLINEGTLTGKALNFVGQYFTHSKGARLGAKKFLILITDGVAQDDVRDPARILRGKDVTIFSVGVYNANRSQLEEISGDSSLVFHVENFDHLKALERKLIFRVCALHDCKRITLLDVVFVLDHSGSIKKQYQDHMINLTIHLVKKADVGRDRVQFGALKYSDQPNILFYLNTYSNRSAIIENLRKRRDTGGNTYTAKALKHANALFTEEHGSRIKQNVKQMLIVITDGESHDHDQLNDTALELRNKGITIFAVGVGKANQKELEGMAGNKNNTIYVDNFDKLKDVFTLVQERMCTEAPEVCHLQEADVIFLCDGSDRVSNSDFVTMTTFLSDLIDNFDIQSQRMKIGMAQFGSNYQSIIELKNSLTKTQWKTQIQNVSKSGGFPRIDFALKKVSNMFNLHAGGRRNAGVPQTLVVITSGDPRYDVADAVKTLKDLGICVLVLGIGDVYKEHLLPITGNSEKIITFQDFDKLKNVDVKKRIIREICQSCGKTNCFMDIVVGFDISTHVQGQPLFQGHPQLESYLPGILEDISSIKGVSCGAGTEAQVSLAFKVNSDQGFPAKFQIYQKAVFDSLLQVNVSGPTHLNAQFLRSLWDTFKDKSASRGQVLLIFSDGLQSESNIMLENQSDRLREAGLDALLVVSLNTTAHHEFSSFEFGKRFDYRTHLTIGMRELGKKLSQYLGNIAERTCCCTFCKCPGIPGPHGTRGLQAMKGSQGLKGSRGHRGEDGNPGVRGDTGPQGDKGIAGCPGAWGQKGLKGFSGPKGGHGDDGIDGLDGEEGCHGFPGIKGEKGDPGSQGSPGSRGAPGQYGEKGFPGDPGNPGQNNNIKGQKGSKGEQGRQGRSGQKGVQGSPSSRGSRGREGQRGLRGVSGEPGNPGPTGTLGAEGLQGPQGSQGNPGRKGEKGSQGQKGPQGSPGLMGAKGSTGRPGLLGKKGEPGLPGDLGPVGQTGQRGRQGDSGIPGYGQMGRKGVKGPRGFPGDAGQKGDIGNPGIPGGPGPKGFRGLALTVGLKGEEGSRGLPGPPGQRGIKGMAGQPVYSQCDLIRFLREHSPCWKEKCPAYPTELVFALDNSYDVTEESFNKTRDIITSIVNDLNIRENNCPVGARVAMVSYNSGTSYLIRWSDYNRKKQLLQQLSQIKYQDTTEPRDVGNAMRFVTRNVFKRTYAGANVRRVAVFFSNGQTASRSSIITATMEFSALDISPTVFAFDERVFLEAFGFDNTGTFQVIPVPPNGENQTLERLRRCALCYDKCFPNACIREAFLPEDSYMDVVFLIDNSRNIAKDEFKAVKALVSSVIDNFNIASDPLISDSGDRIALLSYSPWESSRRKMGTVKTEFDFITYDNQLLMKNHIQTSFQQLNGEATIGRALLWTTENLFPETPYLRKHKVIFVVSAGENYERKEFVKMMALRAKCQGYVIFVISLGSTRKDDMEELASYPLDQHLIQLGRIHKPDLNYIAKFLKPFLYSVRRGFNQYPPPMLEDACRLINLGGENIQNDGFQFVTELQEDFLGGNGFIGQELNSGRESPFVKTEDNGSDYLVYLPSQMFEPQKLMINYEKDQKSAEIASLTSGHENYGRKEEPDHTYEPGDVSLQEYYMDVAFLIDASQRVGSDEFKEVKAFITSVLDYFHIAPTPLTSTLGDRVAVLSYSPPGYMPNTEECPVYLEFDLVTYNSIHQMKHHLQDSQQLNGDVFIGHALQWTIDNVFVGTPNLRKNKVIFVISAGETNSLDKDVLRNVSLRAKCQGYSIFVFSFGPKHNDKELEELASHPLDHHLVQLGRTHKPDWNYIIKFVKPFVHLIRRAINKYPTEDMKATCVNMTSPNPENGGTENTVLLLPGIYEIKTENGDLFDEFDSQAQHLLVLGNNHSSGSETATDLMQKLYLLFSTEKLAMKDKEKAHLEEISALVVDKQQEKEDKEMEATDI

SEQ ID NO: 3341 - protein, 443 aa, Homo Sapiens
NQYPPPMLEDACRLINLGGENIQNDGFQFVTELQEDFLGGNGFIGQELNSGRESPFVKTEDNGSDYLVYLPSQMFEPQKLMINYEKDQKSAEIASLTSGHENYGRKEEPDHTYEPGDVSLQEYYMDVAFLIDASQRVGSDEFKEVKAFITSVLDYFHIAPTPLTSTLGDRVAVLSYSPPGYMPNTEECPVYLEFDLVTYNSIHQMKHHLQDSQQLNGDVFIGHALQWTIDNVFVGTPNLRKNKVIFVISAGETNSLDKDVLRNVSLRAKCQGYSIFVFSFGPKHNDKELEELASHPLDHHLVQLGRTHKPDWNYIIKFVKPFVHLIRRAINKYPTEDMKATCVNMTSPNPENGGTENTVLLLPGIYEIKTENGDLFDEFDSQAQHLLVLGNNHSSGSETATDLMQKLYLLFSTEKLAMKDKEKAHLEEISALVVDKQQEKEDL

SEQ ID NO: 3342 - protein, 778 aa, Homo Sapiens
  misc_feature (1)..(1): Xaa can be any naturally occurring amino acid
XEKCPAYPTELVFALDNSYDVTEESFNKTRDIITSIVNDLNIRENNCPVGARVAMVSYNSGTSYLIRWSDYNRKKQLLQQLSQIKYQDTTEPRDVGNAMRFVTRNVFKRTYAGANVRRVAVFFSNGQTASRSSIITATMEFSALDISPTVFAFDERVFLEAFGFDNTGTFQVIPVPPNGENQTLERLRRCALCYDKCFPNACIREAFLPEDSYMDVVFLIDNSRNIAKDEFKAVKALVSSVIDNFNIASDPLISDSGDRIALLSYSPWESSRRKMGTVKTEFDFITYDNQLLMKNHIQTSFQQLNGEATIGRALLWTTENLFPETPYLRKHKVIFVVSAGENYERKEFVKMMALRAKCQGYVIFVISLGSTRKDDMEELASYPLDQHLIQLGRIHKPDLNYIAKFLKPFLYSVRRGFNQYPPPMLEDACRLINLGGENIQNDGFQFVTELQEDFLGGNGFIGQELNSGRESPFVKTEDNGSDYLVYLPSQMFEPQKLMINYEKDQKSAEIASLTSGHENYGRKEEPDHTYEPGDVSLQEYYMDVAFLIDASQRVGSDEFKEVKAFITSVLDYFHIAPTPLTSTLGDRVAVLSYSPPGYMPNTEECPVYLEFDLVTYNSIHQMKHHLQDSQQLNGDVFIGHALQWTIDNVFVGTPNLRKNKVIFVISAGETNSLDKDVLRNVSLRAKCQGYSIFVFSFGPKHNDKELEELASHPLDHHLVQLGRTHKPDWNYIIKFVKPFVHLIRRAINKYPTEDMKATCVNMTSPNPENGGTENTVLW

SEQ ID NO: 3343 - protein, 2263 aa, Homo Sapiens
MMLLILFLVIICSHISVNQDSGPEYADVVFLVDSSDRLGSKSFPFVKMFITKMISSLPIEADKYRVALAQYSDKLHSEFHLSTFKGRSPMLNHLRKNFGFIGGSLQIGKALQEAHRTYFSAPANGRDKKQFPPILVVLASSESEDNVEEASKALRKDGVKIISVGVQKASEENLKAMATSQFHFNLRTVRDLSMFSQNMTHIIKDVIKYKEGAVDDIFVEACQGPSMADVVFLLDMSINGSEENFDYLKGFLEESVSALDIKENCMRVGLVAYSNETKVINSLSMGINKSEVLQHIQNLSPRTGKAYTGAAIKKLRKEVFSARNGSRKNQGVPQIAVLVTHRDSEDNVTKAAVNLRREGVTIFTLGIEGASDTQLEKIASHPAEQYVSKLKTFADLAAHNQTFLKKLRNQITHTVSVFSERTETLKSGCVDTEEADIYLLIDGSGSTQATDFHEMKTFLSEVVGMFNIAPHKVRVGAVQYADSWDLEFEINKYSNKQDLGKAIENIRQMGGNTNTGAALNFTLSLLQKAKKQRGNKVPCHLVVLTNGMSKDSILEPANRLREEHIRVYAIGIKEANQTQLREIAGEEKRVYYVHDFDALKDIRNQVVQEICTEEACKEMKADIMFLVDSSGSIGPENFSKMKTFMKNLVSKSQIGPDRVQIGVVQFSDINKEEFQLNRFMSQSDISNAIDQMAHIGQTTLTGSALSFVSQYFSPTKGARPNIRKFLILITDGEAQDIVKEPAVVLRQEGVIIYSVGVFGSNVTQLEEISGRPEMVFYVENFDILQRIEDDLVFGICSPREECKRIEVLDVVFVIDSSGSIDYDEYNIMKDFMIGLVKKADVGKNQVRFGALKYADDPEVLFYLDDFGTKLEVISVLQNDQAMGGSTYTAEALGFSDHMFTEARGSRLNKGVPQVLIVITDGESHDADKLNATAKALRDKGILVLAVGIDGANPVELLAMAGSSDKYFFVETFGGLKGIFSDVTASVCNSSKVDCEIDKVDLVFLMDGSTSIQPNDFKKMKEFLASVVQDFDVSLNRVRIGAAQFSDTYHPEFPLGTFIGEKEISFQIENIKQIFGNTHIGAALREVEHYFRPDMGSRINTGTPQVLLVLTDGQSQDEVAQAAEALRHRGIDIYSVGIGDVDDQQLIQITGTAEKKLTVHNFDELKKVNKRIVRNICTTAGESNCFVDVVVGFDVSTQEKGQTLLEGQPWMETYLQDILRAISSLNGVSCEVGTETQVSVAFQVTNAMEKYSPKFEIYSENILNSLKDITVKGPSLLNANLLDSLWDTFQNKSAARGKVVLLFSDGLDDDVEKLEQKSDELRKEGLNALITVALDGPADSSDLADLPYIEFGKGFEYRTQLSIGMRELGSRLSKQLVNVAERTCCCLFCKCIGGDGTMGDPGPPGKRGPPGFKGSEGYLGEEGIAGERGAPGPVGEQGTKGCYGTKGPKGNRGLNGQEGEVGENGIDGLNGEQGDNGLPGRKGEKGDEGSQGSPGKRGTPGDRGAKGLRGDPGAPGVDSSIEGPTGLKGERGRQGRRGWPGPPGTPGSRRKTAAHGRRGHTGPQGTAGIPGPDGLEGSLGLKGPQGPRGEAGVKGEKGGVGSKGPQGPPGPGGEAGNQGRLGSQGNKGEPGDLGEKGAVGFPGPRGLQGNDGSPGYGSVGRKGAKGQEGFPGESGPKGEIGDPGGPGETGLKGARGKMISAGLPGEMGSPGEPGPPGRKGVKGAKGLASFSTCELIQYVRDRSPGRHGKPECPVHPTELVFALDHSRDVTEQEFERMKEMMAFLVRDIKVRENSCPVGAHIAILSYNSHARHLVRFSDAYKKSQLLREIETIPYERSSASREIGRAMRFISRNVFKRTLPGAHTRKIATFFSSGQSADAHSITTAAMEFGALEIIPVVITFSNVPSVRRAFAIDDTGTFQVIVVPSGADYIPALERLQRCTFCYDVCKPDASCDQARPPPVQSYMDAAFLLDASRNMGSAEFEDIRAFLGALLDHFEITPEPETSVTGDRVALLSHAPPDFLPNTQKSPVRAEFNLTTYRSKRLMKRHVHESVKQLNGDAFIGHALQWTLDNVFLSTPNLRRNKVIFVISAGETSHLDGEILKKESLRAKCQGYALFVFSLGPIWDDKELEDLASHPLDHHLVQLGRIHKPDHSYGVKFVKSFINSIRRAINKYPPINLKIKCNRLNSIDPKQPPRPFRSFVPGPLKATLKEDVLQKAKFFQDKKYLSRVARSGRDDAIQNFMRSTSHTFKNGRMIESAPKQHD

SEQ ID NO: 3344 - protein, 298 aa, Homo Sapiens
  misc_feature (1)..(1): Xaa can be any naturally occurring amino acid
XLNGVSCEVGTETQVSVAFQVTNAMEKYSPKFEIYSENILNSLKDITVKGPSLLNANLLDSLWDTFQNKSAARGKVVLLFSDGLDDDVEKLEQKSDELRKEGLNALITVALDGPADSSDLADLPYIEFGKGFEYRTQLSIGMRELGSRLSKQLVNVAERTCCCLFCKCIGGDGTMGDPGPPGKRGPPGFKGSEGYLGEEGIAGERGAPGPVGEQGTKGCYGTKGPKGNRGLNGQEGEVGENGIDGLNGEQGDNGLPGRKGEKGDEGSQGSPGKRGTPGDRGAKGLRGDPVSARAANWS

SEQ ID NO: 3345 - protein, 259 aa, Homo Sapiens
  misc_feature (1)..(1): Xaa can be any naturally occurring amino acid
XTNAMEKYSPKFEIYSENILNSLKDITVKGPSLLNANLLDSLWDTFQNKSAARGKVVLLFSDGLDDDVEKLEQKSDELRKEGLNALITVALDGPADSSDLADLPYIEFGKGFEYRTQLSIGMRELGSRLSKQLVNVAERTCCCLFCKCIGGDGTMGDPGPPGKRLHVKRVVDFFKKQGSERMERKGPPGFKGSEGYLGEEGIAGERGAPGPVGEQGTKGCYGTKGPKGNRGLNGQEGEVGENGIDGLNGEQGDNGLPGR

SEQ ID NO: 3346 - protein, 173 aa, Homo Sapiens
MSALACGLPVPVPCLNSHLSMGQKGAPGPKGFKGDPGVGVPGSPGPPGPPGVKGDLGLPGLPGAPGVVGFPGQTGPRGEMGQPGPSGERGLAGPPGREGIPGPLGPPGPPGSVGPPGASGLKGDKGDPGVGLPGPRGERGEPGIRGEDGRPGQEGPRGLTGPPGSRGERGEKG

SEQ ID NO: 3347 - protein, 2944 aa, Homo Sapiens
MTLRLLVAALCAGILAEAPRVRAQHRERVTCTRLYAADIVFLLDGSSSIGRSNFREVRSFLEGLVLPFSGAASAQGVRFATVQYSDDPRTEFGLDALGSGGDVIRAIRELSYKGGNTRTGAAILHVADHVFLPQLARPGVPKVCILITDGKSQDLVDTAAQRLKGQGVKLFAVGIKNADPEELKRVASQPTSDFFFFVNDFSILRTLLPLVSRRVCTTAGGVPVTRPPDDSTSAPRDLVLSEPSSQSLRVQWTAASGPVTGYKVQYTPLTGLGQPLPSERQEVNVPAGETSVRLRGLRPLTEYQVTVIALYANSIGEAVSGTARTTALEGPELTIQNTTAHSLLVAWRSVPGATGYRVTWRVLSGGPTQQQELGPGQGSVLLRDLEPGTDYEVTVSTLFGRSVGPATSLMARTDASVEQTLRPVILGPTSILLSWNLVPEARGYRLEWRRETGLEPPQKVVLPSDVTRYQLDGLQPGTEYRLTLYTLLEGHEVATPATVVPTGPELPVSPVTDLQATELPGQRVRVSWSPVPGATQYRIIVRSTQGVERTLVLPGSQTAFDLDDVQAGLSYTVRVSARVGPREGSASVLTVRREPETPLAVPGLRVVVSDATRVRVAWGPVPGASGFRISWSTGSGPESSQTLPPDSTATDITGLQPGTTYQVAVSVLRGREEGPAAVIVARTDPLGPVRTVHVTQASSSSVTITWTRVPGATGYRVSWHSAHGPEKSQLVSGEATVAELDGLEPDTEYTVHVRAHVAGVDGPPASVVVRTAPEPVGRVSRLQILNASSDVLRITWVGVTGATAYRLAWGRSEGGPMRHQILPGNTDSAEIRGLEGGVSYSVRVTALVGDREGTPVSIVVTTPPEAPPALGTLHVVQRGEHSLRLRWEPVPRAQGFLLHWQPEGGQEQSRVLGPELSSYHLDGLEPATQYRVRLSVLGPAGEGPSAEVTARTESPRVPSIELRVVDTSIDSVTLAWTPVSRASSYILSWRPLRGPGQEVPGSPQTLPGISSSQRVTGLEPGVSYIFSLTPVLDGVRGPEASVTQTPVCPRGLADVVFLPHATQDNAHRAEATRRVLERLVLALGPLGPQAVQVGLLSYSHRPSPLFPLNGSHDLGIILQRIRDMPYMDPSGNNLGTAVVTAHRYMLAPDAPGRRQHVPGVMVLLVDEPLRGDIFSPIREAQASGLNVVMLGMAGADPEQLRRLAPGMDSVQTFFAVDDGPSLDQAVSGLATALCQASFTTQPRPEPCPVYCPKGQKGEPGEMGLRGQVGPPGDPGLPGRTGAPGPQGPPGSATAKGERGFPGADGRPGSPGRAGNPGTPGAPGLKGSPGLPGPRGDPGERGPRGPKGEPGAPGQVIGGEGPGLPGRKGDPGPSGPPGPRGPLGDPGPRGPPGLPGTAMKGDKGDRGERGPPGPGEGGIAPGEPGLPGLPGSPGPQGPVGPPGKKGEKGDSEDGAPGLPGQPGSPGEQGPRGPPGAIGPKGDRGFPGPLGEAGEKGERGPPGPAGSRGLPGVAGRPGAKGPEGPPGPTGRQGEKGEPGRPGDPAVVGPAVAGPKGEKGDVGPAGPRGATGVQGERGPPGLVLPGDPGPKGDPGDRGPIGLTGRAGPPGDSGPPGEKGDPGRPGPPGPVGPRGRDGEVGEKGDEGPPGDPGLPGKAGERGLRGAPGVRGPVGEKGDQGDPGEDGRNGSPGSSGPKGDRGEPGPPGPPGRLVDTGPGAREKGEPGDRGQEGPRGPKGDPGLPGAPGERGIEGFRGPPGPQGDPGVRGPAGEKGDRGPPGLDGRSGLDGKPGAAGPSGPNGAAGKAGDPGRDGLPGLRGEQGLPGPSGPPGLPGKPGEDGKPGLNGKNGEPGDPGEDGRKGEKGDSGASGREGRDGPKGERGAPGILGPQGPPGLPGPVGPPGQGFPGVPGGTGPKGDRGETGSKGEQGLPGERGLRGEPGSVPNVDRLLETAGIKASALREIVETWDESSGSFLPVPERRRGPKGDSGEQGPPGKEGPIGFPGERGLKGDRGDPGPQGPPGLALGERGPPGPSGLAGEPGKPGIPGLPGRAGGVGEAGRPGERGERGEKGERGEQGRDGPPGLPGTPGPPGPPGPKVSVDEPGPGLSGEQGPPGLKGAKGEPGSNGDQGPKGDRGVPGIKGDRGEPGPRGQDGNPGLPGERGMAGPEGKPGLQGPRGPPGPVGGHGDPGPPGAPGLAGPAGPQGPSGLKGEPGETGPPGRGLTGPTGAVGLPGPPGPSGLVGPQGSPGLPGQVGETGKPGAPGRDGASGKDGDRGSPGVPGSPGLPGPVGPKGEPGPTGAPGQAVVGLPGAKGEKGAPGGLAGDLVGEPGAKGDRGLPGPRGEKGEAGRAGEPGDPGEDGQKGAPGPKGFKGDPGVGVPGSPGPPGPPGVKGDLGLPGLPGAPGVVGFPGQTGPRGEMGQPGPSGERGLAGPPGREGIPGPLGPPGPPGSVGPPGASGLKGDKGDPGVGLPGPRGERGEPGIRGEDGRPGQEGPRGLTGPPGSRGERGEKGDVGSAGLKGDKGDSAVILGPPGPRGAKGDMGERGPRGLDGDKGPRGDNGDPGDKGSKGEPGDKGSAGLPGLRGLLGPQGQPGAAGIPGDPGSPGKDGVPGIRGEKGDVGFMGPRGLKGERGVKGACGLDGEKGDKGEAGPPGRPGLAGHKGEMGEPGVPGQSGAPGKEGLIGPKGDRGFDGQPGPKGDQGEKGERGTPGIGGFPGPSGNDGSAGPPGPPGSVGPRGPEGLQGQKGERGPPGERVVGAPGVPGAPGERGEQGRPGPAGPRGEKGEAALTEDDIRGFVRQEMSQHCACQGQFIASGSRPLPSYAADTAGSQLHAVPVLRVSHAEEEERVPPEDDEYSEYSEYSVEEYQDPEAPWDSDDPCSLPLDEGSCTAYTLRWYHRAVTGSTEACHPFVYGGCGGNANRFGTREACERRCPPRVVQSQGTGTAQD

SEQ ID NO: 3348 - protein, 114 aa, Homo Sapiens
MAVLPGPLQLLGVLLTISLSSIRLIQAGAYYGIKPLPPQIPPQMPPQIPQYQPLGQQVPHMPLAKDGLAMGKEMPHLQYGKEYPHLPQYMKEIQPAPRMGKEAVPKKGKEIPLA

SEQ ID NO: 3349 - protein, 202 aa, Homo Sapiens
MAVLPGPLQLLGVLLTISLSSIRLIQAGAYYGIKPLPPQIPPQMPPQIPQYQPLGQQVPHMPLAKDGLAMGKEMPHLQYGKEYPHLPQYMKEIQPAPRMGKEAVPKKGKEIPLASLRGEQGPRGEPGPRGPPGPPGLPGHGIPGIKGKPGPQGYPGVGKPGMPGMPGKPGAMGMPGAKGEIGQKGEIGPMGIPGPQGPPGPH

SEQ ID NO: 3350 - protein, 744 aa, Homo Sapiens
MAVLPGPLQLLGVLLTISLSSIRLIQAGAYYGIKPLPPQIPPQMPPQIPQYQPLGQQVPHMPLAKDGLAMGKEMPHLQYGKEYPHLPQYMKEIQPAPRMGKEAVPKKGKEIPLASLRGEQGPRGEPGPRGPPGPPGLPGHGIPGIKGKPGPQGYPGVGKPGMPGMPGKPGAMGMPGAKGEIGQKGEIGPMGIPGPQGPPGPHGLPGIGKPGGPGLPGQPGPKGDRGPKGLPGPQGLRGPKGDKGFGMPGAPGVKGPPGMHGPPGPVGLPGVGKPGVTGFPGPQGPLGKPGAPGEPGPQGPIGVPGVQGPPGIPGIGKPGQDGIPGQPGFPGGKGEQGLPGLPGPPGLPGIGKPGFPGPKGDRGMGGVPGALGPRGEKGPIGAPGIGGPPGEPGLPGIPGPMGPPGAIGFPGPKGEGGIVGPQGPPGPKGEPGLQGFPGKPGFLGEVGPPGMRGLPGPIGPKGEAGQKGVPGLPGVPGLLGPKGEPGIPGDQGLQGPPGIPGIGGPSGPIGPPGIPGPKGEPGLPGPPGFPGIGKPGVAGLHGPPGKPGALGPQGQPGLPGPPGPPGPPGPPAVMPPTPPPQGEYLPDMGLGIDGVKPPHAYGAKKGKNGGPAYEMPAFTAELTAPFPPVGAPVKFNKLLYNGRQNYNPQTGIFTCEVPGVYYFAYHVHCKGGNVWVALFKNNEPVMYTYDEYKKGFLDQASGSAVLLLRPGDRVFLQMPSEQAAGLYAGQYVHSSFSGYLLYPM

SEQ ID NO: 3351 - protein, 744 aa, Homo Sapiens; identical to SEQ ID NO: 3350

SEQ ID NO: 3352 - protein, 703 aa, Homo Sapiens
MLGTLTPLSSLLLLLLVLVLGCGPRASSGGGAGGAAGYAPVKYIQPMQKGPVGPPFREGKGQYLEMPLPLLPMDLKGEPGPPGKPGPRGPPGPPGFPGKPGMGKPGLHGQPGPAGPPGFSRMGKAGPPGLPGKVGPPGQPGLRGEPGIRGDQGLRGPPGPPGLPGPSGITIPGKPGAQGVPGPPGFQGEPGPQGEPGPPGDRGLKGDNGVGQPGLPGAPGQGGAPGPPGLPGPAGLGKPGLDGLPGAPGDKGESGPPGVPGPRGEPGAVGPKGPPGVDGVGVPGAAGLPGPQGPSGAKGEPGTRGPPGLIGPTGYGMPGLPGPKGDRGPAGVPGLLGDRGEPGEDGEPGEQGPQGLGGPPGLPGSAGLPGRRGPPGPKGEAGPGGPPGVPGIRGDQGPSGLAGKPGVPGERGLPGAHGPPGPTGPKGEPGFTGRPGGPGVAGALGQKGDLGLPGQPGLRGPSGIPGLQGPAGPIGPQGLPGLKGEPGLPGPPGEGRAGEPGTAGPTGPPGVPGSPGITGPPGPPGPPGPPGAPGAFDETGIAGLHLPNGGVEGAVLGKGGKPQFGLGELSAHATPAFTAVLTSPFPASGMPVKFDRTLYNGHSGYNPATGIFTCPVGGVYYFAYHVHVKGTNVWVALYKNNVPATYTYDEYKKGYLDQASGGAVLQLRPNDQVWVQMPSDQANGLYSTEYIHSSFSGFLLCPT

SEQ ID NO: 3353 - protein, 703 aa, Homo Sapiens; identical to SEQ ID NO: 3352

SEQ ID NO: 3354 - protein, 638 aa, Homo Sapiens
MPLPLLPMDLKGEPGPPGKPGPRGPPGPPGFPGKPGMGKPGLHGQPGPAGPPGFSRMGKAGPPGLPGKVGPPGQPGLRGEPGIRGDQGLRGPPGPPGLPGPSGITIPGKPGAQGVPGPPGFQGEPGPQGEPGPPGDRGLKGDNGVGQPGLPGAPGQGGAPGPPGLPGPAGLGKPGLDGLPGAPGDKGESGPPGVPGPRGEPGAVGPKGPPGVDGVGVPGAAGLPGPQGPSGAKGEPGTRGPPGLIGPTGYGMPGLPGPKGDRGPAGVPGLLGDRGEPGEDGEPGEQGPQGLGGPPGLPGSAGLPGRRGPPGPKGEAGPGGPPGVPGIRGDQGPSGLAGKPGVPGERGLPGAHGPPGPTGPKGEPGFTGRPGGPGVAGALGQKGDLGLPGQPGLRGPSGIPGLQGPAGPIGPQGLPGLKGEPGLPGPPGEGRAGEPGTAGPTGPPGVPGSPGITGPPGPPGPPGPPGAPGAFDETGIAGLHLPNGGVEGAVLGKGGKPQFGLGELSAHATPAFTAVLTSPFPASGMPVKFDRTLYNGHSGYNPATGIFTCPVGGVYYFAYHVHVKGTNVWVALYKNNVPATYTYDEYKKGYLDQASGGAVLQLRPNDQVWVQMPSDQANGLYSTEYIHSSFSGFLLCPT

SEQ ID NO: 3355 - protein, 112 aa, Homo Sapiens
MAWTARDRGALGLLLLGLCLCAAQRGPPGEQGPPGPPGPPGVPGIDGIDGDRGPKGPPGPPGPAGEPGKPGAPGKPGTPGADAGVQWHDLGSLQPLPPGFKRFSCLSLQLPE

SEQ ID NO: 3356 - protein, 678 aa, Homo Sapiens
MAWTARDRGALGLLLLGLCLCAAQRGPPGEQGPPGPPGPPGVPGIDGIDGDRGPKGPPGPPGPAGEPGKPGAPGKPGTPGADGLTGPDGSPGSIGSKGQKGEPGVPGSRGFPGRGIPGPPGPPGTAGLPGELGRVGPVGDPGRRGPPGPPGPPGPRGTIGFHDGDPLCPNACPPGRSGYPGLPGMRGHKGAKGEIGEPGRQGHKGEEGDQGELGEVGAQGPPGAQGLRGITGIVGDKGEKGARGLDGEPGPQGLPGAPGDQGQRGPPGEAGPKGDRGAEGARGIPGLPGPKGDTGLPGVDGRDGIPGMPGTKGEPGKPGPPGDAGLQGLPGVPGIPGAKGVAGEKGSTGAPGKPGQMGNSGKPGQQGPPGEVGPRGPQGLPGSRGELGPVGSPGLPGKLGSLGSPGLPGLPGPPGLPGMKGDRGVVGEPGPKGEQGASGEEGEAGERGELGDIGLPGPKGSAGNPGEPGLRGPEGSRGLPGVEGPRGPPGPRGVQGEQGATGLPGVQGPPGRAPTDQHIKQVCMRVIQEHFAEMAASLKRPDSGATGLPGRPGPPGPPGPPGENGFPGQMGIRGLPGIKGPPGALGLRGPKGDLGEKGERGPPGRGPNGLPGAIGLPGDPGPASYGRNGRDGERGPPGVAGIPGVPGPPGPPGLPGFCEPASCTMQAGQRAFNKGPDP

SEQ ID NO: 3357 - protein, 921 aa, Homo Sapiens
MKTCWKIPVFFFVCSFLEPWASAAVKRRPRFPVNSNSNGGNELCPKIRIGQDDLPGFDLISQFQVDKAASRRAIQRVVGSATLQVAYKLGNNVDFRIPTRNLYPSGLPEEYSFLTTFRMTGSTLKKNWNIWQIQDSSGKEQVGIKINGQTQSVVFSYKGLDGSLQTAAFSNLSSLFDSQWHKIMIGVERSSATLFVDCNRIESLPIKPRGPIDIDGFAVLGKLADNPQVSVPFELQWMLIHCDPLRPRRETCHELPARITPSQTTDERGPPGEQGPPGPPGPPGVPGIDGIDGDRGPKGPPGPPGPAGEPGKPGAPGKPGTPGADGLTGPDGSPGSIGSKGQKGEPGVPGSRGFPGRGIPGPPGPPGTAGLPGELGRVGPVGDPGRRGPPGPPGPPGPRGTIGFHDGDPLCPNACPPGRSGYPGLPGMRGHKGAKGEIGEPGRQGHKGEEGDQGELGEVGAQGPPGAQGLRGITGIVGDKGEKGARGLDGEPGPQGLPGAPGDQGQRGPPGEAGPKGDRGAEGARGIPGLPGPKGDTGLPGVDGRDGIPGMPGTKGEPGKPGPPGDAGLQGLPGVPGIPGAKGVAGEKGSTGAPGKPGQMGNSGKPGQQGPPGEVGPRGPQGLPGSRGELGPVGSPGLPGKLGSLGSPGLPGLPGPPGLPGMKGDRGVVGEPGPKGEQGASGEEGEAGERGELGDIGLPGPKGSAGNPGEPGLRGPEGSRGLPGVEGPRGPPGPRGVQGEQGATGLPGVQGPPGRAPTDQHIKQVCMRVIQEHFAEMAASLKRPDSGATGLPGRPGPPGPPGPPGENGFPGQMGIRGLPGIKGPPGALGLRGPKGDLGEKGERGPPGRGPNGLPGAIGLPGDPGPASYGRNGRDGERGPPGVAGIPGVPGPPGPPGLPGFCEPASCTMQAGQRAFNKGPDP

SEQ ID NO: 3358 - protein, 328 aa, Homo Sapiens
MKTCWKIPVFFFVCSFLEPWASAAVKRRPRFPVNSNSNGGNELCPKIRIGQDDLPGFDLISQFQVDKAASRRAIQRVVGSATLQVAYKLGNNVDFRIPTRNLYPSGLPEEYSFLTTFRMTGSTLKKNWNIWQIQDSSGKEQVGIKINGQTQSVVFSYKGLDGSLQTAAFSNLSSLFDSQWHKIMIGVERSSATLFVDCNRIESLPIKPRGPIDIDGFAVLGKLADNPQVSVPFELQWMLIHCDPLRPRRETCHELPARITPSQTTDERGPPGEQGPPGPPGPPGVPGIDGIDGDRGPKGPPGPPGPAGEPGKPGAPGKPGTPGADTSP

SEQ ID NO: 3359 - protein, 689 aa, Homo Sapiens
MAAATASPRSLLVLLQVVVLALAQIRGPPGERGPPGPPGPPGVPGSDGIDGDNGPPGKAGPPGPKGEPGKAGPDGPDGKPGIDGLTGAKGEPGPMGIPGVKGQPGLPGPPGLPGPGFAGPPGPPGPVGLPGEIGIRGPKGDPGPDGPSGPPGPPGKPGRPGTIQGLEGSADFLCPTNCPPGMKGPPGLQGVKGHAGKRGILGDPGHQGKPGPKGDVGASGEQGIPGPPGPQGIRGYPGMAGPKGETGPHGYKGMVGAIGATGPPGEEGPRGPPGRAGEKGDEGSPGIRGPQGITGPKGATGPPGINGKDGTPGTPGMKGSAGQAGQPGSPGHQGLAGVPGQPGTKGGPGDQGEPGPQGLPGFSGPPGKEGEPGPRGEIGPQGIMGQKGDQGERGPVGQPGPQGRQGPKGEQGPPGIPGPQGLPGVKGDKGSPGKTGPRGKVGDPGVAGLPGEKGEKGESGEPGPKGQQGVRGEPGYPGPSGDAGAPGVQGYPGPPGPRGLAGNRGVPGQPGRQGVEGRDATDQHIVDVALKMLQEQLAEVAVSAKREALGAVGMMGPPGPPGPPGYPGKQGPHGHPGPRGVPGIVGAVGQIGNTGPKGKRGEKGDPGEVGRGHPGMPGPPGIPGLPGRPGQAINGKDGDRGSPGAPGEAGRPGLPGPVGLPGFCEPAACLGASAYASARLTEPGSIKGP

SEQ ID NO: 3360 - protein, 83 aa, Homo Sapiens
MAAATASPRSLLVLLQVVVLALAQIRGPPGERGPPGPPGPPGVPGSDGIDGPPGPVGLPGEIGIRGPKGDPGPDGPSGPPGPP

SEQ ID NO: 3361 - protein, 11 aa, Homo Sapiens
MGIPGVKGQPG

SEQ ID NO: 3362 - protein, 143 aa, Homo Sapiens
MGIPGVKGQPGLPGPPGLPGPGFAGPPGPPGPVGLPGEIGIRGPKGDPGPDGPSGPPGPPGKPGRPGTIQGLEGSADFLCPTNCPPGMKGPPGLQGVKGHAGKRGILGDPGHQGKPGPKGDVGASGEQGIPGPPGPQGIRGYP

SEQ ID NO: 3363 - protein, 684 aa, Homo Sapiens
MAGPRACAPLLLLLLLGELLAAAGAQRVGLPGPPGPPGPPGKPGQDGIDGEAGPPGLPGPPGPKGAPGKPGKPGEAGLPGLPGVDGLTGRDGPPGPKGAPGERGSLGPPGPPGLGGKGLPGPPGEAGVSGPPGGIGLRGPPGPSGLPGLPGPPGPPGPPGHPGVLPEGATDLQCPSICPPGPPGPPGMPGFKGPTGYKGEQGEVGKDGEKGDPGPPGPAGLPGSVGLQGPRGLRGLPGPLGPPGDRGPIGFRGPPGIPGAPGKAGDRGERGPEGFRGPKGDLGRPGPKGTPGVAGPSGEPGMPGKDGQNGVPGLDGQKGEAGRNGAPGEKGPNGLPGLPGRAGSKGEKGERGRAGELGEAGPSGEPGVPGDAGMPGERGEAGHRGSAGALGPQGPPGAPGVRGFQGQKGSMGDPGLPGPQGLRGDVGDRGPGGAAGPKGDQGIAGSDGLPGDKGELGPSGLVGPKGESGSRGELGPKGTQGPNGTSGVQGVPGPPGPLGLQGVPGVPGITGKPGVPGKEASEQRIRELCGGMISEQIAQLAAHLRKPLAPGSIGRPGPAGPPGPPGPPGSIGHPGARGPPGYRGPTGELGDPGPRGNQGDRGDKGAAGAGLDGPEGDQGPQGPQGVPGTSKDGQDGAPGEPGPPGDPGLPGAIGAQGTPGICDTSACQGAVLGGVGEKSGSRSS

SEQ ID NO: 3364 - protein, 191 aa, Homo Sapiens
MWWSSTQNAGTEGEAGPPGLPGPPGPKGAPGKPGKPGEAGLPGLPGVDGLTGRDGPPGPKGAPGERGSLGPPGPPGLGGKGLPGPPGEAGVSGPPGGIGLRGPPGPSGLPGLPGPPGPPGPPGHPGVLPEGATDLQCPSICPPGPPGPPGMPGFKGPTGYKGEQGEVGKDGEKGDPGPPGPAGLPGSVGLQ

SEQ ID NO: 3365 - protein, 277 aa, Homo Sapiens
MNGFASLLRRNQFILLVLFLLQIQSLGLDIDSRPTAEVCATHTISPGPKGDDGEKGDPGEEGKHGKVGRMGPKGIKGELGDMGDQGNIGKTGPIGKKGDKGEKGLLGIPGEKGKAGTVCDCGRYRKFVGQLDISIARLKTSMKFVKNVIAGIRETEEKFYYIVQEEKNYRESLTHCRIRGGMLAMPKDEAANTLIADYVAKSGFFRVFIGVNDLEREGQYMFTDNTPLQNYSNWNEGEPSDPYGHEDCVEMLSSGRWNDTECHLTMYFVCEFIKKKK

SEQ ID NO: 3366 - protein, 123 aa, Homo Sapiens
MKKQRGVGVLPALRMRGNLALVGVLISLAFLSLLPSGHPQPAGDDACSVQILVPGLKGDAGEKGDKGAPGRPGRVGPTGEKGDMGDKGQKGSVGRHGKIGPIGSKGEKGDSGDIGPPGPNGEP

SEQ ID NO: 3367 - protein, 285 aa, Homo Sapiens
MKKQRGVGVLPALRMRGNLALVGVLISLAFLSLLPSGHPQPAGDDACSVQILVPGLKGDAGEKGDKGAPGRPGRVGPTGEKGDMGDKGQKGSVGRHGKIGPIGSKGEKGDSGDIGPPGPNGEPGLPCECSQLRKAIGEMDNQVSQLTSELKFIKNAVAGVRETESKIYLLVKEEKRYADAQLSCQGRGGTLSMPKDEAANGLMAAYLAQAGLARVFIGINDLEKEGAFVYSDHSPMRTFNKWRSGEPNNAYDEEDCVEMVASGGWNDVACHTTMYFMCEFDKENM

SEQ ID NO: 3368 - protein, 116 aa, Homo Sapiens
MRGNLALVGVLISLAFLSLLPSGHPQPAGDDACSVQILVPGLKGDAGEKGDKGAPGRPGRVGPTGEKGDMGDKGQKGSVGRHGKIGPIGSKGEKGDSGDIGPPGPNGEPAPSAPQR

SEQ ID NO: 3369 - protein, 271 aa, Homo Sapiens
MRGNLALVGVLISLAFLSLLPSGHPQPAGDDACSVQILVPGLKGDAGEKGDKGAPGRPGRVGPTGEKGDMGDKGQKGSVGRHGKIGPIGSKGEKGDSGDIGPPGPNGEPGLPCECSQLRKAIGEMDNQVSQLTSELKFIKNAVAGVRETESKIYLLVKEEKRYADAQLSCQGRGGTLSMPKDEAANGLMAAYLAQAGLARVFIGINDLEKEGAFVYSDHSPMRTFNKWRSGEPNNAYDEEDCVEMVASGGWNDVACHTTMYFMCEFDKENM

SEQ ID NO: 3370 - protein, 247 aa, Homo Sapiens
MRGNLALVGVLISLAFLSLLPSGHPQPAGDDACSVQILVPGLKGDAGEKGDKGAPGRPGRVGPTGEKGEKGDSGDIGPPGPNGEPGLPCECSQLRKAIGEMDNQVSQLTSELKFIKNAVAGVRETESKIYLLVKEEKRYADAQLSCQGRGGTLSMPKDEAANGLMAAYLAQAGLARVFIGINDLEKEGAFVYSDHSPMRTFNKWRSGEPNNAYDEEDCVEMVASGGWNDVACHTTMYFMCEFDKENM

SEQ ID NO: 3371 - protein, 268 aa, Homo Sapiens
MTPALCRSSSLASKGMRERRETKAPPDGLEESAPREKKQSQPVVTASDISKRKCTSSFVEMGSQGDMGDKGQKGSVGRHGKIGPIGSKGEKGDSGDIGPPGPNGEPGLPCECSQLRKAIGEMDNQVSQLTSELKFIKNAVAGVRETESKIYLLVKEEKRYADAQLSCQGRGGTLSMPKDEAANGLMAAYLAQAGLARVFIGINDLEKEGAFVYSDHSPMRTFNKWRSGEPNNAYDEEDCVEMVASGGWNDVACHTTMYFMCEFDKENM

SEQ ID NO: 3372 - protein, 245 aa, Homo Sapiens
MWWVPPSPYGCLPCALPGDAGEKGDKGAPGRPGRVGPTGEKGDMGDKGQKGSVGRHGKIGPIGSKGEKGDSGDIGPPGPNGEPGLPCECSQLRKAIGEMDNQVSQLTSELKFIKNAVAGVRETESKIYLLVKEEKRYADAQLSCQGRGGTLSMPKDEAANGLMAAYLAQAGLARVFIGINDLEKEGAFVYSDHSPMRTFNKWRSGEPNNAYDEEDCVEMVASGGWNDVACHTTMYFMCEFDKENM

SEQ ID NO: 3373 - protein, 221 aa, Homo Sapiens
MWWVPPSPYGCLPCALPGDAGEKGDKGAPGRPGRVGPTGEKGEKGDSGDIGPPGPNGEPGLPCECSQLRKAIGEMDNQVSQLTSELKFIKNAVAGVRETESKIYLLVKEEKRYADAQLSCQGRGGTLSMPKDEAANGLMAAYLAQAGLARVFIGINDLEKEGAFVYSDHSPMRTFNKWRSGEPNNAYDEEDCVEMVASGGWNDVACHTTMYFMCEFDKENM

SEQ ID NO: 3374 - protein, 221 aa, Homo Sapiens
MWWVPPSPYGCLPCALPGDMGDKGQKGSVGRHGKIGPIGSKGEKGDSGDIGPPGPNGEPGLPCECSQLRKAIGEMDNQVSQLTSELKFIKNAVAGVRETESKIYLLVKEEKRYADAQLSCQGRGGTLSMPKDEAANGLMAAYLAQAGLARVFIGINDLEKEGAFVYSDHSPMRTFNKWRSGEPNNAYDEEDCVEMVASGGWNDVACHTTMYFMCEFDKENM

SEQ ID NO: 3375 - protein, 197 aa, Homo Sapiens
MWWVPPSPYGCLPCALPGEKGDSGDIGPPGPNGEPGLPCECSQLRKAIGEMDNQVSQLTSELKFIKNAVAGVRETESKIYLLVKEEKRYADAQLSCQGRGGTLSMPKDEAANGLMAAYLAQAGLARVFIGINDLEKEGAFVYSDHSPMRTFNKWRSGEPNNAYDEEDCVEMVASGGWNDVACHTTMYFMCEFDKENM

SEQ ID NO: 3376 - protein, 622 aa, Homo Sapiens
MAAAPRAGRRRGQPLLALLLLLLAPLPPGAPPGADAYFPEERWSPESPLQAPRVLIALLARNAAHALPTTLGALERLRHPRERTALWVATDHNMDNTSTVLREWLVAVKSLYHSVEWRPAEEPRSYPDEEGPKHWSDSRYEHVMKLRQAALKSARDMWADYILFVDADNLILNPDTLSLLIAENKTVVAPMLDSRAAYSNFWCGMTSQGYYKRTPAYIPIRKRDRRGCFAVPMVHSTFLIDLRKAASRNLAFYPPHPDYTWSFDDIIVFAFSCKQAEVQMYVCNKEEYGFLPVPLRAHSTLQDEAESFMHVQLEVMVKHPPAEPSRFISAPTKTPDKMGFDEVFMINLRRRQDRRERMLRALQAQEIECRLVEAVDGKAMNTSQVEALGIQMLPGYRDPYHGRPLTKGELGCFLSHYNIWKEVVDRGLQKSLVFEDDLRFEIFFKRRLMNLMRDVEREGLDWDLIYVGRKRMQVEHPEKAVPRVRNLVEADYSYWTLAYVISLQGARKLLAAEPLSKMLPVDEFLPVMFDKHPVSEYKAHFSLRNLHAFSVEPLLIYPTHYTGDDGYVSDTETSVVWNNEHVKTDWDRAKSQKMREQQALSREAKNSDVLQSPLDSAARDEL

SEQ ID NO: 3377 - protein, 138 aa, Homo Sapiens
MDNTSTVLREWLVAVKSLYHSVEWRPAEEPRSYPDEEGPKHWSDSRYEHVMKLRQAALKSARDMWADYILFVDADNLILNPDTLSLLIAENKTVVAPMLDSRAAYSNFWCGMTSQGYYKRTPAYIPIRKRDRRGCFAV

SEQ ID NO: 3378 - protein, 218 aa, Homo Sapiens
  misc_feature (1)..(1): Xaa can be any naturally occurring amino acid
XKAASRNLAFYPPHPDYTWSFDDIIVFAFSCKQAVKHPPAEPSRFISAPTKTPDKMGFDEVFMINLRRRQDRRERMLRALQAQEIECRLVEAVDGKAMNTSQVEALGIQMLPGYRDPYHGRPLTKGELGCFLSHYNIWKEVVDRGLQKSLVFEDDLRFEIFFKRRLMNLMRDVEREGLDWDLIYVGRKRMQVEHPEKAVPRVRNLVEADYSYWTLAYV

SEQ ID NO: 3379 - protein, 626 aa, Homo Sapiens
MAARPAATLAWSLLLLSSALLREGCRARFVAERDSEDDGEEPVVFPESPLQSPTVLVAVLARNAAHTLPHFLGCLERLDYPKSRMAIWAATDHNVDNTTEIFREWLKNVQRLYHYVEWRPMDEPESYPDEIGPKHWPTSRFAHVMKLRQAALRTAREKWSDYILFIDVDNFLTNPQTLNLLIAENKTIVAPMLESRGLYSNFWCGITPKGFYKRTPDYVQIREWKRTGCFPVPMVHSTFLIDLRKEASDKLTFYPPHQDYTWTFDDIIVFAFSSRQAGIQMYLCNREHYGYLPIPLKPHQTLQEDIENLIHVQIEAMIDRPPMEPSQYVSVVPKYPDKMGFDEIFMINLKRRKDRRDRMLRTLYEQEIEVKIVEAVDGKALNTSQLKALNIEMLPGYRDPYSSRPLTRGEIGCFLSHYSVWKEVIDRELEKTLVIEDDVRFEHQFKKKLMKLMDNIDQAQLDWELIYIGRKRMQVKEPEKAVPNVANLVEADYSYWTLGYVISLEGAQKLVGANPFGKMLPVDEFLPVMYNKHPVAEYKEYYESRDLKAFSAEPLLIYPTHYTGQPGYLSDTETSTIWDNETVATDWDRTHAWKSRKQSRIYSNAKNTEALPPPTSLDTVPSRDEL

SEQ ID NO: 3380 - protein, 363 aa, Homo Sapiens
MFSDCWLCPSLGSSGIQMYLCNREHYGYLPIPLKPHQTLQEDIENLIHVQIEAMIDRPPMEPSQYVSVVPKYPDKMGFDEIFMINLKRRKDRRDRMLRTLYEQEIEVKIVEAVDGKALNTSQLKALNIEMLPGYRDPYSSRPLTRGEIGCFLSHYSVWKEVIDRELEKTLVIEDDVRFEHQFKKKLMKLMDNIDQAQLDWELIYIGRKRMQVKEPEKAVPNVANLVEADYSYWTLGYVISLEGAQKLVGANPFGKMLPVDEFLPVMYNKHPVAEYKEYYESRDLKAFSAEPLLIYPTHYTGQPGYLSDTETSTIWDNETVATDWDRTHAWKSRKQSRIYSNAKNTEALPPPTSLDTVPSRDEL

SEQ ID NO: 3381 - protein, 234 aa, Homo Sapiens
MLPGYRDPYSSRPLTRGEIGCFLSHYSVWKEVIDRELEKTLVIEDDVRFEHQFKKKLMKLMDNIDQAQLDWELIYIGRKRMQVKEPEKAVPNVANLVEADYSYWTLGYVISLEGAQKLVGANPFGKMLPVDEFLPVMYNKHPVAEYKEYYESRDLKAFSAEPLLIYPTHYTGQPGYLSDTETSTIWDNETVATDWDRTHAWKSRKQSRIYSNAKNTEALPPPTSLDTVPSRDEL

SEQ ID NO: 3382 - protein, 194 aa, Homo Sapiens
ISGLLCYSAGCLALPSLDQKKRGGHKACCLLTPPPPPLFPPPFFRGGRSPGPPGLPGKTGPKGEKGELGRPGRKGRPGPPGVPGMPGPIGWPGPEGPRGEKGDLGMMGLPGSRGPMGSKGYPGSRGEKGSRGEKGDLGPKGEKGFPGFPGMLGQKGEMGPKGEPGIAGHRGPTGRPGKRGKQGQKGDSGVMGPP

SEQ ID NO: 3383 - protein, 445 aa, Homo Sapiens
MTGSSFSLAHLLIISGLLCYSAGCLALPSLDQKKRGGHKACCLLTPPPPPLFPPPFFRGGRSPLLSPDMKNLMLELETSQSPCMQGSLGSPGPPGPQGPPGLPGKTGPKGEKGELGRPGRKGRPGPPGVPGMPGPIGWPGPEGPRGEKGDLGMMGLPGSRGPMGSKGYPGSRGEKGSRGEKGDLGPKGEKGFPGFPGMLGQKGEMGPKGEPGIAGHRGPTGRPGKRGKQGQKGDSGVMGPPGKPGPSGQPGRPGPPGPPPAGQLIMGPKGERGFPGPPGRCLCGPTMNVNNPSYGESVYGPSSPRVPVIFVVNNQEELERLNTQNAIAFRRDQRSLYFKDSLGWLPIQLTPFYPVDYTADQHGTCGDGLLQPGEECDDGNSDVGDDCIRCHRAYCGDGHRHEGVEDCDGSDFGYLTCETYLPGSYGDLQCTQYCYIDSTPCRYFT

SEQ ID NO: 3384 - protein, 421 aa, Homo Sapiens
MVVLNPMTLGIYLQLFFLSIVSQPTFINSVLPISAALPSLDQKKRGGHKACCLLTPPPPPLFPPPFFRGGRSPGPPGLPGKTGPKGEKGELGRPGRKGRPGPPGVPGMPGPIGWPGPEGPRGEKGDLGMMGLPGSRGPMGSKGYPGSRGEKGSRGEKGDLGPKGEKGFPGFPGMLGQKGEMGPKGEPGIAGHRGPTGRPGKRGKQGQKGDSGVMGPPGKPGPSGQPGRPGPPGPPPAGQLIMGPKGERGFPGPPGRCLCGPTMNVNNPSYGESVYGPSSPRVPVIFVVNNQEELERLNTQNAIAFRRDQRSLYFKDSLGWLPIQLTPFYPVDYTADQHGTCGDGLLQPGEECDDGNSDVGDDCIRCHRAYCGDGHRHEGVEDCDGSDFGYLTCETYLPGSYGDLQCTQYCYIDSTPCRYFT

SEQ ID NO: 3385 - protein, 455 aa, Homo Sapiens
MVVLNPMTLGIYLQLFFLSIVSQPTFINSVLPISAALPSLDQKKRGGHKACCLLTPPPPPLFPPPFFRGGRSPLLSPDMKNLMLELETSQSPCMQGSLGSPGPPGPQGPPGLPGKTGPKGEKGELGRPGRKGRPGPPGVPGMPGPIGWPGPEGPRGEKGDLGMMGLPGSRGPMGSKGYPGSRGEKGSRGEKGDLGPKGEKGFPGFPGMLGQKGEMGPKGEPGIAGHRGPTGRPGKRGKQGQKGDSGVMGPPGKPGPSGQPGRPGPPGPPPAGQLIMGPKGERGFPGPPGRCLCGPTMNVNNPSYGESVYGPSSPRVPVIFVVNNQEELERLNTQNAIAFRRDQRSLYFKDSLGWLPIQLTPFYPVDYTADQHGTCGDGLLQPGEECDDGNSDVGDDCIRCHRAYCGDGHRHEGVEDCDGSDFGYLTCETYLPGSYGDLQCTQYCYIDSTPCRYFT

SEQ ID NO: 3386 - protein, 456 aa, Homo Sapiens
MVVLNPMTLGIYLQLFFLSIVSQPTFINSVLPISAALPSLDQKKRGGHKACCLLTPPPPPLFPPPFFRGGRSPLLSPDMKNLMLELETSQSPCMQGSLGSPGPPGPQGPPGLPGKTGPKGEKGELGRPGRKGRPGPPGVPGMPGPIGWPGPEGPRGEKGDLGMMGLPGSRGPMGSKGYPGSRGEKGSRGEKGDLGPKGEKGFPGFPGMLGQKGEMGPKGEPGIAGHRGPTGRPGKRGKQGQKGDSGVMGPPGKPGPSGQPGRPGPPGPPPAGQLIMGPKGERGFPGPPGRCLCGPTMNVNNPSYGESVYGPSSPRVPVIFVVNNQEELERLNTQNAIAFRRDQRSLYFKDSLGWLPIQLTPFYPVDYTADQHGTCGDGLLQPGEECDDGNSDVGDDCIRDCHRAYCGDGHRHEGVEDCDGSDFGYLTCETYLPGSYGDLQCTQYCYIDSTPCRYFT

SEQ ID NO: 3387 - protein, 724 aa, Homo Sapiens
MLRELQETNAALQDVRELLRQQVREITFLKNTVMECDACGMQQSVRTGLPSVRPLLHCAPGFCFPGVACIQTESGARCGPCPAGFTGNGSHCTDVNECNAHPCFPRVRCINTSPGFRCEACPPGYSGPTHQGVGLAFAKANKQVCTDINECETGQHNCVPNSVCINTRGSFQCGPCQPGFVGDQASGCQRRAQRFCPDGSPSECHEHADCVLERDGSRSCVCAVGWAGNGILCGRDTDLDGFPDEKLRCPERQCRKDNCVTVPNSGQEDVDRDGIGDACDPDADGDGVPNEKDNCPLVRNPDQRNTDEDKWGDACDNCRSQKNDDQKDTDQDGRGDACDDDIDGDRIRNQADNCPRVPNSDQKDSDGDGIGDACDNCPQKSNPDQADVDHDFVGDACDSDQDQDGDGHQDSRDNCPTVPNSAQEDSDHDGQGDACDDDDDNDGVPDSRDNCRLVPNPGQEDADRDGVGDVCQDDFDADKVVDKIDVCPENAEVTLTDFRAFQTVVLDPEGDAQIDPNWVVLNQGREIVQTMNSDPGLAVGYTAFNGVDFEGTFHVNTVTDDDYAGFIFGYQDSSSFYVVMWKQMEQTYWQANPFRAVAEPGIQLKAVKSSTGPGEQLRNALWHTGDTESQVRLLWKDPRNVGWKDKKSYRWFLQHRPQVGYIRVRFYEGPELVADSNVVLDTTMRGGRLGVFCFSQENIIWANLRYRCNDTIPEDYETHQLRQA

SEQ ID NO: 3388 - protein, 704 aa, Homo Sapiens
MVPDTACVLLLTLAALGASGQGQSPLGSDLGPQMLRELQETNAALQDVRELLRQQVREITFLKNTVMECDACGMQQSVRTGLPSVRPLLHCAPGFCFPGVACIQTESGARCGPCPAGFTGNGSHCTDVNECETGQHNCVPNSVCINTRGSFQCGPCQPGFVGDQASGCQRRAQRFCPDGSPSECHEHADCVLERDGSRSCVCAVGWAGNGILCGRDTDLDGFPDEKLRCPERQCRKDNCVTVPNSGQEDVDRDGIGDACDPDADGDGVPNEKDNCPLVRNPDQRNTDEDKWGDACDNCRSQKNDDQKDTDQDGRGDACDDDIDGDRIRNQADNCPRVPNSDQKDSDGDGIGDACDNCPQKSNPDQADVDHDFVGDACDSDQDQDGDGHQDSRDNCPTVPNSAQEDSDHDGQGDACDDDDDNDGVPDSRDNCRLVPNPGQEDADRDGVGDVCQDDFDADKVVDKIDVCPENAEVTLTDFRAFQTVVLDPEGDAQIDPNWVVLNQGREIVQTMNSDPGLAVGYTAFNGVDFEGTFHVNTVTDDDYAGFIFGYQDSSSFYVVMWKQMEQTYWQANPFRAVAEPGIQLKAVKSSTGPGEQLRNALWHTGDTESQVRLLWKDPRNVGWKDKKSYRWFLQHRPQVGYIRVRFYEGPELVADSNVVLDTTMRGGRLGVFCFSQENIIWANLRYRCNDTIPEDYETHQLRQA

SEQ ID NO: 3389 - protein, 757 aa, Homo Sapiens
MVPDTACVLLLTLAALGASGQGQSPLGSDLGPQMLRELQETNAALQDVRELLRQQVREITFLKNTVMECDACGMQQSVRTGLPSVRPLLHCAPGFCFPGVACIQTESGARCGPCPAGFTGNGSHCTDVNECNAHPCFPRVRCINTSPGFRCEACPPGYSGPTHQGVGLAFAKANKQVCTDINECETGQHNCVPNSVCINTRGSFQCGPCQPGFVGDQASGCQRRAQRFCPDGSPSECHEHADCVLERDGSRSCVCAVGWAGNGILCGRDTDLDGFPDEKLRCPERQCRKDNCVTVPNSGQEDVDRDGIGDACDPDADGDGVPNEKDNCPLVRNPDQRNTDEDKWGDACDNCRSQKNDDQKDTDQDGRGDACDDDIDGDRIRNQADNCPRVPNSDQKDSDGDGIGDACDNCPQKSNPDQADVDHDFVGDACDSDQDQDGDGHQDSRDNCPTVPNSAQEDSDHDGQGDACDDDDDNDGVPDSRDNCRLVPNPGQEDADRDGVGDVCQDDFDADKVVDKIDVCPENAEVTLTDFRAFQTVVLDPEGDAQIDPNWVVLNQGREIVQTMNSDPGLAVGYTAFNGVDFEGTFHVNTVTDDDYAGFIFGYQDSSSFYVVMWKQMEQTYWQANPFRAVAEPGIQLKAVKSSTGPGEQLRNALWHTGDTESQVRLLWKDPRNVGWKDKKSYRWFLQHRPQVGYIRVRFYEGPELVADSNVVLDTTMRGGRLGVFCFSQENIIWANLRYRCNDTIPEDYETHQLRQA

SEQ ID NO: 3390 - protein, 123 aa, Homo Sapiens
LGWYTTGGPPDPSDIHVHKQVCEIIESPLFLKLNPMTKHTDLPVSVFESVIDIINGEATMLFAELTYTLATEEAERIGVDHVARMTATGSGENSTVAEHLIAQHSAIKMLHSRVKLILERGPL

SEQ ID NO: 3391 - protein, 326 aa, Homo Sapiens
MAAAAAAAAATNGTGGSSGMEVDAAVPSVMACGVTGSVSVALHPLVILNISDHWIRMRSQEGRPVQVIGALIGKQEGRNIEVMNSFELLSHTVEEKIIIDKEYYYTKEEQFKQVFKELEFLGWYTTGGPPDPSDIHVHKQVCEIIESPLFLKLNPMTKHTDLPVSVFESVIDIINGEATMLFAELTYTLATEEAERIGVDHVARMTATGSGENSTVAEHLIAQHSAIKMLHSRVKLILEYVKASEAGEVPFNHEILREAYALCHCLPVLSTDKFKTDFYDQCNDVGLMAYLGTITKTCNTMNQFVNKFNVLYDRQGIGRRMRGLFF

SEQ ID NO: 3392 - protein, 327 aa, Homo Sapiens
MAAAAAAAAATNGTGGSSGMEVDAAVVPSVMACGVTGSVSVALHPLVILNISDHWIRMRSQEGRPVQVIGALIGKQEGRNIEVMNSFELLSHTVEEKIIIDKEYYYTKEEQFKQVFKELEFLGWYTTGGPPDPSDIHVHKQVCEIIESPLFLKLNPMTKHTDLPVSVFESVIDIINGEATMLFAELTYTLATEEAERIGVDHVARMTATGSGENSTVAEHLIAQHSAIKMLHSRVKLILEYVKASEAGEVPFNHEILREAYALCHCLPVLSTDKFKTDFYDQCNDVGLMAYLGTITKTCNTMNQFVNKFNVLYDRQGIGRRMRGLFF

SEQ ID NO: 3393 - protein, 42 aa, Homo Sapiens
MACGVTGSVSVALHPLVILNISDHWIRMRSQEGRPVQVIGAL

SEQ ID NO: 3394 - protein, 468 aa, Homo Sapiens
MAARLVSRCGAVRAAPHSGPLVSWRRWSGASTDTVYDVVVSGGGLVGAAMACALGYDIHFHDKKILLLEAGPKKVLEKLSETYSNRVSSISPGSATLLSSFGAWDHICNMRYRAFRRMQVWDACSEALIMFDKDNLDDMGYIVENDVIMHALTKQLEAVSDRVTVLYRSKAIRYTWPCPFPMADSSPWVHITLGDGSTFQTKLLIGADGHNSGVRQAVGIQNVSWNYDQSAVVATLHLSEATENNVAWQRFLPSGPIALLPLSDTLSSLVWSTSHEHAAELVSMDEEKFVDAVNSAFWSDADHTDFIDTAGAMLQYAVSLLKPTKVSARQLPPSVARVDAKSRVLFPLGLGHAAEYVRPRVALIGDAAHRVHPLAGQGVNMGFGDISSLAHHLSTAAFNGKDLGSVSHLTGYETERQRHNTALLAATDLLKRLYSTSASPLVLLRTWGLQATNAVSPLKEQIMAFASK

SEQ ID NO: 3395 - protein, 200 aa, Homo Sapiens
MAARLVSRCGAVRAAPHSGPLVSWRRWSGASTDTVYDVVVSGGGLVGAAMACALGYDIHFHDKKILLLEAGPKKVLEKLSETYSNRVSSISPGSATLLSSFGAWDHICNMRYRAFRRMQVWDACSEALIMFDKDNLDDMGYIVENDVIMHALTKQLEAVSGTDYGLCKQMSTPLLKKDYVDEKEHPAQDPSYIFSRSYLI

SEQ ID NO: 3396 - protein, 111 aa, Homo Sapiens
MAARLVSRCGAVRAAPHSGPLVSWRRWSGASTDTVYDVVVSGGGLVGAAMACALGYDIHFHDKKILLLEAGPKKVLEKLSETYSNRVSSISPGSATLLSSVGRLLRGPDNV

SEQ ID NO: 3397 - protein, 54 aa, Homo Sapiens
MIFTFMTRKSCCSKQVQRKYWRNCQKLTATGSAPFPLALQRFSVVLVPGTISAT

SEQ ID NO: 3398 - protein, 262 aa, Homo Sapiens
MIFTFMTRKSCCSKQVQRKYWRNCQKLTATGSAPFPLALQRFSVVWDACSEALIMFDKDNLDDMGYIVENDVIMHALTKQLEAVSDRVTVLYRSKAIRYTWPCPFPMADSSPWVHITLGDGSTFQTKLLIGADGHNSGVRQAVGIQNVSWNYDQSAVVATLHLSEATENNVAWQRFLPSGPIALLPLSDTLSSLVWSTSHEHAAELVSMDEEKFVDAVNSAFWSDADHTDFIDTAGAMLQYAVSLLKPTKVSARQLPPSVAR

SEQ ID NO: 3399 - protein, 393 aa, Homo Sapiens
MIFTFMTRKSCCSKQVQRKYWRNCQKLTATGSAPFPLALQRFSVVWDACSEALIMFDKDNLDDMGYIVENDVIMHALTKQLEAVSDRVTVLYRSKAIRYTWPCPFPMADSSPWVHITLGDGSTFQTKLLIGADGHNSGVRQAVGIQNVSWNYDQSAVVATLHLSEATENNVAWQRFLPSGPIALLPLSDTLSSLVWSTSHEHAAELVSMDEEKFVDAVNSAFWSDADHTDFIDTAGAMLQYAVSLLKPTKVSARQLPPSVARVDAKSRVLFPLGLGHAAEYVRPRVALIGDAAHRVHPLAGQGVNMGFGDISSLAHHLSTAAFNGKDLGSVSHLTGYETERQRHNTALLAATDLLKRLYSTSASPLVLLRTWGLQATNAVSPLKEQIMAFASK

SEQ ID NO: 3400 - protein, 443 aa, Homo Sapiens
MRGQGPPLSSFGVWLASRAASDPSRPRRQGYDIHFHDKKILLLEAGPKKVLEKLSETYSNRVSSISPGSATLLSSFGAWDHICNMRYRAFRRMQVWDACSEALIMFDKDNLDDMGYIVENDVIMHALTKQLEAVSDRVTVLYRSKAIRYTWPCPFPMADSSPWVHITLGDGSTFQTKLLIGADGHNSGVRQAVGIQNVSWNYDQSAVVATLHLSEATENNVAWQRFLPSGPIALLPLSDTLSSLVWSTSHEHAAELVSMDEEKFVDAVNSAFWSDADHTDFIDTAGAMLQYAVSLLKPTKVSARQLPPSVARVDAKSRVLFPLGLGHAAEYVRPRVALIGDAAHRVHPLAGQGVNMGFGDISSLAHHLSTAAFNGKDLGSVSHLTGYETERQRHNTALLAATDLLKRLYSTSASPLVLLRTWGLQATNAVSPLKEQIMAFASK

SEQ ID NO: 3401 - protein, 86 aa, Homo Sapiens
MRGQGPPLSSFGVWLASRAASDPSRPRRQGYDIHFHDKKILLLEAGPKKVLEKLSETYSNRVSSISPGSATLLSSVGRLLRGPDNV

SEQ ID NO: 3402 - protein, 105 aa, Homo Sapiens
MPLSPGLLLLLLSGATATAALPLEGGPTGRDSEHMQEAAGIRKSSLLTFLAWWFEWTSQASAGPLIGEEAREVARRQEGAPPQQSARRDRMPCRNFFWKTFSSCK

SEQ ID NO: 3403 - protein, 225 aa, Homo Sapiens
GAGTEDSACIPWAYYSTVDQVKDLYSGLIGPLIVCRRPYLKVFNPRRKLEFALLFLVFDENESWYLDDNIKTYSDHPEKVNKDDEEFIESNKMHAINGRMFGNLQGLTMHVGDEVNWYLMGMGNEIDLHTVHFHGHSFQYKHRGVYSSDVFDIFPGTYQTLEMFPRTPGIWLLHCHVTDHIHAGMETTYTVLQNEASSETHRRIWNVIYPITVSVIILFQISTKE

SEQ ID NO: 3404 - protein, 1065 aa, Homo Sapiens
MKILILGIFLFLCSTPAWAKEKHYYIGIIETTWDYASDHGEKKLISVDTEHSNIYLQNGPDRIGRLYKKALYLQYTDETFRTTIEKPVWLGFLGPIIKAETGDKVYVHLKNLASRPYTFHSHGITYYKEHEGAIYPDNTTDFQRADDKVYPGEQYTYMLLATEEQSPGEGDGNCVTRIYHSHIDAPKDIASGLIGPLIICKKDSLDKEKEKHIDREFVVMFSVVDENFSWYLEDNIKTYCSEPEKVDKDNEDFQESNRMYSVNGYTFGSLPGLSMCAEDRVKWYLFGMGNEVDVHAAFFHGQALTNKNYRIDTINLFPATLFDAYMVAQNPGEWMLSCQNLNHLKAGLQAFFQVQECNKSSSKDNIRGKHVRHYYIAAEEIIWNYAPSGIDIFTKENLTAPGSDSAVFFEQGTTRIGGSYKKLVYREYTDASFTNRKERGPEEEHLGILGPVIWAEVGDTIRVTFHNKGAYPLSIEPIGVRFNKNNEGTYYSPNYNPQSRSVPPSASHVAPTETFTYEWTVPKEVGPTNADPVCLAKMYYSAVEPTKDIFTGLIGPMKICKKGSLHANGRQKDVDKEFYLFPTVFDENESLLLEDNIRMFTTAPDQVDKEDEDFQESNKMHSMNGFMYGNQPGLTMCKGDSVVWYLFSAGNEADVHGIYFSGNTYLWRGERRDTANLFPQTSLTLHMWPDTEGTFNVECLTTDHYTGGMKQKYTVNQCRRQSEDSTFYLGERTYYIAAVEVEWDYSPQREWEKELHHLQEQNVSNAFLDKGEFYIGSKYKKVVYRQYTDSTFRVPVERKAEEEHLGILGPQLHADVGDKVKIIFKNMATRPYSIHAHGVQTESSTVTPTLPGETLTYVWKIPERSGAGTEDSACIPWAYYSTVDQVKDLYSGLIGPLIVCRRPYLKVFNPRRKLEFALLFLVFDENESWYLDDNIKTYSDHPEKVNKDDEEFIESNKMHAINGRMFGNLQGLTMHVGDEVNWYLMGMGNEIDLHTVHFHGHSFQYKHRGVYSSDVFDIFPGTYQTLEMFPRTPGIWLLHCHVTDHIHAGMETTYTVLQNEDTKSG

SEQ ID NO: 3405 - protein, 946 aa, Homo Sapiens
MKILILGIFLFLCSTPAWAKEKHYYIGIIETTWDYASDHGEKKLISVDTEHSNIYLQNGPDRIGRLYKKALYLQYTDETFRTTIEKPVWLGFLGPIIKAETGDKVYVHLKNLASRPYTFHSHGITYYKEHEGAIYPDNTTDFQRADDKVYPGEQYTYMLLATEEQSPGEGDGNCVTRIYHSHIDAPKDIASGLIGPLIICKKDSLDKEKEKHIDREFVVMFSVVDENFSWYLEDNIKTYCSEPEKVDKDNEDFQESNRMYSVNGYTFGSLPGLSMCAEDRVKWYLFGMGNEVDVHAAFFHGQALTNKNYRIDTINLFPATLFDAYMVAQNPGEWMLSCQNLNHLKAGLQAFFQVQECNKSSSKDNIRGKHVRHYYIAAEEIIWNYAPSGIDIFTKENLTAPGSDSAVFFEQGTTRIGGSYKKLVYREYTDASFTNRKERGPEEEHLGILGPVIWAEVGDTIRVTFHNKGAYPLSIEPIGVRFNKNNEGTYYSPNYNPQSRSVPPSASHVAPTETFTYEWTVPKEVGPTNADPVCLAKMYYSAVEPTKDIFTGLIGPMKICKKGSLHANGRQKDVDKEFYLFPTVFDENESLLLEDNIRMFTTAPDQVDKEDEDFQESNKMHWTFNVECLTTDHYTGGMKQKYTVNQCRRQSEDSTFYLGERTYYIAAVEVEWDYSPQREWEKELHHLQEQNVSNAFLDKGEFYIGSKYKKVVYRQYTDSTFRVPVERKAEEEHLGILGPQLHADVGDKVKIIFKNMATRPYSIHAHGVQTESSTVTPTLPGETLTYVWKIPERSGAGTEDSACIPWAYYSTVDQVKDLYSGLIGPLIVCRRPYLKVFNPRRKLEFALLFLVFDENESWYLDDNIKTYSDHPEKVNKDDEEFIESNKMHAINGRMFGNLQGLTMHVGDEVNWYLMGMGNEIDLHTVHFHGHSFQYKHLLRLTGEYGM

SEQ ID NO: 3406 - protein, 179 aa, Homo Sapiens [sequence omitted]

SEQ ID NO: 3407 - protein, 852 aa, Homo Sapiens
VVMFSVVDENFSWYLEDNIKTYCSEPEKVDKDNEDFQESNRMYSVNGYTFGSLPGLSMCAEDRVKWYLFGMGNEVDVHAAFFHGQALTNKNYRIDTINLFPATLFDAYMVAQNPGEWMLSCQNLNHLKAGLQAFFQVQECNKSSSKDNIRGKHVRHYYIAAEEIIWNYAPSGIDIFTKENLTAPGSDSAVFFEQGTTRIGGSYKKLVYREYTDASFTNRKERGPEEEHLGILGPVIWAEVGDTIRVTFHNKGAYPLSIEPIGVRFNKNNEGTYYSPNYNPQSRSVPPSASHVAPTETFTYEWTVPKEVGPTNADPVCLAKMYYSAVEPTKDIFTGLIGPMKICKKGSLHANGRQKDVDKEFYLFPTVFDENESLLLEDNIRMFTTAPDQVDKEDEDFQESNKMHSMNGFMYGNQPGLTMCKGDSVVWYLFSAGNEADVHGIYFSGNTYLWRGERRDTANLFPQTSLTLHMWPDTEGTFNVECLTTDHYTGGMKQKYTVNQCRRQSEDSTFYLGERTYYIAAVEVEWDYSPQREWEKELHHLQEQNVSNAFLDKGEFYIGSKYKKVVYRQYTDSTFRVPVERKAEEEHLGILGPQLHADVGDKVKIIFKNMATRPYSIHAHGVQTESSTVTPTLPGETLTYVWKIPERSGAGTEDSACIPWAYYSTVDQVKDLYSGLIGPLIVCRRPYLKVFNPRRKLEFALLFLVFDENESWYLDDNIKTYSDHPEKVNKDDEEFIESNKMHAINGRMFGNLQGLTMHVGDEVNWYLMGMGNEIDLHTVHFHGHSFQYKHRGVYSSDVFDIFPGTYQTLEMFPRTPGIWLLHCHVTDHIHAGMETTYTVLQNEGEYPDTKSG

SEQ ID NO: 3408 - protein, 103 aa, Homo Sapiens
MIEDVQSLLDEEQEQMFAFRSRARSTDTFNYATYHTLEEIYDFLDLLVAENPHLVSKIQIGNTYEGRPIYVLKFSTGGSKRPAIWIDTGIHSREWVTQASGVW

SEQ ID NO: 3409 - protein, 331 aa, Homo Sapiens
MIEDVQSLLDEEQEQMFAFRSRARSTDTFNYATYHTLEEIYDFLDLLVAENPHLVSKIQIGNTYEGRPIYVLKFSTGGSKRPAIWIDTGIHSREWVTQASGVWFAKKITQDYGQDAAFTAILDTLDIFLEIVTNPDGFAFTHSTNRMWRKTRSHTAGSLCIGVDPNRNWDAGFGLSGASSNPCSETYHGKFANSEVEVKSIVDFVKDHGNIKAFISIHSYSQLLMYPYGYKTEPVPDQDELDQLSKAAVTALASLYGTKFNYGSIIKAIYQASGSTIDWTYSQGIKYSFTFELRDTGRYGFLLPASQIIPTAKETWLALLTIMEHTLNHPY

SEQ ID NO: 3410 - protein, 269 aa, Homo Sapiens
MIEDVQSLLDEEQEQMFAFRSRARSTDTFNYATYHTLEEIYDFLDLLVAENPHLVSKIQIGNTYEGRPIYVLKFSTGGSKRPAIWIDTGIHSREWVTQASGVWFAKKITQDYGQDAAFTAILDTLDIFLEIVTNPDGFAFTHSTNRMWRKTRSHTAGSLCIGVDPNRNWDAGFGLSGASSNPCSETYHGKFANSEVEVKSIVDFVKDHGNIKAFISIHSYSQLLMYPYGYKTEPVPDQDELDQLSKAAVTALASLYGTKFNYGSIIKAI

SEQ ID NO: 3411 - protein, 419 aa, Homo Sapiens
MRGLLVLSVLLGAVFGKEDFVGHQVLRISVADEAQVQKVKELEDLEHLQLDFWRGPAHPGSPIDVRVPFPSIQAVKIFLESHGISYETMIEDVQSLLDEEQEQMFAFRSRARSTDTFNYATYHTLEEIYDFLDLLVAENPHLVSKIQIGNTYEGRPIYVLKFSTGGSKRPAIWIDTGIHSREWVTQASGVWFAKKITQDYGQDAAFTAILDTLDIFLEIVTNPDGFAFTHSTNRMWRKTRSHTAGSLCIGVDPNRNWDAGFGLSGASSNPCSETYHGKFANSEVEVKSIVDFVKDHGNIKAFISIHSYSQLLMYPYGYKTEPVPDQDELDQLSKAAVTALASLYGTKFNYGSIIKAIYQASGSTIDWTYSQGIKYSFTFELRDTGRYGFLLPASQIIPTAKETWLALLTIMEHTLNHPY

SEQ ID NO: 3412 - protein, 191 aa, Homo Sapiens
SLTFPPGSSMRGLLVLSVLLGAVFGKEDFVGHQVLRISVADEAQVQKITQDYGQDAAFTAILDTLDIFLEIVTNPDGFAFTHSTNRMWRKTRSHTAGSLCIGVDPNRNWDAGFGLSGASSNPCSETYHGKFANSEVEVKSIVDFVKDHGNIKAFISIHSYSQLLMYPYGYKTEPVPDQDELDQLSKAAVTA

SEQ ID NO: 3413 - protein, 419 aa, Homo Sapiens
MAMRLILFFGALFGHIYCLETFVGDQVLEIVPSNEEQIKNLLQLEAQEHLQLDFWKSPTTPGETAHVRVPFVNVQAVKVFLESQGIAYSIMIEDVQVLLDKENEEMLFNRRRERSGNFNFGAYHTLEEISQEMDNLVAEHPGLVSKVNIGSSFENRPMNVLKFSTGGDKPAIWLDAGIHAREWVTQATALWTANKIVSDYGKDPSITSILDALDIFLLPVTNPDGYVFSQTKNRMWRKTRSKVSGSLCVGVDPNRNWDAGFGGPGASSNPCSDSYHGPSANSEVEVKSIVDFIKSHGKVKAFITLHSYSQLLMFPYGYKCTKLDDFDELSEVAQKAAQSLRSLHGTKYKVGPICSVIYQASGGSIDWSYDYGIKYSFAFELRDTGRYGFLLPARQILPTAEETWLGLKAIMEHVRDHPY

SEQ ID NO: 3414 - protein, 182 aa, Homo Sapiens
MRLILFFGALFGHIYCLETFVGDQVLEIVPSNEEQIKNLLQLEAQEHLQLDFWKSPTTPGETAHVRVPFVNVQAVKVFLESQGIAYSIMIEDVQVLLDKENEEMLFNRRRERSGNFNFGAYHTLEEISQEMDNLVAEHPGLVSKVNIGSSFENRPMNVLKKSSGRMQKDDGQLNPKPQRQTP

SEQ ID NO: 3415 - protein, 417 aa, Homo Sapiens
MRLILPVGLIATTLAIAPVRFDREKVFRVKPQDEKQADIIKDLAKTNELDFWYPGATHHVAANMMVDFRVSEKESQAIQSALDQNKMHYEILIHDLQEEIEKQFDVKEDIPGRHSYAKYNNWEKIVAWTEKMMDKYPEMVSRIKIGSTVEDNPLYVLKIGEKNERRKAIFTDCGIHAREWVSPAFCQWFVYQATKTYGRNKIMTKLLDRMNFYILPVFNVDGYIWSWTKNRMWRKNRSKNQNSKCIGTDLNRNFNASWNSIPNTNDPCADNYRGSAPESEKETKAVTNFIRSHLNEIKVYITFHSYSQMLLFPYGYTSKLPPNHEDLAKVAKIGTDVLSTRYETRYIYGPIESTIYPISGSSLDWAYDLGIKHTFAFELRDKGKFGFLLPESRIKPTCRETMLAVKFIAKYILKHTS

SEQ ID NO: 3416 - protein, 29 aa, Homo Sapiens
MQHNEGQERSSNNFNYGAYHSLEAIYHEM

SEQ ID NO: 3417 - protein, 317 aa, Homo Sapiens
MQHNEGQERSSNNFNYGAYHSLEAIYHEMDNIAADFPDLARRVKIGHSFENRPMYVLKFSTGKGVRRPAVWLNAGIHSREWISQATAIWTARKIVSDYQRDPAITSILEKMDIFLLPVANPDGYVYTQTQNRLWRKTRSRNPGSSCIGADPNRNWNASFAGKGASDNPCSEVYHGPHANSEVEVKSVVDFIQKHGNFKGFIDLHSYSQLLMYPYGYSVKKAPDAEELDKVARLAAKALASVSGTEYQVGPTCTTVYPASGSSIDWAYDNGIKFAFTFELRDTGTYGFLLPANQIIPTAEETWLGLKTIMEHVRDNLY

SEQ ID NO: 3418 - protein, 421 aa, Homo Sapiens
MRWILFIGALIGSSICGQEKFFGDQVLRINVRNGDEISKLSQLVNSNNLKLNFWKSPSSFNRPVDVLVPSVSLQAFKSFLRSQGLEYAVTIEDLQALLDNEDDEMQHNEGQERSSNNFNYGAYHSLEAIYHEMDNIAADFPDLARRVKIGHSFENRPMYVLKFSTGKGVRRPAVWLNAGIHSREWISQATAIWTARKIVSDYQRDPAITSILEKMDIFLLPVANPDGYVYTQTQNRLWRKTRSRNPGSSCIGADPNRNWNASFAGKGASDNPCSEVYHGPHANSEVEVKSVVDFIQKHGNFKGFIDLHSYSQLLMYPYGYSVKKAPDAEELDKVARLAAKALASVSGTEYQVGPTCTTVYPASGSSIDWAYDNGIKFAFTFELRDTGTYGFLLPANQIIPTAEETWLGLKTIMEHVRDNLY

SEQ ID NO: 3419 - protein, 172 aa, Homo Sapiens [sequence omitted]

SEQ ID NO: 3420 - protein, 177 aa, Homo Sapiens
MRWILFIGALIGSSICGQEKFFGDQVLRINVRNGDEISKLSQLVNSNNLKLNFWKSPSSFNRPVDVLVPSVSLQAFKSFLRSQGLEYAVTIEDLQIYHEMDNIAADFPDLARRVKIGHSFENRPMYVLKFSTGKGVRRPAVWLNAGIHSREWISQATAIWTARKIVSDYQRDPAITS

SEQ ID NO: 3421 - protein, 388 aa, Homo Sapiens
MRWILFIGALIGSSICGQEKFFGDQVLRINVRNGDEISKLSQLVNSNNLKLNFWKSPSSFNRPVDVLVPSVSLQAFKSFLRSQGLEYAVTIEDLQIYHEMDNIAADFPDLARRVKIGHSFENRPMYVLKFSTGKGVRRPAVWLNAGIHSREWISQATAIWTARKIVSDYQRDPAITSILEKMDIFLLPVANPDGYVYTQTQNRLWRKTRSRNPGSSCIGADPNRNWNASFAGKGASDNPCSEVYHGPHANSEVEVKSVVDFIQKHGNFKGFIDLHSYSQLLMYPYGYSVKKAPDAEELDKVARLAAKALASVSGTEYQVGPTCTTVYPASGSSIDWAYDNGIKFAFTFELRDTGTYGFLLPANQIIPTAEETWLGLKTIMEHVRDNLY

SEQ ID NO: 3422 - protein, 92 aa, Homo Sapiens
MKCLGKRRGQAAAFLPLCWLFLKILQPGHSHLYNNRYAGDKVIRFIPKTEEEAYALKKISYQLKGPHRRSSENTGEGKQLAHPEKPKIPLWI

SEQ ID NO: 3423 - protein, 92 aa, Homo Sapiens; identical to SEQ ID NO: 3422

SEQ ID NO: 3424 - protein, 437 aa, Homo Sapiens
MKCLGKRRGQAAAFLPLCWLFLKILQPGHSHLYNNRYAGDKVIRFIPKTEEEAYALKKISYQLKVDLWQPSSISYVSEGTVTDVHIPQNGSRALLAFLQEANIQYKVLIEDLQKTLEKGSSLHTQRNRRSLSGYNYEVYHSLEEIQNWMHHLNKTHSGLIHMFSIGRSYEGRSLFILKLGRRSRLKRAVWIDCGIHAREWIGPAFCQWFVKEALLTYKSDPAMRKMLNHLYFYIMPVFNVDGYHFSWTNDRFWRKTRSRNSRFRCRGVDANRNWKVKWCDEGASMHPCDDTYCGPFPESEPEVKAVANFLRKHRKHIRAYLSFHAYAQMLLYPYSYKYATIPNFRCVESAAYKAVNALQSVYGVRYRYGPASTTLYVSSGSSMDWAYKNGIPYAFAFELRDTGYFGFLLPEMLIKPTCTETMLAVKNITMHLLKKCP

SEQ ID NO: 3425 - protein, 175 aa, Homo Sapiens
LLLDKHMGMKRYEVAGRRVLFYFDEIPSRCLTCVRFRALRECVVGRTSALPVSVYDYYEPAFEATRFYNVSTHSPLARELCAGPACNEVERAPARGPGWFPGESGPAVAPEEGAAIARCGCDHDCGAQGNPVCGSDGVVYASACRLREAACRQAAPLEPAPPSCCALAGREAEWS

SEQ ID NO: 3426 - protein, 550 aa, Homo Sapiens
MAPGALRGGCEQRAPGGGARTAALGPWPWPSPGPAPSPGAAPPRSRKMSGALLWPLLPLLLLLLSARDGVRAAQPQAPGYLIAAPSVFRAGVEEVISVTIFNSPREVTVQAQLVAQGEPVVQSQGAILDKGTIKLKVPTGLRGQALLKVWGRGWQAEEGPLFHNQTSVTVDGRGASVFIQTDKPVYRPQHRVLISIFTVSPNLRPVNEKLEAYILDPRGSRMIEWRHLKPFCCGITNMSFPLSDQPVLGEWFIFVEMQGHAYNKSFEVQKYVLPKFELLIDPPRYIQDLDACETGTVRARYTFGKPVAGALMINMTVNGVGYYSHEVGRPVLRTTKILGSRDFDICVRDMIPADVPEHFRGRVSIWAMVTSVDGSQQVAFDDSTPVQRQLVDIRYSKDTRKQFKPGLAYVGKVELSYPDGSPAEGVTVQIKAELTPKDNIYTSEVVSQRGLVGFEIPSIPTSAQHVWLEVFQELEDYDVSDSFGVSREDGPFWWAGLTAQRRRRSSVFPWPWGITKDSGFAFTVRRGNGTGGDDRPSEPEPPAGRWPLHR

SEQ ID NO: 3427 - protein, 1932 aa, Homo Sapiens
MAPGALRGGCEQRAPGGGARTAALGPWPWPSPGPAPSPGAAPPRSRKMSGALLWPLLPLLLLLLSARDGVRAAQPQAPGYLIAAPSVFRAGVEEVISVTIFNSPREVTVQAQLVAQGEPVVQSQGAILDKGTIKLKVPTGLRGQALLKVWGRGWQAEEGPLFHNQTSVTVDGRGASVFIQTDKPVYRPQHRVLISIFTVSPNLRPVNEKLEAYILDPRGSRMIEWRHLKPFCCGITNMSFPLSDQPVLGEWFIFVEMQGHAYNKSFEVQKYVLPKFELLIDPPRYIQDLDACETGTVRARYTFGKPVAGALMINMTVNGVGYYSHEVGRPVLRTTKILGSRDFDICVRDMIPADVPEHFRGRVSIWAMVTSVDGSQQVAFDDSTPVQRQLVDIRYSKDTRKQFKPGLAYVGKVELSYPDGSPAEGVTVQIKAELTPKDNIYTSEVVSQRGLVGFEIPSIPTSAQHVWLETKVMALNGKPVGAQYLPSYLSLGSWYSPSQCYLQLQPPSHPLQVGEEAYFSVKSTCPCNFTLYYEVAARGNIVLSGQQPAHTTQQRSKRAAPALEKPIRLTHLSETEPPPAPEAEVDVCVTSLHLAVTPSMVPLGRLLVFYVRENGEGVADSLQFAVETFFENQVSVTYSANETQPGEVVDLRIRAARGSCVCVAAVDKSVYLLRSGFRLTPAQVFQELEDYDVSDSFGVSREDGPFWWAGLTAQRRRRSSVFPWPWGITKDSGFAFTETGLVVMTDRVSLNHRQDGGLYTDEAVPAFQPHTGSLVAVAPSRHPPRTEKRKRTFFPETWIWHCLNISDPSGEGTLSVKVPDSITSWVGEAVALSTSQGLGIAEPSLLKTFKPFFVDFMLPALIIRGEQVKIPLSVYNYMGTCAEVYMKLSVPKGIQFVGHPGKRHVTKKMCVAPGEAEPIWVVLSFSDLGLNNITAKALAYGDTNCCRDGRSSKHPEENHADRRVPIGVDHVRRSVMVEAEGVPRAYTYSAFFCPSERVHISTPNKYEFQYVQRPLRLTRFDVAVRAHNDARVALSSGPQDTAGMIEIVLGGHQNTRSWISTSKMGEPVASAHTAKILSWDEFRTFWISWRGGLIQVGHGPEPSNESVIVAWTLPRPPEVQFIGFSTGWGSMGEFRIWRKMEVDESYSEAFTLGVPHGAIPGSERATASIIGDVMGPTLNHLNNLLRLPFGCGEQNMIHFAPNVFVLKYLQKTQQLSPEVERETTDYLVQGYQRQLTYKRQDGSYSAFGERDASGSMWLTAFVLKSFAQARSFIFVDPRELAAAKSWIIQQQQADGSFLAVGRVLNKDIQGGIHGTVPLTAYVVVALLETGTASEEERGSTDKARHFLESAAPLAMDPYSCALTTYALTLLRSPAAPEALRKLRSLAIMRDGVTHWSLSNSWDVDKGTFLSFSDRVSQSVVSAEVEMTAYALLTYTLLGDVAAALPVVKWLSQQRNALGGFSSTQDTCVALQALAEYAILSYAGGINLTVSLASTNLDYQETFELHRTNQKVLQTAAIPSLPTGLFVSAKGDGCCLMQIDVTYNVPDPVAKPAFQLLVSLQEPEAQGRPPPMPASAAEGSRGDWPPADDDDPAADQHHQEYKVMLEVCTRWLHAGSSNMAVLEVPLLSGFRADIESLEQLLLDKHMGMKRYEVAGRRVLFYFDEIPSRCLTCVRFRALRECVVGRTSALPVSVYDYYEPAFEATRFYNVSTHSPLARELCAGPACNEVERAPARGPGWFPGESGPAVAPEEGAAIARCGCDHDCGAQGNPVCGSDGVVYASACRLREAACRQAAPLEPAPPSCCALEQRLPASSSSTYGDDLASVAPGPLQQDVKLNGAGLEVEDSDPEPEGEAEDRVTAGPRPPVSSGNLESSTQSASPFHRWGQTPAPQRHSGRVVGAHRPGLLSPVFVYSPAFQSGGEEGLWMSNTCTLR

SEQ ID NO: 3428 - protein, 503 aa, Homo Sapiens
MSGALLWPLLPLLLLLLSARDGVRAAQPQAPGYLIAAPSVFRAGVEEVISVTIFNSPREVTVQAQLVAQGEPVVQSQGAILDKGTIKLKVPTGLRGQALLKVWGRGWQAEEGPLFHNQTSVTVDGRGASVFIQTDKPVYRPQHRVLISIFTVSPNLRPVNEKLEAYILDPRGSRMIEWRHLKPFCCGITNMSFPLSDQPVLGEWFIFVEMQGHAYNKSFEVQKYVLPKFELLIDPPRYIQDLDACETGTVRARYTFGKPVAGALMINMTVNGVGYYSHEVGRPVLRTTKILGSRDFDICVRDMIPADVPEHFRGRVSIWAMVTSVDGSQQVAFDDSTPVQRQLVDIRYSKDTRKQFKPGLAYVGKVELSYPDGSPAEGVTVQIKAELTPKDNIYTSEVVSQRGLVGFEIPSIPTSAQHVWLEVFQELEDYDVSDSFGVSREDGPFWWAGLTAQRRRRSSVFPWPWGITKDSGFAFTVRRGNGTGGDDRPSEPEPPAGRWPLHR

SEQ ID NO: 3429 - protein, 56 aa, Homo Sapiens
RTQTLSLKGRRRTERLLFLTAALLRAGRHHLAASCPYQPVTLYGGWADLSPGDTCL

SEQ ID NO: 3430 - protein, 338 aa, Homo Sapiens
  misc_feature (1)..(1): Xaa can be any naturally occurring amino acid
XVSAKGDGCCLMQIDVTYNVPDPVAKPAFQLLVSLQEPEAQGRPPPMPASAAEGSRGDWPPADDDDPAADQHHQEYKVMLEVCTRWLHAGSSNMAVLEVPLLSGFRADIESLEQLLLDKHMGMKRYEVAGRRVLFYFDEIPSRCLTCVRFRALRECVVGRTSALPVSVYDYYEPAFEATRFYNVSTHSPLARELCAGPACNEVERAPARGPGWFPGESGPAVAPEEGAAIARCGCDHDCGAQGNPVCGSDGVVYASACRLREAACRQAAPLEPAPPSCCALEQRLPASSSSTYGDDLASVAPGPLQQDVKLNGAGLEVEDSDPEPEGEAEDSQSGFSS

SEQ ID NO: 3431 - protein, 59 aa, Homo Sapiens
MLALLVLVTVALASAHHGGEHFEGEKVFRVNVEDENHINIIRELASTTQIDFWKPDSVT

SEQ ID NO: 3432 - protein, 99 aa, Homo Sapiens
MLALLVLVTVALASAHHGGEHFEGEKVFRVNVEDENHINIIRELASTTQIDFWKPDSVTQIKPHSTVDFRVKAEDTVTVENVLKQNELQYKVLISNLRN

SEQ ID NO: 3433 - protein, 417 aa, Homo Sapiens
MLALLVLVTVALASAHHGGEHFEGEKVFRVNVEDENHINIIRELASTTQIDFWKPDSVTQIKPHSTVDFRVKAEDTVTVENVLKQNELQYKVLISNLRNVVEAQFDSRVRATGHSYEKYNKWETIEAWTQQVATENPALISRSVIGTTFEGRAIYLLKVGKAGQNKPAIFMDCGFHAREWISPAFCQWFVREAVRTYGREIQVTELLDKLDFYVLPVLNIDGYIYTWTKSRFWRKTRSTHTGSSCIGTDPNRNFDAGWCEIGASRNPCDETYCGPAAESEKETKALADFIRNKLSSIKAYLTIHSYSQMMIYPYSYAYKLGENNAELNALAKATVKELASLHGTKYTYGPGATTIYPAAGGSDDWAYDQGIRYSFTFELRDTGRYGFLLPESQIRATCEETFLAIKYVASYVLEHLY

SEQ ID NO: 3434 - protein, 417 aa, Homo Sapiens; identical to SEQ ID NO: 3433

SEQ ID NO: 3435 - protein, 203 aa, Homo Sapiens
MLALLVLVTVALASAHHGGEHFEGEKVFRVNVEDENHINIIRELASTTQIDFWKPDSVTQIKPHSTVDFRVKAEDTVTVENVLKQNELQYKVLISNLRNVVEAQFDSRVRATGHSYEKYNKWETVGKAGQNKPAIFMDCGFHAREWISPAFCQWFVREAVRTYGREIQVTELLDKLDFYVLPVLNIDGYIYTWTKSRFWRKTR

SEQ ID NO: 3436 - protein, 423 aa, Homo Sapiens
MKLCSLAVLVPIVLFCEQHVFAFQSGQVLAALPRTSRQVQVLQNLTTTYEIVLWQPVTADLIVKKKQVHFFVNASDVDNVKAHLNVSGIPCSVLLADVEDLIQQQISNDTVSPRASASYYEQYHSLNEIYSWIEFITERHPDMLTKIHIGSSFEKYPLYVLKVSGKEQAAKNAIWIDCGIHAREWISPAFCLWFIGHITQFYGIIGQYTNLLRLVDFYVMPVVNVDGYDYSWKKNRMWRKNRSFYANNHCIGTDLNRNFASKHWCEEGASSSSCSETYCGLYPESEPEVKAVASFLRRNINQIKAYISMHSYSQHIVFPYSYTRSKSKDHEELSLVASEAVRAIEKISKNTRYTHGHGSETLYLAPGGGDDWIYDLGIKYSFTIELRDTGTYGFLLPERYIKPTCREAFAAVSKIAWHVIRNV

SEQ ID NO: 3437 - protein, 423 aa, Homo Sapiens; identical to SEQ ID NO: 3436

SEQ ID NO: 3438 - protein, 386 aa, Homo Sapiens
MKLCSLAVLVPIVLFCEQHVFAFQSGQVLAALPRTSRQVQVLQNLTTTYEIVLWQPVTADLIVKKKQVHFFVNASDVDNVKAHLNVSGIPCSVLLADVEDLIQQQISNDTVSPRASASYYEQYHSLNEIYSWIEFITERHPDMLTKIHIGSSFEKYPLYVLKVSGKEQAAKNAIWIDCGIHAREWISPAFCLWFIGHNRMWRKNRSFYANNHCIGTDLNRNFASKHWCEEGASSSSCSETYCGLYPESEPEVKAVASFLRRNINQIKAYISMHSYSQHIVFPYSYTRSKSKDHEELSLVASEAVRAIEKISKNTRYTHGHGSETLYLAPGGGDDWIYDLGIKYSFTIELRDTGTYGFLLPERYIKPTCREAFAAVSKIAWHVIRNV

SEQ ID NO: 3439 - protein, 476 aa, Homo Sapiens
MAGRGGSALLALCGALAACGWLLGAEAQEPGAPAAGMRRRRRLQQEDGISFEYHRYPELREALVSVWLQCTAISRIYTVGRSFEGRELLVIELSDNPGVHEPGEPEFKYIGNMHGNEAVGRELLIFLAQYLCNEYQKGNETIVNLIHSTRIHIMPSLNPDGFEKAASQPGELKDWFVGRSNAQGIDLNRNFPDLDRIVYVNEKEGGPNNHLLKNMKKIVDQNTKLAPETKAVIHWIMDIPFVLSANLHGGDLVANYPYDETRSGSAHEYSSSPDDAIFQSLARAYSSFNPAMSDPNRPPCRKNDDDSSFVDGTTNGGAWYSVPGGMQDFNYLSSNCFEITVELSCEKFPPEETLKTYWEDNKNSLISYLEQIHRGVKGFVRDLQGNPIANATISVEGIDHDVTSAKDGDYWRLLIPGNYKLTASAPGYLAITKKVAVPYSPAAGVDFELESFSERKEEEKEELMEWWKMMSETLNF

SEQ ID NO: 3440 - protein, 139 aa, Homo Sapiens
MHGNEAVGRELLIFLAQYLCNEYQKGNETIVNLIHSTRIHIMPSLNPDGFEKAASQPGELKDWFVGRSNAQGIDLNRNFPDLDRIVYVNEKEGGPNNHLLKNMKKIVDQNTKLAPETKAVIHWIMDIPFVLSANLHGGD

SEQ ID NO: 3441 - protein, 147 aa, Homo Sapiens
MHGNEAVGRELLIFLAQYLCNEYQKGNETIVNLIHSTRIHIMPSLNPDGFEKAASQPGELKDWFVGRSNAQGIDLNRNFPDLDRIVYVNEKEGGPNNHLLKNMKKIVDQNTKLAPETKAVIHWIMDIPFVLSANLHGGDLVANYPYD

SEQ ID NO: 3442 - protein, 157 aa, Homo Sapiens
MHGNEAVGRELLIFLAQYLCNEYQKGNETIVNLIHSTRIHIMPSLNPDGFEKAASQPGELKDWFVGRSNAQGIDLNRNFPDLDRIVYVNEKEGGPNNHLLKNMKKIVDQNTKLAPETKAVIHWIMDIPFVLSANLHGGDLVANYPYDETRSGSAHEY

SEQ ID NO: 3443 - protein, 108 aa, Homo Sapiens
  misc_feature (1)..(1): Xaa can be any naturally occurring amino acid
XLGAEAQEPGAPAAGMRRRRRLQQEDGISFEYHRYPELREALVSVWLQCTAISRIYTVGRSFEGRELLVIELSDNPGVHEPDCKLYEVGTLIPAPSSCLAHSGLEYTL

SEQ ID NO: 3444 - protein, 64 aa, Homo Sapiens
MDFPCLWLGLLLPLVAALDFNYHRQEGMEAFLKTVAQNYSSVTHLHSIGKSVKDCWAGAAAPSD

SEQ ID NO: 3445 - protein, 64 aa, Homo Sapiens; identical to SEQ ID NO: 3444

SEQ ID NO: 3446 - protein, 72 aa, Homo Sapiens
MDFPCLWLGLLLPLVAALDFNYHRQEGMEAFLKTVAQNYSSVTHLHSIGKSVKETCGFLLWGGFQRNTELGF

SEQ ID NO: 3447 - protein, 136 aa, Homo Sapiens
MDFPCLWLGLLLPLVAALDFNYHRQEGMEAFLKTVAQNYSSVTHLHSIGKSVKGRNLWVLVVGRFPKEHRIGIPEFKYVANMHGDETVGRELLLHLIDYLVTSDGKDPEITNLINSTRIHIMPSMNPDGFEAVKKP

SEQ ID NO: 3448 - protein, 249 aa, Homo Sapiens
MDFPCLWLGLLLPLVAALDFNYHRQEGMEAFLKTVAQNYSSVTHLHSIGKSVKGRNLWVLVVGRFPKEHRIGIPEFKYVANMHGDETVGRELLLHLIDYLVTSDGKDPEITNLINSTRIHIMPSMNPDGFEAVKKPDCYYSIGRENYNQYDLNRNFPDAFEYNNVSRQPETVAVMKWLKTETFVLSANLHGGALVASYPFDNGVQATGALYSRSLTPDDDVFQYLAHTYASRNPNMKKGDECKNKMNFP

SEQ ID NO: 3449 - protein, 443 aa, Homo Sapiens
MDFPCLWLGLLLPLVAALDFNYHRQEGMEAFLKTVAQNYSSVTHLHSIGKSVKGRNLWVLVVGRFPKEHRIGIPEFKYVANMHGDETVGRELLLHLIDYLVTSDGKDPEITNLINSTRIHIMPSMNPDGFEAVKKPDCYYSIGRENYNQYDLNRNFPDAFEYNNVSRQPETVAVMKWLKTETFVLSANLHGGALVASYPFDNGVQATGALYSRSLTPDDDVFQYLAHTYASRNPNMKKGDECKNKMNFPNGVTNGYSWYPLQGGMQDYNYIWAQCFEITLELSCCKYPREEKLPSFWNNNKASLIEYIKQVHLGVKGQVFDQNGNPLPNVIVEVQDRKHICPYRTNKYGEYYLLLLPGSYIINVTVPGHDPHITKVIIPEKSQNFSALKKDILLPFQGQLDSIPVSNPSCPMIPLYRNLPDHSAATKPSLFLFLVSLLHIFFK

SEQ ID NO: 3450 - protein, 443 aa, Homo Sapiens; identical to SEQ ID NO: 3449

SEQ ID NO: 3451 - protein, 443 aa, Homo Sapiens; identical to SEQ ID NO: 3449

SEQ ID NO: 3452 - protein, 35 aa, Homo Sapiens
SCPMIPLYRNLPDHSAATKPSLFLFLVSLLHIFFK

SEQ ID NO: 3453 - protein, 198 aa, Homo Sapiens
  misc_feature (1)..(1): Xaa can be any naturally occurring amino acid
XPFDNGVQATGALYSRSLTPDDDVFQYLAHTYASRNPNMKKGDECKNKMNFPNGVTNGYSWYPLQGGMQDYNYIWAQCFEITLELSCCKYPREEKLPSFWNNNKASLIEYIKQVHLGVKGQVFDQNGNPLPNVIVEVQDRKHICPYRTNKYGEYYLLLLPGSYIINVTVPGHDPHITKLRSFACNRGQDEFCLTSLMS

SEQ ID NO: 3454 - protein, 204 aa, Homo Sapiens
MHSFNFVLSANLHGGAVVANYPYDKSFEHRVRGVRRTASTPTPDDKLFQKLAKVYSYAHGWMFQGWNCGDYFPDGITNGASWYSLSKGMQDFNYLHTNCFEITLELSCDKFPPEEELQREWLGNREALIQFLEQVHQGIKGMVLDENYNNLANAVISVSGINHDVTSGDHGDYFRLLLPGIYTVSATAPGYDPETVTVTVGPAE

SEQ ID NO: 3455 - protein, 458 aa, Homo Sapiens
MSDLLSVFLHLLLLFKLVAPVTFRHHRYDDLVRTLYKVQNECPGITRVYSIGRSVEGRHLYVLEFSDHPGIHEPLEPEVKYVGNMHGNEALGRELMLQLSEFLCEEFRNRNQRIVQLIQDTRIHILPSMNPDGYEVAAAQGPNKPGYLVGRNNANGVDLNRNFPDLNTYIYYNEKYGGPNHHLPLPDNWKSQVEPETRAVIRWMHSFNFVLSANLHGGAVVANYPYDKSFEHRVRGVRRTASTPTPDDKLFQKLAKVYSYAHGWMFQGWNCGDYFPDGITNGASWYSLSKGMQDFNYLHTNCFEITLELSCDKFPPEEELQREWLGNREALIQFLEQVHQGIKGMVLDENYNNLANAVISVSGINHDVTSGDHGDYFRLLLPGIYTVSATAPGYDPETVTVTVGPAEPTLVNFHLKRSIPQVSPVRRAPSRRHGVRAKVQPQARKKEMEMRQLQRGPA

SEQ ID NO: 3456 - protein, 545 aa, Homo Sapiens
MLPGAWLLWTSLLLLARPAQPCPMGCDCFVQEVFCSDEELATVPLDIPPYTKNIIFVETSFTTLETRAFGSNPNLTKVVFLNTQLCQFRPDAFGGLPRLEDLEVTGSSFLNLSTNIFSNLTSLGKLTLNFNMLEALPEGLFQHLAALESLHLQGNQLQALPRRLFQPLTHLKTLNLAQNLLAQLPEELFHPLTSLQTLKLSNNALSGLPQGVFGKLGSLQELFLDSNNISELPPQVFSQLFCLERLWLQRNAITHLPLSIFASLGNLTFLSLQWNMLRVLPAGLFAHTPCLVGLSLTHNQLETVAEGTFAHLSNLRSLMLSYNAITHLPAGIFRDLEELVKLYLGSNNLTALHPALFQNLSKLELLSLSKNQLTTLPEGIFDTNYNLFNLALHGNPWQCDCHLAYLFNWLQQYTDRLLNIQTYCAGPAYLKGQVVPALNEKQLVCPVTRDHLGFQVTWPDESKAGGSWDLAVQERAARSQCTYSNPEGTVVLACDQAQCRWLNVQLSPQQGSLGLQYNASQEWDLRSSCGSLRLTVSIEARAAGP

SEQ ID NO: 3457 - protein, 545 aa, Homo Sapiens; identical to SEQ ID NO: 3456

SEQ ID NO: 3458 - protein, 374 aa, Homo Sapiens
MKPLLETLYLLGMLVPGGLGYDRSLAQHRQEIVDKSVSPWSLETYSYNIYHPMGEIYEWMREISEKYKEVVTQHFLGVTYETHPMYYLKISQPSGNPKKIIWMDCGIHAREWIAPAFCQWFVKEILQNHKDNSSIRKLLRNLDFYVLPVLNIDGYIYTWTTDRLWRKSRSPHNNGTCFGTDLNRNFNASWCSIGASRNCQDQTFCGTGPVSEPETKAVASFIESKKDDILCFLTMHSYGQLILTPYGYTKNKSSNHPEMIQVGQKAANALKAKYGTNYRVGSSADILYASSGSSRDWARDIGIPFSYTFELRDSGTYGFVLPEAQIQPTCEETMEAVLSVLDDVYAKHWHSDSAGRVTSATMLLGLLVSCMSLL

SEQ ID NO: 3459 - protein, 130 aa, Homo Sapiens
MKFLIFAFFGGVHLLSLCSGKAICKNGISKRTFEEIKEEIASCGDVAKAIINLAVYGKAQNRSYERLALLVDTVGPRLSGSKNLEKAIQIMYQNLQQDGLEKVHLEPVRIPHWERGEESAVMLEPRIHKI

SEQ ID NO: 3460 - protein, 131 aa, Homo Sapiens
MKFLIFAFFGGVHLLSLCSGKAICKNGISKRTFEEIKEEIASCGDVAKAIINLAVYGKAQNRSYERLALLVDTVGPRLSGSKNLEKAIQIMYQNLQQDGLEKVHLEPVRIPHWERGEESAVMLEPRIHKIA

SEQ ID NO: 3461 - protein, 137 aa, Homo Sapiens
MKFLIFAFFGGVHLLSLCSGKAICKNGISKRTFEEIKEEIASCGDVAKAIINLAVYGKAQNRSYERLALLVDTVGPRLSGSKNLEKAIQIMYQNLQQDGLEKVHLEPVRIPHWERGEESAVMLEPRIHKIAILGLGS

SEQ ID NO: 3462 - protein, 186 aa, Homo Sapiens
MKFLIFAFFGGVHLLSLCSGKAICKNGISKRTFEEIKEEIASCGDVAKAIINLAVYGKAQNRSYERLALLVDTVGPRLSGSKNLEKAIQIMYQNLQQDGLEKVHLEPVRIPHWERGEESAVMLEPRIHKIAILGLGSSIGTPPEGITAEVLVVTSFDELQRRASEARGKIVVYNQPYINYSRTVQY

SEQ ID NO: 3463 - protein, 472 aa, Homo Sapiens
MKFLIFAFFGGVHLLSLCSGKAICKNGISKRTFEEIKEEIASCGDVAKAIINLAVYGKAQNRSYERLALLVDTVGPRLSGSKNLEKAIQIMYQNLQQDGLEKVHLEPVRIPHWERGEESAVMLEPRIHKIAILGLGSSIGTPPEGITAEVLVVTSFDELQRRASEARGKIVVYNQPYINYSRTVQYRTQGAVEAAKVGALASLIRSVASFSIYSPHTGIQEYQDGVPKIPTACITVEDAEMMSRMASHGIKIVIQLKMGAKTYPDTDSFNTVAEITGSKYPEQVVLVSGHLDSWDVGQGAMDDGGGAFISWEALSLIKDLGLRPKRTLRLVLWTAEEQGGVGAFQYYQLHKVNISNYSLVMESDAGTFLPTGLQFTGSEKARAIMEEVMSLLQPLNITQVLSHGEGTDINFWIQAGVPGASLLDDLYKYFFFHHSHGDTMTVMDPKQMNVAAAVWAVVSYVVADMEEMLPRS

SEQ ID NO: 3464 - protein, 130 aa, Homo Sapiens
  misc_feature (1)..(1): Xaa can be any naturally occurring amino acid
XFQYYQLHKVNISNYSLVMESDAGTFLPTGLQFTGSEKARAIMEEVMSLLQPLNITQVLSHGEGTDINFWIQAGVPGASLLDDLYKYFFFHHSHGDTMTVMDPKQMNVAAAVWAVVSYVVADMEEMLPRS

SEQ ID NO: 3465 - protein, 141 aa, Homo Sapiens
IIGGYAEFLYQIGLLDEKQKKYFQKQCHECIEHIRKQNWFEAFEVLIYNGQLDIIVAAALTERSLMGMDWKGSQEYKKAEKKVWKIFKSDSEVAGYIRQAGDFHQVIIRGGGHILPYDQPLRAFDMINRFIYGKGWDPYVG

SEQ ID NO: 3466 - protein, 100 aa, Homo Sapiens
MFGLFVEHGPYVVTSNMTLRDRDFPWTTTLSMLYIDNPVGTGFSFTDDTHGYAVNEDDVARDLYSALIQFFQIFPEYKNNDFYVTGESYAGKYVPAIAHL

SEQ ID NO: 3467 - protein, 142 aa, Homo Sapiens
MKSYAGFLTVNKTYNSNLFFWFFPAQIQPEDAPVVLWLQGGPGGSSMFGLFVEHGPYVVTSNMTLRDRDFPWTTTLSMLYIDNPVGTGFSFTDDTHGYAVNEDDVARDLYSALIQFFQIFPEYKNNDFYVTGESYAGKYVPA

SEQ ID NO: 3468 - protein, 244 aa, Homo Sapiens
MKSYAGFLTVNKTYNSNLFFWFFPAQIQPEDAPVVLWLQGGPGGSSMFGLFVEHGPYVVTSNMTLRDRDFPWTTTLSMLYIDNPVGTGFSFTDDTHGYAVNEDDVARDLYSALIQFFQIFPEYKNNDFYVTGESYAGKYVPAIAHLIHSLNPVREVKINLNGIAIGDGYSDPESIIGGYAEFLYQIGLLDEKQKKYFQKQCHECIEHIRKQNWFEAFEILDKLLDGDLTSDPSYFQNVTGCSNY

SEQ ID NO: 3469 - protein, 6 aa, Homo Sapiens
MVGAMW

SEQ ID NO: 3470 - protein, 43 aa, Homo Sapiens
MVGAMWKVIVSLVLLMPGPCDGLFRSLYRSVSMPPKGDSGQPL

SEQ ID NO: 3471 - protein, 52 aa, Homo Sapiens
MVGAMWKVIVSLVLLMPGPCDGLFRSLYRSVSMPPKGDSGQPLFLTPYIEAG

SEQ ID NO: 3472 - protein, 476 aa, Homo Sapiens
MVGAMWKVIVSLVLLMPGPCDGLFRSLYRSVSMPPKGDSGQPLFLTPYIEAGKIQKGRELSLVGPFPGLNMKSYAGFLTVNKTYNSNLFFWFFPAQIQPEDAPVVLWLQGGPGGSSMFGLFVEHGPYVVTSNMTLRDRDFPWTTTLSMLYIDNPVGTGFSFTDDTHGYAVNEDDVARDLYSALIQFFQIFPEYKNNDFYVTGESYAGKYVPAIAHLIHSLNPVREVKINLNGIAIGDGYSDPESIIGGYAEFLYQIGLLDEKQKKYFQKQCHECIEHIRKQNWFEAFEILDKLLDGDLTSDPSYFQNVTGCSNYYNFLRCTEPEDQLYYVKFLSLPEVRQAIHVGNQTFNDGTIVEKYLREDTVQSVKPWLTEIMNNYKVLIYNGQLDIIVAAALTERSLMGMDWKGSQEYKKAEKKVWKIFKSDSEVAGYIRQAGDFHQVIIRGGGHILPYDQPLRAFDMINRFIYGKGWDPYVG

SEQ ID NO: 3473 - protein, 476 aa, Homo Sapiens; identical to SEQ ID NO: 3472

SEQ ID NO: 3474 - protein, 476 aa, Homo Sapiens; identical to SEQ ID NO: 3472

SEQ ID NO: 3475 - protein, 180 aa, Homo Sapiens
  misc_feature (1)..(1): Xaa can be any naturally occurring amino acid
XKYFQKQCHECIEHIRKQNWFEAFEEPEDQLYYVKFLSLPEVRQAIHVGNQTFNDGTIVEKYLREDTVQSVKPWLTEIMNNYKVLIYNGQLDIIVAAALTERSLMGMDWKGSQEYKKAEKKVWKIFKSDSEVAGYIRQAGDFHQVIIRGGGHILPYDQPLRAFDMINRFIYGKGWDPYVG

SEQ ID NO: 3476 - protein, 734 aa, Homo Sapiens
MWGLLLALAAFAPAVGPALGAPRNSVLGLAQPGTTKVPGSTPALHSSPAQPPAETANGTSEQHVRIRVIKKKKVIMKKRKKLTLTRPTPLVTAGPLVTPTPAGTLDPAEKQETGCPPLGLESLRVSDSRLEASSSQSFGLGPHRGRLNIQSGLEDGDLYDGAWCAEEQDADPWFQVDAGHPTRFSGVITQGRNSVWRYDWVTSYKVQFSNDSRTWWGSRNHSSGMDAVFPANSDPETPVLNLLPEPQVARFIRLLPQTWLQGGAPCLRAEILACPVSDPNDLFLEAPASGSSDPLDFQHHNYKAMRKLMKQVQEQCPNITRIYSIGKSYQGLKLYVMEMSDKPGEHELGEPEVRYVAGMHGNEALGRELLLLLMQFLCHEFLRGNPRVTRLLSEMRIHLLPSMNPDGYEIAYHRGSELVGWAEGRWNNQSIDLNHNFADLNTPLWEAQDDGKVPHIVPNHHLPLPTYYTLPNATVAPETRAVIKWMKRIPFVLSANLHGGELVVSYPFDMTRTPWAARELTPTPDDAVFRWLSTVYAGSNLAMQDTSRRPCHSQDFSVHGNIINGADWHTVPGSMNDFSYLHTNCFEVTVELSCDKFPHENELPQEWENNKDALLTYLEQVRMGIAGVVRDKDTELGIADAVIAVDGINHDVTTAWGGDYWRLLTPGDYMVTASAEGYHSVTRNCRVTFEEGPFPCNFVLTKTPKQRLRELLAAGAKVPPDLRRRLERLRGQKD

SEQ ID NO: 3477 - protein, 224 aa, Homo Sapiens
MEKIPFVLGGNLQGGELVVAYPYDLVRSPWKTQEHTPTPDDHVFRWLAYSYASTHRLMTDARRRVCHTEDFQKEEGTVNGASWHTVAGSLNDFSYLHTNCFELSIYVGCDKYPHESQLPEEWENNRESLIVFMEQVHRGIKGLVRDSHGKGIPNAIISVEGINHDIRTGRVSLQKLSLACRRVRCAFALSSSSTMIVRPPQPYGTVPHSSPDPVTTKISPLRNF

SEQ ID NO: 3478 - protein, 756 aa, Homo Sapiens
MSRPGTATPALALVLLAVTLAGVGAQGAALEDPDYYGQEIWSREPYYARPEPELETFSPPLPAGPGEEWERRPQEPRPPKRATKPKKAPKREKSAPEPPPPGKHSNKKVMRTKSSEKAANDDHSVRVAREDVRESCPPLGLETLKITDFQLHASTVKRYGLGAHRGRLNIQAGINENDFYDGAWCAGRNDLQQWIEVDARRLTRFTGVITQGRNSLWLSDWVTSYKVMVSNDSHTWVTVKNGSGDMIFEGNSEKEIPVLNELPVPMVARYIRINPQSWFDNGSICMRMEILGCPLPDPNNYYHRRNEMTTTDDLDFKHHNYKEMRQLMKVVNEMCPNITRIYNIGKSHQGLKLYAVEISDHPGEHEVGEPEFHYIAGAHGNEVLGRELLLLLVQFVCQEYLARNARIVHLVEETRIHVLPSLNPDGYEKAYEGGSELGGWSLGRWTHDGIDINNNFPDLNTLLWEAEDRQNVPRKVPNHYIAIPEWFLSENATVAAETRAVIAWMEKIPFVLGGNLQGGELVVAYPYDLVRSPWKTQEHTPTPDDHVFRWLAYSYASTHRLMTDARRRVCHTEDFQKEEGTVNGASWHTVAGSLNDFSYLHTNCFELSIYVGCDKYPHESQLPEEWENNRESLIVFMEQVHRGIKGLVRDSHGKGIPNAIISVEGINHDIRTANDGDYWRLLNPGEYVVTAKAEGFTASTKNCMVGYDMGATRCDFTLSKTNMARIREIMEKFGKQPVSLPARRLKLRGQKRRQRG

SEQ ID NO: 3479 - protein, 515 aa, Homo Sapiens
MAWPYFLDCHRYFTREDEGCYDPLEKLRGGLEADEALPSGLPPTFIRFSHHSYAQMVRVLRRTASRCAHVARTYSIGRSFDGRELLVIEFSSRPGQHELMEPEVKLIGNIHGNEVAGREMLIYLAQYLCSEYLLGNPRIQRLLNTTRIHLLPSMNPDGYEVAAAEGAGYNGWTSGRQNAQNLDLNRNFPDLTSEYYRLAETRGARSDHIPIPQHYWWGKVAPETKAIMKWMQTIPFVLSASLHGGDLVVSYPFDFSKHPQEEKMFSPTPDEKMFKLLSRAYADVHPMMMDRSENRCGGNFLKRGSIINGADWYSFTGGMSDFNYLHTNCFEITVELGCVKFPPEEALYILWQHNKESLLNFVETVHRGIKGVVTDKFGKPVKNARISVKGIRHDITTAPDGDYWRLLPPGIHIVIAQAPGYAKVIKKVIIPARMKRAGRVDFILQPLGMGPKNFIHGLRRTGPHDPLGGASSLGEATEPDPLRARRQPSADGSKPWWWSYFTSLSTHRPRWLLKY

SEQ ID NO: 3480 - protein, 641 aa, Homo Sapiens
MPPPLPLLLLTVLVVAAARPGCEFERNPAATCVDLQLRTCSDAAYNHTTFPNLLQHRSWEVVEASSEYILLSVLHQLLEGQCNPDLRLLGCAVLAPRCEGGWVRRPCRHICEGLREVCQPAFDAIDMAWPYFLDCHRYFTREDEGCYDPLEKLRGGLEADEALPSGLPPTFIRFSHHSYAQMVRVLRRTASRCAHVARTYSIGRSFDGRELLVIEFSSRPGQHELMEPEVKLIGNIHGNEVAGREMLIYLAQYLCSEYLLGNPRIQRLLNTTRIHLLPSMNPDGYEVAAAEGAGYNGWTSGRQNAQNLDLNRNFPDLTSEYYRLAETRGARSDHIPIPQHYWWGKVAPETKAIMKWMQTIPFVLSASLHGGDLVVSYPFDFSKHPQEEKMFSPTPDEKMFKLLSRAYADVHPMMMDRSENRCGGNFLKRGSIINGADWYSFTGGMSDFNYLHTNCFEITVELGCVKFPPEEALYILWQHNKESLLNFVETVHRGIKGVVTDKFGKPVKNARISVKGIRHDITTAPDGDYWRLLPPGIHIVIAQAPGYAKVIKKVIIPARMKRAGRVDFILQPLGMGPKNFIHGLRRTGPHDPLGGASSLGEATEPDPLRARRQPSADGSKPWWWSYFTSLSTHRPRWLLKY

SEQ ID NO: 3481 - protein, 652 aa, Homo Sapiens
MPPPLPLLLLTVLVVAAARPGCEFERNPAGECHRPPAADSATCVDLQLRTCSDAAYNHTTFPNLLQHRSWEVVEASSEYILLSVLHQLLEGQCNPDLRLLGCAVLAPRCEGGWVRRPCRHICEGLREVCQPAFDAIDMAWPYFLDCHRYFTREDEGCYDPLEKLRGGLEADEALPSGLPPTFIRFSHHSYAQMVRVLRRTASRCAHVARTYSIGRSFDGRELLVIEFSSRPGQHELMEPEVKLIGNIHGNEVAGREMLIYLAQYLCSEYLLGNPRIQRLLNTTRIHLLPSMNPDGYEVAAAEGAGYNGWTSGRQNAQNLDLNRNFPDLTSEYYRLAETRGARSDHIPIPQHYWWGKVAPETKAIMKWMQTIPFVLSASLHGGDLVVSYPFDFSKHPQEEKMFSPTPDEKMFKLLSRAYADVHPMMMDRSENRCGGNFLKRGSIINGADWYSFTGGMSDFNYLHTNCFEITVELGCVKFPPEEALYILWQHNKESLLNFVETVHRGIKGVVTDKFGKPVKNARISVKGIRHDITTAPDGDYWRLLPPGIHIVIAQAPGYAKVIKKVIIPARMKRAGRVDFILQPLGMGPKNFIHGLRRTGPHDPLGGASSLGEATEPDPLRARRQPSADGSKPWWWSYFTSLSTHRPRWLLKY

SEQ ID NO: 3482 - protein, 69 aa, Homo Sapiens
MPPPLPLLLLTVLVVAAARPGCEFERNPAGECHRPPAADSGTVPGPPWLLFCRRAAAPTLSEHFRQLNP

SEQ ID NO: 3483 - protein, 388 aa, Homo Sapiens
IGTYLNYECRPGYSGRPFSIICLKNSVWTSAKDKCKRKSCRNPPDPVNGMAHVIKDIQFRSQIKYSCPKGYRLIGSSSATCIISGNTVIWDNKTPVCDRIICGLPPTIANGDFTSISREYFHYGSVVTYHCNLGSRGKKVFELVGEPSIYCTSKDDQVGIWSGPAPQCIIPNKCTPPNVENGILVSDNRSLFSLNEVVEFRCQPGFGMKGPSHVKCQALNKWEPELPSCSRVCQPPPDVLHAERTQRDKDNFSPGQEVFYSCEPGYDLRGSTYLHCTPQGDWSPAAPRCEVKSCDDFLGQLPNGHVLFPLNLQLGAKVDFVCDEGFQLKGSSASYCVLAGMESLWNSSVPVCERKSCETPPVPVNGMVHVITDIHVGSRINYSCTTGF

SEQ ID NO: 3484 - protein, 569 aa, Homo Sapiens
MAPPVRLERPFPSRRFPGLLLAALVLLLSSFSDQCNVPEWLPFARPTNLTDDFEFPIGTYLNYECRPGYSGRPFSIICLKNSVWTSAKDKCKRKSCRNPPDPVNGMAHVIKDIQFRSQIKYSCPKGYRLIGSSSATCIISGNTVIWDNKTPVCDRIICGLPPTIANGDFTSISREYFHYGSVVTYHCNLGSRGKKVFELVGEPSIYCTSKDDQVGIWSGPAPQCIIPNKCTPPNVENGILVSDNRSLFSLNEVVEFRCQPGFGMKGPSHVKCQALNKWEPELPSCSRVCQPPPDVLHAERTQRDKDNFSPGQEVFYSCEPGYDLRGSTYLHCTPQGDWSPAAPRCEVKSCDDFLGQLPNGHVLFPLNLQLGAKVDFVCDEGFQLKGSSASYCVLAGMESLWNSSVPVCERKSCETPPVPVNGMVHVITDIHVGSRINYSCTTGHRLIGHSSAECILSGNTAHWSMKPPICQQIFCPNPPAILNGRHTGTPLGDIPYGKEVSYTCDPHPDRGMTFNLIGESTIRRTSEPHGNGVWSSPAPRCELPVGAGSHDALIVGKFYEVFAEEFCHL

SEQ ID NO: 3485 - protein, 1176 aa, Homo Sapiens
MALARPGTPDPQALASVLLLLLWAPALSLLAGTVPSEPPSACASDPCAPGTECQATESGGYTCGPMEPRGCATQPCHHGALCVPQGPDPTGFRCYCVPGFQGPRCELDIDECASRPCHHGATCRNLADRYECHCPLGYAGVTCEMEVDECASAPCLHGGSCLDGVGSFRCVCAPGYGGTRCQLDLDECQSQPCAHGGTCHDLVNGFRCDCAGTGYEGTHCEREVLECASAPCEHNASCLEGLGSFRCLCWPGYSGELCEVDEDECASSPCQHGGRCLQRSDPALYGGVQAAFPGAFSFRHAAGFLCHCPPGFEGADCGVEVDECASRPCLNGGHCQDLPNGFQCHCPDGYAGPTCEEDVDECLSDPCLHGGTCSDTVAGYICRCPETWGGRDCSVQLTGCQGHTCPLAATCIPIFESGVHSYVCHCPPGTHGPFCGQNTTFSVMAGSPIQASVPAGGPLGLALRFRTTLPAGTLATRNDTKESLELALVAATLQATLWSYSTTVLVLRLPDLALNDGHWHQVEVVLHLATLELRLWHEGCPARLCVASGPVALASTASATPLPAGISSAQLGDATFAGCLQDVRVDGHLLLPEDLGENVLLGCERREQCRPLPCVHGGSCVDLWTHFRCDCARPHRGPTCADEIPAATFGLGGAPSSASFLLQELPGPNLTVSFLLRTRESAGLLLQFANDSAAGLTVFLSEGRIRAEVPGSPAVVLPGRWDDGLRHLVMLSFGPDQLQDLGQHVHVGGRLLAADSQPWGGPFRGCLQDLRLDGCHLPFFPLPLDNSSQPSELGGRQSWNLTAGCVSEDMCSPDPCFNGGTCLVTWNDFHCTCPANFTGPTCAQQLWCPGQPCLPPATCEEVPDGFVCVAEATFREGPPAAFSGHNASSGRLLGGLSLAFRTRDSEAWLLRAAAGALEGVWLAVRNGSLAGGVRGGHGLPGAVLPIPGPRVADGAWHRVRLAMERPAATTSRWLLWLDGAATPVALRGLASDLGFLQGPGAVRILLAENFTGCLGRVALGGLPLPLARPRPGAAPGAREHFASWPGTPAPILGCRGAPVCAPSPCLHDGACRDLFDAFACACGPGWEGPRCEAHVDPCHSAPCARGRCHTHPDGRFECRCPPGFGGPRCRWDGWAGGWAANAPWGYGGAEKSARSVDESLPFPGPHVLICDMRRTV

SEQ ID NO: 3486 - protein, 1285 aa, Homo Sapiens
MALARPGTPDPQALASVLLLLLWAPALSLLAGTVPSEPPSACASDPCAPGTECQATESGGYTCGPMEPRGCATQPCHHGALCVPQGPDPTGFRCYCVPGFQGPRCELDIDECASRPCHHGATCRNLADRYECHCPLGYAGVTCEMEVDECASAPCLHGGSCLDGVGSFRCVCAPGYGGTRCQLDLDECQSQPCAHGGTCHDLVNGFRCDCAGTGYEGTHCEREVLECASAPCEHNASCLEGLGSFRCLCWPGYSGELCEVDEDECASSPCQHGGRCLQRSDPALYGGVQAAFPGAFSFRHAAGFLCHCPPGFEGADCGVEVDECASRPCLNGGHCQDLPNGFQCHCPDGYAGPTCEEDVDECLSDPCLHGGTCSDTVAGYICRCPETWGGRDCSVQLTGCQGHTCPLAATCIPIFESGVHSYVCHCPPGTHGPFCGQNTTFSVMAGSPIQASVPAGGPLGLALRFRTTLPAGTLATRNDTKESLELALVAATLQATLWSYSTTVLVLRLPDLALNDGHWHQVEVVLHLATLELRLWHEGCPARLCVASGPVALASTASATPLPAGISSAQLGDATFAGCLQDVRVDGHLLLPEDLGENVLLGCERREQCRPLPCVHGGSCVDLWTHFRCDCARPHRGPTCADEIPAATFGLGGAPSSASFLLQELPGPNLTVSFLLRTRESAGLLLQFANDSAAGLTVFLSEGRIRAEVPGSPAVVLPGRWDDGLRHLVMLSFGPDQLQDLGQHVHVGGRLLAADSQPWGGPFRGCLQDLRLDGCHLPFFPLPLDNSSQPSELGGRQSWNLTAGCVSEDMCSPDPCFNGGTCLVTWNDFHCTCPANFTGPTCAQQLWCPGQPCLPPATCEEVPDGFVCVAEATFREGPPAAFSGHNASSGRLLGGLSLAFRTRDSEAWLLRAAAGALEGVWLAVRNGSLAGGVRGGHGLPGAVLPIPGPRVADGAWHRVRLAMERPAATTSRWLLWLDGAATPVALRGLASDLGFLQGPGAVRILLAENFTGCLGRVALGGLPLPLARPRPGAAPGAREHFASWPGTPAPILGCRGAPVCAPSPCLHDGACRDLFDAFACACGPGWEGPRCEAHVDPCHSAPCARGRCHTHPDGRFECRCPPGFGGPRCRLPVPSKECSLNVTCLDGSPCEGGSPAANCSCLEGLAGQRCQVPTLPCEANPCLNGGTCRAAGGVSECICNARFSGQFCEVAKGLPLPLPFPLLEVAVPAACACLLLLLLGLLSGILAARKRRQSEGTYSPSQQEVAGARLEMDSVLKVPPEERLI

SEQ ID NO: 3487 - protein, 953 aa, Homo Sapiens
MAMEPGALWTFLGHLWLLAGPTCEEDVDECLSDPCLHGGTCSDTVAGYICRCPETWGGRDCSVQLTGCQGHTCPLAATCIPIFESGVHSYVCHCPPGTHGPFCGQNTTFSVMAGSPIQASVPAGGPLGLALRFRTTLPAGTLATRNDTKESLELALVAATLQATLWSYSTTVLVLRLPDLALNDGHWHQVEVVLHLATLELRLWHEGCPARLCVASGPVALASTASATPLPAGISSAQLGDATFAGCLQDVRVDGHLLLPEDLGENVLLGCERREQCRPLPCVHGGSCVDLWTHFRCDCARPHRGPTCADEIPAATFGLGGAPSSASFLLQELPGPNLTVSFLLRTRESAGLLLQFANDSAAGLTVFLSEGRIRAEVPGSPAVVLPGRWDDGLRHLVMLSFGPDQLQDLGQHVHVGGRLLAADSQPWGGPFRGCLQDLRLDGCHLPFFPLPLDNSSQPSELGGRQSWNLTAGCVSEDMCSPDPCFNGGTCLVTWNDFHCTCPANFTGPTCAQQLWCPGQPCLPPATCEEVPDGFVCVAEATFREGPPAAFSGHNASSGRLLGGLSLAFRTRDSEAWLLRAAAGALEGVWLAVRNGSLAGGVRGGHGLPGAVLPIPGPRVADGAWHRVRLAMERPAATTSRWLLWLDGAATPVALRGLASDLGFLQGPGAVRILLAENFTGCLGRVALGGLPLPLARPRPGAAPGAREHFASWPGTPAPILGCRGAPVCAPSPCLHDGACRDLFDAFACACGPGWEGPRCEAHVDPCHSAPCARGRCHTHPDGRFECRCPPGFGGPRCRLPVPSKECSLNVTCLDGSPCEGGSPAANCSCLEGLAGQRCQVPTLPCEANPCLNGGTCRAAGGVSECICNARFSGQFCEVAKGLPLPLPFPLLEVAVPAACACLLLLLLGLLSGILAARKRRQSEGTYSPSQQEVAGARLEMDSVLKVPPEERLI

SEQ ID NO: 3488 - protein, 220 aa, Homo Sapiens
MAGLSRGSARALLAALLASTLLALLVSPARGRGGRDHGDWDEASRLPPLPPREDAARVARFVTHVSDWGALATISTLEAVRGRPFADVLSLSDGPPGAGSGVPYFYLSPLQLSVSNLQENPYATLTMTLAQTNFCKKHGFDPQSPLCVHIMLSGTVTKVNETEMDIAKHSLFIRHPEMKTWPSSHNWFFAKLNITNIWVLDYFGGPKIVTPEEYYNVTVQ

SEQ ID NO: 3489 - protein, 290 aa, Homo Sapiens
MSVRRGRRPARPGTRLSWLLCCSALLSPAAGYVIVSSVSWAVTNEVDEELDSASTEEAMPALLEDSGSIWQQSFPASAHKEDAHLRPRAGAARARPPPAPPGMFSYRREGGQTASAPPGPRLRAATARSLAHASVWGCLATVSTHKKIQGLPFGNCLPVSDGPFNNSTGIPFFYMTAKDPVVADLMKNPMASLMLPESEGEFCRKNIVDPEDPRCVQLTLTGQMIAVSPEEVEFAKQAMFSRHPGMRKWPRQYEWFFMKMRIEHIWLQKWYGGASSISREEYFKAVPRKA

SEQ ID NO: 3490 - protein, 422 aa, Homo Sapiens
MAPWPPKGLVPAMLWGLSLFLNLPGPIWLQPSPPPQSSPPPQPHPCHTCRGLVDSFNKGLERTIRDNFGGGNTAWEEENLSKYKDSETRLVEVLEGVCSKSDFECHRLLELSEELVESWWFHKQQEAPDLFQWLCSDSLKLCCPAGTFGPSCLPCPGGTERPCGGYGQCEGEGTRGGSGHCDCQAGYGGEACGQCGLGYFEAERNASHLVCSACFGPCARCSGPEESNCLQCKKGWALHHLKCVDIDECGTEGANCGADQFCVNTEGSYECRDCAKACLGCMGAGPGRCKKCSPGYQQVGSKCLDVDECETEVCPGENKQCENTEGGYRCICAEGYKQMEGICVKEQIPGAFPILTDLTPETTRRWKLGSHPHSTYVKMKMQRDEATFPGLYGKQVAKLGSQSRQSDRGTRLIHSQQASSQR

SEQ ID NO: 3491 - protein, 420 aa, Homo Sapiens
MAPWPPKGLVPAMLWGLSLFLNLPGPIWLQPSPPPQSSPPPQPHPCHTCRGLVDSFNKGLERTIRDNFGGGNTAWEEENLSKYKDSETRLVEVLEGVCSKSDFECHRLLELSEELVESWWFHKQQEAPDLFQWLCSDSLKLCCPAGTFGPSCLPCPGGTERPCGGYGQCEGEGTRGGSGHCDCQAGYGGEACGQCGLGYFEAERNASHLVCSACFGPCARCSGPEESNCLQCKKGWALHHLKCVDIDECGTEGANCGADQFCVNTEGSYECRDCAKACLGCMGAGPGRCKKCSPGYQQVGSKCLDVDECETEVCPGENKQCENTEGGYRCICAEGYKQMEGICVKEQIPESAGFFSEMTEDELVVLQQMFFGIIICALATLAAKGDLVFTAIFIGAVAAMTGYWLSERSDRVLEGFIKGR

SEQ ID NO: 3492 - protein, 420 aa, Homo Sapiens; identical to SEQ ID NO: 3491

SEQ ID NO: 3493 - protein, 420 aa, Homo Sapiens; identical to SEQ ID NO: 3491

SEQ ID NO: 3494 - protein, 101 aa, Homo Sapiens
MAPWPPKGLVPAMLWGLSLFLNLPGPIWLQPSPPPQSSPPPQPHPCHTCRGLVDSFNKGLERTIRDNFGGGNTAWEEENLSKYKDSLSWGNREALRWLRAV

SEQ ID NO: 3495 - protein, 100 aa, Homo Sapiens
  misc_feature (1)..(1): Xaa can be any naturally occurring amino acid
XPAHLSADIDECGTEGANCGADQFCVNTEGSYECRDCAKACLGCMGAGPGRCKKCSPGYQQMWMSVRQRCVRERTSSVKTPRAVIAASVPRATSRWKASV

SEQ ID NO: 3496 - protein, 229 aa, Homo Sapiens
MRLPRRAALGLLPLLLLLPPAPEAAKKPTPCHRCRGLVDKFNQGMVDTAKKNFGGGNTAWEEKTLSKYESSEIRLLEILEGLCESSDFECNQMLEAQEEHLEAWWLQLKSEYPDLFEWFCVKTLKVCCSPGTYGPDCLACQGGSQRPCSGNGHCSGDGSRQGDGSCRCHMGYQGPLCTDCMDGYFSSLRNETHSICTACDESCKTCSGLTNRDCGECEVGWVLDEGACV

SEQ ID NO: 3497 - protein, 353 aa, Homo Sapiens
MRLPRRAALGLLPLLLLLPPAPEAAKKPTPCHRCRGLVDKFNQGMVDTAKKNFGGGNTAWEEKTLSKYESSEIRLLEILEGLCESSDFECNQMLEAQEEHLEAWWLQLKSEYPDLFEWFCVKTLKVCCSPGTYGPDCLACQGGSQRPCSGNGHCSGDGSRQGDGSCRCHMGYQGPLCTDCMDGYFSSLRNETHSICTACDESCKTCSGLTNRDCGECEVGWVLDEGACVDVDECAAEPPPCSAAQFCKNANGSYTCEECDSSCVGCTGEGPGNCKECISGYAREHGQCADVDECSLAEKTCVRKNENCYNTPGSYVCVCPDGFEETEDACVPPAEAEATEGESPTQLPSREDL

SEQ ID NO: 3498 - protein, 321 aa, Homo Sapiens
MRLPRRAALGLLPLLLLLPPAPEAAKKPTPCHRCRGLVDKFNQGMVDTAKKNFGGGNTAWEEKTLSKYESSEIRLLEILEGLCESSDFECNQMLEAQEEHLEAWWLQLKSEYPDLFEWFCVKTLKVCCSPGTYGPDCLACQGGSQRPCSGNGHCSGDGSRQGDGSCRCHMGYQGPLCTDCMDGYFSSLRNETHSICTACDESCKTCSGLTNRDCGECEVGWVLDEGACVDVDECAAEPPPCSAAQFCKNANGSYTCEDVDECSLAEKTCVRKNENCYNTPGSYVCVCPDGFEETEDACVPPAEAEATEGESPTQLPSREDL

SEQ ID NO: 3499 - protein, 325 aa, Homo Sapiens
MRLPRRAALGLLPLLLLLPPAPEAAKKPTPCHRCRGLVDKFNQGMVDTAKKNFGGGNTAWEEKTLSKYESSEIRLLEILEGLCESSDFECNQMLEAQEEHLEAWWLQLKSEYPDLFEWFCVKTLKVCCSPGTYGPDCLACQGGSQRPCSGNGHCSGDGSRQGDGSCRCHMGYQGPLCTDCMDGYFSSLRNETHSICTACDESCKTCSGLTNRDCGECEVGWVLDEGACVECDSSCVGCTGEGPGNCKECISGYAREHGQCADVDECSLAEKTCVRKNENCYNTPGSYVCVCPDGFEETEDACVPPAEAEATEGESPTQLPSREDL

SEQ ID NO: 3500 - protein, 402 aa, Homo Sapiens
MRLPRRAALGLLPLLLLLPPAPEAAKKPTPCHRCRGLVDKFNQGMVDTAKKNFGGGNTAWEEKTLSKYESSEIRLLEILEGLCESSDFECNQMLEAQEEHLEAWWLQLKSEYPDLFEWFCVKTLKVCCSPGTYGPDCLACQGGSQRPCSGNGHCSGDGSRQGDGSCRCHMGYQGPLCTDCMDGYFSSLRNETHSICTVRTGLSDSYPPCCLSLGCWRGVGHAWIRGRNTHTQPGYSSRVWIAAFSPACDESCKTCSGLTNRDCGECEVGWVLDEGACVDVDECAAEPPPCSAAQFCKNANGSYTCEECDSSCVGCTGEGPGNCKECISGYAREHGQCADVDECSLAEKTCVRKNENCYNTPGSYVCVCPDGFEETEDACVPPAEAEATEGESPTQLPSREDL

SEQ ID NO: 3501 - protein, 196 aa, Homo Sapiens
MRLPLLVSAGVLLVALLPCPPCRALLSRGPVPGARQAPQHPQPLDFFQPPPQSEQPQQPQARPVLLRMGEEYFLRLGNLNKSPAAPLSPASSLLAGGSGSRPSPEQATANFFRVLLQQLLLPRRSLDSPAALAERGARNALGGHQEAPERERRSEEPPISLDLTFHLLREVLEMARAEQLAQQAHSNRKLMEIIGK

SEQ ID NO: 3502 - protein, 322 aa, Homo Sapiens
MSPNFKLQCHFILIFLTALRGESRYLELREAADYDPFLLFSANLKRELAGEQPYRRALRCLDMLSLQGQFTFTADRPQLHCAAFFISEPEEFITIHYDQVSIDCQGGDFLKVFDGWILKGEKFPSSQDHPLPSAERYIDFCESGLSRRSIRSSQNVAMIFFRVHEPGNGFTLTIKTDPNLFPCNVISQTPNGKFTLVVPHQHRNCSFSIIYPVVIKISDLTLGHVNGLQLKKSSAGCEGIGDFVELLGGTGLDPSKMTPLADLCYPFHGPAQMKVGCDNTVVRMVSSGKHVNRVTFEYRQLEPYELENPNGNSIGEFCLSGL

SEQ ID NO: 3503 - protein, 238 aa, Homo Sapiens
MSPNFKLQCHFILIFLTALRGESRYLELREAADYDPFLLFSANLKRELAGEQPYRRALRCLDMLSLQGQFTFTADRPQLHCAAFFISEPEEFITIHYDQVSIDCQGGDFLKVFDGWILKGEKFPSSQDHPLPSAERYIDFCESGLSRRSIRSSQNVAMIFFRVHEPGNGFTLTIKTDPNLFPCNVISQTPNGKFTLVVPHQHRNCSFSIIYPVVIKISDLTLGHVNGLQLKVSCLLVS

SEQ ID NO: 3504 - protein, 375 aa, Homo Sapiens
MGGHPQLRLVKALLLLGLNPVSASLQDQHCESLSLASNISDNGYRECLANGSWAARVNYSECQEILNEEKKSKVHYHVAVIINYLGHCISLVALLVAFVLFLRLRSIRCLRNIIHWNLISAFILRNATWFVVQLTMSPEVHQSNVGWCRLVTAAYNYFHVTNFFWMFGEGCYLHTAIVLTYSTDRLRKWMFICIGWGVPFPIIVAWAIGKLYYDNEKCWFGKRPGVYTDYIYQGPMILVLLINFIFLFNIVRILMTKLRASTTSETIQYRKAVKATLVLLPLLGITYMLFFVNPGEDEVSRVVFIYFNSFLESFQGFFVSVFYCFLNSEVRSAIRKRWHRWQDKHSIRARVARAMSIPTSPTRVSFHSIKQSTAV

SEQ ID NO: 3505 - protein, 154 aa, Homo Sapiens
MGGHPQLRLVKALLLLGLNPVSASLQDQHCESLSLASNISEKKQGALPCRSHHQLPGPLYLPGGPPGGLCPLSAAQEHPVPAKHHPLEPHLRLHPAQRHLVRGPANHEPRGPPEQRGLVQVGDSRLQLLPCDQLLLDVRRGLLPAHSHRAHLLH

SEQ ID NO: 3506 - protein, 430 aa, Homo Sapiens
MGGHPQLRLVKALLLLGLNPVSASLQDQHCESLSLASNISGLQCNASVDLIGTCWPRSPAGQLVVRPCPAFFYGVRYNTTNNGYRECLANGSWAARVNYSECQEILNEEKKSKVHYHVAVIINYLGHCISLVALLVAFVLFLRLRPGCTHWGDQADGALEVGAPWSGAPFQVRRSIRCLRNIIHWNLISAFILRNATWFVVQLTMSPEVHQSNVGWCRLVTAAYNYFHVTNFFWMFGEGCYLHTAIVLTYSTDRLRKWMFICIGWGVPFPIIVAWAIGKLYYDNEKCWFGKRPGVYTDYIYQGPMILVLLINFIFLFNIVRILMTKLRASTTSETIQYRKAVKATLVLLPLLGITYMLFFVNPGEDEVSRVVFIYFNSFLESFQVRSAIRKRWHRWQDKHSIRARVARAMSIPTSPTRVSFHSIKQSTAV

SEQ ID NO: 3507 - protein, 444 aa, Homo Sapiens
MGGHPQLRLVKALLLLGLNPVSASLQDQHCESLSLASNISGLQCNASVDLIGTCWPRSPAGQLVVRPCPAFFYGVRYNTTNNGYRECLANGSWAARVNYSECQEILNEEKKSKVHYHVAVIINYLGHCISLVALLVAFVLFLRLRPGCTHWGDQADGALEVGAPWSGAPFQVRRSIRCLRNIIHWNLISAFILRNATWFVVQLTMSPEVHQSNVGWCRLVTAAYNYFHVTNFFWMFGEGCYLHTAIVLTYSTDRLRKWMFICIGWGVPFPIIVAWAIGKLYYDNEKCWFGKRPGVYTDYIYQGPMILVLLINFIFLFNIVRILMTKLRASTTSETIQYRKAVKATLVLLPLLGITYMLFFVNPGEDEVSRVVFIYFNSFLESFQGFFVSVFYCFLNSEVRSAIRKRWHRWQDKHSIRARVARAMSIPTSPTRVSFHSIKQSTAV

SEQ ID NO: 3508 - protein, 415 aa, Homo Sapiens
MGGHPQLRLVKALLLLGLNPVSASLQDQHCESLSLASNISGLQCNASVDLIGTCWPRSPAGQLVVRPCPAFFYGVRYNTTNNGYRECLANGSWAARVNYSECQEILNEEKKSKVHYHVAVIINYLGHCISLVALLVAFVLFLRLRSIRCLRNIIHWNLISAFILRNATWFVVQLTMSPEVHQSNVGWCRLVTAAYNYFHVTNFFWMFGEGCYLHTAIVLTYSTDRLRKWMFICIGWGVPFPIIVAWAIGKLYYDNEKCWFGKRPGVYTDYIYQGPMILVLLINFIFLFNIVRILMTKLRASTTSETIQYRKAVKATLVLLPLLGITYMLFFVNPGEDEVSRVVFIYFNSFLESFQGFFVSVFYCFLNSEVRSAIRKRWHRWQDKHSIRARVARAMSIPTSPTRVSFHSIKQSTAV

SEQ ID NO: 3509 - protein, 401 aa, Homo Sapiens
MGGHPQLRLVKALLLLGLNPVSASLQDQHCESLSLASNISGLQCNASVDLIGTCWPRSPAGQLVVRPCPAFFYGVRYNTTNNGYRECLANGSWAARVNYSECQEILNEEKKSKVHYHVAVIINYLGHCISLVALLVAFVLFLRLRSIRCLRNIIHWNLISAFILRNATWFVVQLTMSPEVHQSNVGWCRLVTAAYNYFHVTNFFWMFGEGCYLHTAIVLTYSTDRLRKWMFICIGWGVPFPIIVAWAIGKLYYDNEKCWFGKRPGVYTDYIYQGPMILVLLINFIFLFNIVRILMTKLRASTTSETIQYRKAVKATLVLLPLLGITYMLFFVNPGEDEVSRVVFIYFNSFLESFQVRSAIRKRWHRWQDKHSIRARVARAMSIPTSPTRVSFHSIKQSTAV

SEQ ID NO: 3510 - protein, 145 aa, Homo Sapiens
MGGHPQLRLVKALLLLGLNPVSASLQDQHCESLSLASNISGLQCNASVDLIGTCWPRSPAGQLVVRPCPAFFYGVRYNTTNNGYRECLANGSWAARVNYSECQEILNEEKKSKVHYHVAVIINYLGHCISLVALLVAFVLFLRLS

SEQ ID NO: 3511 - protein, 314 aa, Homo Sapiens
MVSATIPQKKSKVHYHVAVIINYLGHCISLVALLVAFVLFLRLRSIRCLRNIIHWNLISAFILRNATWFVVQLTMSPEVHQSNVGWCRLVTAAYNYFHVTNFFWMFGEGCYLHTAIVLTYSTDRLRKWMFICIGWGVPFPIIVAWAIGKLYYDNEKCWFGKRPGVYTDYIYQGPMILVLLINFIFLFNIVRILMTKLRASTTSETIQYRKAVKATLVLLPLLGITYMLFFVNPGEDEVSRVVFIYFNSFLESFQGFFVSVFYCFLNSEVRSAIRKRWHRWQDKHSIRARVARAMSIPTSPTRVSFHSIKQSTAV

SEQ ID NO: 3512 - protein, 52 aa, Homo Sapiens
  misc_feature (1)..(1): Xaa can be any naturally occurring amino acid
XCWFGKRPGVYTDYIYQGPMILVLLEGCESHSGAAAPPGHHLHAVLRQSRGG

SEQ ID NO: 3513 - protein, 75 aa, Homo Sapiens
  misc_feature (1)..(1): Xaa can be any naturally occurring amino acid
XCWFGKRPGVYTDYIYQGPMILVLLINFIFLFNIVRILMTKLRASTTSETIQYRASLCLCSTVSSIVRSVLPSGR

SEQ ID NO: 3514 - protein, 93 aa, Homo Sapiens
  misc_feature (1)..(1): Xaa can be any naturally occurring amino acid
XSLASNISGLQCNASVDLIGTCWPRSPAGQLVVRPCPAFFYGVRYNTTNNGYRECLANGSWAARVNYSECQEILNEEEPGPQAQPGRAHRGGT

SEQ ID NO: 3515 - protein, 152 aa, Homo Sapiens
YGVRYNTTNNGYRECLANGSWAARVNYSECQEILNEEKKSKVHYHVAVIINYLGHCISLVALLVAFVLFLRLRSIRCLRNIIHWNLISAFILRNATWFVVQLTMSPEVHQSNVVCPSPSLWPGPLGSCTTTMRSAGLAKGLGCTPTTSTRAP

SEQ ID NO: 3516 - protein, 411 aa, Homo Sapiens
MDAALLHSLLEANCSLALAEELLLDGWGPPLDPEGPYSYCNTTLDQIGTCWPRSAAGALVERPCPEYFNGVKYNTTRNAYRECLENGTWASKINYSQCEPILDDKQRKYDLHYRIALVVNYLGHCVSVAALVAAFLLFLALRSIRCLRNVIHWNLITTFILRNVMWFLLQLVDHEVHESNEVWCRCITTIFNYFVVTNFFWMFVEGCYLHTAIVMTYSTERLRKCLFLFIGWCIPFPIIVAWAIGKLYYENEQCWFGKEPGDLVDYIYQGPIILVLLINFVFLFNIVRILMTKLRASTTSETIQYRKAVKATLVLLPLLGITYMLFFVNPGEDDLSQIMFIYFNSFLQSFQGFFVSVFYCFFNGEVRSAVRKRWHRWQDHHSLRVPMARAMSIPTSPTRISFHSIKQTAAV

SEQ ID NO: 3517 - protein, 387 aa, Homo Sapiens
MDAALLHSLLEANCSLALAEELLLDGWGPPLDPEGPYSYCNTTLDQIGTCWPRSAAGALVERPCPEYFNGVKYNTTRNAYRECLENGTWASKINYSQCEPILDDKQRKYDLHYRIALVVNYLGHCVSVAALVAAFLLFLALRSIRCLRNVIHWNLITTFILRNVMWFLLQLVDHEVHESNEVWCRCITTIFNYFVVTNFFWMFVEGCYLHTAIVMTYSTERLRKCLFLFIGWCIPFPIIVAWAIGKLYYENEQCWFGKEPGDLVDYIYQGPIILVLLINFVFLFNIVRILMTKLRASTTSETIQYRKAVKATLVLLPLLGITYMLFFVNPGEDDLSQIMFIYFNSFLQSFQGFFVSVFYCFFNGESWVSKEAQAAGPHGREKPEQRW

SEQ ID NO: 3518 - protein, 397 aa, Homo Sapiens
MGREPWPEDRDLGFPQLFCQGPYSYCNTTLDQIGTCWPRSAAGALVERPCPEYFNGVKYNTTRNAYRECLENGTWASKINYSQCEPILDDKQRKYDLHYRIALVVNYLGHCVSVAALVAAFLLFLALRSIRCLRNVIHWNLITTFILRNVMWFLLQLVDHEVHESNEVWCRCITTIFNYFVVTNFFWMFVEGCYLHTAIVMTYSTERLRKCLFLFIGWCIPFPIIVAWAIGKLYYENEQCWFGKEPGDLVDYIYQGPIILVLLINFVFLFNIVRILMTKLRASTTSETIQYRKAVKATLVLLPLLGITYMLFFVNPGEDDLSQIMFIYFNSFLQSFQGFFVSVFYCFFNGEVRSAVRKRWHRWQDHHSLRVPMARAMSIPTSPTRISFHSIKQTAAV

SEQ ID NO: 3519 - protein, 438 aa, Homo Sapiens
MRGPSGPPGLLYVPHLLLCLLCLLPPPLQYAAGQSQMPKDQPLWALLEQYCHTIMTLTNLSGPYSYCNTTLDQIGTCWPRSAAGALVERPCPEYFNGVKYNTTRNAYRECLENGTWASKINYSQCEPILDDKQRKYDLHYRIALVVNYLGHCVSVAALVAAFLLFLALRSIRCLRNVIHWNLITTFILRNVMWFLLQLVDHEVHESNEVWCRCITTIFNYFVVTNFFWMFVEGCYLHTAIVMTYSTERLRKCLFLFIGWCIPFPIIVAWAIGKLYYENEQCWFGKEPGDLVDYIYQGPIILVLLINFVFLFNIVRILMTKLRASTTSETIQYRKAVKATLVLLPLLGITYMLFFVNPGEDDLSQIMFIYFNSFLQSFQGFFVSVFYCFFNGEVRSAVRKRWHRWQDHHSLRVPMARAMSIPTSPTRISFHSIKQTAAV

SEQ ID NO: 3520 - protein, 64 aa, Homo Sapiens
MRGPSGPPGLLYVPHLLLCLLCLLPPPLQYAAGQSQMPKDQPLWALLEQYCHTIMTLTNLSGWS

SEQ ID NO: 3521 - protein, 64 aa, Homo Sapiens; identical to SEQ ID NO: 3520

SEQ ID NO: 3522 - protein, 99 aa, Homo Sapiens
MRGPSGPPGLLYVPHLLLCLLCLLPPPLQYAAGQSQMPKDQPLWALLEQYCHTIMTLTNLSVTPGAHSHSLSARGCGTRWTRHCSTACWRPTAAWRWLK

SEQ ID NO: 3523 - protein, 178 aa, Homo Sapiens
MEIKHLLFLVAAACLLPMLSMKKKSARDQFNKLVTDLPNVQEEIVNIHNALRRRVVPPASNMLKMSWSEEAAQNARIFSKYCDMTESNPLERRLPNTFCGENMHMTSYPVSWSSVIGVWYSESTSFKHGEWTTTDDDITTDHYTQIVWATSYLIGCAIASCRQQGSPRYLYVCHYCHD

SEQ ID NO: 3524 - protein, 178 aa, Homo Sapiens; identical to SEQ ID NO: 3523

SEQ ID NO: 3525 - protein, 249 aa, Homo Sapiens
MEIKHLLFLVAAACLLPMLSMKKKSARDQFNKLVTDLPNVQEEIVNIHNALRRRVVPPASNMLKMSWSEEAAQNARIFSKYCDMTESNPLERRLPNTFCGENMHMTSYPVSWSSVIGVWYSESTSFKHGEWTTTDDDITTDHYTQIVWATSYLIGCAIASCRQQGSPRYLYVCHYCHEGNDPETKNEPYKTGVPCEACPSNCEDKLCTNPCIYYDEYFDCDIQVHYLGCNHSTTILFCKATCLCDTEIK

SEQ ID NO: 3526 - protein, 249 aa, Homo Sapiens; identical to SEQ ID NO: 3525

SEQ ID NO: 3527 - protein, 243 aa, Homo Sapiens
MALLPVLFLVTVLLPSLPAEGKDPAFTALLTTQLQVQREIVNKHNELRKAVSPPASNMLKMEWSREVTTNAQRWANKCTLQHSDPEDRKTSTRCGENLYMSSDPTSWSSAIQSWYDEILDFVYGVGPKSPNAVVGHYTQLVWYSTYQVGCGIAYCPNQDSLKYYYVCQYCPAGNNMNRKNTPYQQGTPCAGCPDDCDKGLCTNSCQYQDLLSNCDSLKNTAGCEHELLKEKCKATCLCENKIY

SEQ ID NO: 3528 - protein, 243 aa, Homo Sapiens; identical to SEQ ID NO: 3527

SEQ ID NO: 3529 - protein, 278 aa, Homo Sapiens
MALLPVLFLVTVLLPSLPAEGKDPAFTALLTTQLQVQREIVNKHNELRKAVSPPASNMLKMEWSREVTTNAQRWANKCTLQHSDPEDRKTSTRCGENLYMSSDPTSWSSAIQSWYDEILDFVYGVGPKSPNAVVGHYTQLVWYSTYQVGCGIAYCPNQDSLKYYYVCQYCPAMKTYLNKREGINVWKCFLRLRHFQLLRGEQLLTFSGNNMNRKNTPYQQGTPCAGCPDDCDKGLCTNSCQYQDLLSNCDSLKNTAGCEHELLKEKCKATCLCENKIY

SEQ ID NO: 3530 - protein, 276 aa, Homo Sapiens
MKQILHPALETTACTNHFNADPCSTGFVFPAMTLFPVLLFLVAGLLPSFPANEDKDPAFTALLTTQTQVQREIVNKHNELRRAVSPPARNMLKMEWNKEAAANAQKWANQCNYRHSNPKDRMTSLKCGENLYMSSASSSWSQAIQSWFDEYNDFDFGVGPKTPNAVVGHYTQVVWYSSYLVGCGNAYCPNQKVLKYYYVCQYCPAGNWANRLYVPYEQGAPCASCPDNCDDGLCTNGCKYEDLYSNCKSLKLTLTCKHQLVRDSCKASCNCSNSIY

SEQ ID NO: 3531 - protein, 258 aa, Homo Sapiens
MKQILHPALETTAMTLFPVLLFLVAGLLPSFPANEDKDPAFTALLTTQTQVQREIVNKHNELRRAVSPPARNMLKMEWNKEAAANAQKWANQCNYRHSNPKDRMTSLKCGENLYMSSASSSWSQAIQSWFDEYNDFDFGVGPKTPNAVVGHYTQVVWYSSYLVGCGNAYCPNQKVLKYYYVCQYCPAGNWANRLYVPYEQGAPCASCPDNCDDGLCTNGCKYEDLYSNCKSLKLTLTCKHQLVRDSCKASCNCSNSIY

SEQ ID NO: 3532 - protein, 191 aa, Homo Sapiens
MKQILHPALETTDPCSTGFVFPAMTLFPVLLFLVAGLLPSFPANEDKDPAFTALLTTQTQVQREIVNKHNELRRAVSPPARNMLKMEWNKEAAANAQKWANQCNYRHSNPKDRMTSLKCGENLYMSSASSSWSQAIQSWFDEYNDFDFGVGPKTPNAVVGHYTQVVWYSSYLVGCGNAYCPNQKVLKYYYV

SEQ ID NO: 3533 - protein, 268 aa, Homo Sapiens
MKQILHPALETTDPCSTGFVFPAMTLFPVLLFLVAGLLPSFPANEDKDPAFTALLTTQTQVQREIVNKHNELRRAVSPPARNMLKMEWNKEAAANAQKWANQCNYRHSNPKDRMTSLKCGENLYMSSASSSWSQAIQSWFDEYNDFDFGVGPKTPNAVVGHYTQVVWYSSYLVGCGNAYCPNQKVLKYYYVCQYCPAGNWANRLYVPYEQGAPCASCPDNCDDGLCTNGCKYEDLYSNCKSLKLTLTCKHQLVRDSCKASCNCSNSIY

SEQ ID NO: 3534 - protein, 112 aa, Homo Sapiens
MCTHYTQIVWATTNKIGCAVNTCRKMTVWGEVWENAVYFVCNYSPKGNWIGEAPYKNGRPCSECPPSYGGSCRNNLCYREETYTPKPETDEMNEVETAPIPEENHVWLQPRV

SEQ ID NO: 3535 - protein, 210 aa, Homo Sapiens
MCTHYTQIVWATTNKIGCAVNTCRKMTVWGEVWENAVYFVCNYSPKGNWIGEAPYKNGRPCSECPPSYGGSCRNNLCYREETYTPKPETDEMNEVETAPIPEENHVWLQPRVMRPTKPKKTSAVNYMTQVVRCDTKMKDRCKGSTCNRYQCPAGCLNHKAKIFGTLFYESSSSICRAAIHYGILDDKGGLVDITRNGKVPFFVKSERHGV

SEQ ID NO: 3536 - protein, 19 aa, Homo Sapiens
MSCVLGGVIPLGLLFLVCG

SEQ ID NO: 3537 - protein, 120 aa, Homo Sapiens
MSCVLGGVIPLGLLFLVCGSQGYLLPNVTLLEELLSKYQHNESHSRVRRAIPREDKEEILMLHNKLRGQVQPQASNMEYMTWDDELEKSAAAWASQCIWEHGPTSLLVSIGQNLGAHWGR

SEQ ID NO: 3538 - protein, 497 aa, Homo Sapiens
MSCVLGGVIPLGLLFLVCGSQGYLLPNVTLLEELLSKYQHNESHSRVRRAIPREDKEEILMLHNKLRGQVQPQASNMEYMTWDDELEKSAAAWASQCIWEHGPTSLLVSIGQNLGAHWGRYRSPGFHVQSWYDEVKDYTYPYPSECNPWCPERCSGPMCTHYTQIVWATTNKIGCAVNTCRKMTVWGEVWENAVYFVCNYSPKGNWIGEAPYKNGRPCSECPPSYGGSCRNNLCYREETYTPKPETDEMNEVETAPIPEENHVWLQPRVMRPTKPKKTSAVNYMTQVVRCDTKMKDRCKGSTCNRYQCPAGCLNHKAKIFGTLFYESSSSICRAAIHYGILDDKGGLVDITRNGKVPFFVKSERHGVQSLSKYKPSSSFMVSKVKVQDLDCYTTVAQLCPFEKPATHCPRIHCPAHCKDEPSYWAPVFGTNIYADTSSICKTAVHAGVISNESGGDVDVMPVDKKKTYVGSLRNGVQSESLGTPRDGKAFRIFAVRQ

SEQ ID NO: 3539 - protein, 449 aa, Homo Sapiens
MSCVLGGVIPLGLLFLVCGSQGYLLPNVTLLEELLSKYQHNESHSRVRRAIPREDKEEILMLHNKLRGQVQPQASNMEYMTWDDELEKSAAAWASQCIWEHGPTSLLVSIGQNLGAHWGRYRSPGFHVQSWYDEVKDYTYPYPSECNPWCPERCSGPMCTHYTQIVWATTNKIGCAVNTCRKMTVWGEVWENAVYFVCNYSPKGNWIGEAPYKNGRPCSECPPSYGGSCRNNLCYREETYTPKPETDEMNEVETAPIPEENHVWLQPRVMRPTKPKKTSAVNYMTQVVRCDTKMKDRCKGSTCNRYQCPAGCLNHKAKIFGTLFYESSSSICRAAIHYGILDDKGGLVDITRNGKVPFFVKSERHGVQSLSKYKPSSSFMVSKVKVQDLDCYTTVAQLCPFEKPATHCPRIHCPAHCKDEPSYWAPVFGTNIYADVSRMHFQQLSRKAC

SEQ ID NO: 3540 - protein, 496 aa, Homo Sapiens
MSCVLGGVIPLGLLFLVCGSQGYLLPNVTLLEELLSKYQHNESHSRVRRAIPREDKEEILMLHNKLRGQVQPQASNMEYMTWDDELEKSAAAWASQCIWEHGPTSLLVSIGQNLGAHWGRYRSPGFHVQSWYDEVKDYTYPYPSECNPWCPERCSGPMCTHYTQIVWATTNKIGCAVNTCRKMTVWGEVWENAVYFVCNYSPKGNWIGEAPYKNGRPCSECPPSYGGSCRNNLCYRETYTPKPETDEMNEVETAPIPEENHVWLQPRVMRPTKPKKTSAVNYMTQVVRCDTKMKDRCKGSTCNRYQCPAGCLNHKAKIFGTLFYESSSSICRAAIHYGILDDKGGLVDITRNGKVPFFVKSERHGVQSLSKYKPSSSFMVSKVKVQDLDCYTTVAQLCPFEKPATHCPRIHCPAHCKDEPSYWAPVFGTNIYADTSSICKTAVHAGVISNESGGDVDVMPVDKKKTYVGSLRNGVQSESLGTPRDGKAFRIFAVRQ

SEQ ID NO: 3541 - protein, 43 aa, Homo Sapiens
  misc_feature (1)..(1): Xaa can be any naturally occurring amino acid
XKTAVHAGVISNESGGDVDVMPVDKKKTYVGSLRNGVQSERNM

SEQ ID NO: 3542 - protein, 422 aa, Homo Sapiens
MPAGRRGPAAQSARRPPPLLPLLLLLCVLGAPRAGSGAHTAVISPQDPTLLIGSSLLATCSVHGDPPGATAEGLYWTLNGRRLPPELSRVLNASTLALALANLNGSRQRSGDNLVCHARDGSILAGSCLYVGLPPEKPVNISCWSKNMKDLTCRWTPGAHGETFLHTNYSLKYKLRWYGQDNTCEEYHTVGPHSCHIPKDLALFTPYEIWVEATNRLGSARSDVLTLDILDVVTTDPPPDVHVSRVGGLEDQLSVRWVSPPALKDFLFQAKYQIRYRVEDSVDWKVVDDVSNQTSCRLAGLKPGTVYFVQVRCNPFGIYGSKKAGIWSEWSHPTAASTPRSERPGPGGGACEPRGGEPSSGPVRRELKQFLGWLKKHAYCSNLSFRLYDQWRAWMQKSHKTRNQDEGILPSGRRGTARGPAR

SEQ ID NO: 3543 - protein, 173 aa, Homo Sapiens
  misc_feature (1)..(1): Xaa can be any naturally occurring amino acid
XQDNTCEEYHTVGPHSCHIPKDLALFTPYEIWVEATNRLGSARSDVLTLDILDVVTTDPPPDVHVSRVGGLEDQLSVRWVSPPALKDFLFQAKYQIRYRVEDSVDWKVVDDVSNQTSCRLAGLKPGTVYFVQVRCNPFGIYGSKKAGIWKRPGPGGGACEPRGGEPSSGPVRR

SEQ ID NO: 3544 - protein, 102 aa, Homo Sapiens
MEKLLCFLVLTSLSHAFGQTDMSRKAFVFPKESDTSYVSLKAPLTKPLKAFTVCLHFYTELSSTHEINTIYLGGPFSPNVLNWRALKYEVQGEVFTKPQLWP

SEQ ID NO: 3545 - protein, 102 aa, Homo Sapiens; identical to SEQ ID NO: 3544

SEQ ID NO: 3546 - protein, 91 aa, Homo Sapiens
MEKLLCFLVLTSLSHAFGQTDMSRKAFVFPKESDTSYVSLKAPLTKPLKAFTVCLHFYTELSSTRGPNVLNWRALKYEVQGEVFTKPQLWP

SEQ ID NO: 3547 - protein, 224 aa, Homo Sapiens
MEKLLCFLVLTSLSHAFGQTDMSRKAFVFPKESDTSYVSLKAPLTKPLKAFTVCLHFYTELSSTRGYSIFSYATKRQDNEILIFWSKDIGYSFTVGGSEILFEVPEVTVAPVHICTSWESASGIVEFWVDGKPRVRKSLKKGYTVGAEASIILGQEQDSFGGNFEGSQSLVGDIGNVNMWDFVLSPDEINTIYLGGPFSPNVLNWRALKYEVQGEVFTKPQLWP

SEQ ID NO: 3548 - protein, 46 aa, Homo Sapiens
MWDFVLSPDEINTIYLGGPFSPNVLNWRALKYEVQGEVFTKPQLWP

SEQ ID NO: 3549 - protein, 645 aa, Homo Sapiens
MAPSADPGMSRMLPFLLLLWFLPITEGSQRAEPMFTAVTNSVLPPDYDSNPTQLNYGVAVTDVDHDGDFEIVVAGYNGPNLVLKYDRAQKRLVNIAVDERSSPYYALRDRQGNAIGVTACDIDGDGREEIYFLNTNNAFSGVATYTDKLFKFRNNRWEDILSDEVNVARGVASLFAGRSVACVDRKGSGRYSIYIANYAYGNVGPDALIEMDPEASDLSRGILALRDVAAEAGVSKYTGGRGVSVGPILSSSASDIFCDNENGPNFLFHNRGDGTFVDAAASAGVDDPHQHGRGVALADFNRDGKVDIVYGNWNGPHRLYLQMSTHGKVRFRDIASPKFSMPSPVRTVITADFDNDQELEIFFNNIAYRSSSANRLFRVIRREHGDPLIEELNPGDALEPEGRGTGGVVTDFDGDGMLDLILSHGESMAQPLSVFRGNQGFNNNWLRVVPRTRFGAFARGAKVVLYTKKSGAHLRIIDGGSGYLCEMEPVAHFGLGKDEASSVEVTWPDGKMVSRNVASGEMNSVLEILYPRDEDTLQDPAPLECGQGFSQQENGHCMDTNECIQFPFVCPRDKPVCVNTYGSYRCRTNKKCSRGYEPNEDGTACVAQVAFLGGYSSAASRISEPLSRASYLSLGLGLCLQLYAL

SEQ ID NO: 3550 - protein, 661 aa, Homo Sapiens
MAPSADPGMSRMLPFLLLLWFLPITEGSQRAEPMFTAVTNSVLPPDYDSNPTQLNYGVAVTDVDHDGDFEIVVAGYNGPNLVLKYDRAQKRLVNIAVDERSSPYYALRDRQGNAIGVTACDIDGDGREEIYFLNTNNAFSGVATYTDKLFKFRNNRWEDILSDEVNVARGVASLFAGRSVACVDRKGSGRYSIYIANYAYGNVGPDALIEMDPEASDLSRGILALRDVAAEAGVSKYTGGRGVSVGPILSSSASDIFCDNENGPNFLFHNRGDGTFVDAAASAGVDDPHQHGRGVALADFNRDGKVDIVYGNWNGPHRLYLQMSTHGKVRFRDIASPKFSMPSPVRTVITADFDNDQELEIFFNNIAYRSSSANRLFRVIRREHGDPLIEELNPGDALEPEGRGTGGVVTDFDGDGMLDLILSHGESMAQPLSVFRGNQGFNNNWLRVVPRTRFGAFARGAKVVLYTKKSGAHLRIIDGGSGYLCEMEPVAHFGLGKDEASSVEVTWPDGKMVSRNVASGEMNSVLEILYPRDEDTLQDPAPLECGQGFSQQENGHCMDTNECIQFPFVCPRDKPVCVNTYGSYRCRTNKKCSRGYEPNEDGTACVGTLGQSPGPRPTTPTAAAATAAAAAAAGAATAAPVLVDGDLNLGSVVKESCEPSC

SEQ ID NO: 3551 - protein, 637 aa, Homo Sapiens
MSRMLPFLLLLWFLPITEGSQRAEPMFTAVTNSVLPPDYDSNPTQLNYGVAVTDVDHDGDFEIVVAGYNGPNLVLKYDRAQKRLVNIAVDERSSPYYALRDRQGNAIGVTACDIDGDGREEIYFLNTNNAFSGVATYTDKLFKFRNNRWEDILSDEVNVARGVASLFAGRSVACVDRKGSGRYSIYIANYAYGNVGPDALIEMDPEASDLSRGILALRDVAAEAGVSKYTGGRGVSVGPILSSSASDIFCDNENGPNFLFHNRGDGTFVDAAASAGVDDPHQHGRGVALADFNRDGKVDIVYGNWNGPHRLYLQMSTHGKVRFRDIASPKFSMPSPVRTVITADFDNDQELEIFFNNIAYRSSSANRLFRVIRREHGDPLIEELNPGDALEPEGRGTGGVVTDFDGDGMLDLILSHGESMAQPLSVFRGNQGFNNNWLRVVPRTRFGAFARGAKVVLYTKKSGAHLRIIDGGSGYLCEMEPVAHFGLGKDEASSVEVTWPDGKMVSRNVASGEMNSVLEILYPRDEDTLQDPAPLECGQGFSQQENGHCMDTNECIQFPFVCPRDKPVCVNTYGSYRCRTNKKCSRGYEPNEDGTACVAQVAFLGGYSSAASRISEPLSRASYLSLGLGLCLQLYAL

SEQ ID NO: 3552 - protein, 79 aa, Homo Sapiens
  misc_feature (1)..(1): Xaa can be any naturally occurring amino acid
XDEDTLQDPAPLETPMNASSSHSCALETSPYVSTPMEATGAGPTRSAVGATSPTRMAQPAWKEPCYLVSAISLENRMLL

SEQ ID NO: 3553 - protein, 524 aa, Homo Sapiens
YALRDRQGNAIGVTACDIDGDGREEIYFLNTNNAFSGVATYTDKLFKFRNNRWEDILSDEVNVARGVASLFAGRSVACVDRKGSGRYSIYIANYAYGNVGPDALIEMDPEASDLSRGILALRDVAAEAGVSKYTGGRGVSVGPILSSSASDIFCDNENGPNFLFHNRGDGTFVDAAASAGVDDPHQHGRGVALADFNRDGKVDIVYGNWNGPHRLYLQMSTHGKVRFRDIASPKFSMPSPVRTVITADFDNDQELEIFFNNIAYRSSSANRLFRVIRREHGDPLIEELNPGDALEPEGRGTGGVVTDFDGDGMLDLILSHGESMAQPLSVFRGNQGFNNNWLRVVPRTRFGAFARGAKVVLYTKKSGAHLRIIDGGSGYLCEMEPVAHFGLGKDEASSVEVTWPDGKMVSRNVASGEMNSVLEILYPRDEDTLQDPAPLETPMNASSSHSCALETSPYVSTPMEATGAGPTRSAVGATSPTRMAQPAWGLSASHRAPAPPPPPLLLPLPLLLPLLELPLLHRSS

SEQ ID NO: 3554 - protein, 401 aa, Homo Sapiens
MEPGRRGAAALLALLCVACALRAGRAQYERYSFRSFPRDELMPLESAYRHALDKYSGEHWAESVGYLEISLRLHRLLRDSEAFCHRNCSAAPQPEPAAGLASYPELRLFGGLLRRAHCLKRCKQGLPAFRQSQPSREVLADFQRREPYKFLQFAYFKANNLPKAIAAAHTFLLKHPDDEMMKRNMAYYKSLPGAEDYIKDLETKSYESLFIRAVRAYNGENWRTSITDMELALPDFFKAFYECLAACEGSREIKDFKDFYLSIADHYVEVLECKIQCEENLTPVIGGYPVEKFVATMYHYLQFAYYKLNDLKNAAPCAVSYLLFDQNDKVMQQNLVYYQYHRDTWGLSDEHFQPRPEAVQFFNVTTLQKELYDFAKENIMDDDEGEVVEYVDDLLELEETS

SEQ ID NO: 3555 - protein, 358 aa, Homo Sapiens
MEPGRRGAAALLALLCVACALRAGRAQYERYSFRSFPRDELMPLESAYRHALDKYSGEHWAESVGYLEISLRLHRLLRDSEAFCHRNCSAAPQPEPAAGLASYPELRLFGGLLRRAHCLKRCKQGLPAFRQSQPSREVLADFQRREPYKFLQFAYFKANNLPKAIAAAHTFLLKHPDDEMMKRNMAYYKSLPGAEDYIKDLETKSYESLFIRAVRAYNGENWRTSITDMELALPDFFKAFYECLAACEGSREIKDFKDFYLSIAVNDLKNAAPCAVSYLLFDQNDKVMQQNLVYYQYHRDTWGLSDEHFQPRPEAVQFFNVTTLQKELYDFAKENIMDDDEGEVVEYVDDLLELEETS

SEQ ID NO: 3556 - protein, 593 aa, Homo Sapiens
MAATVATAAAVAPAPAPGTDSASSVHWFRKGLRLHDNPALLAAVRGARCVRCVYILDPWFAASSSVGINRWRFLLQSLEDLDTSLRKLNSRLFVVRGQPADVFPRLFKEWGVTRLTFEYDSEPFGKERDAAIMKMAKEAGVEVVTENSHTLYDLDRIIELNGQKPPLTYKRFQAIISRMELPKKPVGLVTSQQMESCRAEIQENHDETYGVPSLEELGFPTEGLGPAVWQGGETEALARLDKHLERKAWVANYERPRMNANSLLASPTGLSPYLRFGCLSCRLFYYRLWDLYKKVKRNSTPPLSLFGQLLWREFFYTAATNNPRFDRMEGNPICIQIPWDRNPEALAKWAEGKTGFPWIDAIMTQLRQEGWIHHLARHAVACFLTRGDLWVSWESGVRVFDELLLDADFSVNAGSWMWLSCSAFFQQFFHCYCPVGFGRRTDPSGDYIRRYLPKLKAFPSRYIYEPWNAPESIQKAAKCIIGVDYPRPIVNHAETSRLNIERMKQIYQQLSRYRGLCLLASVPSCVEDLSHPVAEPSSSQAGSMSSAGPRPLPSGPASPKRKLEAAEEPPGEELSKRARVAELPTPELPSKDA

SEQ ID NO: 3557 - protein, 614 aa, Homo Sapiens
MGGVHVAYRGGAGVAGAVWTVMAATVATAAAVAPAPAPGTDSASSVHWFRKGLRLHDNPALLAAVRGARCVRCVYILDPWFAASSSVGINRWRFLLQSLEDLDTSLRKLNSRLFVVRGQPADVFPRLFKEWGVTRLTFEYDSEPFGKERDAAIMKMAKEAGVEVVTENSHTLYDLDRIIELNGQKPPLTYKRFQAIISRMELPKKPVGLVTSQQMESCRAEIQENHDETYGVPSLEELGFPTEGLGPAVWQGGETEALARLDKHLERKAWVANYERPRMNANSLLASPTGLSPYLRFGCLSCRLFYYRLWDLYKKVKRNSTPPLSLFGQLLWREFFYTAATNNPRFDRMEGNPICIQIPWDRNPEALAKWAEGKTGFPWIDAIMTQLRQEGWIHHLARHAVACFLTRGDLWVSWESGVRVFDELLLDADFSVNAGSWMWLSCSAFFQQFFHCYCPVGFGRRTDPSGDYIRRYLPKLKAFPSRYIYEPWNAPESIQKAAKCIIGVDYPRPIVNHAETSRLNIERMKQIYQQLSRYRGLCLLASVPSCVEDLSHPVAEPSSSQAGSMSSAGPRPLPSGPASPKRKLEAAEEPPGEELSKRARVAELPTPELPSKDA

SEQ ID NO: 3558 - protein, 614 aa, Homo Sapiens; identical to SEQ ID NO: 3557

SEQ ID NO: 3559 - protein, 532 aa, Homo Sapiens
MPAPPGRTHTWFLLQSLEDLDTSLRKLNSRLFVVRGQPADVFPRLFKEWGVTRLTFEYDSEPFGKERDAAIMKMAKEAGVEVVTENSHTLYDLDRIIELNGQKPPLTYKRFQAIISRMELPKKPVGLVTSQQMESCRAEIQENHDETYGVPSLEELGFPTEGLGPAVWQGGETEALARLDKHLERKAWVANYERPRMNANSLLASPTGLSPYLRFGCLSCRLFYYRLWDLYKKVKRNSTPPLSLFGQLLWREFFYTAATNNPRFDRMEGNPICIQIPWDRNPEALAKWAEGKTGFPWIDAIMTQLRQEGWIHHLARHAVACFLTRGDLWVSWESGVRVFDELLLDADFSVNAGSWMWLSCSAFFQQFFHCYCPVGFGRRTDPSGDYIRRYLPKLKAFPSRYIYEPWNAPESIQKAAKCIIGVDYPRPIVNHAETSRLNIERMKQIYQQLSRYRGLCLLASVPSCVEDLSHPVAEPSSSQAGSMSSAGPRPLPSGPASPKRKLEAAEEPPGEELSKRARVAELPTPELPSKDA

SEQ ID NO: 3560 - protein, 142 aa, Homo Sapiens
IQKGTSVSQKVCEWKEPEELKQLLDLELRSQGESQKQILERCRAVIRYSVKTGHPRFFNQLFSGLDPHALAGRIITESLNTSQYTYEIAPVFVLMEEEVLRKLRALVGWSSGDGIFCPVSLLHPEGSCVSGTWHRQCPSGQG

SEQ ID NO: 3561 - protein, 135 aa, Homo Sapiens
MADSEALPSLAGDPVAVEALLRAVFGVVVDEAIQKGTSVSQKCHYSIQKGAAFLGLGTDSVRVVKADERGKMVPEDLERQIGMAEAEGAVPFLVSATSGTTVLGAFDPLEAIADVCQRHGLWLHVDAAWGGSVLL

SEQ ID NO: 3562 - protein, 346 aa, Homo Sapiens
MADSEALPSLAGDPVAVEALLRAVFGVVVDEAIQKGTSVSQKCHYSIQKGAAFLGLGTDSVRVVKADERGKMVPEDLERQIGMAEAEGAVPFLVSATSGTTVLGAFDPLEAIADVCQRHGLWLHVDAAWGGSVLLSQTHRHLLDGIQRADSVAWNPHKLLAAGLQCSALLLQDTSNLLKRCHGSQASYLFQQDKFYDVALDTGDKVVQCGRRVDCLKLWLMWKAQGDQGLERRIDQAFVLARYLVEEMKKREGFELVMEPEFVNVCFWFVPPSLRGKQESPDYHERLSKVAPVLKERMVKEGSMMIGYQPHGTRGNFFRVVVANSALTCADMDFLLNELERLGQDL

SEQ ID NO: 3563 - protein, 129 aa, Homo Sapiens
MADSEALPSLAGDPVAVEALLRAVFGVVVDEAIQKGTSVSQKVCEWKEPEELKQLLDLELRSQGESQKQILERCRAVIRYSVKTGHPRFFNQLFSGLDPHALAGRIITESLNTSQYTYEIAPVFVLMEE

SEQ ID NO: 3564 - protein, 146 aa, Homo Sapiens
MADSEALPSLAGDPVAVEALLRAVFGVVVDEAIQKGTSVSQKVCEWKEPEELKQLLDLELRSQGESQKQILERCRAVIRYSVKTGHPRFFNQLFSGLDPHALAGRIITESLNTSQYTYEIAPVFVLMEEEVLRKLRALVGWSSGDG

SEQ ID NO: 3565 - protein, 163 aa, Homo Sapiens
MADSEALPSLAGDPVAVEALLRAVFGVVVDEAIQKGTSVSQKVCEWKEPEELKQLLDLELRSQGESQKQILERCRAVIRYSVKTGHPRFFNQLFSGLDPHALAGRIITESLNTSQYTYEIAPVFVLMEEEVLRKLRALVGWSSGDGIFCPGGSISNMYAVNLA

SEQ ID NO: 3566 - protein, 493 aa, Homo Sapiens
MADSEALPSLAGDPVAVEALLRAVFGVVVDEAIQKGTSVSQKVCEWKEPEELKQLLDLELRSQGESQKQILERCRAVIRYSVKTGHPRFFNQLFSGLDPHALAGRIITESLNTSQYTYEIAPVFVLMEEEVLRKLRALVGWSSGDGIFCPGGSISNMYAVNLARYQRYPDCKQRGLRTLPPLALFTSKECHYSIQKGAAFLGLGTDSVRVVKADERGKMVPEDLERQIGMAEAEGAVPFLVSATSGTTVLGAFDPLEAIADVCQRHGLWLHVDAAWGGSVLLSQTHRHLLDGIQRADSVAWNPHKLLAAGLQCSALLLQDTSNLLKRCHGSQASYLFQQDKFYDVALDTGDKVVQCGRRVDCLKLWLMWKAQGDQGLERRIDQAFVLARYLVEEMKKREGFELVMEPEFVNVCFWFVPPSLRGKQESPDYHERLSKVAPVLKERMVKEGSMMIGYQPHGTRGNFFRVVVANSALTCADMDFLLNELERLGQDL

SEQ ID NO: 3567 - protein, 493 aa, Homo Sapiens; identical to SEQ ID NO: 3566

SEQ ID NO: 3568 - protein, 267 aa, Homo Sapiens
MADSEALPSLAGDPVAVEALLRAVFGVVVDEAIQKGTSVSQKVCEWKEPEELKQLLDLELRSQGESQKQILERCRAVIRYSVKTGHPRFFNQLFSGLDPHALAGRIITESLNTSQYTYEIAPVFVLMEEEVLRKLRALVGWSSGDGIFCPGGSISNMYAVNLARYQRYPDCKQRGLRTLPPLALFTSKEVGKRHRPNPGLLILISSHVTTPSRRELRFWDLAPTVSEWSRLMREGKWSPRIWRGRLVWPRLRVLCRSWSVPPLAPLC

SEQ ID NO: 3569 - protein, 267 aa, Homo Sapiens; identical to SEQ ID NO: 3568

SEQ ID NO: 3570 - protein, 45 aa, Homo Sapiens
MADSEALPSLAGDPVAVEALLRAVFGVVVDEAIQKGTSVSQKVHI

SEQ ID NO: 3571 - protein, 520 aa, Homo Sapiens
MSIPLKSSFLLSYLCTLPPALLSREILMADSEALPSLAGDPVAVEALLRAVFGVVVDEAIQKGTSVSQKVCEWKEPEELKQLLDLELRSQGESQKQILERCRAVIRYSVKTGHPRFFNQLFSGLDPHALAGRIITESLNTSQYTYEIAPVFVLMEEEVLRKLRALVGWSSGDGIFCPGGSISNMYAVNLARYQRYPDCKQRGLRTLPPLALFTSKECHYSIQKGAAFLGLGTDSVRVVKADERGKMVPEDLERQIGMAEAEGAVPFLVSATSGTTVLGAFDPLEAIADVCQRHGLWLHVDAAWGGSVLLSQTHRHLLDGIQRADSVAWNPHKLLAAGLQCSALLLQDTSNLLKRCHGSQASYLFQQDKFYDVALDTGDKVVQCGRRVDCLKLWLMWKAQGDQGLERRIDQAFVLARYLVEEMKKREGFELVMEPEFVNVCFWFVPPSLRGKQESPDYHERLSKVAPVLKERMVKEGSMMIGYQPHGTRGNFFRVVVANSALTCADMDFLLNELERLGQDL

SEQ ID NO: 3572 - protein, 519 aa, Homo Sapiens
  misc_feature (1)..(1): Xaa can be any naturally occurring amino acid
XLGDARRGAAGYLCTLPPALLSREILMADSEALPSLAGDPVAVEALLRAVFGVVVDEAIQKGTSVSQKVCEWKEPEELKQLLDLELRSQGESQKQILERCRAVIRYSVKTGHPRFFNQLFSGLDPHALAGRIITESLNTSQYTYEIAPVFVLMEEEVLRKLRALVGWSSGDGIFCPGGSISNMYAVNLARYQRYPDCKQRGLRTLPPLALFTSKECHYSIQKGAAFLGLGTDSVRVVKADERGKMVPEDLERQIGMAEAEGAVPFLVSATSGTTVLGAFDPLEAIADVCQRHGLWLHVDAAWGGSVLLSQTHRHLLDGIQRADSVAWNPHKLLAAGLQCSALLLQDTSNLLKRCHGSQASYLFQQDKFYDVALDTGDKVVQCGRRVDCLKLWLMWKAQGDQGLERRIDQAFVLARYLVEEMKKREGFELVMEPEFVNVCFWFVPPSLRGKQESPDYHERLSKVAPVLKERMVKEGSMMIGYQPHGTRGNFFRVVVANSALTCADMDFLLNELERLGQDL

SEQ ID NO: 3573 - protein, 150 aa, Homo Sapiens
MGWGRLQRISLPSQCLSLLSTWLGSLLLLVCLLASRSITEEVSEYCSHMIGSGHLQSLQRLIDSQMETSCQITFEFVDQEQLKDPVCYLKKAFLLVQDIMEDTMRFRDNTPNAIAIVQLQELSLRLKSCFTKDYEEHDKACVRTFYETPL

SEQ ID NO: 3574 - protein, 113 aa, Homo Sapiens
MIGSGHLQSLQRLIDSQMETSCQITFEFVDQEQLKDPVCYLKKAFLLVQDIMEDTMRFRDNTPNAIAIVQLQELSLRLKSCFTKDYEEHDKACVRTFYETPLQLLEKVKNVFN

SEQ ID NO: 3575 - protein, 285 aa, Homo Sapiens
MTAPGAAGRCPPTIDSQMETSCQITFEFVDQEQLKDPVCYLKKAFLLVQDIMEDTMRFRDNTPNAIAIVQLQELSLRLKSCFTKDYEEHDKACVRTFYETPLQLLEKVKNVFNETKNLLDKDWNIFSKNCNNSFAECSSQDVVTKPDCNCLYPKAIPSSDPASVSPHQPLAPSMAPVAGLTWEDSEGTEGSSLLPGEQPLHTVDPGSAKQRPPRSTCQSFEPPETPVVKDSTIGGSPQPRPSVGAFNPGMEDILDSAMGTNWVPEEASGEASEIPVPQGTELSPS

SEQ ID NO: 3576 - protein, 119 aa, Homo Sapiens
MTAPGAAGRCPPTTWLGSLLLLVCLLASRSITEEVSEYCSHMIGSGHLQSLQRLIDSQMETSCQITFEFVDQEQLKDPVCYLKKAFLLVQDIMEDTMRFRDNTPNAIAIVQLQELSLRL

SEQ ID NO: 3577 - protein, 554 aa, Homo Sapiens
MTAPGAAGRCPPTTWLGSLLLLVCLLASRSITEEVSEYCSHMIGSGHLQSLQRLIDSQMETSCQITFEFVDQEQLKDPVCYLKKAFLLVQDIMEDTMRFRDNTPNAIAIVQLQELSLRLKSCFTKDYEEHDKACVRTFYETPLQLLEKVKNVFNETKNLLDKDWNIFSKNCNNSFAECSSQDVVTKPDCNCLYPKAIPSSDPASVSPHQPLAPSMAPVAGLTWEDSEGTEGSSLLPGEQPLHTVDPGSAKQRPPRSTCQSFEPPETPVVKDSTIGGSPQPRPSVGAFNPGMEDILDSAMGTNWVPEEASGEASEIPVPQGTELSPSRPGGGSMQTEPARPSNFLSASSPLPASAKGQQPADVTGTALPRVGPVRPTGQDWNHTPQKTDHPSALLRDPPEPGSPRISSLRPQGLSNPSTLSAQPQLSRSHSSGSVLPLGELEGRRSTRDRRSPAEPEGGPASEGAARPLPRFNSVPLTDTGHERQSEGSFSPQLQESVFHLLVPSVILVLLAVGGLLFYRWRRRSHQEPQRADSPLEQPEGSPLTQDDRQVELPV

SEQ ID NO: 3578 - protein, 554 aa, Homo Sapiens; identical to SEQ ID NO: 3577

SEQ ID NO: 3579 - protein, 438 aa, Homo Sapiens
MTAPGAAGRCPPTTWLGSLLLLVCLLASRSITEEVSEYCSHMIGSGHLQSLQRLIDSQMETSCQITFEFVDQEQLKDPVCYLKKAFLLVQDIMEDTMRFRDNTPNAIAIVQLQELSLRLKSCFTKDYEEHDKACVRTFYETPLQLLEKVKNVFNETKNLLDKDWNIFSKNCNNSFAECSSQDVVTKPDCNCLYPKAIPSSDPASVSPHQPLAPSMAPVAGLTWEDSEGTEGSSLLPGEQPLHTVDPGSAKQRPPRSTCQSFEPPETPVVKDSTIGGSPQPRPSVGAFNPGMEDILDSAMGTNWVPEEASGEASEIPVPQGTELSPSRPGGGSMQTEPARPSNFLSASSPLPASAKGQQPADVTGHERQSEGSFSPQLQESVFHLLVPSVILVLLAVGGLLFYRWRRRSHQEPQRADSPLEQPEGSPLTQDDRQVELPV

SEQ ID NO: 3580 - protein, 256 aa, Homo Sapiens
MTAPGAAGRCPPTTWLGSLLLLVCLLASRSITEEVSEYCSHMIGSGHLQSLQRLIDSQMETSCQITFEFVDQEQLKDPVCYLKKAFLLVQDIMEDTMRFRDNTPNAIAIVQLQELSLRLKSCFTKDYEEHDKACVRTFYETPLQLLEKVKNVFNETKNLLDKDWNIFSKNCNNSFAECSSQGHERQSEGSFSPQLQESVFHLLVPSVILVLLAVGGLLFYRWRRRSHQEPQRADSPLEQPEGSPLTQDDRQVELPV

SEQ ID NO: 3581 - protein, 64 aa, Homo Sapiens
AGSPWALGQRPFGAQGLKGPVCVAATAHADEKEALMSELKIMSHLGQHENIVNLLGACTHGGIS

SEQ ID NO: 3582 - protein, 972 aa, Homo Sapiens
MGPGVLLLLLVATAWHGQGIPVIEPSVPELVVKPGATVTLRCVGNGSVEWDGPPSPHWTLYSDGSSSILSTNNATFQNTGTYRCTEPGDPLGGSAAIHLYVKDPARPWNVLAQEVVVFEDQDALLPCLLTDPVLEAGVSLVRVRGRPLMRHTNYSFSPWHGFTIHRAKFIQSQDYQCSALMGGRKVMSISIRLKVQKVIPGPPALTLVPAELVRIRGEAAQIVCSASSVDVNFDVFLQHNNTKLAIPQQSDFHNNRYQKVLTLNLDQVDFQHAGNYSCVASNVQGKHSTSMFFRVVESAYLNLSSEQNLIQEVTVGEGLNLKVMVEAYPGLQGFNWTYLGPFSDHQPEPKLANATTKDTYRHTFTLSLPRLKPSEAGRYSFLARNPGGWRALTFELTLRYPPEVSVIWTFINGSGTLLCAASGYPQPNVTWLQCSGHTDRCDEAQVLQVWDDPYPEVLSQEPFHKVTVQSLLTVETLEHNQTYECRAHNSVGSGSWAFIPISAGAHTHPPDEFLFTPVVVACMSIMALLLLLLLLLLYKYKQKPKYQVRWKIIESYEGNSYTFIDPTQLPYNEKWEFPRNNLQFGKTLGAGAFGKVVEATAFGLGKEDAVLKVAVKMLKSTAHADEKEALMSELKIMSHLGQHENIVNLLGACTHGGPVLVITEYCCYGDLLNFLRRKAEAMLGPSLSPGQDPEGGVDYKNIHLEKKYVRRDSGFSSQGVDTYVEMRPVSTSSNDSFSEQDLDKEDGRPLELRDLLHFSSQVAQGMAFLASKNCIHRDVAARNVLLTNGHVAKIGDFGLARDIMNDSNYIVKGNARLPVKWMAPESIFDCVYTVQSDVWSYGILLWEIFSLGLNPYPGILVNSKFYKLVKDGYQMAQPAFAPKNIYSIMQACWALEPTHRPTFQQICSFLQEQAQEDRRERDYTNLPSSSRSGGSGSSSSELEEESSSEHLTCCEQGDIAQPLLQPNNYQFC

SEQ ID NO: 3583 - protein, 671 aa, Homo Sapiens
MGPGVLLLLLVATAWHGQGIPVIEPSVPELVVKPGATVTLRCVGNGSVEWDGPPSPHWTLYSDGSSSILSTNNATFQNTGTYRCTEPGDPLGGSAAIHLYVKDPARPWNVLAQEVVVFEDQDALLPCLLTDPVLEAGVSLVRVRGRPLMRHTNYSFSPWHGFTIHRAKFIQSQDYQCSALMGGRKVMSISIRLKVQKVIPGPPALTLVPAELVRIRGEAAQIVCSASSVDVNFDVFLQHNNTKLAIPQQSDFHNNRYQKVLTLNLDQVDFQHAGNYSCVASNVQGKHSTSMFFRVVESAYLNLSSEQNLIQEVTVGEGLNLKVMVEAYPGLQGFNWTYLGPFSDHQPEPKLANATTKDTYRHTFTLSLPRLKPSEAGRYSFLARNPGGWRALTFELTLRYPPEVSVIWTFINGSGTLLCAASGYPQPNVTWLQCSGHTDRCDEAQVLQVWDDPYPEVLSQEPFHKVTVQSLLTVETLEHNQTYECRAHNSVGSGSWAFIPISAGAHTHPPDEFLFTPVVVACMSIMALLLLLLLLLLYKYKQKPKYQVRWKIIESYEGNSYTFIDPTQLPYNEKWEFPRNNLQFGKTLGAGAFGKVVEATAFGLGKEDAVLKVAVKMLKSTAHADEKEALMSELKIMSHLGQHENIVNLLGACTHGGTVASPARVWTPMWR

SEQ ID NO: 3584 - protein, 306 aa, Homo Sapiens
MGPGVLLLLLVATAWHGQGIPVIEPSVPELVVKPGATVTLRCVGNGSVEWDGPPSPHWTLYSDGSSSILSTNNATFQNTGTYRCTEPGDPLGGSAAIHLYVKDPARPWNVLAQEVVVFEDQDALLPCLLTDPVLEAGVSLVRVRGRPLMRHTNYSFSPWHGFTIHRAKFIQSQDYQCSALMGGRKVMSISIRLKVQKVIPGPPALTLVPAELVRIRGEAAQIVCSASSVDVNFDVFLQHNNTKLAIPQQSDFHNNRYQKVLTLNLDQVDFQHAGNYSCVASNVQGKHSTSMFFRVVGTPSPSLCPA

SEQ ID NO: 3585 - protein, 49 aa, Homo Sapiens
MRHTNYSFSPWHGFTIHRAKFIQSQDYQCSALMGGRKVMSISIRLKVQK

SEQ ID NO: 3586 - protein, 144 aa, Homo Sapiens
MWLQSLLLLGTVACSISAPARSPSPSTQPWEHVNAIQEARRLLNLSRDTAAEMNETVEVISEMFDLQEPTCLQTRLELYKQGLRGSLTKLKGPLTMMASHYKQHCPPTPETSCATQIITFESFKENLKDFLLVIPFDCWEPVQE

SEQ ID NO: 3587 - protein, 238 aa, Homo Sapiens
MLLLVTSLLLCELPHPAFLLIPEKSDLRTVAPASSLNVRFDSRTMNLSWDCQENTTFSKCFLTDKKNRVVEPRLSNNECSCTFREICLHEGVTFEVHVNTSQRGFQQKLLYPNSGREGTAAQNFSCFIYNADLMNCTWARGPTAPRDVQYFLYIRNSKRRREIRCPYYIQDSGTHVGCHLDNLSGLTSRNYFLVNGTSREIGIQFFDSLLDTKKIERFNPPSNVTVRCNTTHCLVRWK

SEQ ID NO: 3588 - protein, 377 aa, Homo Sapiens
MLLLVTSLLLCELPHPAFLLIPEKSDLRTVAPASSLNVRFDSRTMNLSWDCQENTTFSKCFLTDKKNRVVEPRLSNNECSCTFREICLHEGVTFEVHVNTSQRGFQQKLLYPNSGREGTAAQNFSCFIYNADLMNCTWARGPTAPRDVQYFLYIRNSKRRREIRCPYYIQDSGTHVGCHLDNLSGLTSRNYFLVNGTSREIGIQFFDSLLDTKKIERFNPPSNVTVRCNTTHCLVRWKQPRTYQKLSYLDFQYQLDVHRKNTQPGTENLLINVSGDLENRYNFPSSEPRAKHSVKIRAADVRILNWSSWSEAIEFDHLGGIHPRGRERLPRRGLDREGNYLRPRGCRNGMDISASATRGNCFLDDAVNLYIIFYVFI

SEQ ID NO: 3589 - protein, 410 aa, Homo Sapiens
MLLLVTSLLLCELPHPAFLLIPEKSDLRTVAPASSLNVRFDSRTMNLSWDCQENTTFSKCFLTDKKNRVVEPRLSNNECSCTFREICLHEGVTFEVHVNTSQRGFQQKLLYPNSGREGTAAQNFSCFIYNADLMNCTWARGPTAPRDVQYFLYIRNSKRRREIRCPYYIQDSGTHVGCHLDNLSGLTSRNYFLVNGTSREIGIQFFDSLLDTKKIERFNPPSNVTVRCNTTHCLVRWKQPRTYQKLSYLDFQYQLDVHRKNTQPGTENLLINVSGDLENRYNFPSSEPRAKHSVKIRAADVRILNWSSWSEAIEFGSDDGNLGSVYIYVLLIVGTLVCGIVLGFLFKRFLRIQRLFPPVPQIKDKLNDNHEVEDEMGPQRHHRCGWNLYPTPGPSPGSGSSPRLGSESSL

SEQ ID NO: 3590 - protein, 333 aa, Homo Sapiens
MLLLVTSLLLCELPHPAFLLIPEKSDLRTVAPASSLNVRFDSRTMNLSWDCQENTTFSKCFLTDKKNRVVEPRLSNNECSCTFREICLHEGVTFEVHVNTSQRGFQQKLLYPNSGREGTAAQNFSCFIYNADLMNCTWARGPTAPRDVQYFLYIRNSKRRREIRCPYYIQDSGTHVGCHLDNLSGLTSRNYFLVNGTSREIGIQFFDSLLDTKKIERFNPPSNVTVRCNTTHCLVRWKQPRTYQKLSYLDFQYQLDVHRKNTQPGTENLLINVSGDLENRYNFPSSEPRAKHSVKIRAADVRILNWSSWSEAIEFGSLGYSGCSRQFHRSKTN

SEQ ID NO: 3591 - protein, 400 aa, Homo Sapiens
MLLLVTSLLLCELPHPAFLLIPEKSDLRTVAPASSLNVRFDSRTMNLSWDCQENTTFSKCFLTDKKNRVVEPRLSNNECSCTFREICLHEGVTFEVHVNTSQRGFQQKLLYPNSGREGTAAQNFSCFIYNADLMNCTWARGPTAPRDVQYFLYIRNSKRRREIRCPYYIQDSGTHVGCHLDNLSGLTSRNYFLVNGTSREIGIQFFDSLLDTKKIERFNPPSNVTVRCNTTHCLVRWKQPRTYQKLSYLDFQYQLDVHRKNTQPGTENLLINVSGDLENRYNFPSSEPRAKHSVKIRAADVRILNWSSWSEAIEFGSDDGNLGSVYIYVLLIVGTLVCGIVLGFLFKRFLRIQRLFPPVPQIKDKLNDNHEVEDEIIWEEFTPEEGKGYREEVLTVKEIT

SEQ ID NO: 3592 - protein, 400 aa, Homo Sapiens; identical to SEQ ID NO: 3591

SEQ ID NO: 3593 - protein, 434 aa, Homo Sapiens
MLLLVTSLLLCELPHPAFLLIPEKSDLRTVAPASSLNVRFDSRTMNLSWDCQENTTFSKCFLTDKKNRVVEPRLSNNECSCTFREICLHEGVTFEVHVNTSQRGFQQKLLYPNSGREGTAAQNFSCFIYNADLMNCTWARGPTAPRDVQYFLYIRNSKRRREIRCPYYIQDSGTHVGCHLDNLSGLTSRNYFLVNGTSREIGIQFFDSLLDTKKIERFNPPSNVTVRCNTTHCLVRWKQPRTYQKLSYLDFQYQLDVHRKNTQPGTENLLINVSGDLENRYNFPSSEPRAKHSVKIRAADVRILNWSSWSEAIEFGSHSVTQAGVQWHNLGSLQPPSPRLKRFSCLRLPGSDDGNLGSVYIYVLLIVGTLVCGIVLGFLFKRFLRIQRLFPPVPQIKDKLNDNHEVEDEIIWEEFTPEEGKGYREEVLTVKEIT

SEQ ID NO: 3594 - protein, 285 aa, Homo Sapiens
MLLLVTSLLLCELPHPAFLLIPEKSDLRTVAPASSLNVRFDSRTMNLSWDCQENTTFSKCFLTDKKNRVVEPRLSNNECSCTFREICLHEGVTFEVHVNTSQRGFQQKLLYPNSGREGTAAQNFSCFIYNADLMNCTWARGPTAPRDVQYFLYIRNSKRRREIRCPYYIQDSGTHVGCHLDNLSGLTSRNYFLVNGTSREIGIQFFDSLLDTKKIERFNPPSNVTVRCNTTHCLVRWKQPRTYQKLSYLDFQYQLDVHRKNTQPGTENLLVLTTGTSALCTFMCS

SEQ ID NO: 3595 - protein, 400 aa, Homo Sapiens; identical to SEQ ID NO: 3591

SEQ ID NO: 3596 - protein, 233 aa, Homo Sapiens
MLLLVTSLLLCELPHPAFLLIPEKSDLRTVAPASSLNVRFDSRTMNLSWDCQENTTFSKCFLTDKKNRVVEPRLSNNECSCTFREICLHEGVTFEVHVNTSQRGFQQKLLYPNSGREGTAAQNFSCFIYNADLMNCTWARGPTAPRDVQYFLYIRNSKRRREIRCPYYIQDSGTHVGCHLDNLSGLTSRNYFLVNGTSREIGIQFFDSLLDTKKIGSLGYSGCSRQFHRSKTN

SEQ ID NO: 3597 - protein, 90 aa, Homo Sapiens
MLLLVTSLLLCELPHPAFLLIPEKSDLRTVAPASSLNVRFDSRTMNLSWDCQENTTFSKCFLTDKKNRVVEPRMEFPSCCPDRTIAHQPA

SEQ ID NO: 3598 - protein, 267 aa, Homo Sapiens
MNCTWARGPTAPRDVQYFLYIRNSKRRREIRCPYYIQDSGTHVGCHLDNLSGLTSRNYFLVNGTSREIGIQFFDSLLDTKKIERFNPPSNVTVRCNTTHCLVRWKQPRTYQKLSYLDFQYQLDVHRKNTQPGTENLLINVSGDLENRYNFPSSEPRAKHSVKIRAADVRILNWSSWSEAIEFGSDDGNLGSVYIYVLLIVGTLVCGIVLGFLFKRFLRIQRLFPPVPQIKDKLNDNHEVEDEIIWEEFTPEEGKGYREEVLTVKEIT

SEQ ID NO: 3599 - protein, 155 aa, Homo Sapiens
MAGPATQSPMKLMALQLLLWHSALWTVQEATPLGPASSLPQSFLLKCLEQVRKIQGDGAALQEKLAGCLSQLHSGLFLYQGLLQALEGISPELGPTLDTLQLDVADFATTIWQQMEELGMAPALQPTQGAMPAFASAFQRRAGGVLVASHLQSFL

SEQ ID NO: 3600 - protein, 204 aa, Homo Sapiens
MAGPATQSPMKLMALQLLLWHSALWTVQEATPLGPASSLPQSFLLKCLEQVRKIQGDGAALQEKLCATYKLCHPEELVLLGHSLGIPWAPLSSCPSQALQLAGCLSQLHSGLFLYQGLLQALEGISPELGPTLDTLQLDVADFATTIWQQMEELGMAPALQPTQGAMPAFASAFQRRAGGVLVASHLQSFLEVSYRVLRHLAQP

SEQ ID NO: 3601 - protein, 171 aa, Homo Sapiens
MAGPATQSPMKLMALQLLLWHSALWTVQEATPLGPASSLPQSFLLKCLEQVRKIQGDGAALQEKLVSEAGCLSQLHSGLFLYQGLLQALEGISPELGPTLDTLQLDVADFATTIWQQMEELGMAPALQPTQGAMPAFASAFQRRAGGVLVASHLQSFLEVSYRVLRHLAQP

SEQ ID NO: 3602 - protein, 207 aa, Homo Sapiens
MAGPATQSPMKLMALQLLLWHSALWTVQEATPLGPASSLPQSFLLKCLEQVRKIQGDGAALQEKLVSECATYKLCHPEELVLLGHSLGIPWAPLSSCPSQALQLAGCLSQLHSGLFLYQGLLQALEGISPELGPTLDTLQLDVADFATTIWQQMEELGMAPALQPTQGAMPAFASAFQRRAGGVLVASHLQSFLEVSYRVLRHLAQP

SEQ ID NO: 3603 - protein, 57 aa, Homo Sapiens
MAGPATQSPMKLMVCHLQAVPPRGAGAARTLSGHPLGSPEQLPQPGPAAGRLLEPTP

SEQ ID NO: 3604 - protein, 164 aa, Homo Sapiens
MSPEPALSPALQLLLWHSALWTVQEATPLGPASSLPQSFLLKCLEQVRKIQGDGAALQEKLAGCLSQLHSGLFLYQGLLQALEGISPELGPTLDTLQLDVADFATTIWQQMEELGMAPALQPTQGAMPAFASAFQRRAGGVLVASHLQSFLEVSYRVLRHLAQP

SEQ ID NO: 3605 - protein, 200 aa, Homo Sapiens
MSPEPALSPALQLLLWHSALWTVQEATPLGPASSLPQSFLLKCLEQVRKIQGDGAALQEKLCATYKLCHPEELVLLGHSLGIPWAPLSSCPSQALQLAGCLSQLHSGLFLYQGLLQALEGISPELGPTLDTLQLDVADFATTIWQQMEELGMAPALQPTQGAMPAFASAFQRRAGGVLVASHLQSFLEVSYRVLRHLAQP

SEQ ID NO: 3606 - protein, 14 aa, Homo Sapiens
MMMVRRGLLAWISR

SEQ ID NO: 3607 - protein, 53 aa, Homo Sapiens
MMMVRRGLLAWISRVVVLLVLLCCAISVLYMLACTPKGDEEQLALPRANSPTG

SEQ ID NO: 3608 - protein, 96 aa, Homo Sapiens
MMMVRRGLLAWISRVVVLLVLLCCAISVLYMLACTPKGDEEQLALPRANSPTGKEGYQAVLQEWEEQHRNYVSSLKRQIAQLKEELQERSEQLRNG

SEQ ID NO: 3609 - protein, 104 aa, Homo Sapiens
MMMVRRGLLAWISRVVVLLVLLCCAISVLYMLACTPKGDEEQLALPRANSPTGKEGYQAVLQEWEEQHRNYVSSLKRQIAQLKEELQERSEQLRNGQYQASDAA

SEQ ID NO: 3610 - protein, 532 aa, Homo Sapiens
MMMVRRGLLAWISRVVVLLVLLCCAISVLYMLACTPKGDEEQLALPRANSPTGKEGYQAVLQEWEEQHRNYVSSLKRQIAQLKEELQERSEQLRNGQYQASDAAGLGLDRSPPEKTQADLLAFLHSQVDKAEVNAGVKLATEYAAVPFDSFTLQKVYQLETGLTRHPEEKPVRKDKRDELVEAIESALETLNSPAENSPNHRPYTASDFIEGIYRTERDKGTLYELTFKGDHKHEFKRLILFRPFGPIMKVKNEKLNMANTLINVIVPLAKRVDKFRQFMQNFREMCIEQDGRVHLTVVYFGKEEINEVKGILENTSKAANFRNFTFIQLNGEFSRGKGLDVGARFWKGSNVLLFFCDVDIYFTSEFLNTCRLNTQPGKKVFYPVLFSQYNPGIIYGHHDAVPPLEQQLVIKKETGFWRDFGFGMTCQYRSDFINIGGFDLDIKGWGGEDVHLYRKYLHSNLIVVRTPVRGLFHLWHEKRCMDELTPEQYKMCMQSKAMNEASHGQLGMLVFRHEIEAHLRKQKQKTSSKKT

SEQ ID NO: 3611 - protein, 297 aa, Homo Sapiens
MMMVRRGLLAWISRVVVLLVLLCCAISVLYMLACTPKGDEEQLALPRANSPTGKEGYQAVLQEWEEQHRNYVSSLKRQIAQLKEELQERSEQLRNGQYQASDAAGLGLDRSPPEKTQADLLAFLHSQVDKAEVNAGVKLATEYAAVPFDSFTLQKVYQLETGLTRHPEEKPVRKDKRDELVEAIESALETLNSPAENSPNHRPYTASDFIEGIYRTERDKGTLYELTFKGDHKHEFKRLILFRPFGPIMKVKNEKLNMANTLINVIVPLAKRVDKFRQFMQNFRPADEVFRCVPLSP

SEQ ID NO: 3612 - protein, 297 aa, Homo Sapiens; identical to SEQ ID NO: 3611

SEQ ID NO: 3613 - protein, 532 aa, Homo Sapiens; identical to SEQ ID NO: 3610

SEQ ID NO: 3614 - protein, 532 aa, Homo Sapiens; identical to SEQ ID NO: 3610

SEQ ID NO: 3615 - protein, 217 aa, Homo Sapiens
MAPGSRTSLLLAFALLCLPWLQEAGAVQTVPLSRLFDHAMLQAHRAHQLAIDTYQEFEETYIPKDQKYSFLHDSQTSFCFSDSIPTPSNMEETQQKSNLELLRISLLLIESWLEPVRFLRSMFANNLVYDTSDSDDYHLLKDLEEGIQTLMGRLEDGSRRTGQILKQTYSKFDTNSHNHDALLKNYGLLYCFRKDMDKVETFLRMVQCRSVEGSCGF

SEQ ID NO: 3616 - protein, 256 aa, Homo Sapiens
MAPGSRTSLLLAFALLCLPWLQEAGAVQTVPLSRLFDHAMLQAHRAHQLAIDTYQEFEETYIPKDQKYSFLHDSQTSFCFSDSIPTPSNMEETQQKSNLELLRISLLLIESWLEPVRFLRSMFANNLVYDTSDSDDYHLLKDLEEGIQTLMGVRVAPGVTNPGTPLASRAGGEKYCCPLFSSKALTQENSPYSSFRLVNPPGLSLHPEGEGGKWINERGREQCPSAWPLLLFLHFAEAGRRQPPDWADPQADLQQV

SEQ ID NO: 3617 - protein, 122 aa, Homo Sapiens
MAPGSRTSLLLAFALLCLPWLQEAGAVQTVPLSRLFDHAMLQAHRAHQLAIDTYQEFRLEDGSRRTGQILKQTYSKFDTNSHNHDALLKNYGLLYCFRKDMDKVETFLRMVQCRSVEGSCGF

SEQ ID NO: 3618 - protein, 128 aa, Homo Sapiens
MEETQQKSNLELLRISLLLIESWLEPVRFLRSMFANNLVYDTSDSDDYHLLKDLEEGIQTLMGRLEDGSRRTGQILKQTYSKFDTNSHNHDALLKNYGLLYCFRKDMDKVETFLRMVQCRSVEGSCGF

SEQ ID NO: 3619 - protein, 160 aa, Homo Sapiens
MAAGSRTSLLLAFALLCLPWLQEADSIPTPSNMEETQQKSNLELLRISLLLIESWLEPVRFLRSMFANNLVYDTSDSDDYHLLKDLEEGIQTLMGRLEDGSRRTGQILKQTYSKFDTNSHNHDALLKNYGLLYCFRKDMDKVETFLRMVQCRSVEGSCGF

SEQ ID NO: 3620 - protein, 217 aa, Homo Sapiens
MAAGSRTSLLLAFALLCLPWLQEAGAVQTVPLSRLFDHAMLQAHRAHQLAIDTYQEFEETYIPKDQKYSFLHDSQTSFCFSDSIPTPSNMEETQQKSNLELLRISLLLIESWLEPVRFLRSMFANNLVYDTSDSDDYHLLKDLEEGIQTLMGRLEDGSRRTGQILKQTYSKFDTNSHNHDALLKNYGLLYCFRKDMDKVETFLRMVQCRSVEGSCGF

SEQ ID NO: 3621 - protein, 167 aa, Homo Sapiens
MAAGSRTSLLLAFALLCLPWLQEAGAVQTVPLSRLFDHAMLQAHRAHQLAIDTYQEFEETYIPKDQKYSFLHDSQTSFCFSDSIPTPSNMEETQQKSNLELLRISLLLIESWLEPVRFLRSMFANNLVYDTSDSDDYHLLKDLEEGIQTLMGVRVAPGVANPGTPLA

SEQ ID NO: 3622 - protein, 122 aa, Homo Sapiens
MAAGSRTSLLLAFALLCLPWLQEAGAVQTVPLSRLFDHAMLQAHRAHQLAIDTYQEFRLEDGSRRTGQILKQTYSKFDTNSHNHDALLKNYGLLYCFRKDMDKVETFLRMVQCRSVEGSCGF

SEQ ID NO: 3623 - protein, 128 aa, Homo Sapiens; identical to SEQ ID NO: 3618

SEQ ID NO: 3624 - protein, 139 aa, Homo Sapiens
MAADSIPTSSNMEETQQKSNLELLHISLLLIESRLEPVRFLRSTFTNNLVYDTSDSDDYHLLKDLEEGIQMLMGRLEDGSHLTGQTLKQTYSKFDTNSHNHDALLKNYGLLHCFRKDMDKVETFLRMVQCRSVEGSCGF

SEQ ID NO: 3625 - protein, 178 aa, Homo Sapiens
MAADSIPTSSNMEETQQKSNLELLHISLLLIESRLEPVRFLRSTFTNNLVYDTSDSDDYHLLKDLEEGIQMLMGVRVAPGVPNPGSPLASRAGGEKHCCPLFSSQALTQENSPYSSFPLVNPPGLSLHPEGEGGKWINERGREQCPSAWSLLLLLHFAEAGRRQPPDWADPQADLQQV

SEQ ID NO: 3626 - protein, 160 aa, Homo Sapiens
MAAGSRTSLLLAFALLCLPWLQEADSIPTSSNMEETQQKSNLELLHISLLLIESRLEPVRFLRSTFTNNLVYDTSDSDDYHLLKDLEEGIQMLMGRLEDGSHLTGQTLKQTYSKFDTNSHNHDALLKNYGLLHCFRKDMDKVETFLRMVQCRSVEGSCGF

SEQ ID NO: 3627 - protein, 222 aa, Homo Sapiens
MAAGSRTSLLLAFALLCLPWLQEAGAVQTVPLSRLFKEAMLQAHRAHQLAIDTYQEFISSWGMEAYITKEQKYSFLHDSQTSFCFSDSIPTSSNMEETQQKSNLELLHISLLLIESRLEPVRFLRSTFTNNLVYDTSDSDDYHLLKDLEEGIQMLMGRLEDGSHLTGQTLKQTYSKFDTNSHNHDALLKNYGLLHCFRKDMDKVETFLRMVQCRSVEGSCGF

SEQ ID NO: 3628 - protein, 217 aa, Homo Sapiens [sequence omitted]

SEQ ID NO: 3629 - protein, 128 aa, Homo Sapiens
MEETQQKSNLELLHISLLLIESRLEPVRFLRSTFTNNLVYDTSDSDDYHLLKDLEEGIQMLMGRLEDGSHLTGQTLKQTYSKFDTNSHNHDALLKNYGLLHCFRKDMDKVETFLRMVQCRSVEGSCGF

SEQ ID NO: 3630 - protein, 167 aa, Homo Sapiens
MEETQQKSNLELLHISLLLIESRLEPVRFLRSTFTNNLVYDTSDSDDYHLLKDLEEGIQMLMGVRVAPGVPNPGSPLASRAGGEKHCCPLFSSQALTQENSPYSSFPLVNPPGLSLHPEGEGGKWINERGREQCPSAWSLLLLLHFAEAGRRQPPDWADPQADLQQV

SEQ ID NO: 3631 - protein, 76 aa, Homo Sapiens
KMESSISSSSEEQIRRMNENSHVQVPFQQLNQLAAYPYAVWYYPQIMQYVPFPPFSDISNPTAHENYEKNNVMLQW

SEQ ID NO: 3632 - protein, 185 aa, Homo Sapiens
MRLLILTCLVAVALARPKLPLRYPERLQNPSESSEPIPLESREEYMNGMNRQRNILREKQTDEIKDTRNESTQNCVVAEPEKMESSISSSSEEMSLSKCAEQFCRLNEYNQLQLQAAHAQEQIRRMNENSHVQVPFQQLNQLAAYPYAVWYYPQIMQYVPFPPFSDISNPTAHENYEKNNVMLQW

SEQ ID NO: 3633 - protein, 177 aa, Homo Sapiens
MRLLILTCLVAVALARPKLPLRYPERLQNPSESSEPIPLESREEYMNGMNRQRNILREKQTDEIKDTRNESTQNCVVAEPEKMESSISSSSEEQFCRLNEYNQLQLQAAHAQEQIRRMNENSHVQVPFQQLNQLAAYPYAVWYYPQIMQYVPFPPFSDISNPTAHENYEKNNVMLQW

SEQ ID NO: 3634 - protein, 169 aa, Homo Sapiens
MRLLILTCLVAVALARPKLPLRYPERLQNPSESSEPIPLESREEYMNGMNRQRNILREKQTDEIKNCVVAEPEKMESSISSSSEEQFCRLNEYNQLQLQAAHAQEQIRRMNENSHVQVPFQQLNQLAAYPYAVWYYPQIMQYVPFPPFSDISNPTAHENYEKNNVMLQW

SEQ ID NO: 3635 - protein, 176 aa, Homo Sapiens
MRLLILTCLVAVALARPKLPLRYPERLQNPSESSEPIPLESREEYMNGMNRRNILREKQTDEIKDTRNESTQNCVVAEPEKMESSISSSSEEQFCRLNEYNQLQLQAAHAQEQIRRMNENSHVQVPFQQLNQLAAYPYAVWYYPQIMQYVPFPPFSDISNPTAHENYEKNNVMLQW

SEQ ID NO: 3636 - protein, 55 aa, Homo Sapiens
QRNILREKQTDEIKNCVVAEPEKMESSISSSSEEMSLSKCAEQFCRLNEYNQLQL

SEQ ID NO: 3637 - protein, 226 aa, Homo Sapiens
MKVLILACLVALALARETIESLSSSEESITEYKQKVEKVKHEDQQQGEDEHQDKIYPSFQPQPLIYPFVEPIPYGFLPQNILPLAQPAVVLPVPQPEIMEVPKAKDTVYTKGRVMPVLKSPTIPFFDPQIPKLTDLENLHLPLPLLQPLMQQVPQPIPQTLALPPQPLWSVPQPKVLPIPQQVVPYPQRAVPVQALLLNQELLLNPTHQIYPVTQPLAPVHNPISV

SEQ ID NO: 3638 - protein, 182 aa, Homo Sapiens
MKSFLLVVNALALTLPFLAVEVQNQKQPACHENDERPFYQKTAPYVPMYYVPNSYPYYGTNLYQRRPAIAINNPYVPRTYYANPAVVRPHAQIPQRQYLPNSHPPTVVRRPNLHPSFIAIPPKKIQDKIIIPTINTIATVEPTPAPATEPTVDSVVTPEAFSESIITSTPETTTVAVTPPTA

SEQ ID NO: 3639 - protein, 141 aa, Homo Sapiens
MAQYLSTLLLLLATLAVALAWSPKEEDRIIPGGIYNADLNDEWVQRALHFAISEYNKATKDDYYRRPLRVLRARQQTVGGVNYFFDVEVGRTICTKSQPNLDTCAFHEQPELQKKQLCSFEIYEVPWENRRSLVKSRCQES

SEQ ID NO: 3640 - protein, 141 aa, Homo Sapiens; identical to SEQ ID NO: 3639

SEQ ID NO: 3641 - protein, 103 aa, Homo Sapiens
MMAEPWQALQLLLAILLTLMALPYQARKKTFLSVHEVMAVENYAKDSLQWITDQYNKESDDKYHFRIFRVLKVQRQQVNCFFSVFAVPWFEQYKILNKSCSSD

SEQ ID NO: 3642 - protein, 138 aa, Homo Sapiens
MMAEPWQALQLLLAILLTLMALPYQARKKTFLSVHEVMAVENYAKDSLQWITDQYNKESDDKYHFRIFRVLKVQRQVTDHLEYHLNVEMQWTTCQKPETTNCVPQERELHKQVNCFFSVFAVPWFEQYKILNKSCSSD

SEQ ID NO: 3643 - protein, 141 aa, Homo Sapiens
MAWPLCTLLLLLATQAVALAWSPQEEDRIIEGGIYDADLNDERVQRALHFVISEYNKATEDEYYRRLLRVLRAREQIVGGVNYFFDIEVGRTICTKSQPNLDTCAFHEQPELQKKQLCSFQIYEVPWEDRMSLVNSRCQEA

SEQ ID NO: 3644 - protein, 146 aa, Homo Sapiens
MAGPLRAPLLLLAILAVALAVSPAAGSSPGKPPRLVGGPMDASVEEEGVRRALDFAVGEYNKASNDMYHSRALQVVRARKQIVAGVNYFLDVELGRTTCTKTQPNLDNCPFHDQPHLKRKAFCSFQIYAVPWQGTMTLSKSTCQDA

SEQ ID NO: 3645 - protein, 146 aa, Homo Sapiens; identical to SEQ ID NO: 3644

SEQ ID NO: 3646 - protein, 146 aa, Homo Sapiens; identical to SEQ ID NO: 3644

SEQ ID NO: 3647 - protein, 141 aa, Homo Sapiens
MARPLCTLLLLMATLAGALASSSKEENRIIPGGIYDADLNDEWVQRALHFAISEYNKATEDEYYRRPLQVLRAREQTFGGVNYFFDVEVGRTICTKSQPNLDTCAFHEQPELQKKQLCSFEIYEVPWEDRMSLVNSRCQEA

SEQ ID NO: 3648 - protein, 142 aa, Homo Sapiens
MMWPMHTPLLLLTALMVAVAGSASAQSRTLAGGIHATDLNDKSVQCALDFAISEYNKVINKDEYYSRPLQVMAAYQQIVGGVNYYFNVKFGRTTCTKSQPNLDNCPFNDQPKLKEEEFCSFQINEVPWEDKISILNYKCRKV

SEQ ID NO: 3649 - protein, 149 aa, Homo Sapiens
MARSNLPLALGLALVAFCLLALPRDARARPQERMVGELRDLSPDDPQVQKAAQAAVASYNMGSNSIYYFRDTHIIKAQSQLVAGIKYFLTMEMGSTDCRKTRVTGDHVDLTTCPLAAGAQQEKLRCDFEVLVVPWQNSSQLLKHNCVQM

SEQ ID NO: 3650 - protein, 145 aa, Homo Sapiens
MRAAGTLLAFCCLVLSTTGGPSPDTCSQDLNSRVKPGFPKTIKTNDPGVLQAARYSVEKFNNCTNDMFLFKESRITRALVQIVKGLKYMLEVEIGRTTCKKNQHLRLDDCDFQTNHTLKQTLSCYSEVWVVPWLQHFEVPVLRCH

SEQ ID NO: 3651 - protein, 134 aa, Homo Sapiens
MPRCRWLSLILLTIPLALVARKDPKKNETGVLRKLKPVNASNANVKQCLWFAMQEYNKESEDKYVFLVVKTLQAQLQVTNLLEYLIDVEIARSDCRKPLSTNEICAIQENSKLKRKLSCSFLVGALPWNGEFTV

SEQ ID NO: 3652 - protein, 142 aa, Homo Sapiens
MPRCRWLSLILLTIPLALVARKDPKKNETGVLRKLKPVNASNANVKQCLWFAMQEYNKESEDKYVFLVVKTLQAQLQVTNLLEYLIDVEIARSDCRKPLSTNEICAIQENSKLKRKLSCSFLVGALPWNGEFTVMEKKCEDA

SEQ ID NO: 3653 - protein, 159 aa, Homo Sapiens
MSSPQRRKAMPWALSLLLMGFQLLVTYAWCSEEEMGGNNKIVQDPMFLATVEFALNTFNVQSKEEHAYRLLRVLSSWREDSMDRKWRGKMVFSMNLQLRQTVCRKFEDDIDNCPFQESLELNNVRQGISFPQVHSCGCCMGCGVGTGAADKAIPRDKGK

SEQ ID NO: 3654 - protein, 147 aa, Homo Sapiens
MLGLPWKGGLSWALLLLLLGSQILLIYAWHFHEQRDCDEHNVMARYLPATVEFAVHTFNQQSKDYYAYRLGHILNSWKEQVESKTVFSMELLLGRTRCGKFEDDIDNCHFQESTELNNTFTCFFTISTRPWMTQFSLLNKTCLEGFH

SEQ ID NO: 3655 - protein, 145 aa, Homo Sapiens
MGIGCWRNPLLLLIALVLSAKLGHFQRWEGFQQKLMSKKNMNSTLNFFIQSYNNASNDTYLYRVQRLIRSQMQLTTGVEYIVTVKIGWTKCKRNDTSNSSCPLQSKKLRKSLICESLIYTMPWINYFQLWNNSCLEAEHVGRNLR

SEQ ID NO: 3656 - protein, 145 aa, Homo Sapiens; identical to SEQ ID NO: 3655

SEQ ID NO: 3657 - protein, 37 aa, Homo Sapiens
MNSTLNFFIQSYNNASNDTYLYRVQRLIRSQMQQVHC

SEQ ID NO: 3658 - protein, 242 aa, Homo Sapiens
MLRLLRLALAFYGRTADPAERQGPQQQGLPQGDTQLTTVQGVVTSFCGDYGMIDESIYFSSDVVTGNVPLKVGQKVNVVVEEDKPHYGLRAIKVDVVPRHLYGAGPSDSGTRVLIGCVTSINEDNIYISNSIYFSIAIVSEDFVPYKGDLLEVEYSTEPGISNIKATSVKPIRCIHTEEVCITSVHGRNGVIDYTIFFTLDSVKLPDGYVPQVDDIVNVVMVESIQFCFIWRAISITPVHKS

SEQ ID NO: 3659 - protein, 264 aa, Homo Sapiens
MLRLLRLALAFYGRTADPAERQGPQQQGLPQGDTQLTTVQGVVTSFCGDYGMIDESIYFSSDVVTGNVPLKVGQKVNVVVEEDKPHYGLRAIKVDVVPRHLYGAGPSDSGTRVLIGCVTSINEDNIYISNSIYFSIAIVSEDFVPYKGDLLEVEYSTEPGISNIKATSVKPIRCIHTEEVCITSVHGRNGVIDYTIFFTLDSVKLPDGYVPQVDDIVNVVMVESIQFCFIWRAISITPVHKSSSGFQDDGGLGRPKRERRSQSI

SEQ ID NO: 3660 - protein, 385 aa, Homo Sapiens
MSRPQLRRWRLVSSPPSGVPGLALLALLALLALRLAAGTDCPCPEPELCRPIRHHPDFEVFVFDVGQKTWKSYDWSQITTVATFGKYDSELMCYAHSKGARVVLKGDVSLKDIIDPAFRASWIAQKLNLAKTQYMDGINIDIEQEVNCLSPEYDALTALVKETTDSFHREIEGSQVTFDVAWSPKNIDRRCYNYTGIADACDFLFVMSYDEQSQIWSECIAAANAPYNQTLTGYNDYIKMSINPKKLVMGVPWYGYDYTCLNLSEDHVCTIAKVPFRGAPCSDAAGRQVPYKTIMKQINSSISGNLWDKDQRAPYYNYKDPAGHFHQVWYDNPQSISLKATYIQNYRLRGIGMWNANCLDYSGDAVAKQQTEEMWEVLKPKLLQR

SEQ ID NO: 3661 - protein, 77 aa, Homo Sapiens
MSRPQLRRWRLVSSPPSGVPGLALLALLALLALRLAAGTDCPCPEPELCRPIRHHPDFEVSAFLCSSRSGLQGTKRS

SEQ ID NO: 3662 - protein, 77 aa, Homo Sapiens; identical to SEQ ID NO: 3661

SEQ ID NO: 3663 - protein, 349 aa, Homo Sapiens
MTAASMGPVRVAFVVLLALCSRPAVGQNCSGPCRCPDEPAPRCPAGVSLVLDGCGCCRVCAKQLGELCTERDPCDPHKGLFCHFGSPANRKIGVCTAKDGAPCIFGGTVYRSGESFQSSCKYQCTCLDGAVGCMPLCSMDVRLPSPDCPFPRRVKLPGKCCEEWVCDEPKDQTVVGPALAAYRLEDTFGPDPTMIRANCLVQTTEWSACSKTCGMGISTRVTNDNASCRLEKQSRLCMVRPCEADLEENIKKGKKCIRTPKISKPIKFELSGCTSMKTYRAKFCGVCTDGRCCTPHRTTTLPVEFKCPDGEVMKKNMMFIKTCACHYNCPGDNDIFESLYYRKMYGDMA

SEQ ID NO: 3664 - protein, 243 aa, Homo Sapiens
MRPQGPAASPQRLRGLLLLLLLQLPAPSSASEIPKGKQKAQLRQREVVDLYNGMCLQGPAGVPGRDGSPGANGIPGTPGIPGRDGFKGEKGECLRESFEESWTPNYKQCSWSSLNYGIDLGKIAECTFTKMRSNSALRVLFSGSLRLKCRNACCQRWYFTFNGAECSGPLPIEAIIYLDQGSPEMNSTINIHRTSSVEGLCEGIGAGLVDVAIWVGTCSDYPKGDASTGWNSVSRIIIEELPK

SEQ ID NO: 3665 - protein, 147 aa, Homo Sapiens
MRPQGPAASPQRLRGLLLLLLLQLPAPSSASEIPKGKQKAQLRQREVVDLYNGMCLQGPAGVPGRDGSPGANGIPGTPGIPGRDGFKGEKGECLRESFEESWTPNYKQCSWSSLNYGIDLGKIAVSLNYFKIEARFKGFHILVLIFR

SEQ ID NO: 3666 - protein, 113 aa, Homo Sapiens
MRSNSALRVLFSGSLRLKCRNACCQRWYFTFNGAECSGPLPIEAIIYLDQGSPEMNSTINIHRTSSVEGLCEGIGAGLVDVAIWVGTCSDYPKGDASTGWNSVSRIIIEELPK

SEQ ID NO: 3667 - protein, 229 aa, Homo Sapiens
MWPPGRSITVKLREKTVSRKLEMNGPSAFQGLICGKYNGMCLQGPAGVPGRDGSPGANGIPGTPGIPGRDGFKGEKGECLRESFEESWTPNYKQCSWSSLNYGIDLGKIAECTFTKMRSNSALRVLFSGSLRLKCRNACCQRWYFTFNGAECSGPLPIEAIIYLDQGSPEMNSTINIHRTSSVEGLCEGIGAGLVDVAIWVGTCSDYPKGDASTGWNSVSRIIIEELPK

SEQ ID NO: 3668 - protein, 174 aa, Homo Sapiens
MACLGFQRHKAQLNLATRTWPCTLLFFLLFIPVFCKAMHVAQPAVVLASSRGIASFVCEYASPGKATEVRVTVLRQADSQVTEVCAATYMMGNELTFLDDSICTGTSSGNQVNLTIQGLRAMDTGLYICKVELMYPPPYYLGIGNGTQIYVIAKEKKPSYNRGLCENAPNRARM

SEQ ID NO: 3669 - protein, 223 aa, Homo Sapiens
MACLGFQRHKAQLNLATRTWPCTLLFFLLFIPVFCKAMHVAQPAVVLASSRGIASFVCEYASPGKATEVRVTVLRQADSQVTEVCAATYMMGNELTFLDDSICTGTSSGNQVNLTIQGLRAMDTGLYICKVELMYPPPYYLGIGNGTQIYVIDPEPCPDSDFLLWILAAVSSGLFFYSFLLTAVSLSKMLKKRSPLTTGVYVKMPPTEPECEKQFQPYFIPIN

SEQ ID NO: 3670 - protein, 79 aa, Homo Sapiens
MACLGFQRHKAQLNLATRTWPCTLLFFLLFIPVFCKAMHVAQPAVVLASSRGIASFVSKEKKPSYNRGLCENAPNRARM

SEQ ID NO: 3671 - protein, 137 aa, Homo Sapiens
MHVAQPAVVLASSRGIASFVCEYASPGKATEVRVTVLRQADSQVTEVCAATYMMGNELTFLDDSICTGTSSGNQVNLTIQGLRAMDTGLYICKVELMYPPPYYLGIGNGTQIYVIAKEKKPSYNRGLCENAPNRARM

SEQ ID NO: 3672 - protein, 53 aa, Homo Sapiens
MIRNWLTIFILFPLKLVEKCESSVSLTVPPVVKLENGSSTNVSLTLRLWCLLE

SEQ ID NO: 3673 - protein, 75 aa, Homo Sapiens
MIRNWLTIFILFPLKLVEKCESSVSLTVPPVVKLENGSSTNVSLTLRPPLNATLVITFEITFRSKNITILELPDE

SEQ ID NO: 3674 - protein, 122 aa, Homo Sapiens
MIRNWLTIFILFPLKLVEKCESSVSLTVPPVVKLENGSSTNVSLTLRPPLNATLVITFEITFRSKNITILELPDELVEAGGEECRDEISSHEAHQDGLQISSEPPRKQTGVKHDQSPACGNL

SEQ ID NO: 3675 - protein, 163 aa, Homo Sapiens
MIRNWLTIFILFPLKLVEKCESSVSLTVPPVVKLENGSSTNVSLTLRPPLNATLVITFEITFRSKNITILELPDEVVVPPGVTNSSFQVTSQNVGQLTVYLHGNHSNQTGPRIRFLVIRSSAISIINQVIGWIYFVAWSISFYPQVIMNWRRKSVIGLSFDFV

SEQ ID NO: 3676 - protein, 367 aa, Homo Sapiens
MIRNWLTIFILFPLKLVEKCESSVSLTVPPVVKLENGSSTNVSLTLRPPLNATLVITFEITFRSKNITILELPDEVVVPPGVTNSSFQVTSQNVGQLTVYLHGNHSNQTGPRIRFLVIRSSAISIINQVIGWIYFVAWSISFYPQVIMNWRRKSVIGLSFDFVALNLTGFVAYSVFNIGLLWVPYIKEQFLLKYPNGVNPVNSNDVFFSLHAVVLTLIIIVQCCLYERGGQRVSWPAIGFLVLAWLFAFVTMIVAAVGVTTWLQFLFCFSYIKLAVTLVKYFPQAYMNFYYKSTEGWSIGNVLLDFTGGSFSLLQMFLQSYNNDQWTLIFGDPTKFGLGVFSIVFDVVFFIQHFCLYRKRPGYDQLN

SEQ ID NO: 3677 - protein, 400 aa, Homo Sapiens
MIRNWLTIFILFPLKLVEKCESSVSLTVPPVVKLENGSSTNVSLTLRPPLNATLVITFEITFRSKNITILELPDEVVVPPGVTNSSFQVTSQNVGQLTVYLHGNHSNQTGPRIRFLVIRSSAISIINQVIGWIYFVAWSISFYPQVIMNWRRKSVIGLSFDFVALNLTGFVAYSVFNIGLLWVPYIKEQFLLKYPNGVNPVNSNDVFFSLHAVVLTLIIIVQCCLYERGGQRVSWPAIGFLVLAWLFAFVTMIVAAVGVTTWLQFLFCFSYIKLAVTLVKYFPQAYMNFYYKSTEGWSIGNVLLDFTGGSFSLLQMFLQSYNNDQWTLIFGDPTKFGLGVFSIVFDVVFFIQHFCLYRKRPGLQAARTGSGSRLRQDWAPSLQPKALPQTTSVSASSLKG

SEQ ID NO: 3678 - protein, 20 aa, Homo Sapiens
MNWRRKSVIGLSFDFVALNL

SEQ ID NO: 3679 - protein, 28 aa, Homo Sapiens
MNWRRKSVIGLSFDFVALNLTGFVAYSV

SEQ ID NO: 3680 - protein, 263 aa, Homo Sapiens
MASLWLLSCFSLVGAAFGCGVPAIHPVLSGLSRIVNGEDAVPGSWPWQVSLQDKTGFHFCGGSLISEDWVVTAAHCGVRTSDVVVAGEFDQGSDEENIQVLKIAKVFKNPKFSILTVNNDITLLKLATPARFSQTVSAVCLPSADDDFPAGTLCATTGWGKTKYNANKTPDKLQQAALPLLSNAECKKSWGRRITDVMICAGASGVSSCMGDSGGPLVCQKDGAWTLVGIVSWGSDTCSTSSPGVYARVTKLIPWVQKILAAN

SEQ ID NO: 3681 - protein, 182 aa, Homo Sapiens
MCQGGPELASVDWGRTGRAARRQVRPRWVWGLSPYSPHSPPGCGVPAIHPVLSGLSRIVNGEDAVPGSWPWQVSLQDKTGFHFCGGSLISEDWVVTAAHCGVRTSDVVVAGEFDQGSDEENIQVLKIAKVFKNPKFSILTVNNDITLLKLATPARFSQTVSAVCLPSADDDFPAGTLCATTG

SEQ ID NO: 3682 - protein, 16 aa, Homo Sapiens
  misc_feature (1)..(1): Xaa can be any naturally occurring amino acid
XVTKLIPWVQKILAAN

SEQ ID NO: 3683 - protein, 114 aa, Homo Sapiens
DKTGFHFCGGSLISEDWVVTAAHCGVRTSDVVVAGEFDQGSDEENIQVLKIAKVFKNPKFSILTVNNDITLLKLATPARFSQTVSAVCLPSADDDFPAGTLCATTGWGKTKYNG

SEQ ID NO: 3684 - protein, 168 aa, Homo Sapiens
EFDQGSDEENIQVLKIAKVFKNPKFSILTVNNDITLLKLATPARFSQTVSAVCLPSADDDFPAGTLCATTGWGKTKYNANKTPDKLQQAALPLLSNAECKKSWGRRITDVMICAGGDSGGPLVCQKDGAWTLVGIVSWGSRTCSTTTPAVYARVAKLIPWVQKILAAN

SEQ ID NO: 3685 - protein, 263 aa, Homo Sapiens
MAFLWLLSCWALLGTTFGCGVPAIHPVLSGLSRIVNGEDAVPGSWPWQVSLQDKTGFHFCGGSLISEDWVVTAAHCGVRTSDVVVAGEFDQGSDEENIQVLKIAKVFKNPKFSILTVNNDITLLKLATPARFSQTVSAVCLPSADDDFPAGTLCATTGWGKTKYNANKTPDKLQQAALPLLSNAECKKSWGRRITDVMICAGASGVSSCMGDSGGPLVCQKDGAWTLVGIVSWGSRTCSTTTPAVYARVAKLIPWVQKILAAN

SEQ ID NO: 3686 - protein, 137 aa, Homo Sapiens
VAGEFDQGSDEENIQVLKIAKVFKNPKFSILTVNNDITLLKLATPARFSQTVSAVCLPSADDDFPAGTLCATTGWGKTKYNANKTPDKLQQAALPLLSNAECKKSWGRRITDVMICAGASGVSSCMVRLALPRPWPG

SEQ ID NO: 3687 - protein, 268 aa, Homo Sapiens [sequence omitted]

SEQ ID NO: 3688 - protein, 69 aa, Homo Sapiens
MLGITVLAALLACATPGPTVWPWERTTWRWKTKKDPCLWVWTPSTSTRDGMPSCCAMILPSSSLQSMWS

SEQ ID NO: 3689 - protein, 190 aa, Homo Sapiens
MLLLSLTLSLVLLGSSWGCGIPAIKPALSFSQRIVNGENAVLGSWPWQVSLQDSSGFHFCGGSLISQSWVVTAAHCNVSPGRHFVVLGEYDRSSNAEPLQVLSVSRAITHPSWNSTTMNNDVTLLKLASPAQYTTRISPVCLASSNEALLSARRETHGCLLVLSPGAPKTAMCAHLLCILELASSAPGST

SEQ ID NO: 3690 - protein, 264 aa, Homo Sapiens
MLLLSLTLSLVLLGSSWGCGIPAIKPALSFSQRIVNGENAVLGSWPWQVSLQDSSGFHFCGGSLISQSWVVTAAHCNVSPGRHFVVLGEYDRSSNAEPLQVLSVSRAITHPSWNSTTMNNDVTLLKLASPAQYTTRISPVCLASSNEALTEGLTCVTTGWGRLSGVGNVTPAHLQQVALPLVTVNQCRQYWGSSITDSMICAGGAGASSCQGDSGGPLVCQKGNTWVLIGIVSWGTKNCNVRAPAVYTRVSKFSTWINQVIAYN

SEQ ID NO: 3691 - protein, 190 aa, Homo Sapiens
MLLLSLTLSLVLLGSSWGQQRLPLLRWFSHQPVLGGHCCPLQCQVLSVSRVSAWAADTEEKWAVQAITHPSWNSTTMNNDVTLLKLASPAQYTTRISPVCLASSNEALTEGLTCVTTGWGRLSGVGNVTPAHLQQVALPLVTVNQCRQYWGSSITDSMICAGGAGASSCQGDSGGPLVCQKGNTWVLIGI

SEQ ID NO: 3692 - protein, 110 aa, Homo Sapiens
MIRAAPPPLFLLLLLLLLLVSWASRGEAAPDQDEIQRLPGLAKQPSFRQYSGYLKGSGSKHLHYWFVESQKDPENSPVVLWLNGGPGCSSLDGLLTEHGPFLVQPDGVTL

SEQ ID NO: 3693 - protein, 480 aa, Homo Sapiens
MIRAAPPPLFLLLLLLLLLVSWASRGEAAPDQDEIQRLPGLAKQPSFRQYSGYLKGSGSKHLHYWFVESQKDPENSPVVLWLNGGPGCSSLDGLLTEHGPFLVQPDGVTLEYNPYSWNLIANVLYLESPAGVGFSYSDDKFYATNDTEVAQSNFEALQDFFRLFPEYKNNKLFLTGESYAGIYIPTLAVLVMQDPSMNLQGLAVGNGLSSYEQNDNSLVYFAYYHGLLGNRLWSSLQTHCCSQNKCNFYDNKDLECVTNLQEVARIVGNSGLNIYNLYAPCAGGVPSHFRYEKDTVVVQDLGNIFTRLPLKRMWHQALLRSGDKVRMDPPCTNTTAASTYLNNPYVRKALNIPEQLPQWDMCNFLVNLQYRRLYRSMNSQYLKLLSSQKYQILLYNGDVDMACNFMGDEWFVDSLNQKMEVQRRPWLVKYGDSGEQIAGFVKEFSHIAFLTIKGAGHMVPTDKPLAAFTMFSRFLNKQPY

SEQ ID NO: 3694 - protein, 480 aa, Homo Sapiens; identical to SEQ ID NO: 3693

SEQ ID NO: 3695 - protein, 480 aa, Homo Sapiens; identical to SEQ ID NO: 3693

SEQ ID NO: 3696 - protein, 82 aa, Homo Sapiens
MTSSPRAPPGEQGRGGAEMIRAAPPPLFLLLLLLLLLVSWASRGEAAPDQDEIQRLPGLAKQPSFRQYSGYLKGSGSKHLHY

SEQ ID NO: 3697 - protein, 481 aa, Homo Sapiens
MTSSPRAPPGEQGRGGAEMIRAAPPPLFLLLLLLLLLVSWASRGEAAPDQDEIQRLPGLAKQPSFRQYSGYLKGSGSKHLHYWFVESQKDPENSPVVLWLNGGPGCSSLDGLLTEHGPFLIANVLYLESPAGVGFSYSDDKFYATNDTEVAQSNFEALQDFFRLFPEYKNNKLFLTGESYAGIYIPTLAVLVMQDPSMNLQGLAVGNGLSSYEQNDNSLVYFAYYHGLLGNRLWSSLQTHCCSQNKCNFYDNKDLECVTNLQEVARIVGNSGLNIYNLYAPCAGGVPSHFRYEKDTVVVQDLGNIFTRLPLKRMWHQALLRSGDKVRMDPPCTNTTAASTYLNNPYVRKALNIPEQLPQWDMCNFLVNLQYRRLYRSMNSQYLKLLSSQKYQILLYNGDVDMACNFMGDEWFVDSLNQKMEVQRRPWLVKYGDSGEQIAGFVKEFSHIAFLTIKGAGHMVPTDKPLAAFTMFSRFLNKQPY

SEQ ID NO: 3698 - protein, 498 aa, Homo Sapiens
MTSSPRAPPGEQGRGGAEMIRAAPPPLFLLLLLLLLLVSWASRGEAAPDQDEIQRLPGLAKQPSFRQYSGYLKGSGSKHLHYWFVESQKDPENSPVVLWLNGGPGCSSLDGLLTEHGPFLVQPDGVTLEYNPYSWNLIANVLYLESPAGVGFSYSDDKFYATNDTEVAQSNFEALQDFFRLFPEYKNNKLFLTGESYAGIYIPTLAVLVMQDPSMNLQGLAVGNGLSSYEQNDNSLVYFAYYHGLLGNRLWSSLQTHCCSQNKCNFYDNKDLECVTNLQEVARIVGNSGLNIYNLYAPCAGGVPSHFRYEKDTVVVQDLGNIFTRLPLKRMWHQALLRSGDKVRMDPPCTNTTAASTYLNNPYVRKALNIPEQLPQWDMCNFLVNLQYRRLYRSMNSQYLKLLSSQKYQILLYNGDVDMACNFMGDEWFVDSLNQKMEVQRRPWLVKYGDSGEQIAGFVKEFSHIAFLTIKGAGHMVPTDKPLAAFTMFSRFLNKQPY

SEQ ID NO: 3699 - protein, 231 aa, Homo Sapiens
MTSSPRAPPGEQGRGGAEMIRAAPPPLFLLLLLLLLLVSWASRGEAAPDQDEIQRLPGLAKQPSFRQYSGYLKGSGSKHLHYWFVESQKDPENSPVVLWLNGGPGCSSLDGLLTEHGPFLVQPDGVTLEYNPYSWNLIANVLYLESPAGVGFSYSDDKFYATNDTEVAQSNFEALQDFFRLFPEYKNNKLFLTGESYAGIYIPTLAVLVMQDPSMNLQVQGAGCGQWTLLL

SEQ ID NO: 3700 - protein, 202 aa, Homo Sapiens
QDFFRLFPEYKNNKLFLTGESYAGIYIPTLAVLVMQDPSMNLQGLAVGNGLSSYEQNDNSLVYFAYYHGLLGNRLWSSLQTHCCSQNKCNFYDNKDLECVTNLQEVARIVGNSGLNIYNLYAPCAGGVPSHFRTLLWSRIWATSSLACHSSGCGIRHCCAQGIKCAWTPPAPTQQLLPPTSTTRTCGRPSTSRSSCHNGTCA

SEQ ID NO: 3701 - protein, 21 aa, Homo Sapiens
MWQLWASLCCLLVLANARSRP

SEQ ID NO: 3702 - protein, 32 aa, Homo Sapiens
MWQLWASLCCLLVLANARSRPSFHPLSDELVN

SEQ ID NO: 3703 - protein, 55 aa, Homo Sapiens
MWQLWASLCCLLVLANARSRPSFHPLSDELVNYVNKRNTTWQAGHNFYNVDMSYL

SEQ ID NO: 3704 - protein, 68 aa, Homo Sapiens
MWQLWASLCCLLVLANARSRPSFHPLSDELVNYVNKRNTTWQAGHNFYNVDMSYLKRLCGTFLGGPKP

SEQ ID NO: 3705 - protein, 70 aa, Homo Sapiens
MWQLWASLCCLLVLANARSRPSFHPLSDELVNYVNKRNTTWQAGHNFYNVDMSYLKRLCGTFLGGPKPPQ

SEQ ID NO: 3706 - protein, 70 aa, Homo Sapiens; identical to SEQ ID NO: 3705

SEQ ID NO: 3707 - protein, 92 aa, Homo Sapiens
MWQLWASLCCLLVLANARSRPSFHPLSDELVNYVNKRNTTWQAGHNFYNVDMSYLKRLCGTFLGGPKPPQRVMFTEDLKLPASFDAREQWPQ

SEQ ID NO: 3708 - protein, 98 aa, Homo Sapiens
MWQLWASLCCLLVLANARSRPSFHPLSDELVNYVNKRNTTWQAGHNFYNVDMSYLKRLCGTFLGGPKPPQRVMFTEDLKLPASFDAREQWPQCPTIKE

SEQ ID NO: 3709 - protein, 101 aa, Homo Sapiens
MWQLWASLCCLLVLANARSRPSFHPLSDELVNYVNKRNTTWQAGHNFYNVDMSYLKRLCGTFLGGPKPPQRVMFTEDLKLPASFDAREQWPQCPTIKEIRD

SEQ ID NO: 3710 - protein, 136 aa, Homo Sapiens
MWQLWASLCCLLVLANARSRPSFHPLSDELVNYVNKRNTTWQAGHNFYNVDMSYLKRLCGTFLGGPKPPQRVMFTEDLKLPASFDAREQWPQCPTIKEIRDQGSCGSCWAFGAVEAISDRICIHTNAHVSVEVSAE

SEQ ID NO: 3711 - protein, 143 aa, Homo Sapiens
MWQLWASLCCLLVLANARSRPSFHPLSDELVNYVNKRNTTWQAGHNFYNVDMSYLKRLCGTFLGGPKPPQRVMFTEDLKLPASFDAREQWPQCPTIKEIRDQGSCGSCWAFGAVEAISDRICIHTNAHVSVEVSAEDLLTCCG

SEQ ID NO: 3712 - protein, 143 aa, Homo Sapiens; identical to SEQ ID NO: 3711

SEQ ID NO: 3713 - protein, 149 aa, Homo Sapiens
MWQLWASLCCLLVLANARSRPSFHPLSDELVNYVNKRNTTWQAGHNFYNVDMSYLKRLCGTFLGGPKPPQRVMFTEDLKLPASFDAREQWPQCPTIKEIRDQGSCGSCWAFGAVEAISDRICIHTNAHVSVEVSAEDLLTCCGSMCGDG

SEQ ID NO: 3714 - protein, 165 aa, Homo Sapiens
MWQLWASLCCLLVLANARSRPSFHPLSDELVNYVNKRNTTWQAGHNFYNVDMSYLKRLCGTFLGGPKPPQRVMFTEDLKLPASFDAREQWPQCPTIKEIRDQGSCGSCWAFGAVEAISDRICIHTNAHVSVEVSAEDLLTCCGSMCGDGCNGGYPAEAWNFWTRK

SEQ ID NO: 3715 - protein, 170 aa, Homo Sapiens
MWQLWASLCCLLVLANARSRPSFHPLSDELVNYVNKRNTTWQAGHNFYNVDMSYLKRLCGTFLGGPKPPQRVMFTEDLKLPASFDAREQWPQCPTIKEIRDQGSCGSCWAFGAVEAISDRICIHTNAHVSVEVSAEDLLTCCGSMCGDGCNGGYPAEAWNFWTRKGLVSG

SEQ ID NO: 3716 - protein, 175 aa, Homo Sapiens
MWQLWASLCCLLVLANARSRPSFHPLSDELVNYVNKRNTTWQAGHNFYNVDMSYLKRLCGTFLGGPKPPQRVMFTEDLKLPASFDAREQWPQCPTIKEIRDQGSCGSCWAFGAVEAISDRICIHTNAHVSVEVSAEDLLTCCGSMCGDGCNGGYPAEAWNFWTRKGLVSGGLYES

SEQ ID NO: 3717 - protein, 339 aa, Homo Sapiens
MWQLWASLCCLLVLANARSRPSFHPLSDELVNYVNKRNTTWQAGHNFYNVDMSYLKRLCGTFLGGPKPPQRVMFTEDLKLPASFDAREQWPQCPTIKEIRDQGSCGSCWAFGAVEAISDRICIHTNAHVSVEVSAEDLLTCCGSMCGDGCNGGYPAEAWNFWTRKGLVSGGLYESHVGCRPYSIPPCEHHVNGSRPPCTGEGDTPKCSKICEPGYSPTYKQDKHYGYNSYSVSNSEKDIMAEIYKNGPVEGAFSVYSDFLLYKSGVYQHVTGEMMGGHAIRILGWGVENGTPYWLVANSWNTDWGDNGFFKILRGQDHCGIESEVVAGIPRTDQYWEKI

SEQ ID NO: 3718 - protein, 339 aa, Homo Sapiens; identical to SEQ ID NO: 3717

SEQ ID NO: 3719 - protein, 339 aa, Homo Sapiens; identical to SEQ ID NO: 3717

SEQ ID NO: 3720 - protein, 339 aa, Homo Sapiens; identical to SEQ ID NO: 3717

SEQ ID NO: 3721 - protein, 339 aa, Homo Sapiens; identical to SEQ ID NO: 3717

SEQ ID NO: 3722 - protein, 339 aa, Homo Sapiens; identical to SEQ ID NO: 3717

SEQ ID NO: 3723 - protein, 339 aa, Homo Sapiens; identical to SEQ ID NO: 3717

SEQ ID NO: 3724 - protein, 110 aa, Homo Sapiens
MWQLWASLCCLLVLANARSRPSFHPLSDELVNYVNKRNTTWQAGHNFYNVDMSYLKRLCGTFLGGPKPPQRVMFTEDLKLPASFDAREQWPQCPTIKEIRDQGSCGSCWL

SEQ ID NO: 3725 - protein, 76 aa, Homo Sapiens
SGVYQHVTGEMMGGHAIRILGWGVENGTPYWLVANSWNTDWGDNGFFKILRGQDHCGIESEVVAGIPRTDQYWEKI

SEQ ID NO: 3726 - protein, 141 aa, Homo Sapiens
MGAGPSLLLAALLLLLSGDGAVRCDTPANCTYLDLLGTWVFQVGSSGSQRDVNCSVMGPQEKKVVVYLQKLDTAYDDLGNSGHFTIIYNQGFEIVLNDYKWFAFFKDVTDFISHLFMQLGTVGIYDLPHLRNKLAMNRRWG

SEQ ID NO: 3727 - protein, 137 aa, Homo Sapiens
MGAGPSLLLAALLLLLSGDGAVRCDTPANCTYLDLLGTWVFQVGSSGSQRDVNCSVMGPQEKKVVVYLQKLDTAYDDLGNSGHFTIIYNQGFEIVLNDYKWFAFFKDVTDFISHLFMQLGTVGIYDLPHLRNKLVIK

SEQ ID NO: 3728 - protein, 463 aa, Homo Sapiens
MGAGPSLLLAALLLLLSGDGAVRCDTPANCTYLDLLGTWVFQVGSSGSQRDVNCSVMGPQEKKVVVYLQKLDTAYDDLGNSGHFTIIYNQGFEIVLNDYKWFAFFKYKEEGSKVTTYCNETMTGWVHDVLGRNWACFTGKKVGTASENVYVNIAHLKNSQEKYSNRLYKYDHNFVKAINAIQKSWTATTYMEYETLTLGDMIRRSGGHSRKIPRPKPAPLTAEIQQKILHLPTSWDWRNVHGINFVSPVRNQASCGSCYSFASMGMLEARIRILTNNSQTPILSPQEVVSCSQYAQGCEGGFPYLIAGKYAQDFGLVEEACFPYTGTDSPCKMKEDCFRYYSSEYHYVGGFYGGCNEALMKLELVHHGPMAVAFEVYDDFLHYKKGIYHHTGLRDPFNPFELTNHAVLLVGYGTDSASGMDYWIVKNSWGTGWGENGYFRIRRGTDECAIESIAVAATPIPKL

SEQ ID NO: 3729 - protein, 36 aa, Homo Sapiens
  misc_feature (1)..(1): Xaa can be any naturally occurring amino acid
XDVTDFISHLFMQLGTVGIYDLPHLRNKLAMNRRWG

SEQ ID NO: 3730 - protein, 245 aa, Homo Sapiens
  misc_feature (1)..(1): Xaa can be any naturally occurring amino acid
XVVDSPLARSARLPGPQEKKVVVYLQKLDTAYDDLGNSGHFTIIYNQGFEIVLNDYKWFAFFKYKEEGSKVTTYCNETMTGWVHDVLGRNWACFTGKKVGTASENVYVNIAHLKNSQEKYSNRLYKYDHNFVKAINAIQKSWTATTYMEYETLTLGDMIRRSGGHSRKIPRPKPAPLTAEIQQKILHLPTSWDWRNVHGINFVSPVRNQASCGSCYSFASMGMLEARIRILTNNSQTPILSPQEV

SEQ ID NO: 3731 - protein, 299 aa, Homo Sapiens
MPRPVVDRIPLHKFTSIRRTMSEVGGSVEDLIAKGPVSKYSQAVPAVTEGPIPEVLKNYMDAQYYGEIGIGTPPQCFTVVFDTGSSNLWVPSIHCKLLDIACWIHHKYNSDKSSTYVKNGTSFDIHYGSGSLSGYLSQDTVSVPCQSASSASALGGVKVERQVFGEATKQPGITFIAAKFDGILGMAYPRISVNNVLPVFDNLMQQKLVDQNIFSFYLSRDPDAQPGGELMLGGTDSKYYKGSLSYLNVTRKAYWQVHLDQVEVASGLTLCKEGCEAIVDTGTSLMVGPVDEVRELQKA

SEQ ID NO: 3732 - protein, 405 aa, Homo Sapiens
MQPSSLLPLALCLLAAPASALVRIPLHKFTSIRRTMSEVGGSVEDLIAKGPVSKYSQAVPAVTEGPIPEAQYYGEIGIGTPPQCFTVVFDTGSSNLWVPSIHCKLLDIACWIHHKYNSDKSSTYVKNGTSFDIHYGSGSLSGYLSQDTVSVPCQSASSASALGGVKVERQVFGEATKQPGITFIAAKFDGILGMAYPRISVNNVLPVFDNLMQQKLVDQNIFSFYLSRDPDAQPGGELMLGGTDSKYYKGSLSYLNVTRKAYWQVHLDQVEVASGLTLCKEGCEAIVDTGTSLMVGPVDEVRELQKAIGAVPLIQGEYMIPCEKVSTLPAITLKLGGKGYKLSPEDYTLKVSQAGKTLCLSGFMGMDIPPPSGPLWILGDVFIGRYYTVFDRDNNRVGFAEAARL

SEQ ID NO: 3733 - protein, 412 aa, Homo Sapiens
MQPSSLLPLALCLLAAPASALVRIPLHKFTSIRRTMSEVGGSVEDLIAKGPVSKYSQAVPAVTEGPIPEVLKNYMDAQYYGEIGIGTPPQCFTVVFDTGSSNLWVPSIHCKLLDIACWIHHKYNSDKSSTYVKNGTSFDIHYGSGSLSGYLSQDTVSVPCQSASSASALGGVKVERQVFGEATKQPGITFIAAKFDGILGMAYPRISVNNVLPVFDNLMQQKLVDQNIFSFYLSRDPDAQPGGELMLGGTDSKYYKGSLSYLNVTRKAYWQVHLDQVEVASGLTLCKEGCEAIVDTGTSLMVGPVDEVRELQKAIGAVPLIQGEYMIPCEKVSTLPAITLKLGGKGYKLSPEDYTLKVSQAGKTLCLSGFMGMDIPPPSGPLWILGDVFIGRYYTVFDRDNNRVGFAEAARL

SEQ ID NO: 3734 - protein, 276 aa, Homo Sapiens
MQPSSLLPLALCLLAAPASALVRIPLHKFTSIRRTMSEVGGSVEDLIAKGPVSKYSQAVPAVTEGPIPEVLKNYMDAQYYGEIGIGTPPQCFTVVFDTGSSNLWVPSIHCKLLDIACWIHHKYNSDKSSTYVKNGTSFDIHYGSGSLSGYLSQDTVSVPCQSASSASALGGVKVERQVFGEATKQPGITFIAAKFDGILGMAYPRISVNNVLPVFDNLMQQKLVDQNIFSFYLSRDPDAQPGGELMLGGTDSKYYKGSLSYLNVTRKAYWQVHLDQ

SEQ ID NO: 3735 - protein, 406 aa, Homo Sapiens
MQPSSLLPLALCLLAAPASALVRIPLHKFTSIRRTMSEVGGSVEDLIAKGPVSKYSQAVPAVTEGPIPEVLKNYMDAQYYGEIGIGTPPQCFTVVFDTGSSNLWVPSIHCKLLDIACWIHHKYNSDKSSTYVKNGTSFDIHYGSGSLSGYLSQDTVSVPCQSASSASALGGVKVERQVFGEATKQPGITFIAAKFDGILGMAYPRISVNNVLPVFDNLMQQKLVDQNIFSFYLSRDPDAQPGGELMLGGTDSKYYKGSLSYLNVTRKAYWVEVASGLTLCKEGCEAIVDTGTSLMVGPVDEVRELQKAIGAVPLIQGEYMIPCEKVSTLPAITLKLGGKGYKLSPEDYTLKVSQAGKTLCLSGFMGMDIPPPSGPLWILGDVFIGRYYTVFDRDNNRVGFAEAARL

SEQ ID NO: 3736 - protein, 405 aa, Homo Sapiens
MQPSSLLPLALCLLAAPASALVRIPLHKFTSIRRTMSEVGGSVEDLIAKGPVSKYSQAVPAVTEGPIPEVLKNYMDAQYYGEIGIGTPPQCFTVVFDTGSSNLWVPSIHCKLLDIACWIHHKYNSDKSSTYVKNGTSFDIHYGSGSLSGYLSQDTVSVPCQSASSASALGGVKVERQVFGEATKQPGITFIAAKFDGILGMAYPRISVNNVLPVFDNLMQQKLVDQNIFSFYLSRDPDAQPGGELMLGGTDSKYYKGSLSYLNVTRKAYWQVHLDQVEVASGLTLCKEGCEAIVDTGTSLMVGPVDEVRELQKAIGAVPLIQGEVSTLPAITLKLGGKGYKLSPEDYTLKVSQAGKTLCLSGFMGMDIPPPSGPLWILGDVFIGRYYTVFDRDNNRVGFAEAARL

SEQ ID NO: 3737 - protein, 409 aa, Homo Sapiens
MQPSSLLPLALCLLAAPASALVRIPLHKFTSIRRTMSEVGGSVEDLIAKGPVSKYSQAVPAVTEGPIPEVLKNYMDAQYYGEIGIGTPPQCFTVVFDTGSSNLWVPSIHCKLLDIACWIHHKYNSDKSSTYVKNGTSFDIHYGSGSLSGYLSQDTVSVPCQSASSASALGGVKVERQVFGEATKQPGITFIAAKFDGILGMAYPRISVNNVLPVFDNLMQQKLVDQNIFSFYLSRDPDAQPGGELMLGGTDSKYYKGSLSYLNVTRKAYWQVHLDQVEVASGLTLCKEGCEAIVDTGTSLMVGPVDEVRELQKAIGAVPLIQGEYMIPCEKVSTLPAITLKLGGKGYKLSPEDYTLKAGKTLCLSGFMGMDIPPPSGPLWILGDVFIGRYYTVFDRDNNRVGFAEAARL

SEQ ID NO: 3738 - protein, 410 aa, Homo Sapiens
MQPSSLLPLALCLLAAPASALVRIPLHKFTSIRRTMSEVGGSVEDLIAKGPVSKYSQAVPAVTEGPIPEVLKNYMDYYGEIGIGTPPQCFTVVFDTGSSNLWVPSIHCKLLDIACWIHHKYNSDKSSTYVKNGTSFDIHYGSGSLSGYLSQDTVSVPCQSASSASALGGVKVERQVFGEATKQPGITFIAAKFDGILGMAYPRISVNNVLPVFDNLMQQKLVDQNIFSFYLSRDPDAQPGGELMLGGTDSKYYKGSLSYLNVTRKAYWQVHLDQVEVASGLTLCKEGCEAIVDTGTSLMVGPVDEVRELQKAIGAVPLIQGEYMIPCEKVSTLPAITLKLGGKGYKLSPEDYTLKVSQAGKTLCLSGFMGMDIPPPSGPLWILGDVFIGRYYTVFDRDNNRVGFAEAARL

SEQ ID NO: 3739 - protein, 94 aa, Homo Sapiens
MSEVGGSVEDLIAKGPVSKYSQAVPAVTEGPIPEVLKNYMDAQYYGEIGIGTPPQCFTVVFDTGSSNLWVPSIHCKLLDIACWIHHKYNSDKSS

SEQ ID NO: 3740 - protein, 199 aa, Homo Sapiens
MSEVGGSVEDLIAKGPVSKYSQAVPAVTEGPIPEVLKNYMDAQYYGEIGIGTPPQCFTVVFDTGSSNLWVPSIHCKLLDIACWIHHKYNSDKSSTYVKNGTSFDIHYGSGSLSGYLSQDTVSVPCQSASSASALGGVKVERQVFGEATKQPGITFIAAKFDGILGMAYPRISVNNVLPVFDNLMQQKLVDQNIFSFYLS

SEQ ID NO: 3741 - protein, 189 aa, Homo Sapiens
NVTRKAYWQVHLDQSPEGRRVQPSQGRGSQGGALGPQGTLQSRQGLHALTPRRVEVASGLTLCKEGCEAIVDTGTSLMVGPVDEVRELQKAIGAVPLIQGEYMIPCEKVSTLPAITLKLGGKGYKLSPEDYTLKVSQAGKTLCLSGFMGMDIPPPSGPLWILGDVFIGRYYTVFDRDNNRVGFAEAARL

SEQ ID NO: 3742 - protein, 396 aa, Homo Sapiens
MKTLLLLLLVLLELGEAQGSLHRVPLRRHPSLKKKLRARSQLSEFWKSHNLDMIQFTESCSMDQSAKEPLINYLDMEYFGTISIGSPPQNFTVIFDTGSSNLWVPSVYCTSPACKTHSRFQPSQSSTYSQPGQSFSIQYGTGSLSGIIGADQVSVEGLTVVGQQFGESVTEPGQTFVDAEFDGILGLGYPSLAVGGVTPVFDNMMAQNLVDLPMFSVYMSSNPEGGAGSELIFGGYDHSHFSGSLNWVPVTKQAYWQIALDNIQVGGTVMFCSEGCQAIVDTGTSLITGPSDKIKQLQNAIGAAPVDGEYAVECANLNVMPDVTFTINGVPYTLSPTAYTLLDFVDGMQFCSSGFQGLDIHPPAGPLWILGDVFIRQFYSVFDRGNNRVGLAPAVP

SEQ ID NO: 3743 - protein, 363 aa, Homo Sapiens
MKTLLLLLLVLLELGEAQGSLHRVPLRRHPSLKKKLRARSQLSEFWKSHNLDMIQFTESCSMDQSAKEPLINYLDMEYFGTISIGSPPQNFTVIFDTGSSNLWVPSVYCTSPACKTHSRFQPSQSSTYSQPGQSFSIQYGTGSLSGIIGADQVSVEGLTVVGQQFGESVTEPGQTFVDAEFDGILGLGYPSLAVGGVTPVFDNMMAQNLVDLPMFSVYMSSNPEGGAGSELIFGGYDHSHFSGSLNWVPVTKQAYWQIALDNMLWSVPTLTSCRMSPSPLTESPIPSAQLPTPYWTSWMECSSAAVAFKDLTSTLQLGPSGSWGMSSFDSFTQSLTVGITVWDWPQQSPKEGPCVCACLSDRP

SEQ ID NO: 3744 - protein, 484 aa, Homo Sapiens [sequence omitted]

SEQ ID NO: 3745 - protein, 120 aa, Homo Sapiens
MVCRLPVSKKTLLCSFQVLDELGRHVLLRKDCGPVDTKVPGAGEPKSAFTQGSAMISSLSQNHPDNRNETFSSVISLLNEDPLSQDLPVKMASIFKNFVITYNRTYESKEEARWRLSVFV

SEQ ID NO: 3746 - protein, 283 aa, Homo Sapiens
  misc_feature (1)..(1): Xaa can be any naturally occurring amino acid
XQNHPDNRNETFSSVISLLNEDPLSQDLPVKMASIFKNFVITYNRTYESKEARWRLSVFVNNMVRAQKIQALDRGTAQYGVTKFSDLTEEEFRTIYLNTLLRKEPGNKMKQAKSVGDLAPPEWDWRSKGAVTKVKDQGMCGSCWAFSVTGNVEGQWFLNQGTLLSLSEQELLDCDKMDKACMGGLPSNAYSAIKNLGGLETEDDYSYQGHMQSCNFSAEKAKVYINDSVELSQNEQKLAAWLAKRGPISVAINAFGMQFYRHGISRPLRPLCSPWLIDHAVLL

SEQ ID NO: 3747 - protein, 82 aa, Homo Sapiens
  misc_feature (1)..(1): Xaa can be any naturally occurring amino acid
XRTIYLNTLLRKEPGNKMKQAKSVGDLAPPEWDWRSKGAVTKVKDQGMCGSCWAFSVTGNVEGQWFLNQGTLLSLSEQALGL

SEQ ID NO: 3748 - protein, 255 aa, Homo Sapiens
MQPLLLLLAFLLPTGAEAGEIIGGRESRPHSRPYMAYLQIQSPAGQSRCGGFLVREDFVLTAAHCWGSNINVTLGAHNIQRRENTQQHITARRAIRHPQYNQRTIQNDIMLLQLSRRVRRNRNVNPVALPRAQEGLRPGTLCTVAGWGRVSMRRGTDTLREVQLRVQRDRQCLRIFGSYDPRRQICVGDRRERKAAFKGDSGGPLLCNNVAHGIVSYGKSSGVPPEVFTRVSSFLPWIRTTMRSFKLLDQMETPL

SEQ ID NO: 3749 - protein, 134 aa, Homo Sapiens
MALNQFSDMSFAEIKHKYLWSEPQNCSATKSNYLRGTGPYPPSVDWRKKGNFVSPVKNQGACGSCWTFSTTGALESAIAIATGKMLSLAEQQLVDCAQDFNNHGCQGGLPSQAFEYILYNKGIMGEDTYPYQGK

SEQ ID NO: 3750 - protein, 323 aa, Homo Sapiens
MWATLPLLCAAELCVNSLEKFHFKSWMSKHRKTYSTEEYHHRLQTFASNWRKINAHNNGNHTFKMALNQFSDMSFAEIKHKYLWSEPQNCSATKSNYLRGTGPYPPSVDWRKKGNFVSPVKNQGACGSCWTFSTTGALESAIAIATGKMLSLAEQQLVDCAQDFNNHGCQGGLPSQAFEYILYNKGIMGEDTYPYQGKDGYCKFQPGKAIGFVKDVANITIYDEEAMVEAVALYNPVSFAFEVTQDFMMYRTGIYSSTSCHKTPDKVNHAVLAVGYGEKNGIPYWIVKNSWGPQWGMNGYFLIERGKNMCGLAACASYPIPLV

SEQ ID NO: 3751 - protein, 335 aa, Homo Sapiens
MWATLPLLCAGAWLLGVPVCGAAELCVNSLEKFHFKSWMSKHRKTYSTEEYHHRLQTFASNWRKINAHNNGNHTFKMALNQFSDMSFAEIKHKYLWSEPQNCSATKSNYLRGTGPYPPSVDWRKKGNFVSPVKNQGACGSCWTFSTTGALESAIAIATGKMLSLAEQQLVDCAQDFNNHGCQGGLPSQAFEYILYNKGIMGEDTYPYQGKDGYCKFQPGKAIGFVKDVANITIYDEEAMVEAVALYNPVSFAFEVTQDFMMYRTGIYSSTSCHKTPDKVNHAVLAVGYGEKNGIPYWIVKNSWGPQWGMNGYFLIERGKNMCGLAACASYPIPLV

SEQ ID NO: 3752 - protein, 62 aa, Homo Sapiens
MWATLPLLCAGAWLLGVPVCGAAELCVNSLEKFHFKSWMSKKTKAHCVLVAESVGEHQCMCF

SEQ ID NO: 3753 - protein, 41 aa, Homo Sapiens
MWATLPLLCAGAWLLGVPVCGAAELCVNSLGTQRARRPRGC

SEQ ID NO: 3754 - protein, 118 aa, Homo Sapiens
MWATLPLLCAGAWLLGVPVCGAAELCVNSLVAGLSPPLGPWSLRSPSQPERCCPWRNSSWWTAPRTSIITAAKGVSPARLSSISCTTRGSWVKTPTPTRARMVIASSNLERPSALSRM

SEQ ID NO: 3755 - protein, 258 aa, Homo Sapiens
MHKENEEIYNVSENRKHCPIFPCPLLTRSGKVPEFRHEREERLEEMIRRQNLDGNLSFVMWGLKVLLLPVVSFALYPEEILDTHWELWKKTHRKQYNNKVDEISRRLIWEKNLKYISIHNLEASLGVHTYELAMNHLGDMTSEEVVQKMTGLKVPLSHSRSNDTLYIPEWEGRAPDSVDYRKKGYVTPVKNQGQCGSCWAFSSVGALEGQLKKKTGKLLNLSPQNLVDCVSENDGCGGGYMTNAFQYVQKNRGIDSED

SEQ ID NO: 3756 - protein, 329 aa, Homo Sapiens
MWGLKVLLLPVVSFALYPEEILDTHWELWKKTHRKQYNNKVDEISRRLIWEKNLKYISIHNLEASLGVHTYELAMNHLGDMTSEEVVQKMTGLKVPLSHSRSNDTLYIPEWEGRAPDSVDYRKKGYVTPVKNQGQCGSCWAFSSVGALEGQLKKKTGKLLNLSPQNLVDCVSENDGCGGGYMTNAFQYVQKNRGIDSEDAYPYVGQEESCMYNPTGKAAKCRGYREIPEGNEKALKRAVARVGPVSVAIDASLTSFQFYSKGVYYDESCNSDNLNHAVLAVGYGIQKGNKHWIIKNSWGENWGNKGYILMARNKNNACGIANLASFPKM

SEQ ID NO: 3757 - protein, 333 aa, Homo Sapiens [sequence omitted]

SEQ ID NO: 3758 - protein, 333 aa, Homo Sapiens [sequence omitted]

SEQ ID NO: 3759 - protein, 225 aa, Homo Sapiens
MNPTLILAAFCLGIASATLTFDHSLEAQWTKWKAMHNRLYGMNEEGWRRAVWEKNMKMIELHNQEYREGKHSFTMAMNAFGDMTSEEFRQVMNGFQNRKPRKGKVFQEPLFYEAPRSVDWREKGYVTPVKNQGQCGSCWAFSATGALEGQMFRKTGRLISLSEQNLVDCSGPQGNEGCNGGLMDYAFQYVQDNGGLDSEESYPYEATVSGAPCHHSSSAFGRWTL

SEQ ID NO: 3760 - protein, 321 aa, Homo Sapiens
MDVRALPWLPWLLWLLCRGGGDADSRAPFTPTWPRSREREAAAFRESLNRHRYLNSLFPSENSTAFYGINQFSYLFPEEFKAIYLRSKPSKFPRYSAEVHMSIPNVSLPLRFDWRDKQVVTQVRNQQMCGGCWAFSVVGAVESAYAIKGKPLEDLSVQQVIDCSYNNYGCNGGSTLNALNWLNKMQVKLVKDSEYPFKAQNGLCHYFSGSHSGFSIKGYSAYDFSDQEDEMAKALLTFGPLVVIVDAVSWQDYLGGIIQHHCSSGEANHAVLITGFDKTGSTPYWIVRNSWGSSWGVDGYAHVKMGSNVCGIADSVSSIFV

SEQ ID NO: 3761 - protein, 117 aa, Homo Sapiens
IIDNKGIDSDASYPYKAMDQKCQYDSKYRAATCSKYTELPYGREDVLKEAVANKGPVSVGVDARHPSFFLYRSDGVLLCCQAGVRWHDLSSLQPLPPGFKQFSCLSLLSSWDYRCLL

SEQ ID NO: 3762 - protein, 281 aa, Homo Sapiens
MKRLVCVLLVCSSAVAQLHKDPTLDHHWHLWKKTYGKQYKEKNEEAVRRLIWEKNLKFVMLHNLEHSMGMHSYDLGMNHLGDMGSCGACWAFSAVGALEAQLKLKTGKLVSLSAQNLVDCSTEKYGNKGCNGGFMTTAFQYIIDNKGIDSDASYPYKAMDQKCQYDSKYRAATCSKYTELPYGREDVLKEAVANKGPVSVGVDARHPSFFLYRSGVYYEPSCTQNVNHGVLVVGYGDLNGKEYWLVKNSWGHNFGEEGYIRMARNKGNHCGIASFPSYPEI

SEQ ID NO: 3763 - protein, 331 aa, Homo Sapiens
MKRLVCVLLVCSSAVAQLHKDPTLDHHWHLWKKTYGKQYKEKNEEAVRRLIWEKNLKFVMLHNLEHSMGMHSYDLGMNHLGDMTSEEVMSLMSSLRVPSQWQRNITYKSNPNRILPDSVDWREKGCVTEVKYQGSCGACWAFSAVGALEAQLKLKTGKLVSLSAQNLVDCSTEKYGNKGCNGGFMTTAFQYIIDNKGIDSDASYPYKAMDQKCQYDSKYRAATCSKYTELPYGREDVLKEAVANKGPVSVGVDARHPSFFLYRSGVYYEPSCTQNVNHGVLVVGYGDLNGKEYWLVKNSWGHNFGEEGYIRMARNKGNHCGIASFPSYPEI

SEQ ID NO: 3764 - protein, 96 aa, Homo Sapiens
  misc_feature (1)..(1): Xaa can be any naturally occurring amino acid
XVLKEAVANKGPVSVGVDARHPSFFLYRSGVYYEPSCTQNVNHGVLVVGYGDLNGKEYWLVKNSWGHNFGEEGYIRMARNKGNHCGIASFPSYPEI

SEQ ID NO: 3765 - protein, 5 aa, Homo Sapiens
  misc_feature (1)..(1): Xaa can be any naturally occurring amino acid
XYPEI

SEQ ID NO: 3766 - protein, 334 aa, Homo Sapiens
MNLSLVLAAFCLGIASAVPKFDQNLDTKWYQWKATHRRLYGANEEGWRRAVWEKNMKMIELHNGEYSQGKHGFTMAMNAFGDMTNEEFRQMMGCFRNQKFRKGKVFREPLFLDLPKSVDWRKKGYVTPVKNQKQCGSCWAFSATGALEGQMFRKTGKLVSLSEQNLVDCSRPQGNQGCNGGFMARAFQYVKENGGLDSEESYPYVAVDEICKYRPENSVANDTGFTVVAPGKEKALMKAVATVGPISVAMDAGHSSFQFYKSGIYFEPDCSSKNLDHGVLVVGYGFEGANSNNSKYWLVKNSWGPEWGSNGYVKIAKDKNNHCGIATAASYPNV

SEQ ID NO: 3767 - protein, 334 aa, Homo Sapiens; identical to SEQ ID NO: 3766

SEQ ID NO: 3768 - protein, 211 aa, Homo Sapiens
ALTAHPSCLLALLVAGLAQGIRGPLRAQDLGPQPLELKEAFKLFQIQFNRSYLSPEEHAHRLDIFAHNLAQAQRLQEEDLGTAEFGVTPFSDLTEEEFGQLYGYRRAAGGVPSMGREIRSEEPEESVPFSCDWRKVASAISPIKDQKNCNCCWAMAAAGNIETLWRISFWDFVDVSVQGGLASEKDYPFQGKVRAHRCHPKKYQKVAWIQD

SEQ ID NO: 3769 - protein, 376 aa, Homo Sapiens
MALTAHPSCLLALLVAGLAQGIRGPLRAQDLGPQPLELKEAFKLFQIQFNRSYLSPEEHAHRLDIFAHNLAQAQRLQEEDLGTAEFGVTPFSDLTEEEFGQLYGYRRAAGGVPSMGREIRSEEPEESVPFSCDWRKVASAISPIKDQKNCNCCWAMAAAGNIETLWRISFWDFVDVSVQELLDCGRCGDGCHGGFVWDAFITVLNNSGLASEKDYPFQGKVRAHRCHPKKYQKVAWIQDFIMLQNNEHRIAQYLATYGPITVTINMKPLQLYRKGVIKATPTTCDPQLVDHSVLLVGFGSVKSEEGIWAETVSSQSQPQPPHPTPYWILKNSWGAQWGEKGYFRLHRGSNTCGITKFPLTARVQKPDMKPRVSCPP

SEQ ID NO: 3770 - protein, 364 aa, Homo Sapiens
MALTAHPSCLLALLVAGLAQGIRGPLRAQDLGPQPLELKEAFKLFQIQFNRSYLSPEEHAHRLDIFAHNLAQAQRLQEEDLGTAEFGVTPFSDLTEEEFGQLYGYRRAAGGVPSMGREIRSEEPEESVPFSCDWRKVASAISPIKDQKNCNCCWAMAAAGNIETLWRISFWDFVDVSVQELLDCGRCGDGCHGGFVWDAFITVLNNSGLASEKDYPFQGKVRAHRCHPKKYQKVAWIQDFIMLQNNEHRIAQYLATYGPITVTINMKPLQLYRKGVIKATPTTCDPQLVDHSVLLVGFGSVKSEEGIWAETVSSQSQPQPPHPTPYWILKNSWGAQWGEKVSVIYWGRGQGRTGLFPPSRPYVP

SEQ ID NO: 3771 - protein, 303 aa, Homo Sapiens
MARRGPGWRPLLLLVLLAGAAQGGLYFRRGQTCYRPLRGDGLAPLGRSTYPRPHEYLSPADLPKSWDWRNVDGVNYASITRNQHIPQYCGSCWAHASTSAMADRINIKRKGAWPSTLLSVQNVIDCGNAGSCEGGNDLSVWDYAHQHGIPDETCNNYQAKDQECDKFNQCGTCNEFKECHAIRNYTLWRVGDYGSLSGREKMMAEIYANGPISCGIMATERLANYTGGIYAEYQDTTYINHVVSVAGWGISDGTEYWIVRNSWGEPWGERGWLRIVTSTYKDGKGARYNLAIEEHCTFGDPIV

SEQ ID NO: 3772 - protein, 3623 aa, Homo Sapiens
MMNMSLPFLWSLLTLLIFAEVNGEAGELELQRQKRSINLQQPRMATERGNLVFLTGSAQNIEFRTGSLGKIKLNDEDLSECLHQIQKNKEDIIELKGSAIGLPQNISSQIYQLNSKLVDLERKFQGLQQTVDKKVCSSNPCQNGGTCLNLHDSFFCICPPQWKGPLCSADVNECEIYSGTPLSCQNGGTCVNTMGSYSCHCPPETYGPQCASKYDDCEGGSVARCVHGICEDLMREQAGEPKYSCVCDAGWMFSPNSPACTLDRDECSFQPGPCSTLVQCFNTQGSFYCGACPTGWQGNGYICEDINECEINNGGCSVAPPVECVNTPGSSHCQACPPGYQGDGRVCTLTDICSVSNGGCHPDASCSSTLGSLPLCTCLPGYTGNGYGPNGCVQLSNICLSHPCLNGQCIDTVSGYFCKCDSGWTGVNCTENINECLSNPCLNGGTCVDGVDSFSCECTRLWTGALCQVPQQVCGESLSGINGSFSYRSPDVGYVHDVNCFWVIKTEMGKVLRITFTFFRLESMDNCPHEFLQVYDGDSSSAFQLGRFCGSSLPHELLSSDNALYFHLYSEHLRNGRGFTVRWETQQPECGGILTGPYGSIKSPGYPGNYPPGRDCVWIVVTSPDLLVTFTFGTLSLEHHDDCNKDYLEIRDGPLYQDPLLGKFCTTFSVPPLQTTGPFARIHFHSDSQISDQGFHITYLTSPSDLRCGGNYTDPEGELFLPELSGPFTHTRQCVYMMKQPQGEQIQINFTHVELQCQSDSSQNYIEVRDGETLLGKVCGNGTISHIKSITNSVWIRFKIDASVEKASFRAVYQVACGDELTGEGVIRSPFFPNVYPGERTCRWTIHQPQSQVILLNFTVFEIGSSAHCETDYVEIGSSSILGSPENKKYCGTDIPSFITSVYNFLYVTFVKSSSTENHGFMAKFSAEDLACGEILTESTGTIQSPGHPNVYPHGINCTWHILVQPNHLIHLMFETFHLEFHYNCTNDYLEVYDTDSETSLGRYCGKSIPPSLTSSGNSLMLVFVTDSDLAYEGFLINYEAISAATACLQDYTDDLGTFTSPNFPNNYPNNWECIYRITVRTGQLIAVHFTNFSLEEAIGNYYTDFLEIRDGGYEKSPLLGIFYGSNLPPTIISHSNKLWLKFKSDQIDTRSGFSAYWDGSSTGCGGNLTTSSGTFISPNYPMPYYHSSECYWWLKSSHGSAFELEFKDFHLEHHPNCTLDYLAVYDGPSSNSHLLTQLCGDEKPPLIRSSGDSMFIKLRTDEGQQGRGFKAEYRQTCENVVIVNQTYGILESIGYPNPYSENQHCNWTIRATTGNTVNYTFLAFDLEHHINCSTDYLELYDGPRQMGRYCGVDLPPPGSTTSSKLQVLLLTDGVGRREKGFQMQWFVYGCGGELSGATGSFSSPGFPNRYPPNKECIWYIRTDPGSSIQLTIHDFDVEYHSRCNFDVLEIYGGPDFHSPRIAQLCTQRSPENPMQVSSTGNELAIRFKTDLSINGRGFNASWQAVTGGCGGIFQAPSGEIHSPNYPSPYRSNTDCSWVIRVDRNHRVLLNFTDFDLEPQDSCIMAYDGLSSTMSRLARTCGREQLANPIVSSGNSLFLRFQSGPSRQNRGFRAQFRQACGGHILTSSFDTVSSPRFPANYPNNQNCSWIIQAQPPLNHITLSFTHFELERSTTCARDFVEILDGGHEDAPLRGRYCGTDMPHPITSFSSALTLRFVSDSSISAGGFHTTVTASVSACGGTFYMAEGIFNSPGYPDIYPPNVECVWNIVSSPGNRLQLSFISFQLEDSQDCSRDFVEIREGNATGHLVGRYCGNSFPLNYSSIVGHTLWVRFISDGSGSGTGFQATFMKIFGNDNIVGTHGKVASPFWPENYPHNSNYQWTVNVNASHVVHGRILEMDIEEIQNCYYDKLRIYDGPSIHARLIGAYCGTQTESFSSTGNSLTFHFYSDSSISGKGFLLEWFAVDAPDGVLPTIAPGACGGFLRTGDAPVFLFSPGWPDSYSNRVDCTWLIQAPDSTVELNILSLDIESHRTCAYDSLVIRDGDNNLAQQLAVLCGREIPGPIRSTGEYMFIRFTSDSSVTRAGFNASFHKSCGGYLHADRGIITSPKYPETYPSNLNCSWHVLVQSGLTIAVHFEQPFQIPNGDSSCNQGDYLVLRNGPDICSPPLGPPGGNGHFCGSHASSTLFTSDNQMFVQFISDHSNEGQGFKIKYEAKSLACGGNVYIHDADSAGYVTSPNHPHNYPPHADCIWILAAPPETRIQLQFEDRFDIEVTPNCTSNYLELRDGVDSDAPILSKFCGTSLPSSQWSSGEVMYLRFRSDNSPTHVGFKAKYSIAQCGGRVPGQSGVVESIGHPTLPYRDNLFCEWHLQGLSGHYLTISFEDFNLQNSSGCEKDFVEIWDNHTSGNILGRYCGNTIPDSIDTSSNTAVVRFVTDGSVTASGFRLRFESSMEECGGDLQGSIGTFTSPNYPNPNPHGRICEWRITAPEGRRITLMFNNLRLATHPSCNNEHVIVFNGIRSNSPQLEKLCSSVNVSNEIKSSGNTMKVIFFTDGSRPYGGFTASYTSSEDAVCGGSLPNTPEGNFTSPGYDGVRNYSRNLNCEWTLSNPNQGNSSISIHFEDFYLESHQDCQFDVLEFRVGDADGPLMWRLCGPSKPTLPLVIPYSQVWIHFVTNERVEHIGFHAKYSFTDCGGIQIGDSGVITSPNYPNAYDSLTHCSSLLEAPQGHTITLTFSDFDIEPHTTCAWDSVTVRNGGSPESPIIGQYCGNSNPRTIQSGSNQLVVTFNSDHSLQGGGFYATWNTQTLGCGGIFHSDNGTIRSPHWPQNFPENSRCSWTAITHKSKHLEISFDNNFLIPSGDGQCQNSFVKVWAGTEEVDKALLATGCGNVAPGPVITPSNTFTAVFQSQEAPAQGFSASFVSRCGSNFTGPSGYIISPNYPKQYDNNMNCTYVIEANPLSVVLLTFVSFHLEARSAVTGSCVNDGVHIIRGYSVMSTPFATVCGDEMPAPLTIAGPVLLNFYSNEQITDFGFKFSYRIISCGGVFNFSSGIITSPAYSYADYPNDMHCLYTITVSDDKVIELKFSDFDVVPSTSCSHDYLAIYDGANTSDPLLGKFCGSKRPPNVKSSNNSMLLVFKTDSFQTAKGWKMSFRQTLGPQQGCGGYLTGSNNTFASPDSDSNGMYDKNLNCVWIIIAPVNKVIHLTFNTFALEAASTRQRCLYDYVKLYDGDSENANLAGTFCGSTVPAPFISSGNFLTVQFISDLTLEREGFNATYTIMDMPCGGTYNATWTPQNISSPNSSDPDVPFSICTWVIDSPPHQQVKITVWALQLTSQDCTQNYLQLQDSPQGHGNSRFQFCGRNASAVPVFYSSMSTAMVIFKSGVVNRNSRMSFTYQIADCNRDYHKAFGNLRSPGWPDNYDNDKDCTVTLTAPQNHTISLFFHSLGIENSVECRNDFLEVRNGSNSNSPLLGKYCGTLLPNPVFSQNNELYLRFKSDSVTSDRGYEIIWTSSPSGCGGTLYGDRGSFTSPGYPGTYPNNTYCEWVLVAPAGRLVTINFYFISIDDPGDCVQNYLTLYDGPNASSPSSGPYCGGDTSIAPFVASSNQVFIKFHADYARRPSAFRLTWDS

SEQ ID NO: 3773 - protein, 170 aa, Homo Sapiens
MMNMSLPFLWSLLTLLIFAEVNGEAGELELQRQKRSINLQQPRMATERGNLVFLTGSAQNIEFRTGSLGKIKLNDEDLSECLHQIQKNKEDIIELKGSAIGLPQNISSQIYQLNSKLVDLERKFQGLQQTVDKKVCSSNPCQNGGTCLNLHDSFFCICPPQWKVSHLLFG

SEQ ID NO: 3774 - protein, 105 aa, Homo Sapiens
NSKLVDLERKFQGLQQTVDKKVCSSNPCQNGGTCLNLHDSFFCICPPQWKGPLCSADVNECEIYSGTPLSCQNGGTCVNTMGSYRNPCSNIPKEPEEGSRDWHRE

SEQ ID NO: 3775 - protein, 88 aa, Homo Sapiens
STGNELAIRFKTDLSINGRGFNASWQAVTGGCGGIFQAPSGEIHSPNYPSPYRSNTDCSWVIRVDRNHRVLLNFTDFDLEPQDSCIMV

SEQ ID NO: 3776 - protein, 198 aa, Homo Sapiens
MIGSGLAGSGGAGGPSSTVTWCALFSNHVAATQASLLLSFVWMPALLPVASRLLLLPRVLLTMASGSPPTQPSPASDSGSGYVPGSVSAAFVTCPNEKVAKEIARAVVEKRLAACVNLIPQITSIYEWKGKIEEDSEVLMMIKTQSSLVPALTDFVRSVHPYEVAEVIALPVEQGNFPYLQWVRQVTESVSDSITVLP

SEQ ID NO: 3777 - protein, 135 aa, Homo Sapiens
MPALLPVASRLLLLPRVLLTMASGSPPTQPSPASDSGSGYVPGSVSAAFVTCPNEKVAKEIARAVVEKRLAACVNLIPQITSIYEWKGKIEEDSEVLMMIKTQSSLVPALTDFVRSVHPYEVAESCHDEPCSCSS

SEQ ID NO: 3778 - protein, 156 aa, Homo Sapiens
MPALLPVASRLLLLPRVLLTMASGSPPTQPSPASDSGSGYVPGSVSAAFVTCPNEKVAKEIARAVVEKRLAACVNLIPQITSIYEWKGKIEEDSEVLMMIKTQSSLVPALTDFVRSVHPYEVAEVIALPVEQGNFPYLQWVRQVTESVSDSITVLP

SEQ ID NO: 3779 - protein, 156 aa, Homo Sapiens; identical to SEQ ID NO: 3778

SEQ ID NO: 3780 - protein, 156 aa, Homo Sapiens; identical to SEQ ID NO: 3778

SEQ ID NO: 3781 - protein, 156 aa, Homo Sapiens; identical to SEQ ID NO: 3778

SEQ ID NO: 3782 - protein, 155 aa, Homo Sapiens
MSGGRAPAVLLGGVASLLLSFVWMPALLPVASRLLLLPRVLLTMASGSPPTQPSPASDSGSGYVPGSVSAAFVTCPNEKVAKEIARAVVEKRLAACVNLIPQITSIYEWKGKIEEDSEVLMFCAPLRSGRGNCIACGTGELSVPAVGAPGHRVSF

SEQ ID NO: 3783 - protein, 179 aa, Homo Sapiens
MSGGRAPAVLLGGVASLLLSFVWMPALLPVASRLLLLPRVLLTMASGSPPTQPSPASDSGSGYVPGSVSAAFVTCPNEKVAKEIARAVVEKRLAACVNLIPQITSIYEWKGKIEEDSEVLMMIKTQSSLVPALTDFVRSVHPYEVAEVIALPVEQGNFPYLQWVRQVTESVSDSITVLP

SEQ ID NO: 3784 - protein, 42 aa, Homo Sapiens
MSGGRAPAVLLGGVVSDRPRPAPSGPRSLDRYPHPKSQRLAP

SEQ ID NO: 3785 - protein, 111 aa, Homo Sapiens
  misc_feature (1)..(1): Xaa can be any naturally occurring amino acid
XSSTVTWCALFSNHVAATQASLLLSFVWMPALLPVASRLLLLPRVLLTMASGSPPTQPSPASDSGSGYVPGSVSAAFVTCPNEKVAKEIARAVVEKRLAACVNLIPQITSM

SEQ ID NO: 3786 - protein, 55 aa, Homo Sapiens
MAPISLSWLLRLATFCHLTVLLAAWRRDSTGCSVPTRRSNGSRTRCSIWTARLLP

SEQ ID NO: 3787 - protein, 397 aa, Homo Sapiens
MAPISLSWLLRLATFCHLTVLLAGQHHGVTKCNITCSKMTSKIPVALLIHYQQNQASCGKRAIILETRQHRLFCADPKEQWVKDAMQHLDRQAAALTRNGGTFEKQIGEVKPRTTPAAGGMDESVVLEPEATGESSSLEPTPSSQEAQRALGTSPELPTGVTGSSGTRLPPTPKAQDGGPVGTELFRVPPVSTAATWQSSAPHQPGPSLWAEAKTSEAPSTQDPSTQASTASSPAPEENAPSEGQRVWGQGQSPRPENSLEREEMGPVPAHTDAFQDWGPGSMAHVSVVPVSSEGTPSREPVASGSWTPKAEEPIHATMDPQRLGVLITPVPDAQAATRRQAVGLLAFLGLLFCLGVAMFTYQSLQGCPRKMAGEMAEGLRYIPRSCGSNSYVLVPV

SEQ ID NO: 3788 - protein, 403 aa, Homo Sapiens
MAPISLSWLLRLATFCHLTVLLAGTSLNSGQHHGVTKCNITCSKMTSKIPVALLIHYQQNQASCGKRAIILETRQHRLFCADPKEQWVKDAMQHLDRQAAALTRNGGTFEKQIGEVKPRTTPAAGGMDESVVLEPEATGESSSLEPTPSSQEAQRALGTSPELPTGVTGSSGTRLPPTPKAQDGGPVGTELFRVPPVSTAATWQSSAPHQPGPSLWAEAKTSEAPSTQDPSTQASTASSPAPEENAPSEGQRVWGQGQSPRPENSLEREEMGPVPAHTDAFQDWGPGSMAHVSVVPVSSEGTPSREPVASGSWTPKAEEPIHATMDPQRLGVLITPVPDAQAATRRQAVGLLAFLGLLFCLGVAMFTYQSLQGCPRKMAGEMAEGLRYIPRSCGSNSYVLVPV

SEQ ID NO: 3789 - protein, 359 aa, Homo Sapiens
MTSKIPVALLIHYQQNQASCGKRAIILETRQHRLFCADPKEQWVKDAMQHLDRQAAALTRNGGTFEKQIGEVKPRTTPAAGGMDESVVLEPEATGESSSLEPTPSSQEAQRALGTSPELPTGVTGSSGTRLPPTPKAQDGGPVGTELFRVPPVSTAATWQSSAPHQPGPSLWAEAKTSEAPSTQDPSTQASTASSPAPEENAPSEGQRVWGQGQSPRPENSLEREEMGPVPAHTDAFQDWGPGSMAHVSVVPVSSEGTPSREPVASGSWTPKAEEPIHATMDPQRLGVLITPVPDAQAATRRQAVGLLAFLGLLFCLGVAMFTYQSLQGCPRKMAGEMAEGLRYIPRSCGSNSYVLVPV

SEQ ID NO: 3790 - protein, 89 aa, Homo Sapiens
MALLLCFVLLCGVVDFARSLSITTPEEMIEKAKGETAYLPCKFTLSPEDQGPLDIEWLISPADNQKVDQVGRCATSKEPYVHCQKLHRQ

SEQ ID NO: 3791 - protein, 200 aa, Homo Sapiens
MALLLCFVLLCGVVDFARSLSITTPEEMIEKAKGETAYLPCKFTLSPEDQGPLDIEWLISPADNQKVDQVIILYSGDKIYDDYYPDLKGRVHFTSNDLKSGDASINVTNLQLSDIGTYQCKVKKAPGVANKKIHLVVLGKMCHLQRAVRPLPEATSAVIIHPWGPCLLPTWKDIPRLSITKYQVKTLNALLRVRLSHLLR

SEQ ID NO: 3792 - protein, 365 aa, Homo Sapiens
MALLLCFVLLCGVVDFARSLSITTPEEMIEKAKGETAYLPCKFTLSPEDQGPLDIEWLISPADNQKVDQVIILYSGDKIYDDYYPDLKGRVHFTSNDLKSGDASINVTNLQLSDIGTYQCKVKKAPGVANKKIHLVVLVKPSGARCYVDGSEEIGSDFKIKCEPKEGSLPLQYEWQKLSDSQKMPTSWLAEMTSSVISVKNASSEYSGTYSCTVRNRVGSDQCLLRLNVVPPSNKAGLIAGAIIGTLLALALIGLIIFCCRKKRREEKYEKEVHHDIREDVPPPKSRTSTARSYIGSNHSSLGSMSPSNMEGYSKTQYNQVPSEDFERTPQSPTLPPAKVAAPNLSRMGAIPVMIPAQSKDGSIV

SEQ ID NO: 3793 - protein, 352 aa, Homo Sapiens
MALLLCFVLLCGVVDFARSLSITTPEEMIEKAKGETAYLPCKFTLSPEDQGPLDIEWLISPADNQKVDQVIILYSGDKIYDDYYPDLKGRVHFTSNDLKSGDASINVTNLQLSDIGTYQCKVKKAPGVANKKIHLVVLVKPSGARCYVDGSEEIGSDFKIKCEPKEGSLPLQYEWQKLSDSQKMPTSWLAEMTSSVISVKNASSEYSGTYSCTVRNRVGSDQCLLRLNVVPPSNKAGLIAGAIIGTLLALALIGLIIFCCRKKRREEKYEKEVHHDIREDVPPPKSRTSTARSYIGSNHSSLGSMSPSNMEGYSKTQYNQVPSEDFERTPQSPTLPPAKFKYPYKTDGITVV

SEQ ID NO: 3794 - protein, 252 aa, Homo Sapiens
MALLLCFVLLCGVVDFARSLSITTPEEMIEKAKGETAYLPCKFTLSPEDQGPLDIEWLISPADNQKVDQVIILYSGDKIYDDYYPDLKGRVHFTSNDLKSGDASINVTNLQLSDIGTYQCKVKKAPGVANKKIHLVVLVKPSGARCYVDGSEEIGSDFKIKCEPKEGSLPLQYEWQKLSDSQKMPTSWLAGKMCHLQRAVRPLPEATSAVIIHPWGPCLLPTWKDIPRLSITKYQVKTLNALLRVRLSHLLR

SEQ ID NO: 3795 - protein, 107 aa, Homo Sapiens
MARAALSAAPSNPRLLRVALLLLLLVAAGRRAAGASVATELRCQCLQTLQGIHPKNIQSVNVKSPGPHCAQTEVIATLKNGRKACLNPASPIVKKIIEKMLNSDKSN

SEQ ID NO: 3796 - protein, 98 aa, Homo Sapiens
MNQTAILICCLIFLTLSGIQGVPLSRTVRCTCISISNQPVNPRSLEKLEIIPASQFCPRVEIIATMKKKGEKRCLNPESKAIKNLLKAVSKERSKRSP

SEQ ID NO: 3797 - protein, 94 aa, Homo Sapiens
MSVKGMAIALAVILCATVVQGFPMFKRGRCLCIGPGVKAVKVADIEKASIMYPSNNCDKIEVIITLKENKGQRCLNPKSKQARLIIKKVERKNF

SEQ ID NO: 3798 - protein, 94 aa, Homo Sapiens; identical to SEQ ID NO: 3797

SEQ ID NO: 3799 - protein, 89 aa, Homo Sapiens
MNAKVVVVLVLVLTALCLSDGKPVSLSYRCPCRFFESHVARANVKHLKILNTPNCALQIVARLKNNNRQVCIDPKLKWIQEYLEKALNK

SEQ ID NO: 3800 - protein, 119 aa, Homo Sapiens
MNAKVVVVLVLVLTALCLSDGKPVSLSYRCPCRFFESHVARANVKHLKILNTPNCALQIVARLKNNNRQVCIDPKLKWIQEYLEKALNKGRREEKVGKKEKIGKKKRQKKRKAAQKRKN

SEQ ID NO: 3801 - protein, 93 aa, Homo Sapiens
MNAKVVVVLVLVLTALCLSDGKPVSLSYRCPCRFFESHVARANVKHLKILNTPNCALQIVARLKNNNRQVCIDPKLKWIQEYLEKALNKRFKM

SEQ ID NO: 3802 - protein, 140 aa, Homo Sapiens
MNAKVVVVLVLVLTALCLSDGKPVSLSYRCPCRFFESHVARANVKHLKILNTPNCALQIVARLKNNNRQVCIDPKLKWIQEYLEKALNNLISAAPAGKRVIAGARALHPSPPRACPTARALCEIRLWPPPEWSWPSPGDV

SEQ ID NO: 3803 - protein, 103 aa, Homo Sapiens
MNAKVVVVLVLVLTALCLSDGKPVSLSYRCPCRFFESHYCTCLIRVSFHGATPLTQGSWVLYSLSCAGGETGLREPGPMVSPRVESHQEGRLGVPGPVNLGKA

SEQ ID NO: 3804 - protein, 103 aa, Homo Sapiens; identical to SEQ ID NO: 3803

SEQ ID NO: 3805 - protein, 109 aa, Homo Sapiens
MKFISTSLLLMLLVSSLSPVQGVLEVYYTSLRCRCVQESSVFIPRRFIDRIQILPRGNGCPRKEIIVWKKNKSIVCVDPQAEWIQRMMEVLRKRSSSTLPVPVFKRKIP

SEQ ID NO: 3806 - protein, 99 aa, Homo Sapiens
MRLLAAALLLLLLALYTARVDGSKCKCSRKGPKIRYSDVKKLEMKPKYPHCEEKMVIITTKSVSRYRGQEHCLHPKLQSTKRFIKWYNAWNEKRRVYEE

SEQ ID NO: 3807 - protein, 111 aa, Homo Sapiens
MSLLPRRAPPVSMRLLAAALLLLLLALYTARVDGSKCKCSRKGPKIRYSDVKKLEMKPKYPHCEEKMVIITTKSVSRYRGQEHCLHPKLQSTKRFIKWYNAWNEKRRVYEE

SEQ ID NO: 3808 - protein, 62 aa, Homo Sapiens
MKVLISSLLLLLPLMLMSMVSSSLNPGVARGHRDRGQASRRWLQEGGQECECKAMLLFQIGS

SEQ ID NO: 3809 - protein, 119 aa, Homo Sapiens
MKVLISSLLLLLPLMLMSMVSSSLNPGVARGHRDRGQASRRWLQEGGQECECKDWFLRAPRRKFMTVSGLPKKQCPCDHFKGNVKKTRHQRHHRKPNKHSRACQQFLKQCQLRSFALPL

SEQ ID NO: 3810 - protein, 107 aa, Homo Sapiens
MARATLSAAPSNPRLLRVALLLLLLVAASRRAAGAPLATELRCQCLQTLQGIHLKNIQSVKVKSPGPHCAQTEVIATLKNGQKACLNPASPMVKKIIEKMLKNGKSN

SEQ ID NO: 3811 - protein, 107 aa, Homo Sapiens
MAHATLSAAPSNPRLLRVALLLLLLVAASRRAAGASVVTELRCQCLQTLQGIHLKNIQSVNVRSPGPHCAQTEVIATLKNGKKACLNPASPMVQKIIEKILNKGSTN

SEQ ID NO: 3812 - protein, 114 aa, Homo Sapiens
MSLLSSRAARVPGPSSSLCALLVLLLLLTQPGPIASAGPAAAVLRELRCVCLQTTQGVHPKMISNLQVFAIGPQCSKVEVVASLKNGKEICLDPEAPFLKKVIQKILDGGNKEN

SEQ ID NO: 3813 - protein, 113 aa, Homo Sapiens
MSLPSSRAARVPGPSGSLCALLALLLLLTPPGPLASAGPVSAVLTELRCTCLRVTLRVNPKTIGKLQVFPAGPQCSKVEVVASLKNGKQVCLDPEAPFLKKVIQKILDRYLSL

SEQ ID NO: 3814 - protein, 114 aa, Homo Sapiens
MSLPSSRAARVPGPSGSLCALLALLLLLTPPGPLASAGPVSAVLTELRCTCLRVTLRVNPKTIGKLQVFPAGPQCSKVEVVASLKNGKQVCLDPEAPFLKKVIQKILDSGNKKN

SEQ ID NO: 3815 - protein, 95 aa, Homo Sapiens
MTSKLAVALLAAFLISAALCEGAVLPRSAKELRCQCIKTYSKPFHPKFIKELRVIESGPHCANTEIIVKLSDGRELCLDPKENWVQRVVEKFLKR

SEQ ID NO: 3816 - protein, 99 aa, Homo Sapiens
MTSKLAVALLAAFLISAALCEGAVLPRSAKELRCQCIKTYSKPFHPKFIKELRVIESGPHCANTEIIVKLSDGRELCLDPKENWVQRVVEKFLKRAENS

SEQ ID NO: 3817 - protein, 125 aa, Homo Sapiens
MKKSGVLFLLGIILLVLIGVQGTPVVRKGRCSCISTNQGTIHLQSLKDLKQFAPSPSCEKIEIIATLKNGVQTCLNPDSADVKELIKKWEKQVSQKKKQKNGKKHQKKKVLKVRKSQRSRQKKTT

SEQ ID NO: 3818 - protein, 182 aa, Homo Sapiens
MEPQLGPEAAALRPGWLALLLWVSALSCSFSLPASSLSSLVPQVRTSYNFGRTFLGLDKCNACIGTSICKKFFKEEIRSDNWLASHLGLPPDSLLSYPANYSDDSKIWRPVEIFRLVSKYQNEISDRRICASASAPKTCSIERVLRKTERFQKWLQAKRLTPDLVQDCHQGQRELKFLCMLR

SEQ ID NO: 3819 - protein, 433 aa, Homo Sapiens
MEPQLGPEAAALRPGWLALLLWVSALSCSFSLPASSLSSLVPQVRTSYNFGRTFLGLDKCNACIGTSICKKFFKEEIRSDNWLASHLGLPPDSLLSYPANYSDDSKIWRPVEIFRLVSKYQNEISDRRICASASAPKTCSIERVLRKTERFQKWLQAKRLTPDLVQGLASPLLRCPSQRLLDRVVRRYAEVADAGSIFMDHFTDRDKLRLLYTLAVNSHPILLQIFPGAEGWPLPKYLGSCGRFLVSTSTRPLQEFYDAPPDQAADLAYQLLGVLESLRSNDLNYFFYFTHIDAGMFGVFNNGHLFIRDASAVGVIDKQEGSQEANRAGENKDIFSCLVSGCQAQLPSCESISEKQSLVLVCQKLLPRLLQGRFPSPVQDDIDSILVQCGDSIRPDPEVLGAASQLKDILRPLRTCDSRFAYRYPDCKYNDKF

SEQ ID NO: 3820 - protein, 264 aa, Homo Sapiens
MLRCGGRGLLLGLAVAAAAVMAARLMGWWGPRAGFRLFIPEELSRYRGGPGDPGLYLALLGRVYDVSSGRRHYEPGSHYSGFAGRDASRAFVTGDCSEAGLVDDVSDLSAAEMLTLHNWLSFYEKNYVCVGRVTGRFYGEDGLPTPALTQVEAAITRGLEANKLQLQEKQTFPPCNAEWSSARGSRLWCSQKSGGVSRDWIGVPRKLYKPGAKEPRCVCVRTTGPPSGQMPDNPPHRNRGDLDHPNLAEYTGCPPLAITCSFPL

SEQ ID NO: 3821 - protein, 106 aa, Homo Sapiens
MLTLHNWLSFYEKNYVCVGRVTGRFYGEDGLPTPALTQVEAAITRGLEANKLQLQEKQTFPPCNAEWSSARGSRLWCSQKRGFNSSLALASGSLKHACHRLILQFL

SEQ ID NO: 3822 - protein, 152 aa, Homo Sapiens
MLTLHNWLSFYEKNYVCVGRVTGRFYGEDGLPTPALTQVEAAITRGLEANKLQLQEKQTFPPCNAEWSSARGSRLWCSQKSGGVSRDWIGVPRKLYKPGAKEPRCVCVRTTGPPSGQMPDNPPHRNRGDLDHPNLAEYTGCPPLAITCSFPL

SEQ ID NO: 3823 - protein, 152 aa, Homo Sapiens; identical to SEQ ID NO: 3822

SEQ ID NO: 3824 - protein, 42 aa, Homo Sapiens
MAPKPGAEWSTALSHLVLGVVSLHAAVSTAEASRGAAAGFLL

SEQ ID NO: 3825 - protein, 362 aa, Homo Sapiens
MAPKPGAEWSTALSHLVLGVVSLHAAVSTAEASRGAAAGFLLQVLAATTTLAPGLSTHEDCLAGAWVATVIGLPLLAFDFHWCTNGHLMCAGCFIHLLADARLKEEQATCPNCRCEISKSLCCRNLAVEKAVSELPSECGFCLRQFPRSLLERHQKEECQDRVTQCKYKRIGCPWHGPFHELTVHEAACAHPTKTGSELMEILDGMDQSHRKEMQLYNSIFSLLSFEKIGYTEVQFRPYRTDDFITRLYYETPRFTVLNQTWVLKARVNDSERNPNLSCKRTLSFQLLLKSKVTAPLECSFLLLKGPYDDVRISPVIYHFVFTNESNETDYVPLPIIDSVECNKLLAAKNINLRLFLFQIQK

SEQ ID NO: 3826 - protein, 144 aa, Homo Sapiens
MAPKPGAEWSTALSHLVLGVVSLHAAVSTAEASRGAAAGFLLQVLAATTTLAPGLSTHEDCLAGAWVATVIGLPLLAFDFHWVNGDRSSANLLLGGGMVLAVAGGHLGPEGRSVAGQAMLLVVAVTILIVAVFTANTYGMWGGA

SEQ ID NO: 3827 - protein, 192 aa, Homo Sapiens
MAPKPGAEWSTALSHLVLGVVSLHAAVSTAEASRGAAAGFLLQVLAATTTLAPGLSTHEDCLAGAWVATVIGLPLLAFDFHWVNGDRSSANLLLGGGMVLAVAGGHLGPEGRSVAGQAMLLVVAVTILIVAVFTANTYGMWGGAMLGVAGLLSRLEEDRLLLLPKEDVCRWALAVGSWAYCRALHTQRLQWE

SEQ ID NO: 3828 - protein, 192 aa, Homo Sapiens; identical to SEQ ID NO: 3827

SEQ ID NO: 3829 - protein, 192 aa, Homo Sapiens; identical to SEQ ID NO: 3827

SEQ ID NO: 3830 - protein, 246 aa, Homo Sapiens
MAPKPGAEWSTALSHLVLGVVSLHAAVSTAECTNGHLMCAGCFIHLLADARLKEEQATCPNCRCEISKSLCCRNLAVEKAVSELPSECGFCLRQFPRSLLERHQKEECQDRVTQCKYKRIGCPWHGPFHELTVHEAACAHPTKTGSELMEILDGMDQSHRKEMQLYNSIFSLLSFEKIGYTEVQFRPYRTDDFITRLYYETPRFTVLNQTWVLKARVNDSERNPNLSCKRTLSFQLLLKSKVTAPL

SEQ ID NO: 3831 - protein, 404 aa, Homo Sapiens
MSGAEEAGGGGPAAGPAGSVPAGVGVGVGAGPGAAAGQAAAAALGEAAGPGLPDEAGLAGARQLQLQEAAGDPDAPPKKRLRAAEAAEAAAAAAAAGSGKLEERLYSVLCCTVCLDLPKASVYQCTNGHLMCAGCFIHLLADARLKEEQATCPNCRCEISKSLCCRNLAVEKAVSELPSECGFCLRQFPRSLLERHQKEECQDRVTQCKYKRIGCPWHGPFHELTVHEAACAHPTKTGSELMEILDGMDQSHRKEMQLYNSIFSLLSFEKIGYTEVQFRPYRTDDFITRLYYETPRFTVLNQTWVLKARVNDSERNPNLSCKRTLSFQLLLKSKVTAPLECSFLLLKGPYDDVRISPVIYHFVFTNESNETDYVPLPIIDSVECNKLLAAKNINLRLFLFQIQK

SEQ ID NO: 3832 - protein, 479 aa, Homo Sapiens
MWELVALLLLTLAYLFWPKRRCPGAKYPKSLLSLPLVGSLPFLPRHGHMHNNFFKLQKKYGPIYSVRMGTKTTVIVGHHQLAKEVLIKKGKDFSGRPQMATLDIASNNRKGIAFADSGAHWQLHRRLAMATFALFKDGDQKLEKIICQEISTLCDMLATHNGQSIDISFPVFVAVTNVISLICFNTSYKNGDPELNVIQNYNEGIIDNLSKDSLVDLVPWLKEKFRSDSITNMLDTLMQAKMNSDNGNAGPDQDSELLSDNHILTTIGDIFGAGVETTTSVVKWTLAFLLHNPQVKKKLYEEIDQNVGFSRTPTISDRNRLLLLEATIREVLRLRPVAPMLIPHKANVDSSIGEFAVDKGTEVIINLWALHHNEKEWHQPDQFMPERFLNPAGTQLISPSVSYLPFGAGPRSCIGEILARQELFLIMAWLLQRFDLEVPDDGQLPSLEGIPKVVFLIDSFKVKIKVRQAWREAQAEGST

SEQ ID NO: 3833 - protein, 508 aa, Homo Sapiens
MWELVALLLLTLAYLFWPKRRCPGAKYPKSLLSLPLVGSLPFLPRHGHMHNNFFKLQKKYGPIYSVRMGTKTTVIVGHHQLAKEVLIKKGKDFSGRPQMATLDIASNNRKGIAFADSGAHWQLHRRLAMATFALFKDGDQKLEKIICQEISTLCDMLATHNGQSIDISFPVFVAVTNVISLICFNTSYKNGDPELNVIQNYNEGIIDNLSKDSLVDLVPWLKIFPNKTLEKLKSHVKIRNDLLNKILENYKEKFRSDSITNMLDTLMQAKMNSDNGNAGPDQDSELLSDNHILTTIGDIFGAGVETTTSVVKWTLAFLLHNPQVKKKLYEEIDQNVGFSRTPTISDRNRLLLLEATIREVLRLRPVAPMLIPHKANVDSSIGEFAVDKGTEVIINLWALHHNEKEWHQPDQFMPERFLNPAGTQLISPSVSYLPFGAGPRSCIGEILARQELFLIMAWLLQRFDLEVPDDGQLPSLEGIPKVVFLIDSFKVKIKVRQAWREAQAEGST

SEQ ID NO: 3834 - protein, 509 aa, Homo Sapiens
MWELVALLLLTLAYLFWPKRRCPGAKYPKSLLSLPLVGSLPFLPRHGHMHNNFFKLQKKYGPIYSVRMGTKTTVIVGHHQLAKEVLIKKGKDFSGRPQMATLDIASNNRKGIAFADSGAHWQLHRRLAMATFALFKDGDQKLEKIICQEISTLCDMLATHNGQSIDISFPVFVAVTNVISLICFNTSYKNGDPELNVIQNYNEGIIDNLSKDSLVDLVPWLKIFPNKTLEKLKSHVKIRNDLLNKILENYKEKFRSDSITNMLDTLMQAKMNSDNGNAGPDQDSELLSDNHILTTIGDIFGAGVETTTSVVKWTLAFLLHNPQVKKKLYEEIDQNVGFSRTPTISDRNRLLLLEATIREVLRLRPVAPMLIPHKANVDSSSIGEFAVDKGTEVIINLWALHHNEKEWHQPDQFMPERFLNPAGTQLISPSVSYLPFGAGPRSCIGEILARQELFLIMAWLLQRFDLEVPDDGQLPSLEGIPKVVFLIDSFKVKIKVRQAWREAQAEGST

SEQ ID NO: 3835 - protein, 407 aa, Homo Sapiens
MWELVALLLLTLAYLFWPKRRCPGAKYPKSLLSLPLVGSLPFLPRHGHMHNNFFKLQKKYGPIYSVRMGTKTTVIVGHHQLAKEVLIKKGKDFSGRPQMATLDIASNNRKGIAFADSGAHWQLHRRLAMATFALFKDGDQKLEKIICQEISTLCDMLATHNGQSIDISFPVFVAVTNVISLICFNTSYKNGDPELNVIQNYNEGIIDNLSKDSLVDLVPWLKVKKKLYEEIDQNVGFSRTPTISDRNRLLLLEATIREVLRLRPVAPMLIPHKANVDSSIGEFAVDKGTEVIINLWALHHNEKEWHQPDQFMPERFLNPAGTQLISPSVSYLPFGAGPRSCIGEILARQELFLIMAWLLQRFDLEVPDDGQLPSLEGIPKVVFLIDSFKVKIKVRQAWREAQAEGST

SEQ ID NO: 3836 - protein, 356 aa, Homo Sapiens
MWELVALLLLTLAYLFWPKRRCPGAKYPKSLLSLPLVGSLPFLPRHGHMHNNFFKLQKKYGPIYSVRMGTKTTVIVGHHQLAKEVLIKKGKDFSGRPQMEKFRSDSITNMLDTLMQAKMNSDNGNAGPDQDSELLSDNHILTTIGDIFGAGVETTTSVVKWTLAFLLHNPQVKKKLYEEIDQNVGFSRTPTISDRNRLLLLEATIREVLRLRPVAPMLIPHKANVDSSIGEFAVDKGTEVIINLWALHHNEKEWHQPDQFMPERFLNPAGTQLISPSVSYLPFGAGPRSCIGEILARQELFLIMAWLLQRFDLEVPDDGQLPSLEGIPKVVFLIDSFKVKIKVRQAWREAQAEGST

SEQ ID NO: 3837 - protein, 192 aa, Homo Sapiens
MIFSLASCIITAKLCTWAICFLTTSEEVQKKLYEEINQVFGNGPVTPEKIEQLRYCQHVLCETVRTAKLTPVSAQLQDIEGKIDRFIIPRETLVLYALGVVLQDPNTWPSPHKFDPDRFDDELVMKTFSSLGFSGTQECPELRFAYMVTTVLLSVLVKRLHLLSVEGQVIETKYELVTSSREEAWITVSKRY

SEQ ID NO: 3838 - protein, 258 aa, Homo Sapiens
MLDFAIFAVTFLLALVGAVLYLYPASRQAAGIPGITPTEEKDGNLPDIVNSGSLHEFLVNLHERYGPVVSFWFGRRLVVSLGTVDVLKQHINPNKTSDPFETMLKSLLRYQSGGGSVSENHMRKKLYENGVTDSLKSNFALLLKLSEELLDKWLSYPETQHVPLSQHMLGFAMKSVTQMVMGSTFEDDQEVIRFQKNHGTILEDSMIFSLASCIITAKLCTWAICFLTTSEEVQKKLYEEINQVFGNGPVTPEKIEQL

SEQ ID NO: 3839 - protein, 470 aa, Homo Sapiens
MLDFAIFAVTFLLALVGAVLYLYPASRQAAGIPGITPTEEKDGNLPDIVNSGSLHEFLVNLHERYGPVVSFWFGRRLVVSLGTVDVLKQHINPNKTSDPFETMLKSLLRYQSGGGSVSENHMRKKLYENGVTDSLKSNFALLLKLSEELLDKWLSYPETQHVPLSQHMLGFAMKSVTQMVMGSTFEDDQEVIRFQKNHGTLCIFTYFQVWSEIGKGFLDGSLDKNMTRKKQYEDALMQLESVLRNIIKERKGRNFSQHIFIDSLVQGNLNDQQILEDSMIFSLASCIITAKLCTWAICFLTTSEEVQKKLYEEINQVFGNGPVTPEKIEQLRYCQHVLCETVRTAKLTPVSAQLQDIEGKIDRFIIPRETLVLYALGVVLQDPNTWPSPHKFDPDRFDDELVMKTFSSLGFSGTQECPELRFAYMVTTVLLSVLVKRLHLLSVEGQVIETKYELVTSSREEAWITVSKRY

SEQ ID NO: 3840 - protein, 208 aa, Homo Sapiens
MLDFAIFAVTFLLALVGAVLYLYPASRQAAGIPGITPTEEKDGNLPDIVNSGSLHEFLVNLHERYGPVVSFWFGRRLVVSLGTVDVLKQHINPNKTSDPFETMLKSLLRYQSGGGSVSENHMRKKLYENGVTDSLKSNFALLLKLSEELLDKWLSYPETQHVPLSQHMLGFAMKSVTQMVMGSTFEDDQEVIRFQKNHGTPSCNWSLF

SEQ ID NO: 3841 - protein, 462 aa, Homo Sapiens
MLDFAIFAVTFLLALVGAVLYLYPASRQAAGIPGITPTEEKDGNLPDIVNSGSLHEFLVNLHERYGPVVSFWFGRRLVVSLGTVDVLKQHINPNKTSDPFETMLKSLLRYQSGGGSVSENHMRKKLYENGVTDSLKSNFALLLKLSEELLDKWLSYPETQHVPLSQHMLGFAMKSVTQMVMGSTFEDDQEVIRFQKNHGTVWSEIGKGFLDGSLDKNMTRKKQYEDALMQLESVLRNIIKERKGRNFSQHIFIDSLVQGNLNDQQILEDSMIFSLASCIITAKLCTWAICFLTTSEEVQKKLYEEINQVFGNGPVTPEKIEQLRYCQHVLCETVRTAKLTPVSAQLQDIEGKIDRFIIPRETLVLYALGVVLQDPNTWPSPHKFDPDRFDDELVMKTFSSLGFSGTQECPELRFAYMVTTVLLSVLVKRLHLLSVEGQVIETKYELVTSSREEAWITVSKRY

SEQ ID NO: 3842 - protein, 44 aa, Homo Sapiens
MLDFAIFAVTFLLALVGAVLYLYPASRQAAGIPGITPTEENGPF

SEQ ID NO: 3843 - protein, 44 aa, Homo Sapiens; identical to SEQ ID NO: 3842

SEQ ID NO: 3844 - protein, 78 aa, Homo Sapiens
MLLLGLLLLLPLLAGARLLWNWWKLRSLHLPPLAPGFLHLLQPDLPIYLLGLTQKFGPIYRLHLGLQAPTSSCRQAGV

SEQ ID NO: 3845 - protein, 465 aa, Homo Sapiens
MLLLGLLLLLPLLAGARLLWNWWKLRSLHLPPLAPGFLHLLQPDLPIYLLGLTQKFGPIYRLHLGLQDKLVSRNYPDLSLGDYSLLWKAHKKLTRSALLLGIRDSMEPVVEQLTQEFCERMRAQPGTPVAIEEEFSLLTCSIICYLTFGDKIKDDNLMPAYYKCIQEVLKTWSHWSIQIVDVIPFLRFFPNPGLRRLKQAIEKRDHIVEMQLRQHKESLVAGQWRDMMDYMLQGVAQPSMEEGSGQLLEGHVHMAAVDLLIGGTETTANTLSWAVVFLLHHPEIQQRLQEELDHELGPGASSSRVPYKDRARLPLLNATIAEVLRLRPVVPLALPHRTTRPSSISGYDIPEGTVIIPNLQGAHLDETVWERPHEFWPDRFLEPGKNSRALAFGCGARVCLGEPLARLELFVVLTRLLQAFTLLPSGDALPSLQPLPHCSVILKMQPFQVRLQPRGMGAHSPGQSQ

SEQ ID NO: 3846 - protein, 186 aa, Homo Sapiens
MLLLGLLLLLPLLAGARLLWNWWKLRSLHLPPLAPGFLHLLQPDLPIYLLGLTQKFGPIYRLHLGLQDVVVLNSKRTIEEAMVKKWADFAGRPEPLTFPTLQPPPPPADKLVSRNYPDLSLGDYSLLWKAHKKLTRSALLLGIRDSMEPVVEQLTQEFCERMRAQPGTPVAIEEEFSLLTCSIICY

SEQ ID NO: 3847 - protein, 108 aa, Homo Sapiens
MLLLGLLLLLPLLAGARLLWNWWKLRSLHLPPLAPGFLHLLQPDLPIYLLGLTQKFGPIYRLHLGLQDVVVLNSKRTIEEAMVKKWADFAGRPEPLTSPTSSCRQAGV

SEQ ID NO: 3848 - protein, 495 aa, Homo Sapiens
MLLLGLLLLLPLLAGARLLWNWWKLRSLHLPPLAPGFLHLLQPDLPIYLLGLTQKFGPIYRLHLGLQDVVVLNSKRTIEEAMVKKWADFAGRPEPLTYKLVSRNYPDLSLGDYSLLWKAHKKLTRSALLLGIRDSMEPVVEQLTQEFCERMRAQPGTPVAIEEEFSLLTCSIICYLTFGDKIKDDNLMPAYYKCIQEVLKTWSHWSIQIVDVIPFLRFFPNPGLRRLKQAIEKRDHIVEMQLRQHKESLVAGQWRDMMDYMLQGVAQPSMEEGSGQLLEGHVHMAAVDLLIGGTETTANTLSWAVVFLLHHPEIQQRLQEELDHELGPGASSSRVPYKDRARLPLLNATIAEVLRLRPVVPLALPHRTTRPSSISGYDIPEGTVIIPNLQGAHLDETVWERPHEFWPDRFLEPGKNSRALAFGCGARVCLGEPLARLELFVVLTRLLQAFTLLPSGDALPSLQPLPHCSVILKMQPFQVRLQPRGMGAHSPGQSQ

SEQ ID NO: 3849 - protein, 495 aa, Homo Sapiens; identical to SEQ ID NO: 3848

SEQ ID NO: 3850 - protein, 495 aa, Homo Sapiens; identical to SEQ ID NO: 3848

SEQ ID NO: 3851 - protein, 190 aa, Homo Sapiens
MLLLGLLLLLPLLAGARLLWNWWKLRSLHLPPLAPGFLHLLQPDLPIYLLGLTQKFGPIYRLHLGLQDVVVLNSKRTIEEAMVKKWADFAGRPEPLTYKLVSRNYPDLSLGDYSLLWKAHKKLTRSALLLGIRDSMEPVVEQLTQEFCERMRAQPGTPVAIEEEFSLLTCSIICYLTFGDKIKEVLKTWS

SEQ ID NO: 3852 - protein, 321 aa, Homo Sapiens
MAIRVLLGFSIPEEDLGHLFEVYQQFVDNVFSLPVDLPFSGYRRGIQARQILQKGLEKAIREKLQCTQGKDYLDALDLLIESSKEHGKEMTMQELKDGTLELIFAAYATTASASTSLIMQLLKHPTVLEKLRDELRAHGILHSGGCPCEGTLRLDTLSGLRYLDCVIKEVMRLFTPISGGYRTVLQTFELDGFQIPKGWSVMYSIRDTHDTAPVFKDVNVFDPDRFSQARSEDKDGRFHYLPFGGGVRTCLGKHLAKLFLKVLAVELASTSRFELATRTFPRITLVPVLHPVDGLSVKFFGLDSNQNEILPETEAMLSATV

SEQ ID NO: 3853 - protein, 172 aa, Homo Sapiens
MKNKTCVLVCVSVFGGERGQVTVPRVGVRRPSLAGPLQKCTLRETRVWLPQGSGFQSSRREKYGNVFKTHLLGRPLIRVTGAENVRKILMGEHHLVSTEWPRSTRMLLGPNTVSNSIGDIHRNKRKVFSKIFSHEALESYLPKIQLVIQDTLRAWSSHPEAINVYQEAQKLT

SEQ ID NO: 3854 - protein, 512 aa, Homo Sapiens
MLFEGLDLVSALATLAACLVSVTLLLAVSQQLWQLRWAATRDKSCKLPIPKGSMGFPLIGETGHWLLQGSGFQSSRREKYGNVFKTHLLGRPLIRVTGAENVRKILMGEHHLVSTEWPRSTRMLLGPNTVSNSIGDIHRNKRKVFSKIFSHEALESYLPKIQLVIQDTLRAWSSHPEAINVYQEAQKLTFRMAIRVLLGFSIPEEDLGHLFEVYQQFVDNVFSLPVDLPFSGYRRGIQARQILQKGLEKAIREKLQCTQGKDYLDALDLLIESSKEHGKEMTMQELKDGTLELIFAAYATTASASTSLIMQLLKHPTVLEKLRDELRAHGILHSGGCPCEGTLRLDTLSGLRYLDCVIKEVMRLFTPISGGYRTVLQTFELDGFQIPKGWSVMYSIRDTHDTAPVFKDVNVFDPDRFSQARSEDKDGRFHYLPFGGGVRTCLGKHLAKLFLKVLAVELASTSRFELATRTFPRITLVPVLHPVDGLSVKFFGLDSNQNEILPETEAMLSATV

SEQ ID NO: 3855 - protein, 182 aa, Homo Sapiens
MLFEGLDLVSALATLAACLVSVTLLLAVSQQLWQLRWAATRDKSCKLPIPKGSMGFPLIGETGHWLLQVFSKIFSHEALESYLPKIQLVIQDTLRAWSSHPEAINVYQEAQKLTFRMAIRVLLGFSIPEEDLGHLFEVYQQFVDNVFSLPVDLPFSGYRRGIQARQILQKGLEKAIREKLQC

SEQ ID NO: 3856 - protein, 437 aa, Homo Sapiens
MLFEGLDLVSALATLAACLVSVTLLLAVSQQLWQLRWAATRDKSCKLPIPKGSMGFPLIGETGHWLLQVFSKIFSHEALESYLPKIQLVIQDTLRAWSSHPEAINVYQEAQKLTFRMAIRVLLGFSIPEEDLGHLFEVYQQFVDNVFSLPVDLPFSGYRRGIQARQILQKGLEKAIREKLQCTQGKDYLDALDLLIESSKEHGKEMTMQELKDGTLELIFAAYATTASASTSLIMQLLKHPTVLEKLRDELRAHGILHSGGCPCEGTLRLDTLSGLRYLDCVIKEVMRLFTPISGGYRTVLQTFELDGFQIPKGWSVMYSIRDTHDTAPVFKDVNVFDPDRFSQARSEDKDGRFHYLPFGGGVRTCLGKHLAKLFLKVLAVELASTSRFELATRTFPRITLVPVLHPVDGLSVKFFGLDSNQNEILPETEAMLSATV

SEQ ID NO: 3857 - protein, 494 aa, Homo Sapiens
MLASGMLLVALLVCLTVMVLMSVWQQRKSKGKLPPGPTPLPFIGNYLQLNTEQMYNSLMKISERYGPVFTIHLGPRRVVVLCGHDAVREALVDQAEEFSGRGEQATFDWVFKGYGVVFSNGERAKQLRRFSIATLRDFGVGKRGIEERIQEEAGFLIDALRGTGGANIDPTFFLSRTVSNVISSIVFGDRFDYKDKEFLSLLRMMLGIFQFTSTSTGQLYEMFSSVMKHLPGPQQQAFQLLQGLEDFIAKKVEHNQRTLDPNSPRDFIDSFLIRMQEEEKNPNTEFYLKNLVMTTLNLFIGGTETVSTTLRYGFLLLMKHPEVEAKVHEEIDRVIGKNRQPKFEDRAKMPYMEAVIHEIQRFGDVIPMSLARRVKKDTKFRDFFLPKGTEVYPMLGSVLRDPSFFSNPQDFNPQHFLNEKGQFKKSDAFVPFSIGKRNCFGEGLARMELFLFFTTVMQNFRLKSSQSPKDIDVSPKHVGFATIPRNYTMSFLPR

SEQ ID NO: 3858 - protein, 65 aa, Homo Sapiens
MLASGMLLVALLVCLTVMVLMSVWQQRKSKGKLPPGPTPLPFIGNYLQLNTEQMYNSLMKVSQDQ

SEQ ID NO: 3859 - protein, 80 aa, Homo Sapiens
MLASGLLLVALLACLTVMVLMSVWQQRKSRGKLPPGPTPLPFIGNYLQLNTEHICDSIMKAWRSATGSAPSSSCALPSPP

SEQ ID NO: 3860 - protein, 494 aa, Homo Sapiens
MLASGLLLVALLACLTVMVLMSVWQQRKSRGKLPPGPTPLPFIGNYLQLNTEHICDSIMKFSECYGPVFTIHLGPRRVVVLCGHDAVREALVDQAEEFSGRGEQATFDWVFKGYGVAFSNGERAKQLLRFAIATLRDFGVGKRGIEERIQEESGFLIEAIRSTHGANIDPTFFLSRTVSNVISSIVFGDRFDYEDKEFLSLLSMMLGIFQFTSTSTGQLYEMFSSVMKHLPGPQQQAFKLLQGLEDFIAKKVEHNQRTLDPNSPQDFIDSFLIHMQEEEKNPNTEFYLKNLMMSTLNLFIAGTETVSTTLRYGFLLLMKHPEVEAKVHEEIDRVIGKNRQPKFEDRTKMPYMEAVIHEIQRFGDVIPMSLARRVKKDTKFRDFFLPKGTEVFPMLGSVLRDPSFFSNPQDFNPQHFLDDKGQFKKSDAFVPFSIGKRNCFGEGLARMELFLFFTTVMQNFRLKSSQSPKDIDVSPKHVVFATIPRNYTMSFLPR

SEQ ID NO: 3861 - protein, 443 aa, Homo Sapiens
MLASGLLLVALLACLTVMVLMSVWQQRKSRGKLPPGPTPLPFIGNYLQLNTEHICDSIMKVSQGVAFSNGERAKQLLRFAIATLRDFGVGKRGIEERIQEESGFLIEAIRSTHGANIDPTFFLSRTVSNVISSIVFGDRFDYEDKEFLSLLSMMLGIFQFTSTSTGQLYEMFSSVMKHLPGPQQQAFKLLQGLEDFIAKKVEHNQRTLDPNSPQDFIDSFLIHMQEEEKNPNTEFYLKNLMMSTLNLFIAGTETVSTTLRYGFLLLMKHPEVEAKVHEEIDRVIGKNRQPKFEDRTKMPYMEAVIHEIQRFGDVIPMSLARRVKKDTKFRDFFLPKGTEVFPMLGSVLRDPSFFSNPQDFNPQHFLDDKGQFKKSDAFVPFSIGKRNCFGEGLARMELFLFFTTVMQNFRLKSSQSPKDIDVSPKHVVFATIPRNYTMSFLPR

SEQ ID NO: 3862 - protein, 491 aa, Homo Sapiens
MELSVLLFLALLTGLLLLLVQRHPNTHDRLPPGPRPLPLLGNLLQMDRRGLLKSFLRFREKYGDVFTVHLGPRPVVMLCGVEAIREALVDKAEAFSGRGKIAMVDPFFRGYGVIFANGNRWKVLRRFSVTTMRDFGMGKRSVEERIQEEAQCLIEELRKSKGALMDPTFLFQSITANIICSIVFGKRFHYQDQEFLKMLNLFYQTFSLISSVFGQLFELFSGFLKYFPGAHRQVYKNLQEINAYIGHSVEKHRETLDPSAPKDLIDTYLLHMEKEKSNAHSEFSHQNLNLNTLSLFFAGTETTSTTLRYGFLLMLKYPHVAERVYREIEQVIGPHRPPELHDRAKMPYTEAVIYEIQRFSDLLPMGVPHIVTQHTSFRGYIIPKDTEVFLILSTALHDPHYFEKPDAFNPDHFLDANGALKKTEAFIPFSLGKRICLGEGIARAELFLFFTTILQNFSMASPVAPEDIDLTPQECGVGKIPPTYQIRFLPR

SEQ ID NO: 3863 - protein, 491 aa, Homo Sapiens; identical to SEQ ID NO: 3862

SEQ ID NO: 3864 - protein, 255 aa, Homo Sapiens
MLCGVEAIREALVDKAEAFSGRGKIAMVDPFFRGYGVIFANGNRWKVLRRFSVTTMRDFGMGKRSVEERIQEEAQCLIEELRKSKERVYREIEQVIGPHRPPELHDRAKMPYTEAVIYEIQRFSDLLPMGVPHIVTQHTSFRGYIIPKDTEVFLILSTALHDPHYFEKPDAFNPDHFLDANGALKKTEAFIPFSLGKRICLGEGIARAELFLFFTTILQNFSMASPVAPEDIDLTPQECGVGKIPPTYQIRFLPR

SEQ ID NO: 3865 - protein, 194 aa, Homo Sapiens
  misc_feature (1)..(1): Xaa can be any naturally occurring amino acid
XPRPLPLLGNLLQMDRRGLLKSFLRFREKYGDVFTVHLGPRPVVMLCGVEAIREALVDKAEAFSGRGKIAMVDPFFRGYGVIFANGNRWKVLRRFSVTTMRDFGMGKRSVEERIQEEAQCLIEELRKSKGALMDPTFLFQSITANIICSIVFGKRFHYQDQEFLKMLNLFYQTFSLISSVFGQTESRCFIPAGV

SEQ ID NO: 3866 - protein, 431 aa, Homo Sapiens
MDPAVALVLCLSCLFLLSLWRQSSGRGRLPSGPTPLPIIGNILQLDVKDMSKSLTNFSKVYGPVFTVYFGLKPIVVLHGYEAVKEALIDHGEEFSGRGSFPVAEKVNKGLGILFSNGKRWKEIRRFCLMTLRNFGMGKRSIEDRVQEEARCLVEELRKTNASPCDPTFILGCAPCNVICSVIFHDRFDYKDQRFLNLMEKFNENLRILSSPWIQEKHNQQSEFTVESLIATVTDMFGAGTETTSTTLRYGLLLLLKYPEVTAKVQEEIECVVGRNRSPCMQDRSHMPYTDAVVHEIQRYIDLLPTNLPHAVTCDVKFKNYLIPKGTTIITSLTSVLHNDKEFPNPEMFDPGHFLDKSGNFKKSDYFMPFSAGKRMCMGEGLARMELFLFLTTILQNFNLKSQVDPKDIDITPIANAFGRVPPLYQLCFIPV

SEQ ID NO: 3867 - protein, 490 aa, Homo Sapiens
MDPAVALVLCLSCLFLLSLWRQSSGRGRLPSGPTPLPIIGNILQLDVKDMSKSLTNFSKVYGPVFTVYFGLKPIVVLHGYEAVKEALIDHGEEFSGRGSFPVAEKVNKGLGILFSNGKRWKEIRRFCLMTLRNFGMGKRSIEDRVQEEARCLVEELRKTNASPCDPTFILGCAPCNVICSVIFHDRFDYKDQRFLNLMEKFNENLRILSSPWIQVCNNFPALIDYLPGSHNKIAENFAYIKSYVLERIKEHQESLDMNSARDFIDCFLIKMEQEKHNQQSEFTVESLIATVTDMFGAGTETTSTTLRYGLLLLLKYPEVTAKVQEEIECVVGRNRSPCMQDRSHMPYTDAVVHEIQRYIDLLPTNLPHAVTCDVKFKNYLIPKGTTIITSLTSVLHNDKEFPNPEMFDPGHFLDKSGNFKKSDYFMPFSAGKRMCMGEGLARMELFLFLTTILQNFNLKSQVDPKDIDITPIANAFGRVPPLYQLCFIPV

SEQ ID NO: 3868 - protein, 490 aa, Homo Sapiens
MDPFVVLVLCLSCLLLLSIWRQSSGRGKLPPGPTPLPVIGNILQIDIKDVSKSLTNLSKIYGPVFTLYFGLERMVVLHGYEVVKEALIDLGEEFSGRGHFPLAERANRGFGIVFSNGKRWKEIRRFSLMTLRNFGMGKRSIEDRVQEEARCLVEELRKTKASPCDPTFILGCAPCNVICSIIFQKRFDYKDQQFLNLMEKLNENIRIVSTPWIQICNNFPTIIDYFPGTHNKLLKNLAFMESDILEKVKEHQESMDINNPRDFIDCFLIKMEKEKQNQQSEFTIENLVITAADLLGAGTETTSTTLRYALLLLLKHPEVTAKVQEEIERVIGRNRSPCMQDRGHMPYTDAVVHEVQRYIDLIPTSLPHAVTCDVKFRNYLIPKGTTILTSLTSVLHDNKEFPNPEMFDPRHFLDEGGNFKKSNYFMPFSAGKRICVGEGLARMELFLFLTFILQNFNLKSLIDPKDLDTTPVVNGFASVPPFYQLCFIPV

SEQ ID NO: 3869 - protein, 162 aa, Homo Sapiens
MDPFVVLVLCLSCLLLLSIWRQSSGRGKLPPGPTPLPVIGNILQIDIKDVSKSLTNLSKIYGPVFTLYFGLERMVVLHGYEVVKEALIDLGEEFSGRGHFPLAERANRGFGIVFSNGKRWKEIRRFSLMTLRNFGMGKRSIEDRVQEEARCLVEELRKTKGG

SEQ ID NO: 3870 - protein, 307 aa, Homo Sapiens
MAAKCCSTFFLGCEFSQFLPLFLLGIISSNGKRWKEIRRFSLTTLRNFGMGKRSIEDRVQEEAHCLVEELRKTKASPCDPTFILGCAPCNVICSVVFQKRFDYKDQNFLTLMKRFNENFRILNSPWIQVCNNFPLLIDCFPGTHNKVLKNVALTRSYIREKVKEHQASLDVNNPRDFIDCFLIKMEQEKDNQKSEFNIENLVGTVADLFVAGTETTSTTLRYGLLLLLKHPEVTAKVQEEIDHVIGRHRSPCMQDRSHMPYTDAVVHEIQRYSDLVPTGVPHAVTTDTKFRNYLIPKSFDNKIMLAA

SEQ ID NO: 3871 - protein, 490 aa, Homo Sapiens
MEPFVVLVLCLSFMLLFSLWRQSCRRRKLPPGPTPLPIIGNMLQIDVKDICKSFTNFSKVYGPVFTVYFGMNPIVVFHGYEAVKEALIDNGEEFSGRGNSPISQRITKGLGIISSNGKRWKEIRRFSLTTLRNFGMGKRSIEDRVQEEAHCLVEELRKTKASPCDPTFILGCAPCNVICSVVFQKRFDYKDQNFLTLMKRFNENFRILNSPWIQVCNNFPLLIDCFPGTHNKVLKNVALTRSYIREKVKEHQASLDVNNPRDFIDCFLIKMEQEKDNQKSEFNIENLVGTVADLFVAGTETTSTTLRYGLLLLLKHPEVTAKVQEEIDHVIGRHRSPCMQDRSHMPYTDAVVHEIQRYSDLVPTGVPHAVTTDTKFRNYLIPKGTTIMALLTSVLHDDKEFPNPNIFDPGHFLDKNGNFKKSDYFMPFSAGKRICAGEGLARMELFLFLTTILQNFNLKSVDDLKNLNTTAVTKGIVSLPPSYQICFIPV

SEQ ID NO: 3872 - protein, 393 aa, Homo Sapiens
MEPFVVLVLCLSFMLLFSLWRQSCRRRKLPPGPTPLPIIGNMLQIDVKDICKSFTNFSKVYGPVFTVYFGMNPIVVFHGYEAVKEALIDNGEEFSGRGNSPISQRITKGLGIISSNGKRWKEIRRFSLTTLRNFGMGKRSIEDRVQEEAHCLVEELRKTKASPCDPTFILGCAPCNVICSVVFQKRFDYKDQNFLTLMKRFNENFRILNSPWIQVCNNFPLLIDCFPGTHNKVLKNVALTRSYIREKVKEHQASLDVNNPRDFIDCFLIKMEQEKDNQKSEFNIENLVGTVADLFVAGTETTSTTLRYGLLLLLKHPEVTAKVQEEIDHVIGRHRSPCMQDRSHMPYTDAVVHEIQRYSDLVPTGVPHAVTTDTKFRNYLIPKSFDNKIMLAA

SEQ ID NO: 3873 - protein, 99 aa, Homo Sapiens
MEPFVVLVLCLSFMLLFSLWRQSCRRRKLPPGPTPLPIIGNMLQIDVKDICKSFTNVSLPYVPPANCKGNHFQQWKEMEGDPAFLPHNLAEFWDGEEEH

SEQ ID NO: 3874 - protein, 83 aa, Homo Sapiens
MEPFVVLVLCLSFMLLFSLWRQSCRRRKLPPGPTPLPIIGNMLQIDVKDICKSFTNVSLPYVPPANCKGSQKSMVLCSPCILA

SEQ ID NO: 3875 - protein, 388 aa, Homo Sapiens
MFLQPIAKGIISSNGKRWKEIRRFSLTTLRNFGMGKRSIEDRVQEEAHCLVEELRKTKASPCDPTFILGCAPCNVICSVVFQKRFDYKDQNFLTLMKRFNENFRILNSPWIQVCNNFPLLIDCFPGTHNKVLKNVALTRSYIREKVKEHQASLDVNNPRDFIDCFLIKMEQEKDNQKSEFNIENLVGTVADLFVAGTETTSTTLRYGLLLLLKHPEVTAKVQEEIDHVIGRHRSPCMQDRSHMPYTDAVVHEIQRYSDLVPTGVPHAVTTDTKFRNYLIPKGTTIMALLTSVLHDDKEFPNPNIFDPGHFLDKNGNFKKSDYFMPFSAGKRICAGEGLARMELFLFLTTILQNFNLKSVDDLKNLNTTAVTKGIVSLPPSYQICFIPV

SEQ ID NO: 3876 - protein, 420 aa, Homo Sapiens
MNPIVVFHGYEAVKEALIDNGEEFSGRGNSPISQRITKGLGIISSNGKRWKEIRRFSLTTLRNFGMGKRSIEDRVQEEAHCLVEELRKTKASPCDPTFILGCAPCNVICSVVFQKRFDYKDQNFLTLMKRFNENFRILNSPWIQVCNNFPLLIDCFPGTHNKVLKNVALTRSYIREKVKEHQASLDVNNPRDFIDCFLIKMEQEKDNQKSEFNIENLVGTVADLFVAGTETTSTTLRYGLLLLLKHPEVTAKVQEEIDHVIGRHRSPCMQDRSHMPYTDAVVHEIQRYSDLVPTGVPHAVTTDTKFRNYLIPKGTTIMALLTSVLHDDKEFPNPNIFDPGHFLDKNGNFKKSDYFMPFSAGKRICAGEGLARMELFLFLTTILQNFNLKSVDDLKNLNTTAVTKGIVSLPPSYQICFIPV

SEQ ID NO: 3877 - protein, 420 aa, Homo Sapiens; identical to SEQ ID NO: 3876

SEQ ID NO: 3878 - protein, 490 aa, Homo Sapiens [sequence omitted]

SEQ ID NO: 3879 - protein, 282 aa, Homo Sapiens
MDSLVVLVLCLSCLLLLSLWRQSSGRGKLPPGPTPLPVIGNILQIGIKDISKSLTNLSKVYGPVFTLYFGLKPIVVLHGYEAVKEALIDLGEEFSGRGIFPLAERANRGFGIVFSNGKKWKEIRRFSLMTLRNFGMGKRSIEDRVQEEARCLVEELRKTKASPCDPTFILGCAPCNVICSIIFHKRFDYKDQQFLNLMEKLNENIKILSSPWIQICNNFSPIIDYFPGTHNKLLKNVAFMKSYILEKVKEHQESMDMNNPQDFIDCFLMKMEKLKSRKRLNV

SEQ ID NO: 3880 - protein, 162 aa, Homo Sapiens
MDSLVVLVLCLSCLLLLSLWRQSSGRGKLPPGPTPLPVIGNILQIGIKDISKSLTNLSKVYGPVFTLYFGLKPIVVLHGYEAVKEALIDLGEEFSGRGIFPLAERANRGFGIVFSNGKKWKEIRRFSLMTLRNFGMGKRSIEDRVQEEARCLVEELRKTKGG

SEQ ID NO: 3881 - protein, 86 aa, Homo Sapiens
MSALGVTVALLVWAAFLLLVSMWRQVHSSWNLPPGPFPLPIIGNLFQLELKNIPKSFTRLAQRFGPVFTLYVGSQRMVVMHGYKAV

SEQ ID NO: 3882 - protein, 493 aa, Homo Sapiens
MSALGVTVALLVWAAFLLLVSMWRQVHSSWNLPPGPFPLPIIGNLFQLELKNIPKSFTRLAQRFGPVFTLYVGSQRMVVMHGYKAVKEALLDYKDEFSGRGDLPAFHAHRDRGIIFNNGPTWKDIRRFSLTTLRNYGMGKQGNESRIQREAHFLLEALRKTQGQPFDPTFLIGCAPCNVIADILFRKHFDYNDEKFLRLMYLFNENFHLLSTPWLQLYNNFPSFLHYLPGSHRKVIKNVAEVKEYVSERVKEHHQSLDPNCPRDLTDCLLVEMEKEKHSAERLYTMDGITVTVADLFFAGTETTSTTLRYGLLILMKYPEIEEKLHEEIDRVIGPSRIPAIKDRQEMPYMDAVVHEIQRFITLVPSNLPHEATRDTIFRGYLIPKGTVVVPTLDSVLYDNQEFPDPEKFKPEHFLNENGKFKYSDYFKPFSTGKRVCAGEGLARMELFLLLCAILQHFNLKPLVDPKDIDLSPIHIGFGCIPPRYKLCVIPRS

SEQ ID NO: 3883 - protein, 493 aa, Homo Sapiens; identical to SEQ ID NO: 3882

SEQ ID NO: 3884 - protein, 356 aa, Homo Sapiens
RPFPASHHREPLPVGIEEYSQVLHPGIIFNNGPTWKDIRRFSLTTLRNYGMGKQGNESRIQREAHFLLEALRKTQGQPFDPTFLIGCAPCNVIADILFRKHFDYNDEKFLRLMYLFNENFHLLSTPWLQLYNNFPSFLHYLPGSHRKVIKNVAEVKEYVSERVKEHHQSLDPNCPRDLTDCLLVEMEKEKHSAERLYTMDGITVTVADLFFAGTETTSTTLRYGLLILMKYPEIEEKLHEEIDRVIGPSRIPAIKDRQEMPYMDAVVHEIQRFITLVPSNLPHEATRDTIFRGYLIPKGTVVVPTLDSVLYDNQEFPDPEKFKPEHFLNENGKFKYSDYFKPFSTGKRVCAGEGLA

SEQ ID NO: 3885 - protein, 306 aa, Homo Sapiens
RPFPASHHREPLPVGIEEYSQVLHPGQPFDPTFLIGCAPCNVIADILFRKHFDYNDEKFLRLMYLFNENFHLLSTPWLQLYNNFPSFLHYLPGSHRKVIKNVAEVKEYVSERVKEHHQSLDPNCPRDLTDCLLVEMEKEKHSAERLYTMDGITVTVADLFFAGTETTSTTLRYGLLILMKYPEIEEKLHEEIDRVIGPSRIPAIKDRQEMPYMDAVVHEIQRFITLVPSNLPHEATRDTIFRGYLIPKGTVVVPTLDSVLYDNQEFPDPEKFKPEHFLNENGKFKYSDYFKPFSTGKRVCAGEGLA

SEQ ID NO: 3886 - protein, 43 aa, Homo Sapiens
  misc_feature (1)..(1): Xaa can be any naturally occurring amino acid
XGPFPLPIIGNLFQLELKNIPKSFTRESFLIMDLPGRTSGGFP

SEQ ID NO: 3887 - protein, 172 aa, Homo Sapiens
ARVQEEIDLVVGRARLPALKDRAAMPYTDAVIHEVQRFADIIPMNLPHRVTRDTAFRGFLIPKGTDVITLLNTVHYDPSQFLTPQEFNPEHFLDANQSFKKSPAFMPFSAGEGRNQSLSGPISTYIPHPNSTCQILSLLPSTHSQLWMHRDIHSSSQLCSYRQVVTKILVKQ

SEQ ID NO: 3888 - protein, 491 aa, Homo Sapiens
MDSISTAILLLLLALVCLLLTLSSRDKGKLPPGPRPLSILGNLLLLCSQDMLTSLTKLSKEYGSMYTVHLGPRRVVVLSGYQAVKEALVDQGEEFSGRGDYPAFFNFTKGNGIAFSSGDRWKVLRQFSIQILRNFGMGKRSIEERILEEGSFLLAELRKTEGEPFDPTFVLSRSVSNIICSVLFGSRFDYDDERLLTIIRLINDNFQIMSSPWGELYDIFPSLLDWVPGPHQRIFQNFKCLRDLIAHSVHDHQASLDPRSPRDFIQCFLTKMAEEKEDPLSHFHMDTLLMTTHNLLFGGTKTVSTTLHHAFLALMKYPKVQARVQEEIDLVVGRARLPALKDRAAMPYTDAVIHEVQRFADIIPMNLPHRVTRDTAFRGFLIPKGTDVITLLNTVHYDPSQFLTPQEFNPEHFLDANQSFKKSPAFMPFSAGRRLCLGESLARMELFLYLTAILQSFSLQPLGAPEDIDLTPLSSGLGNLPRPFQLCLRPR

SEQ ID NO: 3889 - protein, 320 aa, Homo Sapiens
MDSISTAILLLLLALVCLLLTLSSRDKGKLPPGPRPLSILGNLLLLCSQDMLTSLTKLSKEYGSMYTVHLGPRRVVVLSGYQAVKEALVDQGEEFSGRGDYPAFFNFTKGNGIAFSSGDRWKVLRQFSIQILRNFGMGKRSIEERILEEGSFLLAELRKTEGEPFDPTFVLSRSVSNIICSVLFGSRFDYDDERLLTIIRLINDNFQIMSSPWGELYDIFPSLLDWVPGPHQRIFQNFKCLRDLIAHSVHDHQASLDPRSPRDFIQCFLTKMAEEKEDPLSHFHMDTLLMTTHNLLFGGTKTPACRRRSTSWWDARGCRR

SEQ ID NO: 3890 - protein, 81 aa, Homo Sapiens
  misc_feature (1)..(1): Xaa can be any naturally occurring amino acid
XPHRVTRDTAFRGFLIPKGTDVITLLNTVHYDPSQFLTPQEFNPEHFLDANQSFKKSPAFMPFSAALDAQRHSFLLSTLLL

SEQ ID NO: 3891 - protein, 502 aa, Homo Sapiens
MLAAMGSLAAALWAVVHPRTLLLGTVAFLLAADFLKRRRPKNYPPGPWRLPFLGNFFLVDFEQSHLEVQLFVKKYGNLFSLELGDISAVLITGLPLIKEALIHMDQNFGNRPVTPMREHIFKKNGLIMSSGQAWKEQRRFTLTALRNFGLGKKSLEERIQEEAQHLTEAIKEENGQPFDPHFKINNAVSNIICSITFGERFEYQDSWFQQLLKLLDEVTYLEASKTCQLYNVFPWIMKFLPGPHQTLFSNWKKLKLFVSHMIDKHRKDWNPAETRDFIDAYLKEMSKHTGNPTSSFHEENLICSTLDLFFAGTETTSTTLRWALLYMALYPEIQEKVQAEIDRVIGQGQQPSTAARESMPYTNAVIHEVQRMGNIIPLNVPREVTVDTTLAGYHLPKGTMILTNLTALHRDPTEWATPDTFNPDHFLENGQFKKREAFMPFSIGKRACLGEQLARTELFIFFTSLMQKFTFRPPNNEKLSLKFRMGITISPVSHRLCAVPQV

SEQ ID NO: 3892 - protein, 268 aa, Homo Sapiens
MPCSSKRNFCRQTMPSFIHEDDKNGRLIEKASVNRKPQLPQHFVDAYLDEMDQGKNDPSSTFSKENLIFSVGELIIAGTETTTNVLRWAILFMALYPNIQGQVQKEIDLIMGPNGKPSWDDKCKMPYTEAVLHEVLRFCNIVPLGIFHATSEDAVVRGYSIPKGTTVITNLYSVHFDEKYWRDPEVFHPERFLDSSGYFAKKEALVPFSLGRRHCLGEHLARMEMFLFFTALLQRFHLHFPHELVPDLKPRLGMTLQPQPYLICAERR

SEQ ID NO: 3893 - protein, 37 aa, Homo Sapiens
MPCSSKRNFCRQTMPSFIHEDDKNGRLTQFQIWPRMG

SEQ ID NO: 3894 - protein, 37 aa, Homo Sapiens; identical to SEQ ID NO: 3893

SEQ ID NO: 3895 - protein, 37 aa, Homo Sapiens; identical to SEQ ID NO: 3893

SEQ ID NO: 3896 - protein, 501 aa, Homo Sapiens
MWKLWRAEEGAAALGGALFLLLFALGVRQLLKQRRPMGFPPGPPGLPFIGNIYSLAASSELPHVYMRKQSQVYGEIFSLDLGGISTVVLNGYDVVKECLVHQSEIFADRPCLPLFMKMTKMGGLLNSRYGRGWVDHRRLAVNSFRYFGYGQKSFESKILEETKFFNDAIETYKGRPFDFKQLITNAVSNITNLIIFGERFTYEDTDFQHMIELFSENVELAASASVFLYNAFPWIGILPFGKHQQLFRNAAVVYDFLSRLIEKASVNRKPQLPQHFVDAYLDEMDQGKNDPSSTFSKENLIFSVGELIIAGTETTTNVLRWAILFMALYPNIQGQVQKEIDLIMGPNGKPSWDDKCKMPYTEAVLHEVLRFCNIVPLGIFHATSEDAVVRGYSIPKGTTVITNLYSVHFDEKYWRDPEVFHPERFLDSSGYFAKKEALVPFSLGRRHCLGEHLARMEMFLFFTALLQRFHLHFPHELVPDLKPRLGMTLQPQPYLICAERR

SEQ ID NO: 3897 - protein, 32 aa, Homo Sapiens
  misc_feature (1)..(1): Xaa can be any naturally occurring amino acid
XQSEIFADRPCLPLFMKMTKMGVLERPRSVPS

SEQ ID NO: 3898 - protein, 73 aa, Homo Sapiens
AVCWDDDGQHHGRLYPPAPDEIPSCPKARRSSPSLAPSCMTPTSSSTQKSSTQTVSWMQMDGSGSMRRSCPSP

SEQ ID NO: 3899 - protein, 175 aa, Homo Sapiens
MEATGTWALLLALALLLLLTLALSGTRARGHLPPGPTPLPLLGNLLQLRPGALYSGLMREEQNPGTEFTNKNMLMTVIYLLFAGTMTVSTTVGYTLLLLMKYPHVQKWVREELNRELGAGQAPSLGDRTRLPYTDAVLHEAQRLLALVPMGIPRTLMRTTRFRGYTLPQGTEVFP

SEQ ID NO: 3900 - protein, 165 aa, Homo Sapiens
MEATGTWALLLALALLLLLTLALSGTRARGHLPPGPTPLPLLGNLLQLRPGALYSGLMRLSKKYGPVFTIYLGPWRPVVVLVGQEAVREALGGQAEEFSGRGTVAMLEGTFDGHGGTKPRHRIHQQEHADDSHLFAVCWDDDGQHHGRLYPPAPDEIPSCPKVGT

SEQ ID NO: 3901 - protein, 187 aa, Homo Sapiens
MEATGTWALLLALALLLLLTLALSGTRARGHLPPGPTPLPLLGNLLQLRPGALYSGLMRLSKKYGPVFTIYLGPWRPVVVLVGQEAVREALGGQAEEFSGRGTVAMLEGTFDGHGVFFSNGERWRQLRKFTMLALRDLGMGKREGEELIQAEARCLVETFQGTEGGTKPRHRIHQQEHADDSHLFAV

SEQ ID NO: 3902 - protein, 504 aa, Homo Sapiens
MEATGTWALLLALALLLLLTLALSGTRARGHLPPGPTPLPLLGNLLQLRPGALYSGLMRLSKKYGPVFTIYLGPWRPVVVLVGQEAVREALGGQAEEFSGRGTVAMLEGTFDGHGVFFSNGERWRQLRKFTMLALRDLGMGKREGEELIQAEARCLVETFQGTEGRPFDPSLLLAQATSNVVCSLLFGLRFSYEDKEFQAVVRAAGGTLLGVSSQGGQTYEMFSWFLRPLPGPHKQLLHHVSTLAAFTVRQVQQHQGNLDASGPARDLVDAFLLKMAQEEQNPGTEFTNKNMLMTVIYLLFAGTMTVSTTVGYTLLLLMKYPHVQKWVREELNRELGAGQAPSLGDRTRLPYTDAVLHEAQRLLALVPMGIPRTLMRTTRFRGYTLPQGTEVFPLLGSILHDPNIFKHPEEFNPDRFLDADGRFRKHEAFLPFSLGKRVCLGEGLAKAELFLFFTTILQAFSLESPCPPDTLSLKPTVSGLFNIPPAFQLQVRPTDLHSTTQTR

SEQ ID NO: 3903 - protein, 60 aa, Homo Sapiens
MLEGTFDGHGGTKPRHRIHQQEHADDSHLFAVCWDDDGQHHGRLYPPAPDEIPSCPKVGT

SEQ ID NO: 3904 - protein, 288 aa, Homo Sapiens
LQLHRPVLRKIEEVRAILRTLLEARRPHVCPGDPVCSYVDALIQQGQGDDPEGLFAEANAVACTLDMVMAGTETTSATLQWAALLMGRHPDVQGRVQEELDRVLGPGRTPRLEDQQALPYTSAVLHEVQRFITLLPHVPRCTAADTQLGGFLLPKGTPVIPLLTSVLLDETQWQTPGQFNPGHFLDANGHFVKREAFLPFSAGSEGGCGGCSCAPLGRSPPLPSRSRPGAAHSVPGHPPQAAASVLGSAWPGPSSSCCLPASCRGTACCPRLASVRPPWTPRPPGLLP

SEQ ID NO: 3905 - protein, 490 aa, Homo Sapiens
MALLLLLFLGLLGLWGLLCACAQDPSPAARWPPGPRPLPLVGNLHLLRLSQQDRSLMELSERYGPVFTVHLGRQKTVVLTGFEAVKEALAGPGQELADRPPIAIFQLIQRGGGIFFSSGARWRAARQFTVRALHSLGVGREPVADKILQELKCLSGQLDGYRGRPFPLALLGWAPSNITFALLFGRRFDYRDPVFVSLLGLIDEVMVLLGSPGLQLFNVYPWLGALLQLHRPVLRKIEEVRAILRTLLEARRPHVCPGDPVCSYVDALIQQGQGDDPEGLFAEANAVACTLDMVMAGTETTSATLQWAALLMGRHPDVQGRVQEELDRVLGPGRTPRLEDQQALPYTSAVLHEVQRFITLLPHVPRCTAADTQLGGFLLPKGTPVIPLLTSVLLDETQWQTPGQFNPGHFLDANGHFVKREAFLPFSAGRRVCVGERLARTELFLLFAGLLQRYRLLPPPGVSPASLDTTPARAFTMRPRAQALCAVPRP

SEQ ID NO: 3906 - protein, 408 aa, Homo Sapiens
MELSERYGPVFTVHLGRQKTVVLTGFEAVKEALAGPGQELADRPPIAIFQLIQRGGGIFFSSGARWRAARQFTVRALHSLGVGREPVADKILQELKCLSGQLDGYRGRPFPLALLGWAPSNITFALLFGRRFDYRDPVFVSLLGLIDEVMVLLGSPGLQLFNVYPWLGALLQLHRPVLRKIEEVRAILRTLLEARRPHVCPGDPVCSYVDALIQQGQGDDPEGLFAEANAVACTLDMVMAGTETTSATLQWAALLMGRHPDVQGRVQEELDRVLGPGRTPRLEDQQALPYTSAVLHEVQRFITLLPHVPRCTAADTQLGGFLLPKGTPVIPLLTSVLLDETQWQTPGQFNPGHFLDANGHFVKREAFLPFSAGQQPSGPGWGGTSRAPGVGRPQLRLPPLHPPPDLRF

SEQ ID NO: 3907 - protein, 96 aa, Homo Sapiens
MSPGLLLLGSAVLLAFGLCCTFVHRARSRYEHIPGPPRPSFLLGHLPCFWKKDEVGGRVLQDVFLDWAKKYGPVVRVNVFHKTSVIVTSPESVKFH

SEQ ID NO: 3908 - protein, 500 aa, Homo Sapiens
MSPGLLLLGSAVLLAFGLCCTFVHRARSRYEHIPGPPRPSFLLGHLPCFWKKDEVGGRVLQDVFLDWAKKYGPVVRVNVFHKTSVIVTSPESVKKFLMSTKYNKDSKMYRALQTVFGERLFGQGLVSECNYERWHKQRRVIDLAFSRSSLVSLMETFNEKAEQLVEILEAKADGQTPVSMQDMLTYTAMDILAKAAFGMETSMLLGAQKPLSQAVKLMLEGITASRNTLAKFLPGKRKQLREVRESIRFLRQVGRDWVQRRREALKRGEEVPADILTQILKAEEGAQDDEGLLDNFVTFFIAGHETSANHLAFTVMELSRQPEIVARLQAEVDEVIGSKRYLDFEDLGRLQYLSQVLKESLRLYPPAWGTFRLLEEETLIDGVRVPGNTPLLFSTYVMGRMDTYFEDPLTFNPDRFGPGAPKPRFTYFPFSLGHRSCIGQQFAQMEVKVVMAKLLQRLEFRLVPGQRFGLQEQATLKPLDPVLCTLRPRGWQPAPPPPPC

SEQ ID NO: 3909 - protein, 403 aa, Homo Sapiens
MSTKYNKDSKMYRALQTVFGERLFGQGLVSECNYERWHKQRRVIDLAFSRSSLVSLMETFNEKAEQLVEILEAKADGQTPVSMQDMLTYTAMDILAKAAFGMETSMLLGAQKPLSQAVKLMLEGITASRNTLAKFLPGKRKQLREVRESIRFLRQVGRDWVQRRREALKRGEEVPADILTQILKAEEGAQDDEGLLDNFVTFFIAGHETSANHLAFTVMELSRQPEIVARLQAEVDEVIGSKRYLDFEDLGRLQYLSQVLKESLRLYPPAWGTFRLLEEETLIDGVRVPGNTPLLFSTYVMGRMDTYFEDPLTFNPDRFGPGAPKPRFTYFPFSLGHRSCIGQQFAQMEVKVVMAKLLQRLEFRLVPGQRFGLQEQATLKPLDPVLCTLRPRGWQPAPPPPPC

SEQ ID NO: 3910 - protein, 164 aa, Homo Sapiens
RFLRQVGRDWVQRRREALKRGEEVPADILTQILKAEEGAQDDEGLLDNFVTFFIAGHETSANHLAFTVMELSRQPEIVARLQAEVDEVIGSKRYLDFEDLGRLQYLSQVLKESLRLYPPAWGTFRLLEEETLIDGVRVPGNTPLLEQCASQLLGHLPRSERAGL

SEQ ID NO: 3911 - protein, 51 aa, Homo Sapiens
  misc_feature (1)..(1): Xaa can be any naturally occurring amino acid
XPAREEEAAPGGPGEHSLPAPGGQGLGPAPPGSPEEGRGGSCRHPHTDSES

SEQ ID NO: 3912 - protein, 199 aa, Homo Sapiens
MFEGHDTTASGLSWVLYHLAKHPEYQEQCRQEVQELLKDREPIEIEWDDLAQLPFLTMCIKESLRLHPPVPVISRCCTQDFVLPDGRVIPKGIVCLINIIGIHYNPTVWPDPEVYDPFRFDQENIKERSPLAFIPFSAGPRNCIGQAFAMAEMKVVLALTLLHFRILPTHTEPRRKPELILRAEGGLWLRVEPLGANSQ

SEQ ID NO: 3913 - protein, 524 aa, Homo Sapiens
MPQLSLSWLGLGPVAASPWLLLLLVGGSWLLARVLAWTYTFYDNCRRLQCFPQPPKQNWFWGHQGLVTPTEEGMKTLTQLVTTYPQGFKLWLGPTFPLLILCHPDIIRPITSASAAVAPKDMIFYGFLKPWLGDGLLLSGGDKWSRHRRMLTPAFHFNILKPYMKIFNKSVNIMHDKWQRLASEGSARLDMFEHISLMTLDSLQKCVFSFESNCQEKPSEYIAAILELSAFVEKRNQQILLHTDFLYYLTPDGQRFRRACHLVHDFTDAVIQERRCTLPTQGIDDFLKNKAKSKTLDFIDVLLLSKDEDGKELSDEDIRAEADTFMFEGHDTTASGLSWVLYHLAKHPEYQEQCRQEVQELLKDREPIEIEWDDLAQLPFLTMCIKESLRLHPPVPVISRCCTQDFVLPDGRVIPKGIVCLINIIGIHYNPTVWPDPEVYDPFRFDQENIKERSPLAFIPFSAGPRNCIGQAFAMAEMKVVLALTLLHFRILPTHTEPRRKPELILRAEGGLWLRVEPLGANSQ

SEQ ID NO: 3914 - protein, 454 aa, Homo Sapiens
MPQLSLSWLGLGPVAASPWLLLLLVGGSWLLARVLAWTYTFYDNCRRLQCFPQPPKQNWFWGHQGLVTPTEEGMKTLTQLVTTYPQGFKLWLGPTFPLLILCHPDIIRPITSASAAVAPKDMIFYGFLKPWLGDGLLLSGGDKWSRHRRMLTPAFHFNILKPYMKIFNKSVNIMHDKWQRLASEGSARLDMFEHISLMTLDSLQKCVFSFESNCQEKPSEYIAAILELSAFVEKRNQQILLHTDFLYYLTPDGQRFRRACHLVHDFTDAVIQERRCTLPTQGIDDFLKNKAKSKTLDFIDVLLLSKDEDGKELSDEDIRAEADTFMFEGHDTTASGLSWVLYHLAKHPEYQEQCRQEVQELLKDREPIEIEWDDLAQLPFLTMCIKESLRLHPPVPVISRCCTQDFVLPDGRVIPKGLRPLPFRPREHQGEVTSGFYSLLGRAQKLHRAGVRHG

SEQ ID NO: 3915 - protein, 524 aa, Homo Sapiens; identical to SEQ ID NO: 3913

SEQ ID NO: 3916 - protein, 454 aa, Homo Sapiens; identical to SEQ ID NO: 3914

SEQ ID NO: 3917 - protein, 520 aa, Homo Sapiens
MSQLSLSWLGLWPVAASPWLLLLLVGASWLLAHVLAWTYAFYDNCRRLRCFPQPPRRNWFWGHQGMIHSSEEGLLYTQSLACTFGDMGCWWVGPWQAVIHIFLPTCIKPVLFAPAAIAPKDKFFYSFLEPWLGDGLLLSAGDKWSRHRRMLTPAFHFNILKPYMKIFNESVNIMHAKWQLLASEGSACLDMFEHISLMTLDSLQKCVFSFDSHCQEKPSEYIAAILELSALVSKRHHEILLHIDFLYYLTPDGQRFRRACRLVHDFTDAVIQERRRTLPSQGVDDFLQAKAKSKTLDFIDVLLLSKDEDGKKLSDEDIRAEADTFMFEGHDTTASGLSWVLYHLAKHPEYQERCRQEVQELLKDREPKEIEWDDLAHLPFLTMCMKESLRLHPPVPVISRHVTQDIVLPDGRVIPKGIICLISVFGTHHNPAVWPDPEVYDPFRFDPENIKERSPLAFIPFSAGPRNCIGQTFAMAEMKVVLALTLLRFRVLPDHTEPRRKPELVLRAEGGLWLRVEPLS

SEQ ID NO: 3918 - protein, 89 aa, Homo Sapiens
MSQLSLSWLGLWPVAASPWLLLLLVGASWLLAHVLAWTYAFYDNCRRLRCFPQPPRRNWFWGHQGMLPLHQRTSSSTASWSPGWGMGSC

SEQ ID NO: 3919 - protein, 154 aa, Homo Sapiens
MSQLSLSWLGLWPVAASPWLLLLLVGASWLLAHVLAWTYAFYDNCRRLRCFPQPPRRNWFWGHQGMVNPTEEGMRVLTQLVATYPQGFKVWMGPISPLLSLCHPDIIRSVINASAAIAPKDKFFYSFLEPWLGDGLLLSAGDKWSRHRRMLTPA

SEQ ID NO: 3920 - protein, 520 aa, Homo Sapiens
MSQLSLSWLGLWPVAASPWLLLLLVGASWLLAHVLAWTYAFYDNCRRLRCFPQPPRRNWFWGHQGMVNPTEEGMRVLTQLVATYPQGFKVWMGPISPLLSLCHPDIIRSVINASAAIAPKDKFFYSFLEPWLGDGLLLSAGDKWSRHRRMLTPAFHFNILKPYMKIFNESVNIMHAKWQLLASEGSACLDMFEHISLMTLDSLQKCVFSFDSHCQEKPSEYIAAILELSALVSKRHHEILLHIDFLYYLTPDGQRFRRACRLVHDFTDAVIQERRRTLPSQGVDDFLQAKAKSKTLDFIDVLLLSKDEDGKKLSDEDIRAEADTFMFEGHDTTASGLSWVLYHLAKHPEYQERCRQEVQELLKDREPKEIEWDDLAHLPFLTMCMKESLRLHPPVPVISRHVTQDIVLPDGRVIPKGIICLISVFGTHHNPAVWPDPEVYDPFRFDPENIKERSPLAFIPFSAGPRNCIGQTFAMAEMKVVLALTLLRFRVLPDHTEPRRKPELVLRAEGGLWLRVEPLS

SEQ ID NO: 3921 - protein, 74 aa, Homo Sapiens
  misc_feature (1)..(1): Xaa can be any naturally occurring amino acid
XWVLYHLAKHPEYQERCRQEVQELLKDREPKEIEWSTTPFALTQRTSRRGHLWLLFPSRQGPGTASGRRSRWRR

SEQ ID NO: 3922 - protein, 381 aa, Homo Sapiens [sequence omitted]

SEQ ID NO: 3923 - protein, 136 aa, Homo Sapiens
MRTPGPLPVLLLLLAGAPAARPTPPTCYSRMRALSQEITRDFNLLQVSEPSEPCVRYLPRLYLDIHNYCVLDKLRDFVASPPCWKVAQVDSLKDKARKLYTIMNSFCRRDLVFLLDDCNALEYPIPVTTVLPDRQR

SEQ ID NO: 3924 - protein, 76 aa, Homo Sapiens
  misc_feature (1)..(1): Xaa can be any naturally occurring amino acid
XPGPLPVLLLLLAGAPAARPTPPTCYSRMRALSQEITRDFNLLQVSEPSDLVFLLDDCNALEYPIPVTTVLPDRQR

SEQ ID NO: 3925 - protein, 92 aa, Homo Sapiens
  misc_feature (1)..(1): Xaa can be any naturally occurring amino acid
XTPGPLPVLLLLLAGAPAARPTPPTCYSRMRALSQEITRDFNLLQVSEPSEPCVRYLPRLYLDIHDLVFLLDDCNALEYPIPVTTVLPDRQR

SEQ ID NO: 3926 - protein, 78 aa, Homo Sapiens
GNTGMVGGSVPVFDEIILSTARMNRVLSFHSVSESPFYVLIETSGSNAGHDAEKLGHFLEHALGSGLVTDGTMATDQR

SEQ ID NO: 3927 - protein, 243 aa, Homo Sapiens
MLPRRPLAWPAWLLRGAPGAAGSWGRPVGPLARRGCCSAPGTPEVPLTRERYPVRRLPFSTVSKQDLAAFERIVPGGVVTDPEALQAPNVDWLRTLRGCSKVLLRPRTSEEVSHILRHCHERNLAVNPQGGNTGMVGGSVPVFDEIILSTARMNRVLSFHSVSGGLRPGGAEPVCGGTGLHHAAGLRSQGQLPHRGKRGNQRWRPAVSSIWLTAWDCPGPGSGAGRRHCPGLPDLPEEGQHGL

SEQ ID NO: 3928 - protein, 521 aa, Homo Sapiens
MLPRRPLAWPAWLLRGAPGAAGSWGRPVGPLARRGCCSAPGTPEVPLTRERYPVRRLPFSTVSKQDLAAFERIVPGGVVTDPEALQAPNVDWLRTLRGCSKVLLRPRTSEEVSHILRHCHERNLAVNPQGGNTGMVGGSVPVFDEIILSTARMNRVLSFHSVSGILVCQAGCVLEELSRYVEERDFIMPLDLGAKGSCHIGGNVATNAGGLRFLRYGSLHGTVLGLEVVLADGTVLDCLTSLRKDNTGYDLKQLFIGSEGTLGIITTVSILCPPKPRAVNVAFLGCPGFAEVLQTFSTCKGMLGEILSAFEFMDAVCMQLVGRHLHLASPVQESPFYVLIETSGSNAGHDAEKLGHFLEHALGSGLVTDGTMATDQRKVKMLWALRERITEALSRDGYVYKYDLSLPVERLYDIVTDLRARLGPHAKHVVGYGHLGDGNLHLNVTAEAFSPSLLAALEPHVYEWTAGQQGSVSAEHGVGFRKRDVLGYSKPPGALQLMQQLKALLDPKGILNPYKTLPSQA

SEQ ID NO: 3929 - protein, 320 aa, Homo Sapiens
MLPRRPLAWPAWLLRGAPGAAGSWGRPVGPLARRGCCSAPGTPEVPLTRERYPVRRLPFSTVSKQDLAAFERIVPGGVVTDPEALQAPNVDWLRTLRGCSKVLLRPRTSEEVSHILRHCHERNLAVNPQGGNTGMVGGSVPVFDEIILSTARMNRVLSFHSVSGILVCQAGCVLEELSRYVEERDFIMPLDLGAKGSCHIGGNVATNAGGLRFLRYGSLHGTVLGLEVVLADGTVLDCLTSLRKDNTGYDLKQLFIGSEGTLGIITTVSILCPPKPRAVNVAFLDAVGPEGKDHRGAEPGWLRVQVRPLPPCGAALRHRD

SEQ ID NO: 3930 - protein, 387 aa, Homo Sapiens
MVGGSVPVFDEIILSTARMNRVLSFHSVSGILVCQAGCVLEELSRYVEERDFIMPLDLGAKGSCHIGGNVATNAGGLRFLRYGSLHGTVLGLEVVLADGTVLDCLTSLRKDNTGYDLKQLFIGSEGTLGIITTVSILCPPKPRAVNVAFLGCPGFAEVLQTFSTCKGMLGEILSAFEFMDAVCMQLVGRHLHLASPVQESPFYVLIETSGSNAGHDAEKLGHFLEHALGSGLVTDGTMATDQRKVKMLWALRERITEALSRDGYVYKYDLSLPVERLYDIVTDLRARLGPHAKHVVGYGHLGDGNLHLNVTAEAFSPSLLAALEPHVYEWTAGQQGSVSAEHGVGFRKRDVLGYSKPPGALQLMQQLKALLDPKGILNPYKTLPSQA

SEQ ID NO: 3931 - protein, 90 aa, Homo Sapiens [sequence omitted]

SEQ ID NO: 3932 - protein, 152 aa, Homo Sapiens
  misc_feature (1)..(1): Xaa can be any naturally occurring amino acid
XHSVSGILVCQAGCVLEELSRYVEERDFIMPLDLGAKGSCHIGGNVATNAGGLRFLRYGSLHGTVLGLEVVLADGTVLDCLTSLRKDNTGYDLKQLFIGSEGTLGIITTVSILCPPKPRAVNVAFLGFLCSALIPLQLQSPVCRPPVVLGAR

SEQ ID NO: 3933 - protein, 318 aa, Homo Sapiens
  misc_feature (1)..(1): Xaa can be any naturally occurring amino acid
XSHANHRPICLSPRIWPGSASATSTVCSSSESFLPRGPPAVSLLLHGPPTVSFPPPWPTHHVLPSPVAHPPCPCLPPDMPLELPGPCCCPHCLCDSAPPSLPCPTLVQGASRPILILRAFPGPCHSVPCHDLKLQVGASPFRHGCPPSVRCPSRLIAGVPGCSVLSWSLGHSLSGIDSRMLWALRERITEALSRDGYVYKYDLSLPVERLYDIVTDLRARLGPHAKHVVGYGHLGDGNLHLNVTAEAFSPSLLAALEPHVYEWTAGQQGSVSAEHGVGFRKRDVLGYSKPPGALQLMQQLKALLDPKGILNPYKTLPS

SEQ ID NO: 3934 - protein, 189 aa, Homo Sapiens
  misc_feature (1)..(1): Xaa can be any naturally occurring amino acid
XSVFCSDPTPTAVTCVPPACGPGSPRPARLPHPALRTPGCPGFAEVLQTFSTCKGMLGEILSAFEFMDAVCMQLVGRHLHLASPVQESPFYVLIETSGSNAGHDAEKLGHFLEHALGSGLVTDGTMATDQRKVKMLWALRERITEALSRDGYVYKYDLSLPVERLYDIVTDLRARLGPHAKHVVGYGHL

SEQ ID NO: 3935 - protein, 9 aa, Homo Sapiens
MRMSVGLSL

SEQ ID NO: 3936 - protein, 15 aa, Homo Sapiens
MRMSVGLSLLLPLSG

SEQ ID NO: 3937 - protein, 41 aa, Homo Sapiens
MRMSVGLSLLLPLSGRTFLLLLSVVMAQSHWPSEPSEAVRD

SEQ ID NO: 3938 - protein, 52 aa, Homo Sapiens
MRMSVGLSLLLPLSGRTFLLLLSVVMAQSHWPSEPSEAVRDWENQLEASMHS

SEQ ID NO: 3939 - protein, 86 aa, Homo Sapiens
MRMSVGLSLLLPLSGRTFLLLLSVVMAQSHWPSEPSEAVRDWENQLEASMHSVLSDLHEAVPTVVGIPDGTAVVGRSFRVTIPTDL

SEQ ID NO: 3940 - protein, 88 aa, Homo Sapiens
MRMSVGLSLLLPLSGRTFLLLLSVVMAQSHWPSEPSEAVRDWENQLEASMHSVLSDLHEAVPTVVGIPDGTAVVGRSFRVTIPTDLIA

SEQ ID NO: 3941 - protein, 96 aa, Homo Sapiens
MRMSVGLSLLLPLSGRTFLLLLSVVMAQSHWPSEPSEAVRDWENQLEASMHSVLSDLHEAVPTVVGIPDGTAVVGRSFRVTIPTDLIASSGDIIKV

SEQ ID NO: 3942 - protein, 106 aa, Homo Sapiens
MRMSVGLSLLLPLSGRTFLLLLSVVMAQSHWPSEPSEAVRDWENQLEASMHSVLSDLHEAVPTVVGIPDGTAVVGRSFRVTIPTDLIASSGDIIKVSAAGKEALPS

SEQ ID NO: 3943 - protein, 117 aa, Homo Sapiens
MRMSVGLSLLLPLSGRTFLLLLSVVMAQSHWPSEPSEAVRDWENQLEASMHSVLSDLHEAVPTVVGIPDGTAVVGRSFRVTIPTDLIASSGDIIKVSAAGKEALPSWLHWDSQSHTL

SEQ ID NO: 3944 - protein, 895 aa, Homo Sapiens
MRMSVGLSLLLPLSGRTFLLLLSVVMAQSHWPSEPSEAVRDWENQLEASMHSVLSDLHEAVPTVVGIPDGTAVVGRSFRVTIPTDLIASSGDIIKVSAAGKEALPSWLHWDSQSHTLEGLPLDTDKGVHYISVSATRLGANGSHIPQTSSVFSIEVYPEDHSELQSVRTASPDPGEVVSSACAADEPVTVLTVILDADLTKMTPKQRIDLLHRMRSFSEVELHNMKLVPVVNNRLFDMSAFMAGPGNAKKVVENGALLSWKLGCSLNQNSVPDIHGVEAPAREGAMSAQLGYPVVGWHIANKKPPLPKRVRRQIHATPTPVTAIGPPTTAIQEPPSRIVPTPTSPAIAPPTETMAPPVRDPVPGKPTVTIRTRGAIIQTPTLGPIQPTRVSEAGTTVPGQIRPTMTIPGYVEPTAVATPPTTTTKKPRVSTPKPATPSTDSTTTTTRRPTKKPRTPRPVPRVTTKVSITRLETASPPTRIRTTTSGVPRGGEPNQRPELKNHIDRVDAWVGTYFEVKIPSDTFYDHEDTTTDKLKLTLKLREQQLVGEKSWVQFNSNSQLMYGLPDSSHVGKHEYFMHATDKGGLSAVDAFEIHVHRRPQGDRAPARFKAKFVGDPALVLNDIHKKIALVKKLAFAFGDRNCSTITLQNITRGSIVVEWTNNTLPLEPCPKEQIAGLSRRIAEDDGKPRPAFSNALEPDFKATSITVTGSGSCRHLQFIPVVPPRRVPSEAPPTEVPDRDPEKSSEDDVYLHTVIPAVVVAAILLIAGIIAMICYRKKRKGKLTLEDQATFIKKGVPIIFADELDDSKPPPSSSMPLILQEEKAPLPPPEYPNQSVPETTPLNQDTMGEYTPLRDEDPNAPPYQPPPPFTAPMEGKGSRPKNMTPYRSPPPYVPP

SEQ ID NO: 3945 - protein, 895 aa, Homo Sapiens; identical to SEQ ID NO: 3944

SEQ ID NO: 3946 - protein, 895 aa, Homo Sapiens; identical to SEQ ID NO: 3944

SEQ ID NO: 3947 - protein, 895 aa, Homo Sapiens; identical to SEQ ID NO: 3944

SEQ ID NO: 3948 - protein, 895 aa, Homo Sapiens; identical to SEQ ID NO: 3944

SEQ ID NO: 3949 - protein, 895 aa, Homo Sapiens; identical to SEQ ID NO: 3944

SEQ ID NO: 3950 - protein, 189 aa, Homo Sapiens
MLLGQLSTLLCLLSGALPTGSGRPEPQSPRPQSWAAANQTWALGPGALPPLVPASALGSWKAFLGLQKARQLGMGRLQRGQDEVAAVTLPLNPQEVIQGMCKAVPFVQVFSRPGCSAIRLRNHLCFGHCSSLYIPGSDPTPLVLCNSCMPARKRWAPVVLWCLTGSSASRRRVKISTMLIEGCHCSPKA

SEQ ID NO: 3951 - protein, 163 aa, Homo Sapiens
MPLTRQQGRLLVTLSPVRTDRQADRRTDKQMLLGQLSTLLCLLSGALPTGSGRPEPQSPRPQSWAAANQTWALGPGALPPLVPASALGSWKAFLGLQKARQLGMGRLQRGQDEVAAVTLPLNPQEVIQGMCKAVPFVQTRESRYVAQASLELLASSNPPTSAS

SEQ ID NO: 3952 - protein, 167 aa, Homo Sapiens
MFPDYGYGWFHTSLILEGKNYLQWLTERLTERGVKFFQRKVESFEEVAREGADVIVNCTGVWAGALQRDPLLQPGRGQIMKVDAPWMKHFILTHDPERGIYNSPYIIPGTQTVTLGGIFQLGNWSELNNIQDHNTIWEGCCRLEPTLKNARIIGERTGFRPVRPQIR

SEQ ID NO: 3953 - protein, 197 aa, Homo Sapiens
MRVVVIGAGVIGLSTALCIHERYHSVLQPLDIKVYADRFTPLTTTDVAAGLWQPYLSDPNNPQEADWSQQTFDYLLSHVHSPNAENLGLFLISGYNLFHEAIPDPSWKDTVLGFRKLTPRELDMFPDYGYGWFHTSLILEGKNYLQWLTERLTERGVKFFQRKVESFEEVAREGADVIVNCTGVWAGALQRDPLLQP

SEQ ID NO: 3954 - protein, 347 aa, Homo Sapiens
MRVVVIGAGVIGLSTALCIHERYHSVLQPLDIKVYADRFTPLTTTDVAAGLWQPYLSDPNNPQEADWSQQTFDYLLSHVHSPNAENLGLFLISGYNLFHEAIPDPSWKDTVLGFRKLTPRELDMFPDYGYGWFHTSLILEGKNYLQWLTERLTERGVKFFQRKVESFEEVAREGADVIVNCTGVWAGALQRDPLLQPGRGQIMKVDAPWMKHFILTHDPERGIYNSPYIIPGTQTVTLGGIFQLGNWSELNNIQDHNTIWEGCCRLEPTLKNARIIGERTGFRPVRPQIRLEREQLRTGPSNTEVIHNYGHGGYGLTIHWGCALEAAKLFGRILEEKKLSRMPPSHL

SEQ ID NO: 3955 - protein, 123 aa, Homo Sapiens
MRVVVIGAGVIGLSTALCIHERYHSVLQPLDIKVYADRFTPLTTTDVAAGLWQPYLSDPNNPQEADWSQQTFDYLLSHVHSPNAENLGLFLISGYNLFHEAIPLWLVPHKPNSGGKELSTVAD

SEQ ID NO: 3956 - protein, 281 aa, Homo Sapiens
MRVVVIGAGVIGLSTALCIHERYHSVLQPLDIKVYADRFTPLTTTDVAAGLWQPYLSDPNNPQEADWSQQTFDYLLSHVHSPNAENLGLFLISGYNLFHEAIPVAREGADVIVNCTGVWAGALQRDPLLQPGRGQIMKVDAPWMKHFILTHDPERGIYNSPYIIPGTQTVTLGGIFQLGNWSELNNIQDHNTIWEGCCRLEPTLKNARIIGERTGFRPVRPQIRLEREQLRTGPSNTEVIHNYGHGGYGLTIHWGCALEAAKLFGRILEEKKLSRMPPSHL

SEQ ID NO: 3957 - protein, 78 aa, Homo Sapiens
MRVVVIGAGVIGLSTALCIHERYHSVLQPLDIKVYADRFTPLTTTDVAAGLWQPYLSDPNNPQEATLPGRTQFWDFGS

SEQ ID NO: 3958 - protein, 73 aa, Homo Sapiens
MNSKGQYPTQPTYPVQPPGNPVYPQTLHLPQAPPYTDAPPAYSEGLPQSPPCQPHFLEPLCIFPWPSLWLLGL

SEQ ID NO: 3959 - protein, 207 aa, Homo Sapiens
MNSKGQYPTQPTYPVQPPGNPVYPQTLHLPQAPPYTDAPPAYSELYRPSFVHPGAATVPTMSAAFPGASLYLPMAQSVAVGPLGSTIPMAYYPVGPIYPPASTSWMPSQCCSACSHAGSQRPRNSAEGELLHGWFRWWLHHLVRNQGHLCAGKDITYLQHFSQCNCFSHINLKLQFRHMLLGCLSGAQTFRHFSNLIRNHVMVAVPP

SEQ ID NO: 3960 - protein, 168 aa, Homo Sapiens
MNSKGQYPTQPTYPVQPPGNPVYPQTLHLPQAPPYTDAPPAYSELYRPSFVHPGAATVPTMSAAFPGASLYLPMAQSVAVGPLGSTIPMAYYPVGPIYPPGSTVLVEGGYDAGARFGAGATAGNIPPPPPGCPPNAAQLAVMQGANVLVTQRKGNFFMGGSDGGYTIW

SEQ ID NO: 3961 - protein, 134 aa, Homo Sapiens
MNSKGQYPTQPTYPVQPPGNPVYPQTLHLPQAPPYTDAPPAYSELYRPSFVHPGAATVPTMSAAFPGASLYLPMAQSVAVGPLGSTIPMAYYPVGPIYPPGSTVLVEGGYDAGARFGAGATAGNIPVCVLKLGR

SEQ ID NO: 3962 - protein, 153 aa, Homo Sapiens
MNSKGQYPTQPTYPVQPPGNPVYPQTLHLPQAPPYTDAPPAYSELYRPSFVHPGAATVPTMSAAFPGASLYLPMAQSVAVGPLGSTIPMAYYPVGPIYPPGSTVLVEGGYDAGARFGAGATAGNIPVKEDQDHDREQGEEDNGDNNLERRGKM

SEQ ID NO: 3963 - protein, 146 aa, Homo Sapiens
MNSKGQYPTQPTYPVQPPGNPVYPQTLHLPQAPPYTDAPPAYSELYRPSFVHPGAATVPTMSAAIPMAYYPVGPIYPPGSTVLVEGGYDAGARFGAGATAGNIPPPPPGCPPNAAQLAVMQGANVLVTQRKGNFFMGGSDGGYTIW

SEQ ID NO: 3964 - protein, 86 aa, Homo Sapiens
MNSKGQYPTQPTYPVQPPGNPVYPQTLHLPQAPPYTDAPPAYSEPPPPGCPPNAAQLAVMQGANVLVTQRKGNFFMGGSDGGYTIW

SEQ ID NO: 3965 - protein, 136 aa, Homo Sapiens
MNSKGQYPTQPTYPVQPPGNPVYPQTLHLPQAPPYTDAPPAYSESVAVGPLGSTIPMAYYPVGPIYPPGSTVLVEGGYDAGARFGAGATAGNIPPPPPGCPPNAAQLAVMQGANVLVTQRKGNFFMGGSDGGYTIW

SEQ ID NO: 3966 - protein, 108 aa, Homo Sapiens
MSAAFPGASLYLPMAQSVAVGPLGSTIPMAYYPVGPIYPPGSTVLVEGGYDAGARFGAGATAGNIPPPPPGCPPNAAQLAVMQGANVLVTQRKGNFFMGGSDGGYTIW

SEQ ID NO: 3967 - protein, 617 aa, Homo Sapiens
MPALSRWASLPGPSMREAAFMYSTAVAIFLVILVAALQGSAPRESPLPYHIPLDPEGSLELSWNVSYTQEAIHFQLLVRRLKAGVLFGMSDRGELENADLVVLWTDGDTAYFADAWSDQKGQIHLDPQQDYQLLQVQRTPEGLTLLFKRPFGTCDPKDYLIEDGTVHLVYGILEEPFRSLEAINGSGLQMGLQRVQLLKPNIPEPELPSDACTMEVQAPNIQIPSQETTYWCYIKELPKGFSRHHIIKYEPIVTKGNEALVHHMEVFQCAPEMDSVPHFSGPCDSKMKPDRLNYCRHVLAAWALGAKAFYYPEEAGLAFGGPGSSRYLRLEVHYHNPLVIEGRNDSSGIRLYYTAKLRRFNAGIMELGLVYTPVMAIPPRETAFILTGYCTDKCTQLALPPSGIHIFASQLHTHLTGRKVVTVLVRDGREWEIVNQDNHYSPHFQEIRMLKKVVSVHPGDVLITSCTYNTEDRELATVGGFGILEEMCVNYVHYYPQTQLELCKSAVDAGFLQKYFHLINRFNNEDVCTCPQASVSQQFTSVPWNSFNRDVLKALYSFAPISMHCNKSSAVRFQGEWNLQPLPKVISTLEEPTPQCPTSQGRSPAGPTVVSIGGGKG

SEQ ID NO: 3968 - protein, 244 aa, Homo Sapiens
MREAAFMYSTAVAIFLVILVAALQGSAPRESPLPYHIPLDPEGSLELSWNVSYTQEAIHFQLLVRRLKAGVLFGMSDRGELENADLVVLWTDGDTAYFADGTVHLVYGILEEPFRSLEAINGSGLQMGLQRVQLLKPNIPEPELPSDACTMEVQAPNIQIPSQETTYWCYIKELPKGFSRHHIIKYEPIVTKGNEALVHHMEVFQCAPEMDSVPHFSGPCDSKMKPDRLNYCRHVLAAWALGAK

SEQ ID NO: 3969 - protein, 27 aa, Homo Sapiens
MAANLSRNGPALQEAYVRVVTEKSPTD

SEQ ID NO: 3970 - protein, 50 aa, Homo Sapiens
MAANLSRNGPALQEAYVRVVTEKSPTDWALFTYEGNSNDIRCCSCCRGPM

SEQ ID NO: 3971 - protein, 87 aa, Homo Sapiens
MAANLSRNGPALQEAYVRVVTEKSPTDWALFTYEGNSNDIRVAGTGDRRGRERCAEGSLCQPRQHHGQLPEGGPCDHQRTGRGGCGA

SEQ ID NO: 3972 - protein, 406 aa, Homo Sapiens
MAANLSRNGPALQEAYVRVVTEKSPTDWALFTYEGNSNDIRVAGTGEGGLEEMVEELNSGKVMYAFCRVKDPNSGLPKFVLINWGAHVTINARAEEDVEPECIMEKVAKASGANYSFHKESGRFQDVGPQAPVGSVYQKTNAVSEIKRVGKDSFWAKAEKEEENRRLEEKRRAEEAQRQLEQERRERELREAARREQRYQEQGGEASPQSRTWEQQQEVVSRNRNEQESAVHPREIFKQKERAMSTTSISSPQPGKLRSPFLQKQLTQPETHFGREPAAAISRPRADLPAEEPAPSTPPCLVQAEEEAVYEEPPEQETFYEQPPLVQQQGAGSEHIDHHIQGQGLSGQGLCARALYDYQAADDTEISFDPENLITGIEVIDEGWWRGYGPDGHFGMFPANYVELIE

SEQ ID NO: 3973 - protein, 430 aa, Homo Sapiens
MAANLSRNGPALQEAYVRVVTEKSPTDWALFTYEGNSNDIRVAGTGEGGLEEMVEELNSGKVMYAFCRVKDPNSGLPKFVLINWTGEGVNDVRKGACASHVSTMASFLKGAHVTINARAEEDVEPECIMEKVAKASGANYSFHKESGRFQDVGPQAPVGSVYQKTNAVSEIKRVGKDSFWAKAEKEEENRRLEEKRRAEEAQRQLEQERRERELREAARREQRYQEQGGEASPQRTWEQQQEVVSRNRNEQESAVHPREIFKQKERAMSTTSISSPQPGKLRSPFLQKQLTQPETHFGREPAAAISRPRADLPAEEPAPSTPPCLVQAEEEAVYEEPPEQETFYEQPPLVQQQGAGSEHIDHHIQGQGLSGQGLCARALYDYQAADDTEISFDPENLITGIEVIDEGWWRGYGPDGHFGMFPANYVELIE

SEQ ID NO: 3974 - protein, 431 aa, Homo Sapiens
MAANLSRNGPALQEAYVRVVTEKSPTDWALFTYEGNSNDIRVAGTGEGGLEEMVEELNSGKVMYAFCRVKDPNSGLPKFVLINWTGEGVNDVRKGACASHVSTMASFLKGAHVTINARAEEDVEPECIMEKVAKASGANYSFHKESGRFQDVGPQAPVGSVYQKTNAVSEIKRVGKDSFWAKAEKEEENRRLEEKRRAEEAQRQLEQERRERELREAARREQRYQEQGGEASPQSRTWEQQQEVVSRNRNEQESAVHPREIFKQKERAMSTTSISSPQPGKLRSPFLQKQLTQPETHFGREPAAAISRPRADLPAEEPAPSTPPCLVQAEEEAVYEEPPEQETFYEQPPLVQQQGAGSEHIDHHIQGQGLSGQGLCARALYDYQAADDTEISFDPENLITGIEVIDEGWWRGYGPDGHFGMFPANYVELIE

SEQ ID NO: 3975 - protein, 439 aa, Homo Sapiens
MAANLSRNGPALQEAYVRVVTEKSPTDWALFTYEGNSNDIRVAGTGEGGLEEMVEELNSGKVMYAFCRVKDPNSGLPKFVLINWTGEGVNDVRKGACASHVSTMASFLKGAHVTINARAEEDVEPECIMEKVAKASGANYSFHKESGRFQDVGPQAPVGSVYQKTNAVSEIKRVGKDSFWAKAEKEEENRRLEEKRRAEEAQRQLEQERRERELREAARREQRYQEQGGEASPQSRTWEQQQEVVSRNRNEQGSTCASLQESAVHPREIFKQKERAMSTTSISSPQPGKLRSPFLQKQLTQPETHFGREPAAAISRPRADLPAEEPAPSTPPCLVQAEEEAVYEEPPEQETFYEQPPLVQQQGAGSEHIDHHIQGQGLSGQGLCARALYDYQAADDTEISFDPENLITGIEVIDEGWWRGYGPDGHFGMFPANYVELIE

SEQ ID NO: 3976 - protein, 382 aa, Homo Sapiens
MAANLSRNGPALQEAYVRVVTEKSPTDWALFTYEGNSNDIRVAGTGEGGLEEMVEELNSGKVMYAFCRVKDPNSGLPKFVLINWTGEGVNDVRKGACASHVSTMASFLKGSVYQKTNAVSEIKRVGKDSFWAKAEKEEENRRLEEKRRAEEAQRQLEQERRERELREAARREQRYQEQGGEASPQSRTWEQQQEVVSRNRNEQESAVHPREIFKQKERAMSTTSISSPQPGKLRSPFLQKQLTQPETHFGREPAAAISRPRADLPAEEPAPSTPPCLVQAEEEAVYEEPPEQETFYEQPPLVQQQGAGSEHIDHHIQGQGLSGQGLCARALYDYQAADDTEISFDPENLITGIEVIDEGWWRGYGPDGHFGMFPANYVELIE

SEQ ID NO: 3977 - protein, 128 aa, Homo Sapiens
MAANLSRNGPALQEAYVRVVTEKSPTDWALFTYEGNSNDIRVAGTGEGGLEEMVEELNSGKVMYAFCRVKDPNSGLPKFVLINWTGEGVNDVRKGACASHVSTMASFLKVRPGGPCDHQRTGRGGCGA

SEQ ID NO: 3978 - protein, 62 aa, Homo Sapiens
MAANLSRNGPALQEAYVRVVTEKSPTDWALFTYEGNSNDIRVAGTGGGPCDHQRTGRGGCGA

SEQ ID NO: 3979 - protein, 31 aa, Homo Sapiens
MAANLSRNGPALQEAYVRVVTEKSPTDWGPM

SEQ ID NO: 3980 - protein, 40 aa, Homo Sapiens
MAANLSRNGPALQEAYVRVVTEKSPTDWWAARRARGSLYL

SEQ ID NO: 3981 - protein, 48 aa, Homo Sapiens
MAANLSRNGPALQEAYVRVVTEKSPTDWWAARRARVGPGAASGGSLYL

SEQ ID NO: 3982 - protein, 48 aa, Homo Sapiens; identical to SEQ ID NO: 3981

SEQ ID NO: 3983 - protein, 327 aa, Homo Sapiens
MASFLKGAHVTINARAEEDVEPECIMEKVAKASGANYSFHKESGRFQDVGPQAPVGSVYQKTNAVSEIKRVGKDSFWAKAEKEEENRRLEEKRRAEEAQRQLEQERRERELREAARREQRYQEQGGEASPQRTWEQQQEVVSRNRNEQESAVHPREIFKQKERAMSTTSISSPQPGKLRSPFLQKQLTQPETHFGREPAAAISRPRADLPAEEPAPSTPPCLVQAEEEAVYEEPPEQETFYEQPPLVQQQGAGSEHIDHHIQGQGLSGQGLCARALYDYQAADDTEISFDPENLITGIEVIDEGWWRGYGPDGHFGMFPANYVELIE

SEQ ID NO: 3984 - protein, 336 aa, Homo Sapiens
MKATAMTSAWLAQGGAHVTINARAEEDVEPECIMEKVAKASGANYSFHKESGRFQDVGPQAPVGSVYQKTNAVSEIKRVGKDSFWAKAEKEEENRRLEEKRRAEEAQRQLEQERRERELREAARREQRYQEQGGEASPQSRTWEQQQEVVSRNRNEQESAVHPREIFKQKERAMSTTSISSPQPGKLRSPFLQKQLTQPETHFGREPAAAISRPRADLPAEEPAPSTPPCLVQAEEEAVYEEPPEQETFYEQPPLVQQQGAGSEHIDHHIQGQGLSGQGLCARALYDYQAADDTEISFDPENLITGIEVIDEGWWRGYGPDGHFGMFPANYVELIE

SEQ ID NO: 3985 - protein, 359 aa, Homo Sapiens
  misc_feature (1)..(1): Xaa can be any naturally occurring amino acid
XATAMTSAWLAQGTGEGVNDVRKGACASHVSTMASFLKGAHVTINARAEEDVEPECIMEKVAKASGANYSFHKESGRFQDVGPQAPVGSVYQKTNAVSEIKRVGKDSFWAKAEKEEENRRLEEKRRAEEAQRQLEQERRERELREAARREQRYQEQGGEASPQRTWEQQQEVVSRNRNEQESAVHPREIFKQKERAMSTTSISSPQPGKLRSPFLQKQLTQPETHFGREPAAAISRPRADLPAEEPAPSTPPCLVQAEEEAVYEEPPEQETFYEQPPLVQQQGAGSEHIDHHIQGQGLSGQGLCARALYDYQAADDTEISFDPENLITGIEVIDEGWWRGYGPDGHFGMFPANYVELIE

SEQ ID NO: 3986 - protein, 138 aa, Homo Sapiens
  misc_feature (1)..(1): Xaa can be any naturally occurring amino acid
XKQKERAMSTTSISSPQPDLPAEEPAPSTPPCLVQAEEEAVYEEPPEQETFYEQPPLVQQQGAGSEHIDHHIQGQGLSGQGLCARALYDYQAADDTEISFDPENLITGIEVIDEGWWRGYGPDGHFGMFPANYVELIE

SEQ ID NO: 3987 - protein, 77 aa, Homo Sapiens
MRFMTLLFLTALAGALVCAYDPEAASAPGSGNHKQMDCLQLQKPPSETAKFLSSSTNLPRREKLVPSAKPPHTRGLV

SEQ ID NO: 3988 - protein, 110 aa, Homo Sapiens
MRFMTLLFLTALAGALVCAYDPEAASAPGSGNPCHEASAAQKENAGEDPGLARQAPKPRKQRSSLLEKGLDGAKKAVGGLGKLGKDAVEDLESVGKGAVHDVKDVLDSVL

SEQ ID NO: 3989 - protein, 121 aa, Homo Sapiens
MRFMTLLFLTALAGALVCAYDPEAASAPGSGNPCHEASAAQKENAGEDPGLARQAPKPRKQRSSLLEKGLDGAKKAVGGLGKLGKDAVEDLESVGKGGEERLVFGAPVNLTSIPLTSVSRP

SEQ ID NO: 3990 - protein, 100 aa, Homo Sapiens
MKATIILLLLAQVSWAGPFQQRGLFDFMLEDEASGIGPEVPDDRDFEPSLGPVCPFRCQCHLRVVQCSDLEKFGLEIPRALHLEDKSPERLKLSGWAKGE

SEQ ID NO: 3991 - protein, 98 aa, Homo Sapiens
MKATIILLLLAQVSWAGPFQQRGLFDFMLEDEASGIGPEVPDDRDFEPSLGPVCPFRCQCHLRVVQCSDLEKKYCNNLSSYNLYTTNCLILCRLFTHH

SEQ ID NO: 3992 - protein, 98 aa, Homo Sapiens; identical to SEQ ID NO: 3991

SEQ ID NO: 3993 - protein, 250 aa, Homo Sapiens
MKATIILLLLAQVSWAGPFQQRGLFDFMLEDEASGIGPEVPDDRDFEPSLGPVCPFRCQCHLRVVQCSDLELGTNPLKSSGIENGAFQGMKKLSYIRIADTNITSIPQGLPPSLTELHLDGNKISRVDAASLKGLNNLAKLGLSFNSISAVDNGSLANTPHLRELHLDNNKLTRVPGGLAEHKYIQVVYLHNNNISVVGSSDFCPPGHNTKKASYSGVSLFSNPVQYWEIQPSTFRCVYVRSAIQLGNYK

SEQ ID NO: 3994 - protein, 75 aa, Homo Sapiens
MKATIILLLLAQVSWAGPFQQRGLFDFMLEDEASGIGPEVPDDRDFEPSLGPVCPFRCQCHLRVVQCSDLGCLPS

SEQ ID NO: 3995 - protein, 119 aa, Homo Sapiens
MKATIILLLLAQVSWAGPFQQRGLFDFMLEDEASGIGPEVPDDRDFEPSLGPVCPFRCQCHLRVVQCSDLGLDKVPKDLPPDTTLLDLQNNKITEIKDGDFKNLKNLHALILVNNKISK

SEQ ID NO: 3996 - protein, 174 aa, Homo Sapiens
MKATIILLLLAQVSWAGPFQQRGLFDFMLEDEASGIGPEVPDDRDFEPSLGPVCPFRCQCHLRVVQCSDLGLDKVPKDLPPDTTLLDLQNNKITEIKDGDFKNLKNLHALILVNNKISKVSPGAFTPLVKLERLYLSKNQLKELPEKMPKTLQELRAHENEITKVRKVTFNGLN

SEQ ID NO: 3997 - protein, 178 aa, Homo Sapiens
MKATIILLLLAQVSWAGPFQQRGLFDFMLEDEASGIGPEVPDDRDFEPSLGPVCPFRCQCHLRVVQCSDLGLDKVPKDLPPDTTLLDLQNNKITEIKDGDFKNLKNLHALILVNNKISKVSPGAFTPLVKLERLYLSKNQLKELPEKMPKTLQELRAHENEITKVRKVTFNGLNQMIV

SEQ ID NO: 3998 - protein, 179 aa, Homo Sapiens
MKATIILLLLAQVSWAGPFQQRGLFDFMLEDEASGIGPEVPDDRDFEPSLGPVCPFRCQCHLRVVQCSDLGLDKVPKDLPPDTTLLDLQNNKITEIKDGDFKNLKNLHALILVNNKISKVSPGAFTPLVKLERLYLSKNQLKELPEKMPKTLQELRAHENEITKVRKVTFNGLNQMIVI

SEQ ID NO: 3999 - protein, 359 aa, Homo Sapiens
MKATIILLLLAQVSWAGPFQQRGLFDFMLEDEASGIGPEVPDDRDFEPSLGPVCPFRCQCHLRVVQCSDLGLDKVPKDLPPDTTLLDLQNNKITEIKDGDFKNLKNLHALILVNNKISKVSPGAFTPLVKLERLYLSKNQLKELPEKMPKTLQELRAHENEITKVRKVTFNGLNQMIVIELGTNPLKSSGIENGAFQGMKKLSYIRIADTNITSIPQGLPPSLTELHLDGNKISRVDAASLKGLNNLAKLGLSFNSISAVDNGSLANTPHLRELHLDNNKLTRVPGGLAEHKYIQVVYLHNNNISVVGSSDFCPPGHNTKKASYSGVSLFSNPVQYWEIQPSTFRCVYVRSAIQLGNYK

SEQ ID NO: 4000 - protein, 359 aa, Homo Sapiens; identical to SEQ ID NO: 3999

SEQ ID NO: 4001 - protein, 359 aa, Homo Sapiens; identical to SEQ ID NO: 3999

SEQ ID NO: 4002 - protein, 172 aa, Homo Sapiens
MKATIILLLLAQVSWAGPFQQRGLFDFMLEDEASGIGPEVPDDRDFEPSLGPVCPFRCQCHLRVVQCSDLGLDKVPKDLPPDTTLLDLQNNKITEIKDGDFKNLKNLHVVYLHNNNISVVGSSDFCPPGHNTKKASYSGVSLFSNPVQYWEIQPSTFRCVYVRSAIQLGNYK

SEQ ID NO: 4003 - protein, 177 aa, Homo Sapiens
MKATIILLLLAQVSWAGPFQQRGLFDFMLEDEASGIGPEVPDDRDFEPSLGPVCPFRCQCHLRVVQCSDLGLPPSLTELHLDGNKISRVDAASLKGLNNLAKLGLSFNSISAVDNGSLANTPHLRELHLDNNKLTRVPGGLAEHKYIQVVYLHNNNISVVGSSDFCPPGHNTKKASY

SEQ ID NO: 4004 - protein, 212 aa, Homo Sapiens
MKATIILLLLAQVSWAGPFQQRGLFDFMLEDEASGIGPEVPDDRDFEPSLGPVCPFRCQCHLRVVQCSDLGLPPSLTELHLDGNKISRVDAASLKGLNNLAKLGLSFNSISAVDNGSLANTPHLRELHLDNNKLTRVPGGLAEHKYIQVVYLHNNNISVVGSSDFCPPGHNTKKASYSGVSLFSNPVQYWEIQPSTFRCVYVRSAIQLGNYK

SEQ ID NO: 4005 - protein, 212 aa, Homo Sapiens; identical to SEQ ID NO: 4004

SEQ ID NO: 4006 - protein, 88 aa, Homo Sapiens
MKATIILLLLAQVSWAGPFQQRGLFDFMLEDEASGIGPEVPDDRDFEPSLGPVCPFRCQCHLRVVQCSDLVETGFHRVSQDGLDLLIS

SEQ ID NO: 4007 - protein, 52 aa, Homo Sapiens
  misc_feature (1)..(1): Xaa can be any naturally occurring amino acid
XDFCPPGHNTKKASYSGVSLFSNPVQYWEIQPSTFRCVYVRSAIQLGNYKKK

SEQ ID NO: 4008 - protein, 95 aa, Homo Sapiens
  misc_feature (1)..(1): Xaa can be any naturally occurring amino acid
XKISRVDAASLKGLNNLAKLGLSFNSISAVDNGSLANTPHLRELHLDNNKLTRVPGGLAEHKYIQVMQSHCLCEEYPKSKTPTLLMGCWEAGSSS

SEQ ID NO: 4009 - protein, 66 aa, Homo Sapiens
MNRRRKFLLASVLALQNSSFIYPSCQKCFSRIILVSKRILKTNLDKVQMPVTSYSNALTTKEKPKH

SEQ ID NO: 4010 - protein, 75 aa, Homo Sapiens
MNRRRKFLLASVLALQNSSFIYPSCQKCFSRIILVSKRSNCPKCGSTGESGNANYRYKLSLKVAESNKLFVITVF

SEQ ID NO: 4011 - protein, 76 aa, Homo Sapiens
MNRRRKFLLASVLALQNSSFIYPSCQKCFSRIILVSKRSNCPKCGSTGESGNANYRYKLSLKVAESNKLFVITVFG

SEQ ID NO: 4012 - protein, 120 aa, Homo Sapiens
MNRRRKFLLASVLALQNSSFIYPSCQKCFSRIILVSKRSNCPKCGSTGESGNANYRYKLSLKVAESNKLFVITVFGSCLDTFFGLTATGLHRILKTNLDKVQMPVTSYSNALTTKEKPKH

SEQ ID NO: 4013 - protein, 120 aa, Homo Sapiens; identical to SEQ ID NO: 4012

SEQ ID NO: 4014 - protein, 123 aa, Homo Sapiens
MNRRRKFLLASVLALQNSSFIYPSCQKCFSRIILVSKRSNCPKCGSTGESGNANYRYKLSLKVAESNKLFVITVFGSCLDTFFGLTATGLHRYIQDPNKIPETLDNDTTQNLLTKAVETCFVG

SEQ ID NO: 4015 - protein, 178 aa, Homo Sapiens
MNRRRKFLLASVLALQNSSFIYPSCQKCFSRIILVSKRSNCPKCGSTGESGNANYRYKLSLKVAESNKLFVITVFGSCLDTFFGLTATGLHRYIQDPNKIPETLDNDTTQNLLTKAVETCFVGQSFIFGVTNFENQPGQGSDASNFLQQCSDHKRKAKALVACQIVLPDPATQDAKTK

SEQ ID NO: 4016 - protein, 998 aa, Homo Sapiens
MNRRRKFLLASVLALQNSSFIYPSCQKCFSRIILVSKRSNCPKCGSTGESGNANYRYKLSLKVAESNKLFVITVFGSCLDTFFGLTATGLHRYIQDPNKIPETLDNDTTQNLLTKAVETCFVGQSFIFGVTNFENQPGQGSDASNFLQQCSDHKRKAKALVACQIVLPDPGIAGFTVIDYFHQLLQTFNFRKLQCDSQAPNNHLLALDHSNSDLSSIYTSDSTSDFFKSCSKDTFSKFWQPSLEFTCIVSQLTDNDDFSASEQSKAFGTLQQNRKSISIAEATGSSSCHDPIQDSWSLVSYMDKKSTAEKLGKELGLQAKELSAVHSSHHEIGVNDSNLFSLEMREPLESSNTKSFHSAVEIKNRSQHELPCFQHHGIDTPTSLQKRSACCPPSLLRLEETASSSQDGDPQIWDDLPFSESLNKFLAVLESEIAVTQADVSSRKHHVDNDIDKFHADHSRLSVTPQRTTGALHTPPIALRSSQVIVKANCSKDDFLFNCKGNLSPSVEKESQPDNKVEAVSVNHNGRDMSEYFLPNPYLSALSSSSKDLETIVTLKKTIRISPHRESDHSSLNNKYLNGCGEISVSEMNEKLTTLCYRKYNDVSDLCKLENKQYCRWSKNQDDSFTICRKLTYPLETLCNSPNRSTNTLKEMPWGHINNNVTQSYSIGYEGSYDASADLFDDIAKEMDIATEITKKSQDILLKWGTSLAESHPSESDFSLRSLSEDFIQPSQKLSLQSLSDSRHSRTCSPTPHFQSDSEYNFENSQDFVPCSQSTPISGFHQTRIHGINRAFKKPVFYSDLDGNYEKIRIFPENDKQQASPSCPKNIKTPSQKIRSPIVSGVSQPDVFNHYPFAECHETDSDEWVPPTTQKIFPSDMLGFQGIGLGKCLAAYHFPDQQELPRKKLKHIRQGTNKGLIKKKLKNMLAAVVTKKKTHKYNCKSSGWISKCPDIQVLAAPQLHPILGPDSCSEVKCCLPFSEKGPPSVCETRSAWSPELFS

SEQ ID NO: 4017 - protein, 998 aa, Homo Sapiens; identical to SEQ ID NO: 4016

SEQ ID NO: 4018 - protein, 225 aa, Homo Sapiens
MYQMSTLKSNKVIFQLKKNNFHQFRFFKRFIWSFALVAQAEVPWCNLGSLQPPHPRPRCEHMNRRRKFLLASVLALQNSSFIYPSCQKCFSRIILVSKRSNCPKCGSTGESGNANYRYKLSLKVAESNKLFVITVFGSCLDTFFGLTATGLHRYIQDPNKIPETLDNDTTQNLLTKAVETCFVGQSFIFGVTNFENQPGQGSDASNFLQQCSDHKRKAKALVACQ

SEQ ID NO: 4019 - protein, 439 aa, Homo Sapiens
MEPSTAARAWALFWLLLPLLGAVCASGPRTLVLLDNLNVRETHSLFFRSLKDRGFELTFKTADDPSLSLIKYGEFLYDNLIIFSPSVEDFGGNINVETISAFIDGGGSVLVAASSDIGDPLRELGSECGIEFDEEKTAVIDHHNYDISDLGQHTLIVADTENLLKAPTIVGKSSLNPILFRGVGMVADPDNPLVLDILTGSSTSYSFFPDKPITQYPHAVGKNTLLIAGLQARNNARVIFSGSLDFFSDSFFNSAVQKAAPGSQRYSQTGNYELAVALSRWVFKEEGVLRVGPVSHHRVGETAPPNAYTVTDLVEYSIVIQQLSNGKWVPFDGDDIQLEFVRIDPFVRTFLKKKGGKYSVQFKLPDVYGVFQFKVDYNRLGYTHLYSSTQVSVRPLQHTQYERFIPSAYPYYASAFSMMLGLFIFSIVFLHMKEKEKSD

SEQ ID NO: 4020 - protein, 155 aa, Homo Sapiens [sequence omitted]

SEQ ID NO: 4021 - protein, 456 aa, Homo Sapiens
MGYFRCARAGSFGRRRKMEPSTAARAWALFWLLLPLLGAVCASGPRTLVLLDNLNVRETHSLFFRSLKDRGFELTFKTADDPSLSLIKYGEFLYDNLIIFSPSVEDFGGNINVETISAFIDGGGSVLVAASSDIGDPLRELGSECGIEFDEEKTAVIDHHNYDISDLGQHTLIVADTENLLKAPTIVGKSSLNPILFRGVGMVADPDNPLVLDILTGSSTSYSFFPDKPITQYPHAVGKNTLLIAGLQARNNARVIFSGSLDFFSDSFFNSAVQKAAPGSQRYSQTGNYELAVALSRWVFKEEGVLRVGPVSHHRVGETAPPNAYTVTDLVEYSIVIQQLSNGKWVPFDGDDIQLEFVRIDPFVRTFLKKKGGKYSVQFKLPDVYGVFQFKVDYNRLGYTHLYSSTQVSVRPLQHTQYERFIPSAYPYYASAFSMMLGLFIFSIVFLHMKEKEKSD

SEQ ID NO: 4022 - protein, 456 aa, Homo Sapiens; identical to SEQ ID NO: 4021

SEQ ID NO: 4023 - protein, 41 aa, Homo Sapiens
MGPEALSSLLLLLLVASGDADMKGHFDPAKCRYALGMQDRT

SEQ ID NO: 4024 - protein, 51 aa, Homo Sapiens
MGPEALSSLLLLLLVASGDADMKGHFDPAKCRYALGMQDRTIPDSDISASS

SEQ ID NO: 4025 - protein, 51 aa, Homo Sapiens; identical to SEQ ID NO: 4024

SEQ ID NO: 4026 - protein, 55 aa, Homo Sapiens
MGPEALSSLLLLLLVASGDADMKGHFDPAKCRYALGMQDRTIPDSDISASSSWSD

SEQ ID NO: 4027 - protein, 58 aa, Homo Sapiens
MGPEALSSLLLLLLVASGDADMKGHFDPAKCRYALGMQDRTIPDSDISASSSWSDSTA

SEQ ID NO: 4028 - protein, 70 aa, Homo Sapiens
MGPEALSSLLLLLLVASGDADMKGHFDPAKCRYALGMQDRTIPDSDISASSSWSDSTAARHSRLESSDGD

SEQ ID NO: 4029 - protein, 73 aa, Homo Sapiens
MGPEALSSLLLLLLVASGDADMKGHFDPAKCRYALGMQDRTIPDSDISASSSWSDSTAARHSRLESSDGDGAW

SEQ ID NO: 4030 - protein, 78 aa, Homo Sapiens
MGPEALSSLLLLLLVASGDADMKGHFDPAKCRYALGMQDRTIPDSDISASSSWSDSTAARHSRLESSDGDGAWCPAGS

SEQ ID NO: 4031 - protein, 85 aa, Homo Sapiens
MGPEALSSLLLLLLVASGDADMKGHFDPAKCRYALGMQDRTIPDSDISASSSWSDSTAARHSRLESSDGDGAWCPAGSVFPKEEE

SEQ ID NO: 4032 - protein, 101 aa, Homo Sapiens
MGPEALSSLLLLLLVASGDADMKGHFDPAKCRYALGMQDRTIPDSDISASSSWSDSTAARHSRLESSDGDGAWCPAGSVFPKEEEYLQVDLQRLHLVALVG

SEQ ID NO: 4033 - protein, 112 aa, Homo Sapiens
MGPEALSSLLLLLLVASGDADMKGHFDPAKCRYALGMQDRTIPDSDISASSSWSDSTAARHSRLESSDGDGAWCPAGSVFPKEEEYLQVDLQRLHLVALVGTQGRHAGGLGK

SEQ ID NO: 4034 - protein, 115 aa, Homo Sapiens
MGPEALSSLLLLLLVASGDADMKGHFDPAKCRYALGMQDRTIPDSDISASSSWSDSTAARHSRLESSDGDGAWCPAGSVFPKEEEYLQVDLQRLHLVALVGTQGRHAGGLGKEFS

SEQ ID NO: 4035 - protein, 122 aa, Homo Sapiens
MGPEALSSLLLLLLVASGDADMKGHFDPAKCRYALGMQDRTIPDSDISASSSWSDSTAARHSRLESSDGDGAWCPAGSVFPKEEEYLQVDLQRLHLVALVGTQGRHAGGLGKEFSRSYRLRY

SEQ ID NO: 4036 - protein, 127 aa, Homo Sapiens
MGPEALSSLLLLLLVASGDADMKGHFDPAKCRYALGMQDRTIPDSDISASSSWSDSTAARHSRLESSDGDGAWCPAGSVFPKEEEYLQVDLQRLHLVALVGTQGRHAGGLGKEFSRSYRLRYSRDGR

SEQ ID NO: 4037 - protein, 132 aa, Homo Sapiens
MGPEALSSLLLLLLVASGDADMKGHFDPAKCRYALGMQDRTIPDSDISASSSWSDSTAARHSRLESSDGDGAWCPAGSVFPKEEEYLQVDLQRLHLVALVGTQGRHAGGLGKEFSRSYRLRYSRDGRRWMGW

SEQ ID NO: 4038 - protein, 138 aa, Homo Sapiens
MGPEALSSLLLLLLVASGDADMKGHFDPAKCRYALGMQDRTIPDSDISASSSWSDSTAARHSRLESSDGDGAWCPAGSVFPKEEEYLQVDLQRLHLVALVGTQGRHAGGLGKEFSRSYRLRYSRDGRRWMGWKDRWGQ

SEQ ID NO: 4039 - protein, 138 aa, Homo Sapiens; identical to SEQ ID NO: 4038

SEQ ID NO: 4040 - protein, 143 aa, Homo Sapiens
MGPEALSSLLLLLLVASGDADMKGHFDPAKCRYALGMQDRTIPDSDISASSSWSDSTAARHSRLESSDGDGAWCPAGSVFPKEEEYLQVDLQRLHLVALVGTQGRHAGGLGKEFSRSYRLRYSRDGRRWMGWKDRWGQEVISG

SEQ ID NO: 4041 - protein, 147 aa, Homo Sapiens
MGPEALSSLLLLLLVASGDADMKGHFDPAKCRYALGMQDRTIPDSDISASSSWSDSTAARHSRLESSDGDGAWCPAGSVFPKEEEYLQVDLQRLHLVALVGTQGRHAGGLGKEFSRSYRLRYSRDGRRWMGWKDRWGQEVISGNEDP

SEQ ID NO: 4042 - protein, 153 aa, Homo Sapiens
MGPEALSSLLLLLLVASGDADMKGHFDPAKCRYALGMQDRTIPDSDISASSSWSDSTAARHSRLESSDGDGAWCPAGSVFPKEEEYLQVDLQRLHLVALVGTQGRHAGGLGKEFSRSYRLRYSRDGRRWMGWKDRWGQEVISGNEDPEGVVLK

SEQ ID NO: 4043 - protein, 160 aa, Homo Sapiens
MGPEALSSLLLLLLVASGDADMKGHFDPAKCRYALGMQDRTIPDSDISASSSWSDSTAARHSRLESSDGDGAWCPAGSVFPKEEEYLQVDLQRLHLVALVGTQGRHAGGLGKEFSRSYRLRYSRDGRRWMGWKDRWGQEVISGNEDPEGVVLKDLGPPMV

SEQ ID NO: 4044 - protein, 170 aa, Homo Sapiens
MGPEALSSLLLLLLVASGDADMKGHFDPAKCRYALGMQDRTIPDSDISASSSWSDSTAARHSRLESSDGDGAWCPAGSVFPKEEEYLQVDLQRLHLVALVGTQGRHAGGLGKEFSRSYRLRYSRDGRRWMGWKDRWGQEVISGNEDPEGVVLKDLGPPMVARLVRFYPRA

SEQ ID NO: 4045 - protein, 243 aa, Homo Sapiens
MGPEALSSLLLLLLVASGDADMKGHFDPAKCRYALGMQDRTIPDSDISASSSWSDSTAARHSRLESSDGDGAWCPAGSVFPKEEEYLQVDLQRLHLVALVGTQGRHAGGLGKEFSRSYRLRYSRDGRRWMGWKDRWGQEVISGNEDPEGVVLKDLGPPMVARLVRFYPRADRVMSVCLRVELYGCLWRDCSMGVWASWQMVWWGWMTLGRVRSCGSGQAMTMWDGATTASPVAMWRWSLSLTG

SEQ ID NO: 4046 - protein, 243 aa, Homo Sapiens; identical to SEQ ID NO: 4045

SEQ ID NO: 4047 - protein, 209 aa, Homo Sapiens
MGPEALSSLLLLLLVASGDADMKGHFDPAKCRYALGMQDRTIPDSDISASSSWSDSTAARHSRLESSDGDGAWCPAGSVFPKEEEYLQVDLQRLHLVALVGTQGRHAGGLGKEFSRSYRLRYSRDGRRWMGWKDRWGQEVISGNEDPEGVVLKDLGPPMVARLVRFYPRADRVMSVCLRVELYGCLWRDGLLSYTAPVGQTMYLSEAVY

SEQ ID NO: 4048 - protein, 913 aa, Homo Sapiens
MGPEALSSLLLLLLVASGDADMKGHFDPAKCRYALGMQDRTIPDSDISASSSWSDSTAARHSRLESSDGDGAWCPAGSVFPKEEEYLQVDLQRLHLVALVGTQGRHAGGLGKEFSRSYRLRYSRDGRRWMGWKDRWGQEVISGNEDPEGVVLKDLGPPMVARLVRFYPRADRVMSVCLRVELYGCLWRDGLLSYTAPVGQTMYLSEAVYLNDSTYDGHTVGGLQYGGLGQLADGVVGLDDFRKSQELRVWPGYDYVGWSNHSFSSGYVEMEFEFDRLRAFQAMQVHCNNMHTLGARLPGGVECRFRRGPAMAWEGEPMRHNLGGNLGDPRARAVSVPLGGRVARFLQCRFLFAGPWLLFSEISFISDVVNNSSPALGGTFPPAPWWPPGPPPTNFSSLELEPRGQQPVAKAEGSPTAILIGCLVAIILLLLLIIALMLWRLHWRRLLSKAERRVLEEELTVHLSVPGDTILINNRPGPREPPPYQEPRPRGNPPHSAPCVPNGSALLLSNPAYRLLLATYARPPRGPGPPTPAWAKPTNTQAYSGDYMEPEKPGAPLLPPPPQNSVPHYAEADIVTLQGVTGGNTYAVPALPPGAVGDGPPRVDFPRSRLRFKEKLGEGQFGEVHLCEVDSPQDLVSLDFPLNVRKGHPLLVAVKILRPDATKNARNDFLKEVKIMSRLKDPNIIRLLGVCVQDDPLCMITDYMENGDLNQFLSAHQLEDKAAEGAPGDGQAAQGPTISYPMLLHVAAQIASGMRYLATLNFVHRDLATRNCLVGENFTIKIADFGMSRNLYAGDYYRVQGRAVLPIRWMAWECILMGKFTTASDVWAFGVTLWEVLMLCRAQPFGQLTDEQVIENAGEFFRDQGRQVYLSRPPACPQGLYELMLRCWSRESEQRPPFSQLHRFLAEDALNTV

SEQ ID NO: 4049 - protein, 876 aa, Homo Sapiens
MGPEALSSLLLLLLVASGDADMKGHFDPAKCRYALGMQDRTIPDSDISASSSWSDSTAARHSRLESSDGDGAWCPAGSVFPKEEEYLQVDLQRLHLVALVGTQGRHAGGLGKEFSRSYRLRYSRDGRRWMGWKDRWGQEVISGNEDPEGVVLKDLGPPMVARLVRFYPRADRVMSVCLRVELYGCLWRDGLLSYTAPVGQTMYLSEAVYLNDSTYDGHTVGGLQYGGLGQLADGVVGLDDFRKSQELRVWPGYDYVGWSNHSFSSGYVEMEFEFDRLRAFQAMQVHCNNMHTLGARLPGGVECRFRRGPAMAWEGEPMRHNLGGNLGDPRARAVSVPLGGRVARFLQCRFLFAGPWLLFSEISFISDVVNNSSPALGGTFPPAPWWPPGPPPTNFSSLELEPRGQQPVAKAEGSPTAILIGCLVAIILLLLLIIALMLWRLHWRRLLSKAERRVLEEELTVHLSVPGDTILINNRPGPREPPPYQEPRPRGNPPHSAPCVPNGSAYSGDYMEPEKPGAPLLPPPPQNSVPHYAEADIVTLQGVTGGNTYAVPALPPGAVGDGPPRVDFPRSRLRFKEKLGEGQFGEVHLCEVDSPQDLVSLDFPLNVRKGHPLLVAVKILRPDATKNARNDFLKEVKIMSRLKDPNIIRLLGVCVQDDPLCMITDYMENGDLNQFLSAHQLEDKAAEGAPGDGQAAQGPTISYPMLLHVAAQIASGMRYLATLNFVHRDLATRNCLVGENFTIKIADFGMSRNLYAGDYYRVQGRAVLPIRWMAWECILMGKFTTASDVWAFGVTLWEVLMLCRAQPFGQLTDEQVIENAGEFFRDQGRQVYLSRPPACPQGLYELMLRCWSRESEQRPPFSQLHRFLAEDALNTV

SEQ ID NO: 4050 - protein, 876 aa, Homo Sapiens; identical to SEQ ID NO: 4049

SEQ ID NO: 4051 - protein, 913 aa, Homo Sapiens; identical to SEQ ID NO: 4048

SEQ ID NO: 4052 - protein, 267 aa, Homo Sapiens
MGPEALSSLLLLLLVASGDADMKGHFDPAKCRYALGMQDRTIPDSDISASSSWSDSTAARHSRLESSDGDGAWCPAGSVFPKEEEYLQVDLQRLHLVALVGTQGRHAGGLGKEFSRSYRLRYSRDGRRWMGWKDRWGQEVISGNEDPEGVVLKDLGPPMVARLVRFYPRADRVMSVCLRVELYGCLWRDGLLSYTAPVGQTMYLSEAVYLNDSTYDGHTVGGLQYGGLGQLADGVVGLDDFRKSQELRVWPGYDYVGWSNHSFSSGY

SEQ ID NO: 4053 - protein, 876 aa, Homo Sapiens; identical to SEQ ID NO: 4049

SEQ ID NO: 4054 - protein, 767 aa, Homo Sapiens
MGPEALSSLLLLLLVASGDADMKGHFDPAKCRYALGMQDRTIPDSDISASSSWSDSTAARHSRLESSDGDGAWCPAGSVFPKEEEYLQVDLQRLHLVALVGTQGRHAGGLGKEFSRSYRLRYSRDGRRWMGWKDRWGQEVISGNEDPEGVVLKDLGPPMVARLVRFYPRADRVMSVCLRVELYGCLWRDGLLSYTAPVGQTMYLSEAVYLNDSTYDGHTVGGLQYGGLGQLADGVVGLDDFRKSQELRVWPGYDYVGWSNHSFSSGYVEMEFEFDRLRAFQAMQVHCNNMHTLGARLPGGVECRFRRGPAMAWEGEPMRHNLGGNLGDPRARAVSVPLGGRVARFLQCRFLFAGPWLLFSEISFISDVVNNSSPALGGTFPPAPWWPPGPPPTNFSSLELEPRGQQPVAKAEGSPTAILIGCLVAIILLLLLIIALMLWRLHWRRLLSKVLESHPRTRSPGLVGIRPTPLPVSPMALVHLCEVDSPQDLVSLDFPLNVRKGHPLLVAVKILRPDATKNARNDFLKEVKIMSRLKDPNIIRLLGVCVQDDPLCMITDYMENGDLNQFLSAHQLEDKAAEGAPGDGQAAQGPTISYPMLLHVAAQIASGMRYLATLNFVHRDLATRNCLVGENFTIKIADFGMSRNLYAGDYYRVQGRAVLPIRWMAWECILMGKFTTASDVWAFGVTLWEVLMLCRAQPFGQLTDEQVIENAGEFFRDQGRQVYLSRPPACPQGLYELMLRCWSRESEQRPPFSQLHRFLAEDALNTV

SEQ ID NO: 4055 - protein, 876 aa, Homo Sapiens; identical to SEQ ID NO: 4049

SEQ ID NO: 4056 - protein, 876 aa, Homo Sapiens; identical to SEQ ID NO: 4049

SEQ ID NO: 4057 - protein, 919 aa, Homo Sapiens
MGPEALSSLLLLLLVASGDADMKGHFDPAKCRYALGMQDRTIPDSDISASSSWSDSTAARHSRLESSDGDGAWCPAGSVFPKEEEYLQVDLQRLHLVALVGTQGRHAGGLGKEFSRSYRLRYSRDGRRWMGWKDRWGQEVISGNEDPEGVVLKDLGPPMVARLVRFYPRADRVMSVCLRVELYGCLWRDGLLSYTAPVGQTMYLSEAVYLNDSTYDGHTVGGLQYGGLGQLADGVVGLDDFRKSQELRVWPGYDYVGWSNHSFSSGYVEMEFEFDRLRAFQAMQVHCNNMHTLGARLPGGVECRFRRGPAMAWEGEPMRHNLGGNLGDPRARAVSVPLGGRVARFLQCRFLFAGPWLLFSEISFISDVVNNSSPALGGTFPPAPWWPPGPPPTNFSSLELEPRGQQPVAKAEGSPTAILIGCLVAIILLLLLIIALMLWRLHWRRLLSKAERRVLEEELTVHLSVPGDTILINNRPGPREPPPYQEPRPRGNPPHSAPCVPNGSALLLSNPAYRLLLATYARPPRGPGPPTPAWAKPTNTQAYSGDYMEPEKPGAPLLPPPPQNSVPHYAEADIVTLQGVTGGNTYAVPALPPGAVGDGPPRVDFPRSRLRFKEKLGEGQFGEVHLCEVDSPQDLVSLDFPLNVRKGHPLLVAVKILRPDATKNASFSLFSRNDFLKEVKIMSRLKDPNIIRLLGVCVQDDPLCMITDYMENGDLNQFLSAHQLEDKAAEGAPGDGQAAQGPTISYPMLLHVAAQIASGMRYLATLNFVHRDLATRNCLVGENFTIKIADFGMSRNLYAGDYYRVQGRAVLPIRWMAWECILMGKFTTASDVWAFGVTLWEVLMLCRAQPFGQLTDEQVIENAGEFFRDQGRQVYLSRPPACPQGLYELMLRCWSRESEQRPPFSQLHRFLAEDALNTV

SEQ ID NO: 4058 - protein, 286 aa, Homo Sapiens
MGPEALSSLLLLLLVASGDADMKGHFDPAKCRYALGMQDRTIPDSDISASSSWSDSTAARHSRLESSDGDGAWCPAGSVFPKEEEYLQVDLQRLHLVALVGTQGRHAGGLGKEFSRSYRLRYSRDGRRWMGWKDRWGQEVISGNEDPEGVVLKDLGPPMVARLVRFYPRADRVMSVCLRVELYGCLWRDGLLSYTAPVGQTMYLSEAVYLNDSTYDGHTVGGLQYGGLGQLADGVVGLDDFRKSQELRVWPGYDYVGWSNHSFSSGYVEMEFEFDRLRAFQAMQVH

SEQ ID NO: 4059 - protein, 913 aa, Homo Sapiens; identical to SEQ ID NO: 4048

SEQ ID NO: 4060 - protein, 35 aa, Homo Sapiens
MGPEALSSLLLLLLVASGDADMKGHFDPGPDHPRQ

SEQ ID NO: 4061 - protein, 35 aa, Homo Sapiens; identical to SEQ ID NO: 4060

SEQ ID NO: 4062 - protein, 196 aa, Homo Sapiens
MPHLASLFTASSRCCPHPLRPEGSGAMGPEALSSLLLLLLVASGDADMKGHFDPAKCRYALGMQDRTIPDSDISASSSWSDSTAARHSRLESSDGDGAWCPAGSVFPKEEEYLQVDLQRLHLVALVGTQGRHAGGLGKEFSRSYRLRYSRDGRRWMGWKDRWGQEVISGNEDPEGVVLKDLGPPMVARLVRFYPRA

SEQ ID NO: 4063 - protein, 894 aa, Homo Sapiens
MSLPRCCPHPLRPEGSGAMGPEALSSLLLLLLVASGDADMKGHFDPAKCRYALGMQDRTIPDSDISASSSWSDSTAARHSRLESSDGDGAWCPAGSVFPKEEEYLQVDLQRLHLVALVGTQGRHAGGLGKEFSRSYRLRYSRDGRRWMGWKDRWGQEVISGNEDPEGVVLKDLGPPMVARLVRFYPRADRVMSVCLRVELYGCLWRDGLLSYTAPVGQTMYLSEAVYLNDSTYDGHTVGGLQYGGLGQLADGVVGLDDFRKSQELRVWPGYDYVGWSNHSFSSGYVEMEFEFDRLRAFQAMQVHCNNMHTLGARLPGGVECRFRRGPAMAWEGEPMRHNLGGNLGDPRARAVSVPLGGRVARFLQCRFLFAGPWLLFSEISFISDVVNNSSPALGGTFPPAPWWPPGPPPTNFSSLELEPRGQQPVAKAEGSPTAILIGCLVAIILLLLLIIALMLWRLHWRRLLSKAERRVLEEELTVHLSVPGDTILINNRPGPREPPPYQEPRPRGNPPHSAPCVPNGSAYSGDYMEPEKPGAPLLPPPPQNSVPHYAEADIVTLQGVTGGNTYAVPALPPGAVGDGPPRVDFPRSRLRFKEKLGEGQFGEVHLCEVDSPQDLVSLDFPLNVRKGHPLLVAVKILRPDATKNARNDFLKEVKIMSRLKDPNIIRLLGVCVQDDPLCMITDYMENGDLNQFLSAHQLEDKAAEGAPGDGQAAQGPTISYPMLLHVAAQIASGMRYLATLNFVHRDLATRNCLVGENFTIKIADFGMSRNLYAGDYYRVQGRAVLPIRWMAWECILMGKFTTASDVWAFGVTLWEVLMLCRAQPFGQLTDEQVIENAGEFFRDQGRQVYLSRPPACPQGLYELMLRCWSRESEQRPPFSQLHRFLAEDALNTV

SEQ ID NO: 4064 - protein, 69 aa, Homo Sapiens
MVARLVRFYPRADRVMSVCLRVELYGCLWRDGLLSYTAPVGQTMYLSEAVYLNDSTYDGHTVGGLQYGG

SEQ ID NO: 4065 - protein, 493 aa, Homo Sapiens
SEAVYLNDSTYDGHTVGGLQYGGLGQLADGVVGLDDFRKSQELRVWPGYDYVGWSNHSFSSGYVEMEFEFDRLRAFQAMQVHCNNMHTLGARLPGGVECRFRRGPAMAWEGEPMRHNLGGNLGDPRARAVSVPLGGRVARFLQCRFLFAGPWLLFSEISFISDVVNNSSPALGGTFPPAPWWPPGPPPTNFSSLELEPRGQQPVAKAEGSPTAILIGCLVAIILLLLLIIALMLWRLHWRRLLSKVLESHPRTRSPGLVGIRPTPLPVSPMALRCCSPIQPTASFWPLTPVPLEARAPPHPPGPNPPTPRGVTGGNTYAVPALPPGAVGDGPPRVDFPRSRLRFKEKLGEGQFGEVHLCEVDSPQDLVSLDFPLNVRKGHPLLVAVKILRPDATKNARNDFLKEVKIMSRLKDPNIIRLLGVCVQDDPLCMITDYMENGDLNQFLSAHQLEDKAAEGAPGDGQAAQGPTISYPMLLHVAAQIASGMRYLATLN

SEQ ID NO: 4066 - protein, 172 aa, Homo Sapiens
  misc_feature (1)..(1): Xaa can be any naturally occurring amino acid
XNNRPGPREPPPYQEPRPRGNPPHSAPCVPNGSAYSGDYMEPEKPGAPLLPPPPQNSVPHYAEADIVTLQGVTGGNTYAVPALPPGAVGDGPPRVDFPRSRLRFKEKLGEGQFGEVHLCEVDSPQDLVSLDFPLNVRKGHPLLVAVKILRPDATKNASFSLFSRNDFLKEVK

SEQ ID NO: 4067 - protein, 277 aa, Homo Sapiens
  misc_feature (1)..(1): Xaa can be any naturally occurring amino acid
XRKGHPLLVAVKILRPDATKNARNDFLKEVKIMSRLKDPNIIRLLGVCVQDDPLCMITDYMENGDLNQFLSAHQLEDKAAEGAPGDGQAAQGPTISYPMLLHVAAQIASGMRYLATLNFVHRDLATRNCLVGENFTIKIADFGMSRNLYAGDYYRVQGRAVLPIRWMAWECILMGKFTTASDVWAFGVTLWEVLMLCRAQPFGQLTDEQVIENAGEFFRDQGRQVRVEEREDGSEAGDRRGRVVILETKEYLFPDSHPHCHNAGVPVPAACLPAGPI

SEQ ID NO: 4068 - protein, 196 aa, Homo Sapiens
  misc_feature (1)..(1): Xaa can be any naturally occurring amino acid
XSLLLLLLVASGDADMKGHFDPAKCRYALGMQDRTIPDSDISASSSWLESSDGDGAWCPAGSVFPKEEEYLQVDLQRLHLVALVGTQGRHAGGLGKEFSRSYRLRYSRDGRRWMGWKDRWGQEVISGNEDPEGVVLKDLGPPMVARLVRFYPRADRVMSVCLRVELYGCLWRDGLLSYTAPVGQTMYLSEAVYLND

SEQ ID NO: 4069 - protein, 166 aa, Homo Sapiens
LKVDDSNTRILIGCLVAIIFILLAIIVIILWRQFWQKMLEKASRRMLDDEMTVSLSLPSDSSMFNNNRSSSPSEQGSNSTYDRIFPLRPDYQEPSRLIRKLPEFAPGEEESGEDDVVGRVSREKPQQASGRYDTPAPSSLHLFLVSANLLRSPHSLSRFGLPLLLA

SEQ ID NO: 4070 - protein, 130 aa, Homo Sapiens
MILIPRMLLVLFLLLPILSSAKAQVNPAICRYPLGMSGGQIPDEDITASSQWSESTAAKYGRLDSEEGDGAWCPEIPVEPDDLKEFLQIDLHTLHFITLVGTQGRHAGGHGIEFAPMYKINYSRDGTRWI

SEQ ID NO: 4071 - protein, 148 aa, Homo Sapiens
MILIPRMLLVLFLLLPILSSAKAQVNPAICRYPLGMSGGQIPDEDITASSQWSESTAAKYGRLDSEEGDGAWCPEIPVEPDDLKEFLQIDLHTLHFITLVGTQGRHAGGHGIEFAPMYKINYSRDGTRWISWRNRHGKQVLDGNSNPY

SEQ ID NO: 4072 - protein, 855 aa, Homo Sapiens
MILIPRMLLVLFLLLPILSSAKAQVNPAICRYPLGMSGGQIPDEDITASSQWSESTAAKYGRLDSEEGDGAWCPEIPVEPDDLKEFLQIDLHTLHFITLVGTQGRHAGGHGIEFAPMYKINYSRDGTRWISWRNRHGKQVLDGNSNPYDIFLKDLEPPIVARFVRFIPVTDHSMNVCMRVELYGCVWLDGLVSYNAPAGQQFVLPGGSIIYLNDSVYDGAVGYSMTEGLGQLTDGVSGLDDFTQTHEYHVWPGYDYVGWRNESATNGYIEIMFEFDRIRNFTTMKVHCNNMFAKGVKIFKEVQCYFRSEASEWEPNAISFPLVLDDVNPSARFVTVPLHHRMASAIKCQYHFADTWMMFSEITFQSDAAMYNNSEALPTSPMAPTTYDPMLKVDDSNTRILIGCLVAIIFILLAIIVIILWRQFWQKMLEKASRRMLDDEMTVSLSLPSDSSMFNNNRSSSPSEQGSNSTYDRIFPLRPDYQEPSRLIRKLPEFAPGEEESGCSGVVKPVQPSGPEGVPHYAEADIVNLQGVTGGNTYSVPAVTMDLLSGKDVAVEEFPRKLLTFKEKLGEGQFGEVHLCEVEGMEKFKDKDFALDVSANQPVLVAVKMLRADANKNARNDFLKEIKIMSRLKDPNIIHLLAVCITDDPLCMITEYMENGDLNQFLSRHEPPNSSSSDVRTVSYTNLKFMATQIASGMKYLSSLNFVHRDLATRNCLVGKNYTIKIADFGMSRNLYSGDYYRIQGRAVLPIRWMSWESILLGKFTTASDVWAFGVTLWETFTFCQEQPYSQLSDEQVIENTGEFFRDQGRQTYLPQPAICPDSVYKLMLSCWRRDTKNRPSFQEIHLLLLQQGDE

SEQ ID NO: 4073 - protein, 855 aa, Homo Sapiens; identical to SEQ ID NO: 4072

SEQ ID NO: 4074 - protein, 171 aa, Homo Sapiens
  misc_feature (1)..(1): Xaa can be any naturally occurring amino acid
XIFILLAIIVIILWRQFWQKMLEKASRRMLDDEMTVSLSLPSDSSMFNNNRSSSPSEQGSNSTYDRIFPLRPDYQEPSRLIRKLPEFAPGEEESGCSGVVKPVQPSGPEGVPHYAEADIVNLQGVTGGNTYSVPAVTMDLLSGKDVAVEEFPRKLLTFKEKLGEGQFGEVS

SEQ ID NO: 4075 - protein, 166 aa, Homo Sapiens
MPFLELDTNLPANRVPAGLEKRLCAAAASILGKPADRVNVTVRPGLAMALSGSTEPCAQLSISSIGVVGTAEDNRSHSAHFFEFLTKELALGQDRFQVKFTGDSQSSERPLAWMSRHLLSGSCIAGGPQTNLEMNHLQLATSSSVNTGEKTSLPHKKRLQPKPGVL

SEQ ID NO: 4076 - protein, 118 aa, Homo Sapiens
MPFLELDTNLPANRVPAGLEKRLCAAAASILGKPADRVNVTVRPGLAMALSGSTEPCAQLSISSIGVVGTAEDNRSHSAHFFEFLTKELALGQDRILIRFFPLESWQIGKIGTVMTFL

SEQ ID NO: 4077 - protein, 118 aa, Homo Sapiens; identical to SEQ ID NO: 4076

SEQ ID NO: 4078 - protein, 107 aa, Homo Sapiens
MPFLELDTNLPANRVPAGLEKRLCAAAASILGKPADRVNVTVRPGLAMALSGSTEPCAQLSISSIGVVGTAEDNRSHSAHFFEFLTKELALGQDRQVPGEVHGRLTE

SEQ ID NO: 4079 - protein, 132 aa, Homo Sapiens
MQLFLLAVSVPLPAMPFLELDTNLPANRVPAGLEKRLCAAAASILGKPADRVNVTVRPGLAMALSGSTEPCAQLSISSIGVVGTAEDNRSHSAHFFEFLTKELALGQDRILIRFFPLESWQIGKIGTVMTFL

SEQ ID NO: 4080 - protein, 50 aa, Homo Sapiens
  misc_feature (1)..(1): Xaa can be any naturally occurring amino acid
XKDLPPPQEASATQTWRSVTELKFPLGILIRFFPLESWQIGKIGTVMTFL

SEQ ID NO: 4081 - protein, 729 aa, Homo Sapiens
LPTGFVAPILCVLLPSPTREAATVASATGDSASERESAAPAAAPTAEAPPPSVVTRPEPQALPSPAIRAPLPDLYPFGTMRGGGFGDRDRDRDRGGFGARGGGGLPPKKFGNPGERLRKKKWDLSELPKFEKNFYVEHPEVARLTPYEVDELRRKKEITVRGGDVCPKPVFAFHHANFPQYVMDVLMDQHFTEPTPIQCQGFPLALSGRDMVGIAQTGSGKTLAYLLPAIVHINHQPYLERGDGPICLVLAPTRELAQQVQQVADDYGKCSRLKSTCIYGGAPKGPQIRDLERGVEICIATPGRLIDFLESGKTNLRRCTYLVLDEADRMLDMGFEPQIRKIVDQIRPDRQTLMWSATWPKEVRQLAEDFLRDYTQINVGNLELSANHNILQIVDVCMESEKDHKLIQLMEEIMAEKENKTIIFVETKRRCDDLTRRMRRDGWPAMCIHGDKSQPERDWVLNEFRSGKAPILIATDVASRGLDVEDVKFVINYDYPNSSEDYVHRIGRTARSTNKGTAYTFFTPGNLKQARELIKVLEEANQAINPKLMQLVDHRGGGGGGGGRSRYRTTSSANNPNLMYQDECDRRLRGVKDGGRRDSASYRDRSETDRAGYANGSGYGSPNSAFGAQAGQYTYGQGTYGAAAYGTSSYTAQEYGAGTYGASSTTSTGRSSQSSSQQFSGIGRSGQQPQPLMSQQFAQPPGATNMIGYMGQTAYQYPPPPPPPPPSRK

SEQ ID NO: 4082 - protein, 731 aa, Homo Sapiens
LPTGFVAPILCVLLPSPTREAATVASATGDSASERESAAPAAAPTAEAPPPSVVTRPEPQALPSPAIRAPLPDLYPFGTMRGGGFGDRDRDRDRGGFGARGGGGLPPKKFGNPGERLRKKKWDLSELPKFEKNFYVEHPEVARLTPYEVDELRRKKEITVRGGDVCPKPVFAFHHANFPQYVMDVLMDQHFTEPTPIQCQGFPLALSGRDMVGIAQTGSGKTLAYLLPAIVHINHQPYLERGDGPICLVLAPTRELAQQVQQVADDYGKCSRLKSTCIYGGAPKGPQIRDLERGVEICIATPGRLIDFLESGKTNLRRCTYLVLDEADRMLDMGFEPQIRKIVDQIRPDRQTLMWSATWPKEVRQLAEDFLRDYTQINVGNLELSANHNILQIVDVCMESEKDHKLIQLMEEIMAEKENKTIIFVETKRRCDDLTRRMRRDGWPAMCIHGDKSQPERDWVLNEFRSGKAPILIATDVASRGLDVEDVKFVINYDYPNSSEDYVHRIGRTARSTNKGTAYTFFTPGNLKQARELIKVLEEANQAINPKLMQLVDHRGGGGGGGKGGRSRYRTTSSANNPNLMYQDECDRRLRGVKDGGRRDSASYRDRSETDRAGYANGSGYGSPNSAFGAQAGQYTYGQGTYGAAAYGTSSYTAQEYGAGTYGASSTTSTGRSSQSSSQQFSGIGRSGQQPQPLMSQQFAQPPGATNMIGYMGQTAYQYPPPPPPPPPSRK

SEQ ID NO: 4083 - protein, 729 aa, Homo Sapiens; identical to SEQ ID NO: 4081

SEQ ID NO: 4084 - protein, 731 aa, Homo Sapiens; identical to SEQ ID NO: 4082

SEQ ID NO: 4085 - protein, 56 aa, Homo Sapiens
  misc_feature (1)..(1): Xaa can be any naturally occurring amino acid
XWPAMCIHGDKSQPERDWVLNEFRSGKAPILIATDVASRGLGSPALGNQMGLQRSI

SEQ ID NO: 4086 - protein, 138 aa, Homo Sapiens
MAAAFEASGALAAVATAMPAEHVAVQVPAPEPTPGPVRILRTAQDLSSPRTRTGDVLLAEPADFESLLLSRPVLEGLRAAGFERPSPVQLKAIPLGRCGLDLIVQAKSGTGKTCVFSTIALDSLVLENLSTQAELSNS

SEQ ID NO: 4087 - protein, 824 aa, Homo Sapiens
MAAAFEASGALAAVATAMPAEHVAVQVPAPEPTPGPVRILRTAQDLSSPRTRTGDVLLAEPADFESLLLSRPVLEGLRAAGFERPSPVQLKAIPLGRCGLDLIVQAKSGTGKTCVFSTIALDSLVLENLSTQILILAPTREIAVQIHSVITAIGIKMEGLECHVFIGGTPLSQDKTRLKKCHIAVGSPGRIKQLIELDYLNPGSIRLFILDEADKLLEEGSFQEQINWIYSSLPASKQMLAVSATYPEFLANALTKYMRDPTFVRLNSSDPSLIGLKQYYKVVNSYPLAHKVFEEKTQHLQELFSRIPFNQALVFSNLHSRAQHLADILSSKGFPAECISGNMNQNQRLDAMAKLKHFHCRVLISTDLTSRGIDAEKVNLVVNLDVPLDWETYMHRIGRAGRFGTLGLTVTYCCRGEEENMMMRIAQKCNINLLPLPDPIPSGLMEECVDWDVEVKAAVHTYGIASVPNQPLKKQIQKIERTLQIQKAHGDHMASSRNNSVSGLSVKSKNNTKQKLPVKSHSECGIIEKATSPKELGCDRQSEEQMKNSVQTPVENSTNSQHQVKEALPVSLPQIPCLSSFKIHQPYTLTFAELVEDYEHYIKEGLEKPVEIIRHYTGPGDQTVNPQNGFVRNKVIEQRVPVLASSSQSGDSESDSDSYSSRTSSQSKGNKSYLEGSSDNQLKDSESTPVDDRISLEQPPNGSDTPNPEKYQESPGIQMKTRLKEGASQRAKQSRRNLPRRSSFRLQTEAQEDDWYDCHREIRLSFSDTYQDYEEYWRAYYRAWQEYYAAASHSYYWNAQRHPSWMAAYHMNTIYLQEMMHSNQ

SEQ ID NO: 4088 - protein, 432 aa, Homo Sapiens [sequence omitted]

SEQ ID NO: 4089 - protein, 191 aa, Homo Sapiens
ASVRSGASDAGGEMREGFGRGPQRETPSPPPREFSNLSQPRKNLWGIKSTAVRNIDGSINNINEDDEEDVVDLAANSLLNKLIHQSLVESSHRVEVLQKDPSSPLYSVKTFEELRLKEELLKGIYAMGFNRPSKIQEMALPMMLAHPPQNLIAQSQSGTGKTAAFVLAMLSRVNALELFPQCLCLAPTYEL

SEQ ID NO: 4090 - protein, 468 aa, Homo Sapiens
IAAMASLLWGGDAGAAESERLNSHFSNLSQPRKNLWGIKSTAVRNIDGSINNINEDDEEDVVDLAANSLLNKLIHQSLVESSHRVEVLQKDPSSPLYSVKTFEELRLKEELLKGIYAMGFNRPSKIQEMALPMMLAHPPQNLIAQSQSGTGKTAAFVLAMLSRVNALELFPQCLCLAPTYELALQTGRVVEQMGKFCVDVQVMYAIRGNRIPRGTDITKQIIIGTPGTVLDWCFKLKLIDLTKIRVFVLDEADVMIDTQGFSDHSIRIQRALPSECQMLLFSATFEDSVWHFAERIIPDPNVIKLRKEELTLNNIRQYYVLCEHRKDKYQALCNIYGSITIGQAIIFCQTRRNAKWLTVEMIQDGHQVSLLSGELTVEQRASIIQRFRDGKEKVLITTNVCARGIDVKQVTIVVNFDLPVKQGEEPDYETYLHRIGRTGRFGKKGLAFNMIEVDELPSLMKIQDHFSK

SEQ ID NO: 4091 - protein, 483 aa, Homo Sapiens
MASLLWGGDAGAAESERLNSHFSNLSQPRKNLWGIKSTAVRNIDGSINNINEDDEEDVVDLAANSLLNKLIHQSLVESSHRVEVLQKDPSSPLYSVKTFEELRLKEELLKGIYAMGFNRPSKIQEMALPMMLAHPPQNLIAQSQSGTGKTAAFVLAMLSRVNALELFPQCLCLAPTYELALQTGRVVEQMGKFCVDVQVMYAIRGNRIPRGTDITKQIIIGTPGTVLDWCFKLKLIDLTKIRVFVLDEADVMIDTQGFSDHSIRIQRALPSECQMLLFSATFEDSVWHFAERIIPDPNVIKLRKEELTLNNIRQYYVLCEHRKDKYQALCNIYGSITIGQAIIFCQTRRNAKWLTVEMIQDGHQVSLLSGELTVEQRASIIQRFRDGKEKVLITTNVCARGIDVKQVTIVVNFDLPVKQGEEPDYETYLHRIGRTGRFGKKGLAFNMIEVDELPSLMKIQDHFNSSIKQLNAEDMDEIEKIDY

SEQ ID NO: 4092 - protein, 369 aa, Homo Sapiens
MGFNRPSKIQEMALPMMLAHPPQNLIAQSQSGTGKTAAFVLAMLSRVNALELFPQCLCLAPTYELALQTGRVVEQMGKFCVDVQVMYAIRGNRIPRGTDITKQIIIGTPGTVLDWCFKLKLIDLTKIRVFVLDEADVMIDTQGFSDHSIRIQRALPSECQMLLFSATFEDSVWHFAERIIPDPNVIKLRKEELTLNNIRQYYVLCEHRKDKYQALCNIYGSITIGQAIIFCQTRRNAKWLTVEMIQDGHQVSLLSGELTVEQRASIIQRFRDGKEKVLITTNVCARGIDVKQVTIVVNFDLPVKQGEEPDYETYLHRIGRTGRFGKKGLAFNMIEVDELPSLMKIQDHFNSSIKQLNAEDMDEIEKIDY

SEQ ID NO: 4093 - protein, 197 aa, Homo Sapiens
MGFNRPSKIQEMALPMMLAHPPQNLIAQSQSGTGKTAAFVLAMLSRVNALELFPQCLCLAPTYELALQTGRVVEQMGKFCVDVQVMYAIRGNRIPRGTDITKQIIIGTPGTVLDWCFKLKLIDLTKIRVFVLDEADVMIDTQGFSDHSIRIQRIIWLLVAKETTDNFQLPSLTLELYRDIMETPHSFLLLSQGTWRI

SEQ ID NO: 4094 - protein, 67 aa, Homo Sapiens
  misc_feature (1)..(1): Xaa can be any naturally occurring amino acid
XGIDVKQVTIVVNFDLPVKQGEEPDYETYLHRIGRTGRFGKKGLAFNMIEVDELPSLMKIQDHFRKS

SEQ ID NO: 4095 - protein, 407 aa, Homo Sapiens
  misc_feature (1)..(1): Xaa can be any naturally occurring amino acid
XLVDLAANSLLNKLIHQSLVESSHRVEVLQKDPSSPLYSVKTFEELRLKEELLKGIYAMGFNRPSKIQEMALPMMLAHPPQNLIAQSQSGTGKTAAFVLAMLSRVNALELFPQCLCLAPTYELALQTGRVVEQMGKFCVDVQVMYAIRGNRNWCFKLKLIDLTKIRVFVLDEADVMIDTQGFSDHSIRIQRALPSECQMLLFSATFEDSVWHFAERIIPDPNVIKLRKEELTLNNIRQYYVLCEHRKDKYQALCNIYGSITIGQAIIFCQTRRNAKWLTVEMIQDGHQVSLLSGELTVEQRASIIQRFRDGKEKVLITTNVCARGIDVKQVTIVVNFDLPVKQGEEPDYETYLHRIGRTGRFGKKGLAFNMIEVDELPSLMKIQDHFNSSIKQLNAEDMDEIEKIDY

SEQ ID NO: 4096 - protein, 540 aa, Homo Sapiens
MALTRPVRLFSLVTRLLLAPRRGLTVRSPDEPLPVVRIPVALQRQLEQRQSRRRNLPRPVLVRPGPLLVSARRPELNQPARLTLGRWERAPLASQGWKSRRARRDHFSIERAQQEAPAVRKLSSKGSFADLGLEPRVLHALQEAAPEVVQPTTVQSSTIPSLLRGRHVVCAAETGSGKTLSYLLPLLQRLLGQPSLDSLPIPAPRGLVLVPSRELAQQVRAVAQPLGRSLGLLVRDLEGGHGMRRIRLQLSRQPSADVLVATPGALWKALKSRLISLEQLSFLVLDEADTLLDESFLELVDYILEKSHIAEGPADLEDPFNPKAQLVLVGATFPEGVGQLLNKVASPDAVTTITSSKLHCIMPHVKQTFLRLKGADKVAELVHILKHRDRAERTGPSGTVLVFCNSSSTVNWLGYILDDHKIQHLRLQGQMPALMRVGIFQSFQKSSRDILLCTDIASRGLDSTGVELVVNYDFPPTLQDYIHRAGRVGRVGSEVPGTVISFVTHPWDVSLVQKIELAARRRRSLPGLASSVKEPLPQAT

SEQ ID NO: 4097 - protein, 565 aa, Homo Sapiens
MEDSDSAAKQLGLAEAAAVAAAAAVAAAAAAAAGGEAEEPVLSRDEDSEEDADSEAERETPRVTAVAVMAAEPGHMDMGAEALPGPDEAAAAAAFAEVTTVTVANVGAAADNVFTTSVANAASISGHVLSGRTALQIGDSLNTEKATLIVVHTDGSIVETTGLKGPAAPLTPGPQSPPTPLAPGQEKGGTKYNWDPSVYDSELPVRCRNISGTLYKNRLGSGGRGRCIKQGENWYSPTEFEAMAGRASSKDWKRSIRYAGRPLQCLIQDGILNPHAASCTCAACCDDMTLSGPVRLFVPYKRRKKENELPTTPVKKDSPKNITLLPATAATTFTVTPSGQITTSGALTFDRASTVEATAVISESPAQGDVFAGATVQEASVQPPCRASHPEPHYPGYQDSCQIAPFPEAALPTSHPKIVLTSLPALAVPPPTPTKAAPPALVNGLELSEPRSWLYLEEMVNSLLNTAQQLKTLFEQAKHASTYREAATNQAKIHADAERKEQSCVNCGREAMSECTGCHKVNYCSTFCQRKDWKDHQHICGQSAAVTVQADEVHVAESVMEKVTV

SEQ ID NO: 4098 - protein, 349 aa, Homo Sapiens
  misc_feature (1)..(1): Xaa can be any naturally occurring amino acid
XLYKNRLGSGGRGRCIKQGENWYSPTEFEAMAGRASSKDWKRSIRYAGRPLQCLIQDGILNPHAASCTCAACCDDMTLSGPVRLFVPYKRRKKENELPTTPVKKDSPKNITLLPATAATTFTVTPSGQITTSGALTFDRASTVEATAVISESPAQGDVFAGATVQEASVQPPCRASHPEPHYPGYQDSCQIAPFPEAALPTSHPKIVLTSLPALAVPPPTPTKAAPPALVNGLELSEPRSWLYLEEMVNSLLNTAQQLKTLFEQAKHASTYREAATNQAKIHADAERKEQSCVNCGREAMSECTGCHKVNYCSTFCQRKRWSLTMLTSLVSISWLRAILPCQPPKVLGL

SEQ ID NO: 4099 - protein, 86 aa, Homo Sapiens
  misc_feature (1)..(1): Xaa can be any naturally occurring amino acid
XPVLSRDEDSEEDADSEAERETPRVTAVAVMAAEPGHMDMGAEALPGPDEAAAAAAFAGKCARRPLASSGSRAPTPRACPAQLSQR

SEQ ID NO: 4100 - protein, 136 aa, Homo Sapiens
MAILSLRAPGPWQAMQAHLNPFNKQSGPRQHEQGPGEEVPDVTPEEALPELPPGEPEFRCPERVMDLGLSEDHFSRPVGLFLASDVQQLRQAIEECKQVILELPEQSEKQKDAVVRLIHLRLKLQELKDPNEDEPN

SEQ ID NO: 4101 - protein, 512 aa, Homo Sapiens
MAILSLRAPGPWQAMQVWADRTLLTPHTGVTSQVLGVAAAVMTPLPGGHAAGRTREARWDAMEYDEKLARFRQAHLNPFNKQSGPRQHEQGPGEEVPDVTPEEALPELPPGEPEFRCPERVMDLGLSEDHFSRPVGLFLASDVQQLRQAIEECKQVILELPEQSEKQKDAVVRLIHLRLKLQELKDPNEDEPNIRVLLEHRFYKEKSKSVKQTCDKCNTIIWGLIQTWYTCTGCYYRCHSKCLNLISKPCVSSKVSHQAEYELNICPETGLDSQDYRCAECRAPISLRGVPSEARQCDYTGQYYCSHCHWNDLAVIPARVVHNWDFEPRKVSRCSMRYLALMVSRPVLRLREINPLLFSYVEELVEIRKLRQDILLMKPYFITCREAMEARLLLQLQDRQHFVENDEMYSVQDLLDVHAGRLGCSLTEIHTLFAKHIKLDCERCQAKGFVCELCREGDVLFPFDSHTSVCADCSAVFHRDCYYDNSTTCPKCARLSLRKQSLFQEPGPDVEA

SEQ ID NO: 4102 - protein, 125 aa, Homo Sapiens
MDLGLSEDHFSRPVGLFLASDVQQLRQAIEECKQVILELPEQSEKQKDAVVRLIHLRLKLQELKDPNEDEPNIRVLLEHRFYKEKSKSVKQTCDKCNTIIWGLIQTWYTCTGCYYRCHSKCLNLI

SEQ ID NO: 4103 - protein, 391 aa, Homo Sapiens
MDLGLSEDHFSRPVGLFLASDVQQLRQAIEECKQVILELPEQSEKQKDAVVRLIHLRLKLQELKDPNEDEPNIRVLLEHRFYKEKSKSVKQTCDKCNTIIWGLIQTWYTCTGCYYRCHSKCLNLISKPCVSSKVSHQAEYELNICPETGLDSQDYRCAECRAPISLRGVPSEARQCDYTGQYYCSHCHWNDLAVIPARVVHNWDFEPRKVSRCSMRYLALMVSRPVLRLREINPLLFSYVEELVEIRKLRQDILLMKPYFITCREAMEARLLLQLQDRQHFVENDEMYSVQDLLDVHAGRLGCSLTEIHTLFAKHIKLDCERCQAKGFVCELCREGDVLFPFDSHTSVCADCSAVFHRDCYYDNSTTCPKCARLSLRKQSLFQEPGPDVEA

SEQ ID NO: 4104 - protein, 66 aa, Homo Sapiens
MEYDEKLARFRQAHLNPFNKQSGPRQHEQGPGEEVPDVTPEEALPELPPGEPEFRCPERVMDLGLS

SEQ ID NO: 4105 - protein, 107 aa, Homo Sapiens
MEYDEKLARFRQAHLNPFNKQSGPRQHEQGPGEEVPDVTPEEALPELPPGEPEFRCPERVMDLGLSEDHFSRPVDGPLTAPAPNLGRVCSWPLTSSSCGRRSRSASR

SEQ ID NO: 4106 - protein, 106 aa, Homo Sapiens
MEYDEKLARFRQAHLNPFNKQSGPRQHEQGPGEEVPDVTPEEALPELPPGEPEFRCPERVMDLGLSEDHFSRPVGLFLASDVQQLRQAIEECKQVILELPEQSEKQ

SEQ ID NO: 4107 - protein, 134 aa, Homo Sapiens
MEYDEKLARFRQAHLNPFNKQSGPRQHEQGPGEEVPDVTPEEALPELPPGEPEFRCPERVMDLGLSEDHFSRPVGLFLASDVQQLRQAIEECKQVILELPEQSEKQKDAVVRLIHLRLKLQELKDPNEDEPNIR

SEQ ID NO: 4108 - protein, 150 aa, Homo Sapiens
MEYDEKLARFRQAHLNPFNKQSGPRQHEQGPGEEVPDVTPEEALPELPPGEPEFRCPERVMDLGLSEDHFSRPVGLFLASDVQQLRQAIEECKQVILELPEQSEKQKDAVVRLIHLRLKLQELKDPNEDEPNIRVLLEHRFYKEKSKSVK

SEQ ID NO: 4109 - protein, 451 aa, Homo Sapiens
MEYDEKLARFRQAHLNPFNKQSGPRQHEQGPGEEVPDVTPEEALPELPPGEPEFRCPERVMDLGLSEDHFSRPVGLFLASDVQQLRQAIEECKQVILELPEQSEKQKDAVVRLIHLRLKLQELKDPNEDEPNIRVLLEHRFYKEKSKSVKQTCDKCNTIIWGLIQTWYTCTGCYYRCHSKCLNLISKPCVSSKVSHQAEYELNICPETGLDSQDYRCAECRAPISLRGVPSEARQCDYTGQYYCSHCHWNDLAVIPARVVHNWDFEPRKVSRCSMRYLALMVSRPVLRLREINPLLFSYVEELVEIRKLRQDILLMKPYFITCREAMEARLLLQLQDRQHFVENDEMYSVQDLLDVHAGRLGCSLTEIHTLFAKHIKLDCERCQAKGFVCELCREGDVLFPFDSHTSVCADCSAVFHRDCYYDNSTTCPKCARLSLRKQSLFQEPGPDVEA

SEQ ID NO: 4110 - protein, 451 aa, Homo Sapiens; identical to SEQ ID NO: 4109

SEQ ID NO: 4111 - protein, 434 aa, Homo Sapiens
MEYDEKLARFRQAHLNPFNKQSGPRQHEQGPGEEVPDVTPEEALPELPPGEPEFRCPERVMDLGLSEDHFSRPVGLFLASDVQQLRQAIEECKQVILELPEQSEKQKDAVVRLIHLRLKLQELKDPNEDEPNIRVLLEHRFYKEKSKSVKQTCDKCNTIIWGLIQTWYTCTGCYYRCHSKCLNLISKPCVSSKVSHQAEYELNICPETGLDSQDYRCAECRAPISLRGVPSEARQCDYTGQYYCSHCHWNDLAVIPARVVHNWDFEPRKVSRCSMRYLALMVSRPVLRLREINPLLFSYVEELVEIRKLRQDILLMKPYFITCREAMEARLLLQDLLDVHAGRLGCSLTEIHTLFAKHIKLDCERCQAKGFVCELCREGDVLFPFDSHTSVCADCSAVFHRDCYYDNSTTCPKCARLSLRKQSLFQEPGPDVEA

SEQ ID NO: 4112 - protein, 451 aa, Homo Sapiens; identical to SEQ ID NO: 4109

SEQ ID NO: 4113 - protein, 197 aa, Homo Sapiens
MEYDEKLARFRQAHLNPFNKQSGPRQHEQGPGEEVPDVTPEEALPELPPGEPEFRCPERVMDLGLSEDHFSRPVGLFLASDVQQLRQAIEECKQVILELPEQSEKQKDAVVRLIHLRLKLQELKDPNEDEPNIRVLLEHRFYKEKSKSVKQTCDKCNTIIWGLIQTWYTCTGGPRPRRGVRNERDQSSCLRWAHIQM

SEQ ID NO: 4114 - protein, 197 aa, Homo Sapiens; identical to SEQ ID NO: 4113

SEQ ID NO: 4115 - protein, 176 aa, Homo Sapiens
MEYDEKLARFRQAHLNPFNKQSGPRQHEQGPGEEVPDVTPEEALPELPPGEPEFRCPERVMDLGLSEDHFSRPVGLFLASDVQQLRQAIEECKQVILELPEQSEKQKDAVVRLIHLRLKLQELKRCQAKGFVCELCREGDVLFPFDSHTSVCADCSAVFHRDCYYDNSTTCPKCAR

SEQ ID NO: 4116 - protein, 441 aa, Homo Sapiens
MEYDEKLARFRQAHLNPFNKQSGPRQHEQGPGEEVPDVTPEEALPELPPGEPEFRCPERVMDLGLSEDHFSRPVLRQAIEECKQVILELPEQSEKQKDAVVRLIHLRLKLQELKDPNEDEPNIRVLLEHRFYKEKSKSVKQTCDKCNTIIWGLIQTWYTCTGCYYRCHSKCLNLISKPCVSSKVSHQAEYELNICPETGLDSQDYRCAECRAPISLRGVPSEARQCDYTGQYYCSHCHWNDLAVIPARVVHNWDFEPRKVSRCSMRYLALMVSRPVLRLREINPLLFSYVEELVEIRKLRQDILLMKPYFITCREAMEARLLLQLQDRQHFVENDEMYSVQDLLDVHAGRLGCSLTEIHTLFAKHIKLDCERCQAKGFVCELCREGDVLFPFDSHTSVCADCSAVFHRDCYYDNSTTCPKCARLSLRKQSLFQEPGPDVEA

SEQ ID NO: 4117 - protein, 127 aa, Homo Sapiens
MEYDEKLARFRQAHLNPFNKQSGPRQHEQGPGEEVPDVTPEEALPELPPGEPEFRCPERVMDLGLSEDHFSRPVQLRQAIEECKQVILELPEQSEKQKDAVVRLIHLRLKLQELKDPNEDEPNIRVL

SEQ ID NO: 4118 - protein, 177 aa, Homo Sapiens
MRGGGQAHLNPFNKQSGPRQHEQGPGEEVPDVTPEEALPELPPGEPEFRCPERVMDLGLSEDHFSRPVGLFLASDVQQLRQAIEECKQVILELPEQSEKQKDAVVRLIHLRLKLQELKDPNEDEPNIRVLLEHRFYKEKSKSVKQTCDKCNTIIWGLIQTWYTCTGCYYRCHSKCLN

SEQ ID NO: 4119 - protein, 186 aa, Homo Sapiens
MRGGGQVLGVAAAVMTPLPGGHAAGRTREARWDAMEYDEKLARFRQAHLNPFNKQSGPRQHEQGPGEEVPDVTPEEALPELPPGEPEFRCPERVMDLGLSEDHFSRPVGLFLASDVQQLRQAIEECKQVILELPEQSEKQKDAVVRLIHLRLKLQELKDPNEDEPNIRVLLEHRFYKEKSKSVKQT

SEQ ID NO: 4120 - protein, 94 aa, Homo Sapiens
MRTLAILAAILLVALQAQAEPLQARADEVAAAPEQIAADIPEVVVSLAWDESLAPKHPGSRKNMACYCRIPACIAGERRYGTCIYQGRLWAFCC

SEQ ID NO: 4121 - protein, 94 aa, Homo Sapiens; identical to SEQ ID NO: 4120

SEQ ID NO: 4122 - protein, 94 aa, Homo Sapiens; identical to SEQ ID NO: 4120

SEQ ID NO: 4123 - protein, 94 aa, Homo Sapiens
MRTLAILAAILLVALQAQAEPLQARADEVAAAPEQIAADIPEVVVSLAWDESLAPKHPGSRKNMDCYCRIPACIAGERRYGTCIYQGRLWAFCC

SEQ ID NO: 4124 - protein, 97 aa, Homo Sapiens
MRIIALLAAILLVALQVRAGPLQARGDEAPGQEQRGPEDQDISISFAWDKSSALQVSGSTRGMVCSCRLVFCRRTELRVGNCLIGGVSFTYCCTRVD

SEQ ID NO: 4125 - protein, 94 aa, Homo Sapiens
MRTIAILAAILLVALQAQAESLQERADEATTQKQSGEDNQDLAISFAGNGLSALRTSGSQARATCYCRTGRCATRESLSGVCEISGRLYRLCCR

SEQ ID NO: 4126 - protein, 100 aa, Homo Sapiens
MRTLTILTAVLLVALQAKAEPLQAEDDPLQAKAYEADAQEQRGANDQDFAVSFAEDASSSLRALGSTRAFTCHCRRSCYSTEYSYGTCTVMGINHRFCCL

SEQ ID NO: 4127 - protein, 68 aa, Homo Sapiens
MRTSYLLLFTLCLLLSEMASGGNFLTGLGHRSDHYNCVSSGGQCLYSACPIFTKIQGTCYRGKAKCCK

SEQ ID NO: 4128 - protein, 67 aa, Homo Sapiens
MRIHYLLFALLFLFLVPVPGHGGIINTLQKYYCRVRGGRCAVLSCLPKEEQIGKCSTRGRKCCRRKK

SEQ ID NO: 4129 - protein, 67 aa, Homo Sapiens; identical to SEQ ID NO: 4128

SEQ ID NO: 4130 - protein, 72 aa, Homo Sapiens
MQRLVLLLAISLLLYQDLPVRSEFELDRICGYGTARCRKKCRSQEYRIGRCPNTYACCLRKWDESLLNRTKP

SEQ ID NO: 4131 - protein, 72 aa, Homo Sapiens; identical to SEQ ID NO: 4130

SEQ ID NO: 4132 - protein, 78 aa, Homo Sapiens
MALIRKTFYFLFAMFFILVQLPSGCQAGLDFSQPFPSGEFAVCESCKLGRGKCRKECLENEKPDGNCRLNFLCCRQRI

SEQ ID NO: 4133 - protein, 78 aa, Homo Sapiens; identical to SEQ ID NO: 4132

SEQ ID NO: 4134 - protein, 65 aa, Homo Sapiens
MRTFLFLFAVLFFLTPAKNAFFDEKCNKLKGTCKNNCGKNEELIALCQKSLKCCRTIQPCGSIID

SEQ ID NO: 4135 - protein, 65 aa, Homo Sapiens; identical to SEQ ID NO: 4134

SEQ ID NO: 4136 - protein, 70 aa, Homo Sapiens
MPGAMKIFVFILAALILLAQIFQARTAIHRALISKRMEGHCEAECLTFEVKIGGCRAELAPFCCKNRKKH

SEQ ID NO: 4137 - protein, 70 aa, Homo Sapiens; identical to SEQ ID NO: 4136

SEQ ID NO: 4138 - protein, 73 aa, Homo Sapiens
MRIAVLLFAIFFFMSQVLPARGKFKEICERPNGSCRDFCLETEIHVGRCLNSQPCCLPLGHQPRIESTTPKKD

SEQ ID NO: 4139 - protein, 67 aa, Homo Sapiens
MKIQLFFFILHFWVTILPAKKKYPEYGSLDLRRECRIGNGQCKNQCHENEIRIAYCIRPGTHCCLQQ

SEQ ID NO: 4140 - protein, 62 aa, Homo Sapiens
MKIQLFFFILHFWVTILPARSNFEPKYRFERCEKVRGICKTFCDDVEYDYGYCIKWRSQCCV

SEQ ID NO: 4141 - protein, 82 aa, Homo Sapiens
MKILCIFLTFVFTVSCGPSVPQKKTREVAERKRECQLVRGACKPECNSWEYVYYYCNVNPCCAVWEYQKPIINKITSKLHQK

SEQ ID NO: 4142 - protein, 69 aa, Homo Sapiens
MRIFYYLHFLCYVTFILPATCTLVNADRCTKRYGRCKRDCLESEKQIDICSLPRKICCTEKLYEEDDMF

SEQ ID NO: 4143 - protein, 88 aa, Homo Sapiens
MLPDHFSPLSGDIKLSVLALVVLVVLAQTAPDGWIRRCYYGTGRCRKSCKEIERKKEKCGEKHICCVPKEKDKLSHIHDQKETSELYI

SEQ ID NO: 4144 - protein, 102 aa, Homo Sapiens
MSVMKPCLMTIAILMILAQKTPGGLFRSHNGKSREPWNPCELYQGMCRNACREYEIQYLTCPNDQKCCLKLSVKITSSKNVKEDYDSNSNLSVTNSSSYSHI

SEQ ID NO: 4145 - protein, 123 aa, Homo Sapiens
MKLLLLALPMLVLLPQVIPAYSGEKKCWNRSGHCRKQCKDGEAVKDTCKNLRACCIPSNEDHRRVPATSPTPLSDSTPGIIDDILTVRFTTDYFEVSSKKDMVEESEAGRGTETSLPNVHHSS

SEQ ID NO: 4146 - protein, 43 aa, Homo Sapiens
MKLLYLFLAILLAIEEPVISALVRTVGCCLDTARQTPHPSMHG

SEQ ID NO: 4147 - protein, 84 aa, Homo Sapiens
MKLLYLFLAILLAIEEPVISGKRHILRCMGNSGICRASCKKNEQPYLYCRNCQSCCLQSYMRISISGKEENTDWSYEKQWPRLP

SEQ ID NO: 4148 - protein, 88 aa, Homo Sapiens
MKLLYLFLAILLAIEEPVISVECWMDGHCRLLCKDGEDSIIRCRNRKRCCVPSRYLTIQPVTIHGILGWTTPQMSTTAPKMKTNITNR

SEQ ID NO: 4149 - protein, 76 aa, Homo Sapiens
MKLLLLLLTVTLLLAQVTPVMKCWGKSGRCRTTCKESEVYYILCKTEAKCCVDPKYVPVKPKLTDTNTSLESTSAV

SEQ ID NO: 4150 - protein, 67 aa, Homo Sapiens
MKLLLLTLTVLLLLSQLTPGGTQRCWNLYGKCRYRCSKKERVYVYCINNKMCCVKPKYQPKERWWPF

SEQ ID NO: 4151 - protein, 71 aa, Homo Sapiens
MTQLLLFLVALLVLGHVPSGRSEFKRCWKGQGACQTYCTRQETYMHLCPDASLCCLSYALKPPPVPKHEYE

SEQ ID NO: 4152 - protein, 156 aa, Homo Sapiens
MNILMLTFIICGLLTRVTKGSFEPQKCWKNNVGHCRRRCLDTERYILLCRNKLSCCISIISHEYTRRPAFPVIHLEDITLDYSDVDSFTGSPVSMLNDLITFDTTKFGETMTPETNTPETTMPPSEATTPETTMPPSETATSETMPPPSQTALTHN

SEQ ID NO: 4153 - protein, 111 aa, Homo Sapiens
MKSLLFTLAVFMLLAQLVSGNWYVKKCLNDVGICKKKCKPEEMHVKNGWAMCGKQRDCCVPADRRANYPVFCVQTKTTRISTVTATTATTTLMMTTASMSSMAPTPVSPTG

SEQ ID NO: 4154 - protein, 99 aa, Homo Sapiens
MGLFMIIAILLFQKPTVTEQLKKCWNNYVQGHCRKICRVNEVPEALCENGRYCCLNIKELEACKKITKPPRPKPATLALTLQDYVTIIENFPSLKTQST

SEQ ID NO: 4155 - protein, 93 aa, Homo Sapiens
MKLFLVLIILLFEVLTDGARLKKCFNKVTGYCRKKCKVGERYEIGCLSGKLCCANDEEEKKHVSFKKPHQHSGEKLSVLQDYIILPTITIFTV

SEQ ID NO: 4156 - protein, 183 aa, Homo Sapiens
MKLLFPIFASLMLQYQVNTEFIGLRRCLMGLGRCRDHCNVDEKEIQKCKMKKCCVGPKVVKLIKNYLQYGTPNVLNEDVQEMLKPAKNSSAVIQRKHILSVLPQIKSTSFFANTNFVIIPNATPMNSATISTMTPGQITYTATSTKSNTKESRDSATASPPPAPPPPNILPTPSLELEEAEEQ

SEQ ID NO: 4157 - protein, 79 aa, Homo Sapiens
MKLHSLISVLLLFVTLIPKGKTGVIPGQKQCIALKGVCRDKLCSTLDDTIGICNEGKKCCRRWWILEPYPTPVPKGKSP

SEQ ID NO: 4158 - protein, 79 aa, Homo Sapiens; identical to SEQ ID NO: 4157

SEQ ID NO: 4159 - protein, 70 aa, Homo Sapiens
MRVLFFVFGVLSLMFTVPPARSFISNDECPSEYYHCRLKCNADEHAIRYCADFSICCKLKIIEIDGQKKW

SEQ ID NO: 4160 - protein, 70 aa, Homo Sapiens
MRVLFFVFGVLSLMSTVPPTRSFTSNDECPSEYYHCRLKCNADEHAIRYCADFSICCKLKIIQIDGQKKW

SEQ ID NO: 4161 - protein, 95 aa, Homo Sapiens
MKFLLLVLAALGFLTQVIPASAGGSKCVSNTPGYCRTCCHWGETALFMCNASRKCCISYSFLPKPDLPQLIGNHWQSRRRNTQRKDKKQQTTVTS

SEQ ID NO: 4162 - protein, 61 aa, Homo Sapiens
MKIHVFLFVLFFFLVPIATRVKCAVKDTYSCFIMRGKCRHECHDFEKPIGFCTKLNANCYM

SEQ ID NO: 4163 - protein, 66 aa, Homo Sapiens
MKPLLVVFVFLFLWDPVLAGINSLSSEMHKKCYKNGICRLECYESEMLVAYCMFQLECCVKGNPAP

SEQ ID NO: 4164 - protein, 66 aa, Homo Sapiens; identical to SEQ ID NO: 4163

SEQ ID NO: 4165 - protein, 77 aa, Homo Sapiens
MATRSVLLALVVLNLLFYVPPGRSGPNVYIQKIFASCWRLQGTCRPKCLKNEQYRILCDTIHLCCVNPKYLPILTGK

SEQ ID NO: 4166 - protein, 78 aa, Homo Sapiens
MNLCLSALLFFLVILLPSGKGMFGNDGVKVRTCTSQKAVCFFGCPPGYRWIAFCHNILSCCKNMTRFQPPQAKDPWVH

SEQ ID NO: 4167 - protein, 64 aa, Homo Sapiens
MRVLYLLFSFLFIFLMPLPGVFGGIGDPVTCLKSGAICHPVFCPRRYKQIGTCGLPGTKCCKKP

SEQ ID NO: 4168 - protein, 64 aa, Homo Sapiens; identical to SEQ ID NO: 4167

SEQ ID NO: 4169 - protein, 84 aa, Homo Sapiens
MRSRLLLSVAHLPTIRETTEEMLLGGPGQEPPPSPSLDDYVRSISRLAQPTSVLDKATAQGQPRPPHRPAQACRKGRPAVSLRD

SEQ ID NO: 4170 - protein, 212 aa, Homo Sapiens
MRSRLLLSVAHLPTIRETTEEMLLGGPGQEPPPSPSLDDYVRSISRLAQPTSVLDKATAQGQPRPPHRPAQACRKGRPAVSLRDITARFSGQQPTLPMADTVDPLDWLFGESQEKQPSQRDLPRRTGPSAGLWGPHRQMDSSKPMGAPRGRLCEARMPGHSLARPPQDGQQSSDLRSWTFGQSAQAMASRHRPRPSSVLRTLYSHLPVIHEL

SEQ ID NO: 4171 - protein, 326 aa, Homo Sapiens
MSENDNVFCAQLQCFHFPTLRHHDLHSWHAESCYEKSSFLCKRSQTCVDIKDNVVDEGFYFTPKGDDPCLSCTCHGGEPEMCVAALCERPQGCQQYRKDPKECCKFMCLDPDGNSLFDSMASGMRLVVSCISSFLILSLLLFMVHRLRQRRRERIESLIGANLHHFNLGRRIPGFDYGPDGFGTGLTPLHLSDDGEGGTFHFHDPPPPYTAYKYPDIGQPDDPPPPYEASIHPDSVFYDPADDDAFEPVEVSLPAPGDGGSEGALLRRLEQPLPTAGASLADLEDSADSSSALLVPPDPAQSGSTPAAEALPGGGRHSRSSLNTVV

SEQ ID NO: 4172 - protein, 550 aa, Homo Sapiens
MVPKADSGAFLLLFLLVLTVTEPLRPELRCNPGQFACRSGTIQCIPLPWQCDGWATCEDESDEANCPEVTGEVRPHHGKEAVDPRQGRARGGDPSHFHAVNVAQPVRFSSFLGKCPTGWHHYEGTASCYRVYLSGENYWDAAQTCQRLNGSLATFSTDQELRFVLAQEWDQPERSFGWKDQRKLWVGYQYVITGRNRSLEGRWEVAFKGSSEVFLPPDPIFASAMSENDNVFCAQLQCFHFPTLRHHDLHSWHAESCYEKSSFLCKRSQTCVDIKDNVVDEGFYFTPKGDDPCLSCTCHGGEPEMCVAALCERPQGCQQYRKDPKECCKFMCLDPDGNSLFDSMASGMRLVVSCISSFLILSLLLFMVHRLRQRRRERIESLIGANLHHFNLGRRIPGFDYGPDGFGTGLTPLHLSDDGEGGTFHFHDPPPPYTAYKYPDIGQPDDPPPPYEASIHPDSVFYDPADDDAFEPVEVSLPAPGDGGSEGALLRRLEQPLPTAGASLADLEDSADSSSALLVPPDPAQSGSTPAAEALPGGGRHSRSSLNTVV

SEQ ID NO: 4173 - protein, 550 aa, Homo Sapiens [sequence omitted]

SEQ ID NO: 4174 - protein, 509 aa, Homo Sapiens
MVPKADSGAFLLLFLLVLTVTEPLRPEVTGEVRPHHGKEAVDPRQGRARGGDPSHFHAVNVAQPVRFSSFLGKCPTGWHHYEGTASCYRVYLSGENYWDAAQTCQRLNGSLATFSTDQELRFVLAQEWDQPERSFGWKDQRKLWVGYQYVITGRNRSLEGRWEVAFKGSSEVFLPPDPIFASAMSENDNVFCAQLQCFHFPTLRHHDLHSWHAESCYEKSSFLCKRSQTCVDIKDNVVDEGFYFTPKGDDPCLSCTCHGGEPEMCVAALCERPQGCQQYRKDPKECCKFMCLDPDGNSLFDSMASGMRLVVSCISSFLILSLLLFMVHRLRQRRRERIESLIGANLHHFNLGRRIPGFDYGPDGFGTGLTPLHLSDDGEGGTFHFHDPPPPYTAYKYPDIGQPDDPPPPYEASIHPDSVFYDPADDDAFEPVEVSLPAPGDGGSEGALLRRLEQPLPTAGASLADLEDSADSSSALLVPPDPAQSGSTPAAEALPGGGRHSRSSLNTVV

SEQ ID NO: 4175 - protein, 396 aa, Homo Sapiens
MALLTNLLPLCCLALLALPAQSCGPGRGPVGRRRYARKQLVPLLYKQFVPGVPERTLGASGPAEGRVARGSERFRDLVPNYNPDIIFKDEENSGADRLMTERCKERVNALAIAVMNMWPGVRLRVTEGWDEDGHHAQDSLHYEGRALDITTSDRDRNKYGLLARLAVEAGFDWVYYESRNHVHVSVKADNSLAVRAGGCFPGNATVRLWSGERKGLRELHRGDWVLAADASGRVVPTPVLLFLDRDLQRRASFVAVETEWPPRKLLLTPWHLVFAARGPAPAPGDFAPVFARRLRAGDSVLAPGGDALRPARVARVAREEAVGVFAPLTAHGTLLVNDVLASCYAVLESHQWAHRAFAPLRLLHALGALLPGGAVQPTGMHWYSRLLYRLAEELLG

SEQ ID NO: 4176 - protein, 155 aa, Homo Sapiens
MHKAGLLGLCARAWNSVRMASSGMTRRDPLANKVALVTASTDGIGFAIARRLAQDGAHVVVSSRKQQNVDQAVATLQGEGLSVTGTVCHVGKAEDRERLVATAVKLHGGIDILVSNAAVNPFFGSIMDVTEEVWDKLWMDKEKEESMKETLRIRR

SEQ ID NO: 4177 - protein, 192 aa, Homo Sapiens
MHKAGLLGLCARAWNSVRMASSGMTRRDPLANKVALVTASTDGIGFAIARRLAQDGAHVVVSSRKQQNVDQAVATLQGEGLSVTGTVCHVGKAEDRERLVATAVKLHGGIDILVSNAAVNPFFGSIMDVTEEVWDKLWMDKEKEESMKETLRIRRLGEPEDCAGIVSFLCSEDASYITGETVVVGGGTPSRL

SEQ ID NO: 4178 - protein, 188 aa, Homo Sapiens
MHKAGLLGLCARAWNSVRMASSGMTRRDPLANKVALVTASTDGIGFAIARRLAQDGAHVVVSSRKQQNVDQAVATLQGEGLSVTGTVCHVGKAEDRERLVATAVKLHGGIDILVSNAAVNPFFGSIMDVTEEVWDKRRLSGDRVFHSSLQSISSLDGQGKRGKHERNPADKKVRRARGLCWHRVFPVL

SEQ ID NO: 4179 - protein, 278 aa, Homo Sapiens
MHKAGLLGLCARAWNSVRMASSGMTRRDPLANKVALVTASTDGIGFAIARRLAQDGAHVVVSSRKQQNVDQAVATLQGEGLSVTGTVCHVGKAEDRERLVATAVKLHGGIDILVSNAAVNPFFGSIMDVTEEVWDKTLDINVKAPALMTKAVVPEMEKRGGGSVVIVSSIAAFSPSPGFSPYNVSKTALLGLTKTLAIELAPRNIRVNCLAPGLIKTSFSRMLWMDKEKEESMKETLRIRRLGEPEDCAGIVSFLCSEDASYITGETVVVGGGTPSRL

SEQ ID NO: 4180 - protein, 158 aa, Homo Sapiens
MHKAGLLGLCARAWNSVRMASSGMTRRDPLANKVALVTASTDGIGFAIARRLAQDGAHVVVSSRKQQNVDQAVATLQGEGLSVTGTVCHVGKAEDRERLVATLWMDKEKEESMKETLRIRRLGEPEDCAGIVSFLCSEDASYITGETVVVGGGTPSRL

SEQ ID NO: 4181 - protein, 244 aa, Homo Sapiens
MHKAGLLGLCARAWNSVRMASSGMTRRDPLANKVALVTASTDGIGFAIARRLAQDGAHVVVSSRKQQNVDQAVATLQGEGLSVTGTVCHVGKAEDRERLVATTLDINVKAPALMTKAVVPEMEKRGGGSVVIVSSIAAFSPSPGFSPYNVSKTALLGLTKTLAIELAPRNIRVNCLAPGLIKTSFSRMLWMDKEKEESMKETLRIRRLGEPEDCAGIVSFLCSEDASYITGETVVVGGGTPSRL

SEQ ID NO: 4182 - protein, 199 aa, Homo Sapiens
MHKAGLLGLCARAWNSVRMASSGMTRRDPLANKVALVTASTDGIGFAIARRLAQDGAHVVVSSRKQQNVDQAVATLQGEGLSVTGTVCHVGKAEDRERLVATTLDINVKAPALMTKAVVPEMEKRGGGSVVIVSSIAAFSPSPLWMDKEKEESMKETLRIRRLGEPEDCAGIVSFLCSEDASYITGETVVVGGGTPSRL

SEQ ID NO: 4183 - protein, 61 aa, Homo Sapiens
RNIRVNCLAPGLIKTSFSRMLWMDKEKEESMKETLRIRRPRIHKHYHYSDLSKKSASLSKG

SEQ ID NO: 4184 - protein, 90 aa, Homo Sapiens
MAVKLHGGIDILVSNAAVNPFFGSLMDVTEEVWDKGFSPYNVSKTALLGLNNTLAIELAPRNIRVNCLHLDLSRLASAGCSGWTRKKRKA

SEQ ID NO: 4185 - protein, 131 aa, Homo Sapiens
MAVKLHGGIDILVSNAAVNPFFGSLMDVTEEVWDKTLDINVKAPALMTKAVVPEMEKRGGGSVVIVSSIAAFSPSPGFSPYNVSKTALLGLNNTLAIELAPRNIRVNCLHLDLSRLASAGCSGWTRKKRKA

SEQ ID NO: 4186 - protein, 49 aa, Homo Sapiens
MDVTEEVWDKTLDINVKAPALMTKAVVPEMEKRGGGSVVIVSSIAAFSP

SEQ ID NO: 4187 - protein, 215 aa, Homo Sapiens
MPFPCLSLPSSWDYRIGFAIARRLAQDRAHVVVSSRKQQNVDQAVATLQGEGLSVTGTVCHVGKAEDRERLVAMTLDINVKAPALMTKAVVPEMEKRGGGSVVIVSSIAAFSPSPGFSPYNVSKTALLGLNNTLAIELAPRNIRVNCLPGLIKTSFSRMLWMDKEKEESMKETLRIRRLGEPEDCAGIVSFLCSEDASYITGETVVVGGGTPSRL

SEQ ID NO: 4188 - protein, 192 aa, Homo Sapiens
MQMARLLGLCAWARKSVRMASSRMTRRDPLTNKVALVTASTDGIGFAIARRLAQDRAHVVVSSRKQQNVDQAVATLQGEGLSVTGTVCHVGKAEDRERLVAMAVKLHGGIDILVSNAAVNPFFGSLMDVTEEVWDKLWMDKEKEESMKETLRIRRLGEPEDCAGIVSFLCSEDASYITGETVVVGGGTPSRL

SEQ ID NO: 4189 - protein, 232 aa, Homo Sapiens
MQMARLLGLCAWARKSVRMASSRMTRRDPLTNKVALVTASTDGIGFAIARRLAQDRAHVVVSSRKQQNVDQAVATLQGEGLSVTGTVCHVGKAEDRERLVAMAVKLHGGIDILVSNAAVNPFFGSLMDVTEEVWDKTLDINVKAPALMTKAVVPEMEKRGGGSVVIVSSIAAFSPSPGFSPYNVSKTALLGLNNTLAIELAPRNIRVNCLHLDLSRLASAGCSGWTRKKRKA

SEQ ID NO: 4190 - protein, 242 aa, Homo Sapiens
MQMARLLGLCAWARKSVRMASSRMTRRDPLTNKVALVTASTDGIGFAIARRLAQDRAHVVVSSRKQQNVDQAVATLQGEGLSVTGTVCHVGKAEDRERLVAMAVKLHGGIDILVSNAAVNPFFGSLMDVTEEVWDKTLDINVKAPALMTKAVVPEMEKRGGGSVVIVSSIAAFSPSPGFSPYNVSKTALLGLNNTLAIELAPRNIRVNCLHLDLSRLASAGWLGEPEDCAGIVSFLCSEDAS

SEQ ID NO: 4191 - protein, 157 aa, Homo Sapiens
MQMARLLGLCAWARKSVRMASSRMTRRDPLTNKVALVTASTDGIGFAIARRLAQDRAHVVVSSRKQQNVDQAVATLQGEGLSVTGTVCHVGKAEDRERLVAMGFSPYNVSKTALLGLNNTLAIELAPRNIRVNCLHLDLSRLASAGCSGWTRKKRKA

SEQ ID NO: 4192 - protein, 157 aa, Homo Sapiens; identical to SEQ ID NO: 4191

SEQ ID NO: 4193 - protein, 109 aa, Homo Sapiens
  misc_feature (1)..(1): Xaa can be any naturally occurring amino acid
XSLMDVTEEVWDKTLDINVKAPALMTKAVVPEMEKRGGGSVVIVSSIAAFSPSPGFSPYNVSKTALLGLNNTLAIELAPRNIRVNCLHLDLSRLASAGCSGWTRKKRKA

SEQ ID NO: 4194 - protein, 61 aa, Homo Sapiens
MNWELLLWLLVLCALLLLLVQLLRFLRADGDLTLLWAEWQGRRPEWELTDMVVWVTGASSG

SEQ ID NO: 4195 - protein, 339 aa, Homo Sapiens
MNWELLLWLLVLCALLLLLVQLLRFLRADGDLTLLWAEWQGRRPEWELTDMVVWVTGASSGIGEELAYQLSKLGVSLVLSARRVHELERVKRRCLENGNLKEKDILVLPLDLTDTGSHEAATKAVLQEFGRIDILVNNGGMSQRSLCMDTSLDVYRKLIELNYLGTVSLTKCVLPHMIERKQGKIVTVNSILGIISVPLSIGYCASKHALRGFFNGLRTELATYPGIIVSNICPGPVQSNIVENSLAGEVTKTIGNNGDQSHKMTTSRCVRLMLISMANDLKEVWISEQPFLLVTYLWQYMPTWAWWITNKMGKKRIENFKSGVDADSSYFKIFKTKHD

SEQ ID NO: 4196 - protein, 339 aa, Homo Sapiens; identical to SEQ ID NO: 4195

SEQ ID NO: 4197 - protein, 376 aa, Homo Sapiens
MNWELLLWLLVLCALLLLLVQLLRFLRADGDLTLLWAEWQGRRPEWELTDMVVWVTGASSGIGEELAYQLSKLGVSLVLSARRVHELERVKRRCLENGNLKEKDILVLPLDLTDTGSHEAATKAVLQEFGRIDILVNNGGMSQRSLCMDTSLDVYRKLIELNYLGTVSLTKCVLPHMIERKQGKIVTVNSILGIISVPLSIGYCASKHALRGFFNGLRTELATYPGIIVSNICPGPVQSNIVENSLAGEVTKTIGNNGDQSHKMTTSRCVRLMLISMANDLKEVWISEQPFLLVTYLWQYMPTWAWWITTRWGRKGLRTLRVVWMQTLLILKSLRQNMTEKSTCTFQATGGRNGKHENSNLLMLLNNQRLICDFTF

SEQ ID NO: 4198 - protein, 289 aa, Homo Sapiens
MVVWVTGASSGIGEELAYQLSKLGVSLVLSARRVHELERVKRRCLENGNLKEKDILVLPLDLTDTGSHEAATKAVLQEFGRIDILVNNGGMSQRSLCMDTSLDVYRKLIELNYLGTVSLTKCVLPHMIERKQGKIVTVNSILGIISVPLSIGYCASKHALRGFFNGLRTELATYPGIIVSNICPGPVQSNIVENSLAGEVTKTIGNNGDQSHKMTTSRCVRLMLISMANDLKEVWISEQPFLLVTYLWQYMPTWAWWITNKMGKKRIENFKSGVDADSSYFKIFKTKHD

SEQ ID NO: 4199 - protein, 212 aa, Homo Sapiens
  misc_feature (1)..(1): Xaa can be any naturally occurring amino acid
XILVNNGGMSQRSLCMDTSLDVYRKLIELNYLGTVSLTKCVLPHMIERKQGKIVTVNSILGIISVPLSIGYCASKHALRGFFNGLRTELATYPGIIVSNICPGPVQSNIVENSLAGEVTKTIGNNGDQSHKMTTSRCVRLMLISMANDLKEVWISEQPFLMQTLLILKSLRQNMTEKSTCTFQATGGRNGKHENSNLLMLLNNQRLICDFTF

SEQ ID NO: 4200 - protein, 399 aa, Homo Sapiens
  misc_feature (1)..(1): Xaa can be any naturally occurring amino acid
XLWLLVLCALLLLLVQLLRFLRADGDLTLLWAEWQGRRPEWELTDMVVWVTGASSGIGEELAYQLSKLGVSLVLSARRVHELERVKRRCLENGNLKEKDILVLPLDLTDTGSHEAATKAVLQEFGRIDILVNNGGMSQRSLCMDTSLDVYRKLIELNYLGTVSLTKCVLPHMIERKQGKIVTVNSILGIISVPLSIGYCASKHALRGFFNGLRTELATYPGIIVSNICPGPVQSNIVENSLAGEVTKTIGNNGDQSHKMTTSRCVRLMLISMANDLKEVWISEQPFLLVTYLWQYMPTWAWWITNKMGKKRIENFKSGVVRPISKFLNSMYQSCRKVQNFPVFKKLSGWVQWLMSVIPALWEAKADHLRPGVQDQPGQHSETPSLLKIQKVAGHGGACL

SEQ ID NO: 4201 - protein, 160 aa, Homo Sapiens
  misc_feature (1)..(1): Xaa can be any naturally occurring amino acid
XNWELLLWLLVLCALLLLLVQLLRFLRADGDLTLLWAEWQGRRPEWELTDMVVWVTGASSGIGEELAYQLSKLGVSLVLSARRVHELERVKRRCLENGNLKEKDILVLPLDLTDTGSHEAATKAVLQEFGRGFFNGLRTELATYPGIIVSNICPGPVQSN

SEQ ID NO: 4202 - protein, 312 aa, Homo Sapiens
MGVMAMLMLPLLLLGISGLLFIYQEVSRLWSKSAVQNKVVVITDAISGLGKECARVFHTGGARLVLCGKNWERLENLYDALISVADPSKQTFTPKLVLLDLSDISCVPDVAKEVLDCYGCVDILINNASVKVKGPAHKISLELDKKIMDANYFGPITLTKALLPNMISRRTGQIVLVNNIQGKFGIPFRTTYAASKHAALGFFDCLRAEVEEYDVVISTVSPTFIRSYHVYPEQGNWEASIWKFFFRKLTYGVHPVEVAEEVMRTVRRKKQEVFMANPIPKAAVYVRTFFPEFFFAVVACGVKEKLNVPEEG

SEQ ID NO: 4203 - protein, 311 aa, Homo Sapiens
MGVMAMLMLPLLLLGISGLLFIYQEVSRLWSKSAVQNKVVVITDAISGLGKECARVFHTGGARLVLCGKNWERLENLYDALISVADPSKTFTPKLVLLDLSDISCVPDVAKEVLDCYGCVDILINNASVKVKGPAHKISLELDKKIMDANYFGPITLTKALLPNMISRRTGQIVLVNNIQGKFGIPFRTTYAASKHAALGFFDCLRAEVEEYDVVISTVSPTFIRSYHVYPEQGNWEASIWKFFFRKLTYGVHPVEVAEEVMRTVRRKKQEVFMANPIPKAAVYVRTFFPEFFFAVVACGVKEKLNVPEEG

SEQ ID NO: 4204 - protein, 132 aa, Homo Sapiens
SVKVKGPAHKISLELDKKIMDANYFGPITLTKALLPNMISRRTGQIVLVNNIQGKFGIPFRTTFFFRKLTYGVHPVEVAEEVMRTVRRKKQEVFMANPIPKAAVYVRTFFPEFFFAVVACGVKEKLNVPEEG

SEQ ID NO: 4205 - protein, 66 aa, Homo Sapiens
MLFWVLGLLILCGFLWTRKGKLKIEDITDKYIFITGCDSGFGNLAARTFDKKGFHVIAACLTESGS

SEQ ID NO: 4206 - protein, 319 aa, Homo Sapiens
MLFWVLGLLILCGFLWTRKGKLKIEDITDKYIFITGCDSGFGNLAARTFDKKGFHVIAACLTESGSTALKAETSERLRTVLLDVTDPENVKRTAQWVKNQVGEKGLWGLINNAGVPGVLAPTDWLTLEDYREPIEVNLFGLISVTLNMLPLVKKAQGRVINVSSVGGRLAIVGGGYTPSKYAVEGFNDSLRRDMKAFGVHVSCIEPGLFKTNLADPVKVIEKKLAIWEQLSPDIKQQYGEGYIEKSLDKLKGNKSYVNMDLSPVVECMDHALTSLFPKTHYAAGKDAKIFWIPLSHMPAALQDFLLLKQKAELANPKAV

SEQ ID NO: 4207 - protein, 319 aa, Homo Sapiens; identical to SEQ ID NO: 4206

SEQ ID NO: 4208 - protein, 319 aa, Homo Sapiens; identical to SEQ ID NO: 4206

SEQ ID NO: 4209 - protein, 319 aa, Homo Sapiens; identical to SEQ ID NO: 4206

SEQ ID NO: 4210 - protein, 319 aa, Homo Sapiens; identical to SEQ ID NO: 4206

SEQ ID NO: 4211 - protein, 172 aa, Homo Sapiens
MLPLVKKAQGRVINVSSVGGRLAIVGGGYTPSKYAVEGFNDSLRRDMKAFGVHVSCIEPGLFKTNLADPVKVIEKKLAIWEQLSPDIKQQYGEGYIEKSLDKLKGNKSYVNMDLSPVVECMDHALTSLFPKTHYAAGKDAKIFWIPLSHMPAALQDFLLLKQKAELANPKAV

SEQ ID NO: 4212 - protein, 379 aa, Homo Sapiens
MPEGRSHCACSITSLTLLVSLTRVTLDILQKLDPPQPAHWRHHLLVLYKKGVYLSHTGGKMLFWVLGLLILCGFLWTRKGKLKIEDITDKYIFITGCDSGFGNLAARTFDKKGFHVIAACLTESGSTALKAETSERLRTVLLDVTDPENVKRTAQWVKNQVGEKGLWGLINNAGVPGVLAPTDWLTLEDYREPIEVNLFGLISVTLNMLPLVKKAQGRVINVSSVGGRLAIVGGGYTPSKYAVEGFNDSLRRDMKAFGVHVSCIEPGLFKTNLADPVKVIEKKLAIWEQLSPDIKQQYGEGYIEKSLDKLKGNKSYVNMDLSPVVECMDHALTSLFPKTHYAAGKDAKIFWIPLSHMPAALQDFLLLKQKAELANPKAV

SEQ ID NO: 4213 - protein, 122 aa, Homo Sapiens
MHVIIAGNNDSKAKQVVSKIKEETLNDKVEFLYCDLASMTSIRQFVQKFKMKKIPLHVLINNAGVMMVPQRKTRDGFEEHFGLNYLGHFLLTNLLLDTLKESGSPGHSARVVTVSSATHYVA

SEQ ID NO: 4214 - protein, 63 aa, Homo Sapiens
MPVFPPRPDRVAIVTGGTDGIGYSTAKHLARLGMHVIIAGNNDSKAKQVVSKIKEETLNDKET

SEQ ID NO: 4215 - protein, 330 aa, Homo Sapiens
MSPLSAARAALRVYAVGAAVILAQLLRRCRGGFLEPVFPPRPDRVAIVTGGTDGIGYSTAKHLARLGMHVIIAGNNDSKAKQVVSKIKEETLNDKVEFLYCDLASMTSIRQFVQKFKMKKIPLHVLINNAGVMMVPQRKTRDGFEEHFGLNYLGHFLLTNLLLDTLKESGSPGHSARVVTVSSATHYVAELNMDDLQSSACYSPHAAYAQSKLALVLFTYHLQRLLAAEGSHVTANVVDPGVVNTDVYKHVFWATRLAKKLLGWLLFKTPDEGAWTSIYAAVTPELEGVGGHYLYNEKETKSLHVTYNQKLQQQLWSKSCEMTGVLDVTL

SEQ ID NO: 4216 - protein, 232 aa, Homo Sapiens
MSPLSAARAALRVYAVGAAVILAQLLRRCRGGFLEPVFPPRPDRVAIVTGGTDGIGYSTAKHLARLGMHVIIVEFLYCDLASMTSIRQFVQKFKMKKIPLHVLINNAGVMMVPQRKTRDGFEEHFGLNYLGHFLLTNLLLDTLKESGSPGHSARVVTVSSATHYVAELNMDDLQSSACYSPHAAYAQSKLALVLFTYHLQRLLAAEGSHVTANVVDPGVVNTDVYKHVFWAT

SEQ ID NO: 4217 - protein, 154 aa, Homo Sapiens
  misc_feature (1)..(1): Xaa can be any naturally occurring amino acid
XPARPGPTLPSPRVWPPRLSRVGLQPSSPRAAAPPRTLTPPGHGRGPGGSHAPRPRHQAALPAACGRPVTARPRQAPEGRSGRPRDLDPYPPQVFPPRPDRVAIVTGGTDGIGYSTAKHLARLGMHVIIAGNNDSKAKQVVSKIKEETLNDKET

SEQ ID NO: 4218 - protein, 1369 aa, Homo Sapiens
MGGKNKKHKAPAAAVVRAAVSASRAKSAEAGIAGEAQSKKPVSRPATAAAAAAGSREPRVKQGPKIYSFNSTNDSSGPANLDKSILKVVINNKLEQRIIGVINEHKKQNNDKGMISGRLTAKKLQDLYMALQAFSFKTKDIEDAMTNTLLYGGDLHSALDWLCLNLSDDALPEGFSQEFEEQQPKSRPKFQSPQIQATISPPLQPKTKTYEEDPKSKPKKEEKNMEVNMKEWILRYAEQQNEEEKNENSKSLEEEEKFDPNERYLHLAAKLLDAKEQAATFKLEKNKQGQKEAQEKIRKFQREMETLEDHPVFNPAMKISHQQNERKKPPVATEGESALNFNLFEKSAAATEEEKDKKKEPHDVRNFDYTARSWTGKSPKQFLIDWVRKNLPKSPNPSFEKVPVGRYWKCRVRVIKSEDDVLVVCPTILTEDGMQAQHLGATLALYRLVKGQSVHQLLPPTYRDVWLEWSDAEKKREELNKMETNKPRDLFIAKLLNKLKQQQQQQQQHSENKRENSEDPEESWENLVSDEDFSALSLESANVEDLEPVRNLFRKLQSTPKYQKLLKERQQLPVFKHRDSIVETLKRHRVVVVAGETGSGKSTQVPHFLLEDLLLNEWEASKCNIVCTQPRRISAVSLANRVCDELGCENGPGGRNSLCGYQIRMESRACESTRLLYCTTGVLLRKLQEDGLLSNVSHVIVDEVHERSVQSDFLLIILKEILQKRSDLHLILMSATVDSEKFSTYFTHCPILRISGRSYPVEVFHLEDIIEETGFVLEKDSEYCQKFLEEEEEVTINVTSKAGGIKKYQEYIPVQTGAHADLNPFYQKYSSRTQHAILYMNPHKINLDLILELLAYLDKSPQFRNIEGAVLIFLPGLAHIQQLYDLLSNDRRFYSERYKVIALHSILSTQDQAAAFTLPPPGVRKIVLATNIAETGITIPDVVFVIDTGRTKENKYHESSQMSSLVETFVSKASALQRQGRAGRVRDGFCFRMYTRERFEGFMDYSVPEILRVPLEELCLHIMKCNLGSPEDFLSKALDPPQLQVISNAMNLLRKIGACELNEPKLTPLGQHLAALPVNVKIGKMLIFGAIFGCLDPVATLAAVMTEKSPFTTPIGRKDEADLAKSALAMADSDHLTIYNAYLGWKKARQEGGYRSEITYCRRNFLNRTSLLTLEDVKQELIKLVKAAGFSSSTTSTSWEGNRASQTLSFQEIALLKAVLVAGLYDNVGKIIYTKSVDVTEKLACIVETAQGKAQVHPSSVNRDLQTHGWLLYQEKIRYARVYLRETTLITPFPVLLFGGDIEVQHRERLLSIDGWIYFQAPVKIAVIFKQLRVLIDSVLRKKLENPKMSLENDKILQIITELIKTENN

SEQ ID NO: 4219 - protein, 1370 aa, Homo Sapiens
MGGKNKKHKAPAAAVVRAAVSASRAKSAEAGIAGEAQSKKPVSRPATAAAAAAGSREPRVKQGPKIYSFNSTNDSSGPANLDKSILKVVINNKLEQRIIGVINEHKKQNNDKGMISGRLTAKKLQDLYMALQAFSFKTKDIEDAMTNTLLYGGDLHSALDWLCLNLSDDALPEGFSQEFEEQQPKSRPKFQSPQIQATISPPLQPKTKTYEEDPKSKPKKEEKNMEVNMKEWILRYAEQQNEEEKNENSKSLEEEEKFDPNERYLHLAAKLLDAKEQAATFKLEKNKQGQKEAQEKIRKFQREMETLEDHPVFNPAMKISHQQNERKKPPVATEGESALNFNLFEKSAAATEEEKGKKKEPHDVRNFDYTARSWTGKSPKQFLIDWVRKNLPKSPNPSFEKVPVGRYWKCRVRVIKSEDDVLVVCPTILTEDGMQAQHLGATLALYRLVKGQSVHQLLPPTYRDVWLEWSDAEKKREELNKMETNKPRDLFIAKLLNKLKQQQQQQQQHSENKRENSEDPEESWENLVSDEDFSALSLESANVEDLEPVRNLFRKLQSTPKYQKLLKERQQLPVFKHRDSIVETLKRHRVVVVAGETGSGKSTQVPHFLLEDLLLNEWEASKCNIVCTQPRRISAVSLANRVCDELGCENGPGGRNSLCGYQIRMESRACESTRLLYCTTGVLLRKLQEDGLLSNVSHVIVDEVHERSVQSDFLLIILKEILQKRSDLHLILMSATVDSEKFSTYFTHCPILRISGRSYPVEVFHLEDIIEETGFVLEKDSEYCQKFLEEEEEVTINVTSKAGGIKKYQEYIPVQTGAHADLNPFYQKYSSRTQHAILYMNPHKINLDLILELLAYLDKSPQFRNIEGAVLIFLPGLAHIQQLYDLLSNDRRFYSERYKVIALHSILSTQDQAAAFTLPPPGVRKIVLATNIAETGITIPDVVFVIDTGRTKENKYHESSQMSSLVETFVSKASALQRQGRAGRVRDGFCFRMYTRERFEGFMDYSVPEILRVPLEELCLHIMKCNLGSPEDFLSKALDPPQLQVISNAMNLLRKIGACELNEPKLTPLGQHLAALPVNVKIGKMLIFGAIFGCLDPVATLAAVMTEKSPFTTPIGRKDEADLAKSALAMADSDHLTIYNAYLGWKKARQEGGYRSEITYCRRNFLNRTSLLTLEDVKQELIKLVKAAGFSSSTTSTSWEGNRASQTLSFQEIALLKAVLVAGLYDNVGKIIYTKSVDVTEKLACIVETAQGKAQVHPSSVNRDLQTHGWLLYQEKIRYARVYLRETTLITPFPVLLFGGDIEVQHRERLLSIDGWIYFQAPVKIAVIFKQLRVLIDSVLRKKLENPKMSLENDKILQIITELIKTENNN

SEQ ID NO: 4220 - protein, 160 aa, Homo Sapiens
  misc_feature (1)..(1): Xaa can be any naturally occurring amino acid
XRPRWSGPPCLLPEPNLPRLELPGRPKARSQCPGRPPLPLPLPAPGSPVSSKVVINNKLEQRIIGVINEHKKQNNDKGMISGRLTAKKLQDLYMALQAFSFKTKDIEDAMTNTLLYGGDLHSALDWLCLNLSDDALPEGFSQEFEEQQPKSRPKFQSPQI

SEQ ID NO: 4221 - protein, 1222 aa, Homo Sapiens
MAAARRLMALAAGISPRLQPLGPRAAGRQGRSRGFSSSCAHPDHTKEAAEAESGMAPGGPGEGDGSLVNASRDLLKEFPQPKNLLNSVIGRALGISHAKDKLVYVHTNGPKKKKVTLHIKWPKSVEVEGYGSKKIDAERQAAAAACQLFKGWGLLGPRNELFDAAKYRVLADRFGSPADSWWRPEPTMPPTSWRQLNPESIRPGGPGGLSRSLGREEEEDEEEELEEGTIDVTDFLSMTQQDSHAPLRDSRGSSFEMTDDDSAIRALTQFPLPKNLLAKVIQIATSSSTAKNLMQFHTVGTKTKLSTLTLLWPCPMTFVAKGRRKAEAENKAAALACKKLKSLGLVDRNNEPLTHAMYNLASLRELGETQRRPCTIQVPEPILRKIETFLNHYPVESSWIAPELRLQSDDILPLGKDSGPLSDPITGKPYVPLLEAEEVRLSQSLLELWRRRGPVWQEAPQLPVDPHRDTILNAIEQHPVVVISGDTGCGKTTRIPQLLLERYVTEGRGARCNVIITQPRRISAVSVAQRVSHELGPSLRRNVGFQVRLESKPPSRGGALLFCTVGILLRKLQSNPSLEGVSHVIVDEVHERDVNTDFLLILLKGLQRLNPALRLVLMSATGDNERFSRYFGGCPVIKVPGFMYPVKEHYLEDILAKLGKHQYLHRHRHHESEDECALDLDLVTDLVLHIDARGEPGGILCFLPGWQEIKGVQQRLQEALGMHESKYLILPVHSNIPMMDQKAIFQQPPVGVRKIVLATNIAETSITINDIVHVVDSGLHKEERYDLKTKVSCLETVWVSRANVIQRRGRAGRCQSGFAYHLFPRSRLEKMVPFQVPEILRTPLENLVLQAKIHMPEKTAVEFLSKAVDSPNIKAVDEAVILLQEIGVLDQREYLTTLGQRLAHISTDPRLAKAIVLAAIFRCLHPLLVVVSCLTRDPFSSSLQNRAEVDKVKALLSHDSGSDHLAFVRAVAGWEEVLRWQDRSSRENYLEENLLYAPSLRFIHGLIKQFSENIYEAFLVGKPSDCTLASAQCNEYSEEEELVKGVLMAGLYPNLIQVRQGKVTRQGKFKPNSVTYRTKSGNILLHKSTINREATRLRSRWLTYFMAVKSNGSVFVRDSSQVHPLAVLLLTDGDVHIRDDGRRATISLSDSDLLRLEGDSRTVRLLKELRRALGRMVERSLRSELAALPPSVQEEHGQLLALLAELLRGPCGSFDVRKTADD

SEQ ID NO: 4222 - protein, 1155 aa, Homo Sapiens
MAASRDLLKEFPQPKNLLNSVIGRALGISHAKDKLVYVHTNGPKKKKVTLHIKWPKSVEVEGYGSKKIDAERQAAAAACQLFKGWGLLGPRNELFDAAKYRVLADRFGSPADSWWRPEPTMPPTSWRQLNPESIRPGGPGGLSRSLGREEEEDEEEELEEGTIDVTDFLSMTQQDSHAPLRDSRGSSFEMTDDDSAIRALTQFPLPKNLLAKVIQIATSSSTAKNLMQFHTVGTKTKLSTLTLLWPCPMTFVAKGRRKAEAENKAAALACKKLKSLGLVDRNNEPLTHAMYNLASLRELGETQRRPCTIQVPEPILRKIETFLNHYPVESSWIAPELRLQSDDILPLGKDSGPLSDPITGKPYVPLLEAEEVRLSQSLLELWRRRGPVWQEAPQLPVDPHRDTILNAIEQHPVVVISGDTGCGKTTRIPQLLLERYVTEGRGARCNVIITQPRRISAVSVAQRVSHELGPSLRRNVGFQVRLESKPPSRGGALLFCTVGILLRKLQSNPSLEGVSHVIVDEVHERDVNTDFLLILLKGLQRLNPALRLVLMSATGDNERFSRYFGGCPVIKVPGFMYPVKEHYLEDILAKLGKHQYLHRHRHHESEDECALDLDLVTDLVLHIDARGEPGGILCFLPGWQEIKGVQQRLQEALGMHESKYLILPVHSNIPMMDQKAIFQQPPVGVRKIVLATNIAETSITINDIVHVVDSGLHKEERYDLKTKVSCLETVWVSRANVIQRRGRAGRCQSGFAYHLFPRSRLEKMVPFQVPEILRTPLENLVLQAKIHMPEKTAVEFLSKAVDSPNIKAVDEAVILLQEIGVLDQREYLTTLGQRLAHISTDPRLAKAIVLAAIFRCLHPLLVVVSCLTRDPFSSSLQNRAEVDKVKALLSHDSGSDHLAFVRAVAGWEEVLRWQDRSSRENYLEENLLYAPSLRFIHGLIKQFSENIYEAFLVGKPSDCTLASAQCNEYSEEEELVKGVLMAGLYPNLIQVRQGKVTRQGKFKPNSVTYRTKSGNILLHKSTINREATRLRSRWLTYFMAVKSNGSVFVRDSSQVHPLAVLLLTDGDVHIRDDGRRATISLSDSDLLRLEGDSRTVRLLKELRRALGRMVERSLRSELAALPPSVQEEHGQLLALLAELLRGPCGSFDVRKTADD

SEQ ID NO: 4223 - protein, 1166 aa, Homo Sapiens
MCVNPTPGGTISRASRDLLKEFPQPKNLLNSVIGRALGISHAKDKLVYVHTNGPKKKKVTLHIKWPKSVEVEGYGSKKIDAERQAAAAACQLFKGWGLLGPRNELFDAAKYRVLADRFGSPADSWWRPEPTMPPTSWRQLNPESIRPGGPGGLSRSLGREEEEDEEEELEEGTIDVTDFLSMTQQDSHAPLRDSRGSSFEMTDDDSAIRALTQFPLPKNLLAKVIQIATSSSTAKNLMQFHTVGTKTKLSTLTLLWPCPMTFVAKGRRKAEAENKAAALACKKLKSLGLVDRNNEPLTHAMYNLASLRELGETQRRPCTIQVPEPILRKIETFLNHYPVESSWIAPELRLQSDDILPLGKDSGPLSDPITGKPYVPLLEAEEVRLSQSLLELWRRRGPVWQEAPQLPVDPHRDTILNAIEQHPVVVISGDTGCGKTTRIPQLLLERYVTEGRGARCNVIITQPRRISAVSVAQRVSHELGPSLRRNVGFQVRLESKPPSRGGALLFCTVGILLRKLQSNPSLEGVSHVIVDEVHERDVNTDFLLILLKGLQRLNPALRLVLMSATGDNERFSRYFGGCPVIKVPGFMYPVKEHYLEDILAKLGKHQYLHRHRHHESEDECALDLDLVTDLVLHIDARGEPGGILCFLPGWQEIKGVQQRLQEALGMHESKYLILPVHSNIPMMDQKAIFQQPPVGVRKIVLATNIAETSITINDIVHVVDSGLHKEERYDLKTKVSCLETVWVSRANVIQRRGRAGRCQSGFAYHLFPRSRLEKMVPFQVPEILRTPLENLVLQAKIHMPEKTAVEFLSKAVDSPNIKAVDEAVILLQEIGVLDQREYLTTLGQRLAHISTDPRLAKAIVLAAIFRCLHPLLVVVSCLTRDPFSSSLQNRAEVDKVKALLSHDSGSDHLAFVRAVAGWEEVLRWQDRSSRENYLEENLLYAPSLRFIHGLIKQFSENIYEAFLVGKPSDCTLASAQCNEYSEEEELVKGVLMAGLYPNLIQVRQGKVTRQGKFKPNSVTYRTKSGNILLHKSTINREATRLRSRWLTYFMAVKSNGSVFVRDSSQVHPLAVLLLTDGDVHIRDDGRRATISLSDSDLLRLEGDSRTVRLLKELRRALGRMVERSLRSELAALPPSVQEEHGQLLALLAELLRGPCGSFDVRKTADD

SEQ ID NO: 4224 - protein, 1194 aa, Homo Sapiens
MFSLDSFRKDRAQHRQRQCKLPPPRLPPMCVNPTPGGTISRASRDLLKEFPQPKNLLNSVIGRALGISHAKDKLVYVHTNGPKKKKVTLHIKWPKSVEVEGYGSKKIDAERQAAAAACQLFKGWGLLGPRNELFDAAKYRVLADRFGSPADSWWRPEPTMPPTSWRQLNPESIRPGGPGGLSRSLGREEEEDEEEELEEGTIDVTDFLSMTQQDSHAPLRDSRGSSFEMTDDDSAIRALTQFPLPKNLLAKVIQIATSSSTAKNLMQFHTVGTKTKLSTLTLLWPCPMTFVAKGRRKAEAENKAAALACKKLKSLGLVDRNNEPLTHAMYNLASLRELGETQRRPCTIQVPEPILRKIETFLNHYPVESSWIAPELRLQSDDILPLGKDSGPLSDPITGKPYVPLLEAEEVRLSQSLLELWRRRGPVWQEAPQLPVDPHRDTILNAIEQHPVVVISGDTGCGKTTRIPQLLLERYVTEGRGARCNVIITQPRRISAVSVAQRVSHELGPSLRRNVGFQVRLESKPPSRGGALLFCTVGILLRKLQSNPSLEGVSHVIVDEVHERDVNTDFLLILLKGLQRLNPALRLVLMSATGDNERFSRYFGGCPVIKVPGFMYPVKEHYLEDILAKLGKHQYLHRHRHHESEDECALDLDLVTDLVLHIDARGEPGGILCFLPGWQEIKGVQQRLQEALGMHESKYLILPVHSNIPMMDQKAIFQQPPVGVRKIVLATNIAETSITINDIVHVVDSGLHKEERYDLKTKVSCLETVWVSRANVIQRRGRAGRCQSGFAYHLFPRSRLEKMVPFQVPEILRTPLENLVLQAKIHMPEKTAVEFLSKAVDSPNIKAVDEAVILLQEIGVLDQREYLTTLGQRLAHISTDPRLAKAIVLAAIFRCLHPLLVVVSCLTRDPFSSSLQNRAEVDKVKALLSHDSGSDHLAFVRAVAGWEEVLRWQDRSSRENYLEENLLYAPSLRFIHGLIKQFSENIYEAFLVGKPSDCTLASAQCNEYSEEEELVKGVLMAGLYPNLIQVRQGKVTRQGKFKPNSVTYRTKSGNILLHKSTINREATRLRSRWLTYFMAVKSNGSVFVRDSSQVHPLAVLLLTDGDVHIRDDGRRATISLSDSDLLRLEGDSRTVRLLKELRRALGRMVERSLRSELAALPPSVQEEHGQLLALLAELLRGPCGSFDVRKTADD

SEQ ID NO: 4225 - protein, 1194 aa, Homo Sapiens; identical to SEQ ID NO: 4224

SEQ ID NO: 4226 - protein, 42 aa, Homo Sapiens
MFSLDSFRKDRAQHRQRQCKLPPPRLPPMCVNPTPGGTISRG

SEQ ID NO: 4227 - protein, 42 aa, Homo Sapiens; identical to SEQ ID NO: 4226

SEQ ID NO: 4228 - protein, 42 aa, Homo Sapiens; identical to SEQ ID NO: 4226

SEQ ID NO: 4229 - protein, 138 aa, Homo Sapiens
KAKFHQTEGDHLTLLAVYNSWKNNKFSNPWCYENFIQARSLRRAQDIRKQMLGIMDRHKLDVVSCGKSTVRVQKAICSGFFRNAAKKDPQEGYRTLIDQQVVYIHPSSALFNRQPEWDLYSRFSEWKSGTNCSSLSGT

SEQ ID NO: 4230 - protein, 1220 aa, Homo Sapiens [sequence omitted]

SEQ ID NO: 4231 - protein, 1181 aa, Homo Sapiens
MAVAVAMAGALIGSEPGPAEELAKLEYLSLVSKVCTELDNHLGINDKDLAEFVISLAEKNTTFDTFKASLVKNGAEFTDSLISNLLRLIQTMRPPAKPSTSKDPVVKPKTEKEKLKELFPVLCQPDNPSVRTMLDEDDVKVAVDVLKELEALMPSAAGQEKQRDAEHRDRTKKKKRSRSRDRNRDRDRDRERNRDRDHKRRHRSRSRSRSRTRERNKVKSRYRSRSRSQSPPKDRKDRDKYGERNLDRWRDKHVDRPPPEEPTIGDIYNGKVTSIMQFGCFVQLEGLRKRWEGLVHISELRREGRVANVADVVSKGQRVKVKVLSFTGTKTSLSMKDVDQETGEDLNPNRRRNLVGETNEETSMRNPDRPTHLSLVSAPEVEDDSLERKRLTRISDPEKWEIKQMIAANVLSKEEFPDFDEETGILPKVDDEEDEDLEIELVEEEPPFLRGHTKQSMDMSPIKIVKNPDGSLSQAAMMQSALAKERRELKQAQREAEMDSIPMGLNKHWVDPLPDAEGRQIAANMRGIGMMPNDIPEWKKHAFGGNKASYGKKTQMSILEQRESLPIYKLKEQLVQAVHDNQILIVIGETGSGKTTQITQYLAEAGYTSRGKIGCTQPRRVAAMSVAKRVSEEFGCCLGQEVGYTIRFEDCTSPETVIKYMTDGMLLRECLIDPDLTQYAIIMLDEAHERTIHTDVLFGLLKKTVQKRQDMKLIVTSATLDAVKFSQYFYEAPIFTIPGRTYPVEILYTKEPETDYLDASLITVMQIHLTEPPGDILVFLTGQEEIDTACEILYERMKSLGPDVPELIILPVYSALPSEMQTRIFDPAPPGSRKVVIATNIAETSLTIDGIYYVVDPGFVKQKVYNSKTGIDQLVVTPISQAQAKQRAGRAGRTGPGKCYRLYTERAYRDEMLTTNVPEIQRTNLASTVLSLKAMGINDLLSFDFMDAPPMETLITAMEQLYTLGALDDEGLLTRLGRRMAEFPLEPMLCKMLIMSVHLGCSEEMLTIVSMLSVQNVFYRPKDKQALADQKKAKFHQTEGDHLTLLAVYNSWKNNKFSNPWCYENFIQARSLRRAQDIRKQMLGIMDRHKLDVVSCGKSTVRVQKAICSGFFRNAAKKDPQEGYRTLIDQQVVYIHPSSALFNRQPECPKHFLPVVAVAVSLEQCLSKFEDLNKELGLVTC

SEQ ID NO: 4232 - protein, 53 aa, Homo Sapiens
MAVAVAMAGALIGSEPGPAEELAKLEYLSLVSKVCTELDNHLGINDKDLGFSY

SEQ ID NO: 4233 - protein, 33 aa, Homo Sapiens
  misc_feature (1)..(1): Xaa can be any naturally occurring amino acid
XYRTLIDQQVVYIHPSSALFNRQPEWTVPMGHV

SEQ ID NO: 4234 - protein, 6 aa, Homo Sapiens
MGILSV

SEQ ID NO: 4235 - protein, 6 aa, Homo Sapiens
MGILSV

SEQ ID NO: 4236 - protein, 56 aa, Homo Sapiens
MGILSVDLLITLQILPPSANWWKSSPQWLTSCWSTLMRLIHQMAGRYRGTPLCLLR

SEQ ID NO: 4237 - protein, 55 aa, Homo Sapiens
MGILSVDLLITLQILPVFFSNCLFLALYDSVILLKHVVLLLSRSKSTRGEWRRML

SEQ ID NO: 4238 - protein, 145 aa, Homo Sapiens
MGILSVDLLITLQILPVFFSNCLFLALYDSVILLKHVVLLLSRSKSTRGEWRRMLTSEGLRCVWKSFLLDAYKQLNCPPSGFSKDGHILLVYEAYKSRLLVYSHLDLWMTDSVVLTLNFPRQISLCFGKNSAAELYIVSKKEKVP

SEQ ID NO: 4239 - protein, 306 aa, Homo Sapiens
MGILSVDLLITLQILPVFFSNCLFLALYDSVILLKHVVLLLSRSKSTRGEWRRMLTSEGLRCVWKSFLLDAYKQLNCPPSGFSKDGHILLVYEAYKSRLLVYSHLDLWMVKLGEDAPNSSVVHVSSTEGGDNSGNGTQEKIAEGATCHLLDFASPERPLVVNFGSATPPFTSQLPAFRKLVEEFSSVADFLLVYIDEAHPSDGWAIPGDSSLSFEVKKHQNQEDRCAAAQQLLERFSLPPQCRVVADRMDNNANIAYGVAFERVCIVQRQKIAYLGGKGPFSYNLQEVRHWLEKNFSKRKKTRLAG

SEQ ID NO: 4240 - protein, 271 aa, Homo Sapiens
MGILSVDLLITLQILPVFFSNCLFLALYDSVILLKHVVLLLSRSKSTRGEWRRMLTSEGLRCVWKSFLLDAYKQVKLGEDAPNSSVVHVSSTEGGDNSGNGTQEKIAEGATCHLLDFASPERPLVVNFGSATPPFTSQLPAFRKLVEEFSSVADFLLVYIDEAHPSDGWAIPGDSSLSFEVKKHQNQEDRCAAAQQLLERFSLPPQCRVVADRMDNNANIAYGVAFERVCIVQRQKIAYLGGKGPFSYNLQEVRHWLEKNFSKRKKTRLAG

SEQ ID NO: 4241 - protein, 271 aa, Homo Sapiens; identical to SEQ ID NO: 4240

SEQ ID NO: 4242 - protein, 37 aa, Homo Sapiens
  misc_feature (1)..(1): Xaa can be any naturally occurring amino acid
XMLTSEGLRCVWKSFLLDAYKQLNCPPSGFSKDGHIL

SEQ ID NO: 4243 - protein, 58 aa, Homo Sapiens
  misc_feature (1)..(1): Xaa can be any naturally occurring amino acid
XMLTSEGLRCVWKSFLLDAYKQTDSVVLTLNFPRQISLCFGKNSAAELYIVSKKEKVP

SEQ ID NO: 4244 - protein, 77 aa, Homo Sapiens
MEEAKKMISGLQALLLNGSLPEDEQERPLALCEPGVNPEEQLIIIQSRLDQSMEENQDLKKELLKCKQEARNLQGIK

SEQ ID NO: 4245 - protein, 472 aa, Homo Sapiens
MGGTQVKCLTSPSPIHSAKSESIITQSEEKADFVIIPAEGIENRTEGTDSPLSRDWRPGSPGTYLETSWEEQLLEQQEYLEKEMEEAKKMISGLQALLLNGSLPEDEQERPLALCEPGVNPEEQLIIIQSRLDQSMEENQDLKKELLKCKQEARNLQGIKDALQQRLTQQDTSVLQLKQELLRANMDKDELHNQNVDLQRKLDERNRLLGEYKKELGQKDRLLQQHQAKLEEALRKLSDVSYHQVDLERELEHKDVLLAHCMKREADEATNYNSHNSQSNGFLLPTAGKGATSVSNRGTSDLQLVRDALRSLRNSFSGHDPQHHTIDSLEQGISSLMERLHVMETQKKQERKVRVKSPRTQVGSEYRESWPPNSKLPHSQSSPTVSSTCTKVLYFTDRSLTPFMVNIPKRLEEVTLKDFKAAIDREGNHRYHFKALDPEFGTVKEEIFHDDDAIPGWEGKIVAWVEEDHGEN

SEQ ID NO: 4246 - protein, 218 aa, Homo Sapiens
MGTQVVMRFNNSLLPTEPSQQLQAYVAWVNAQLKKRPAVKPVQDLRQDLRDGVILAYLIEIVAGEKLSGVQLSPGNQQEMKNNVEKVLQFVASKKIRMHQTSAKDIVDGNLKSIMRLVLALAAHFKPGSSRTVNQGRDSRAPLQSHRPHCATAVAQGAAAALADVCHDMSRSGRDVFRYRQRNSSMDEEIENPYWSVRALVQQYEGQQRSPSESSCSR

SEQ ID NO: 4247 - protein, 683 aa, Homo Sapiens
MLACLTRGNLLDVLQEGFNEQQLQAYVAWVNAQLKKRPAVKPVQDLRQDLRDGVILAYLIEIVAGEKLSGVQLSPGNQQEMKNNVEKVLQFVASKKIRMHQTSAKDIVDGNLKSIMRLVLALAAHFKPGSSRTVNQGRDSRAPLQSHRPHCATAVAQGAAAALADVCHDMSRSGRDVFRYRQRNSSMDEEIENPYWSVRALVQQYEGQQRSPSESSCSSLTSPSPIHSAKSESIITQSEEKADFVIIPAEGIENRTEGTDSPLSRDWRPGSPGTYLETSWEEQLLEQQEYLEKEMEEAKKMISGLQALLLNGSLPEDEQERPLALCEPGVNPEEQLIIIQSRLDQSMEENQDLKKELLKCKQEARNLQGIKDALQQRLTQQDTSVLQLKQELLRANMDKDELHNQNVDLQRKLDERNRLLGEYKKELGQKDRLLQQHQAKLEEALRKLSDVSYHQVDLERELEHKDVLLAHCMKREADEATNYNSHNSQSNGFLLPTAGKGATSVSNRGTSDLQLVRDALRSLRNSFSGHDPQHHTIDSLEQGISSLMERLHVMETQKKQERKVRVKSPRTQVGSEYRESWPPNSKLPHSQSSPTVSSTCTKVLYFTDRSLTPFMVNIPKRLEEVTLKDFKAAIDREGNHRYHFKALDPEFGTVKEEIFHDDDAIPGWEGKIVAWVEEDHGEN

SEQ ID NO: 4248 - protein, 266 aa, Homo Sapiens
MMALGAAGATRVFVAMVAAALGGHPLLGVSATLNSVLNSNAIKNLPPPLGGAAGHPGSAVSAAPGILYPGGNKYQTIDNYQPYPCAEDEECGTDEYCASPTRGGDAGVQICLACRKRRKRCMRHAMCCPGNYCKNGICVSSDQNHFRGEIEETITESFGNDHSTLDGYSRRTTLSSKMYHTKGQEGSVCLRSSDCASGLCCARHFWSKICKPVLKEGQVCTKHRRKGSHGLEIFQRCYCGEGLSCRIQKDHHQASNSSRLHTCQRH

SEQ ID NO: 4249 - protein, 259 aa, Homo Sapiens
MAALMRSKDSSCCLLLLAAVLMVESSQIGSSRAKLNSIKSSLGGETPGQAANRSAGMYQGLAFGGSKKGKNLGQAYPCSSDKECEVGRYCHSPHQGSSACMVCRRKKKRCHRDGMCCPSTRCNNGICIPVTESILTPHIPALDGTRHRDRNHGHYSNHDLGWQNLGRPHTKMSHIKGHEGDPCLRSSDCIEGFCCARHFWTKICKPVLHQGEVCTKQRKKGSHGLEIFQRCDCAKGLSCKVWKDATYSSKARLHVCQKI

SEQ ID NO: 4250 - protein, 213 aa, Homo Sapiens
MTLRIDYCQGLLVGVSSSGLNIIQIQCQAYPCSSDKECEVGRYCHSPHQGSSACMVCRRKKKRCHRDGMCCPSTRCNNGICIPVTESILTPHIPALDGTRHRDRNHGHYSNHDLGWQNLGRPHTKMSHIKGHEGDPCLRSSDCIEGFCCARHFWTKICKPVLHQGEVCTKQRKKGSHGLEIFQRCDCAKGLSCKVWKDATYSSKARLHVCQKI

SEQ ID NO: 4251 - protein, 159 aa, Homo Sapiens
MVCRRKKKRCHRDGMCCPSTRCNNGICIPVTESILTPHIPALDGTRHRDRNHGHYSNHDLGWQNLGRPHTKMSHIKGHEGDPCLRSSDCIEGFCCARHFWTKICKPVLHQGEVCTKQRKKGSHGLEIFQRCDCAKGLSCKVWKDATYSSKARLHVCQKI

SEQ ID NO: 4252 - protein, 132 aa, Homo Sapiens
MQRLGATLLCLLLAAAVPTAPAPAPTATSAPVKPGPALSYPQEEATLNEMFREVEELMEDTQHKLRSAVEEMEAEEAAAKASSEVNLANLPPSYHNETNTDTKVGNNTIHVHREIHKECIIDEDCGPSMYCQ

SEQ ID NO: 4253 - protein, 183 aa, Homo Sapiens
MQRLGATLLCLLLAAAVPTAPAPAPTATSAPVKPGPALSYPQEEATLNEMFREVEELMEDTQHKLRSAVEEMEAEEAAAKASSEVNLANLPPSYHNETNTDTKVGNNTIHVHREIHKECIIDEDCGPSMYCQFASFQYTCQPCRGQRMLCTRDSECCGDQLCVWGHCTKMATRGSNGTICDNQ

SEQ ID NO: 4254 - protein, 235 aa, Homo Sapiens
MQRLGATLLCLLLAAAVPTAPAPAPTATSAPVKPGPALSYPQEEATLNEMFREVEELMEDTQHKLRSAVEEMEAEEAAAKASSEVNLANLPPSYHNETNTDTKVGNNTIHVHREIHKITNNQTGQMVFSETVITSVGDEEGRRSHECIIDEDCGPSMYCQFASFQYTCQPCRGQRMLCTRDSECCGDQLCVWGHCTKMATRGSNGTICDNQRDCQPGLCCAFQRGLLFPVCTPLP

SEQ ID NO: 4255 - protein, 350 aa, Homo Sapiens
MQRLGATLLCLLLAAAVPTAPAPAPTATSAPVKPGPALSYPQEEATLNEMFREVEELMEDTQHKLRSAVEEMEAEEAAAKASSEVNLANLPPSYHNETNTDTKVGNNTIHVHREIHKITNNQTGQMVFSETVITSVGDEEGRRSHECIIDEDCGPSMYCQFASFQYTCQPCRGQRMLCTRDSECCGDQLCVWGHCTKMATRGSNGTICDNQRDCQPGLCCAFQRGLLFPVCTPLPVEGELCHDPASRLLDLITWELEPDGALDRCPCASGLLCQPHSHSLVYVCKPTFVGSRDQDGEILLPREVPDEYEVGSFMEEVRQELEDLERSLTEEMALREPAAAAAALLGGEEI

SEQ ID NO: 4256 - protein, 350 aa, Homo Sapiens; identical to SEQ ID NO: 4255

SEQ ID NO: 4257 - protein, 364 aa, Homo Sapiens
MQRLGATLLCLLLAAAVPTAPAPAPTATSAPVKPGPALSYPQEEATLNEMFREVEELMEDTQHKLRSAVEEMEAEEAAAKASSEVNLANLPPSYHNETNTDTKVGNNTIHVHREIHKITNNQTGQMVFSETVITSVGDEEGRRSHECIIDEDCGPSMYCQFASFQYTCQPCRGQRMLCTRDSECCGDQLCVWGHCTKMATRGSNGTICDNQRDCQPGLCCAFQRGLLFPVCTPLPVEGELCHDPASRLLDLITWELEPDGALDRCPCASGLLCQPHRLPRLEPGFVPSLPSHSLVYVCKPTFVGSRDQDGEILLPREVPDEYEVGSFMEEVRQELEDLERSLTEEMALREPAAAAAALLGGEEI

SEQ ID NO: 4258 - protein, 224 aa, Homo Sapiens
MVAAVLLGLSWLCSPLGALVLDFNNIRSSADLHGARKGSQCLSDTDCNTRKFCLQPRDEKPFCATCRGLRRRCQRDAMCCPGTLCVNDVCTTMEDATPILERQLDEQDGTHAEGTTGHPVQENQPKRKPSIKKSQGRKGQEGESCLRTFDCGPGLCCARHFWTKICKPVLLEGQVCSRRGHKDTAQAPEIFQRCDCGPGLLCRSQLTSNRQHARLRVCQKIEKL

SEQ ID NO: 4259 - protein, 125 aa, Homo Sapiens
MDFRGLPGNYHKEENQEHQLGNNTLSSHLQIDKMTDNKTGEVLISENVVASIQPAEGSFEGDLKVPRMEEKEALVPIQKATDSFHTELHPRVAFWIIKLPRRRSHQDALEGGHWLSEKRHRLQAI

SEQ ID NO: 4260 - protein, 146 aa, Homo Sapiens
MDFRGLPGNYHKEENQEHQLGNNTLSSHLQIDKMTDNKTGEVLISENVVASIQPAEGSFEGDLKVPRMEEKEALVPIQKATDSFHTELHPRVAFWIIKLPRRRSHQDALEGGHWLSEKRHRLQAIRDGLRKGTHKDVLEEGTESSS

SEQ ID NO: 4261 - protein, 100 aa, Homo Sapiens
MEEKEALVPIQKATDSFHTELHPRVAFWIIKLPRRRSHQDALEGGHWLSEKRHRLQAIRDGLRKGTHKDVLEEGTESSSHSRLSPRKTHLLYILRPSRQL

SEQ ID NO: 4262 - protein, 242 aa, Homo Sapiens
MGEASPPAPARRHLLVLLLLLSTLVIPSAAAPIHDADAQESSLGLTGLQSLLQGFSRLFLKGNLLRGIDSLFSAPMDFRGLPGNYHKEENQEHQLGNNTLSSHLQIDKMTDNKTGEVLISENVVASIQPAEGSFEGDLKVPRMEEKEALVPIQKATDSFHTELHPRVAFWIIKLPRRRSHQDALEGGHWLSEKRHRLQAIRDGLRKGTHKDVLEEGTESSSHSRLSPRKTHLLYILRPSRQL

SEQ ID NO: 4263 - protein, 199 aa, Homo Sapiens
MGEASPPAPARRHLLVLLLLLSTLVIPSAAAPIHDADAQESSLGLTGLQSLLQGFSRLFLKGNLLRGIDSLFSAPMDFRGLPGNYHKEENQEHQLGNNTLSSHLQIDKVPRMEEKEALVPIQKATDSFHTELHPRVAFWIIKLPRRRSHQDALEGGHWLSEKRHRLQAIRDGLRKGTHKDVLEEGTESSSHSRLSPRKT

SEQ ID NO: 4264 - protein, 137 aa, Homo Sapiens
  misc_feature (1)..(1): Xaa can be any naturally occurring amino acid
XAAAPIHDADAQESSLGLTGLQSLLQGFSRLFLKVPRMEEKEALVPIQKATDSFHTELHPRVAFWIIKLPRRRSHQDALEGGHWLSEKRHRLQAIRDGLRKGTHKDVLEEGTESSSHSRLSPRKTHLLYILRPSRQL

SEQ ID NO: 4265 - protein, 724 aa, Homo Sapiens
MDCLCIVTTKKYRYQDEDTPPLEHSPAHLPNQANSPPVIVNTDTLEAPGYELQVNGTEGEMEYEEITLERGNSGLGFSIAGGTDNPHIGDDPSIFITKIIPGGAAAQDGRLRVNDSILFVNEVDVREVTHSAAVEALKEAGSIVRLYVMRRKPPAEKVMEIKLIKGPKGLGFSIAGGVGNQHIPGDNSIYVTKIIEGGAAHKDGRLQIGDKILAVNSVGLEDVMHEDAVAALKNTYDVVYLKVAKPSNAYLSDSYAPPDITTSYSQHLDNEISHSSYLGTDYPTAMTPTSPRRYSPVAKDLLGEEDIPREPRRIVIHRGSTGLGFNIVGGEDGEGIFISFILAGGPADLSGELRKGDQILSVNGVDLRNASHEQAAIALKNAGQTVTIIAQYKPEEYSRFEAKIHDLREQLMNSSLGSGTASLRSNPKRGFYIRALFDYDKTKDCGFLSQALSFRFGDVLHVIDASDEEWWQARRVHSDSETDDIGFIPSKRRVERREWSRLKAKDWGSSSGSQGREDSVLSYETVTQMEVHYARPIIILGPTKDRANDDLLSEFPDKFGSCVPHTTRPKREYEIDGRDYHFVSSREKMEKDIQAHKFIEAGQYNSHLYGTSVQSVREVAEQGKHCILDVSANAVRRLQAAHLHPIAIFIRPRSLENVLEINKRITEEQARKAFDRATKLEQEFTECFSAIVEGDSFEEIYHKVKRVIEDLSGPYIWVPARERL

SEQ ID NO: 4266 - protein, 721 aa, Homo Sapiens
MDCLCIVTTKKYRYQDEDTPPLEHSPAHLPNQANSPPVIVNTDTLEAPGYVNGTEGEMEYEEITLERGNSGLGFSIAGGTDNPHIGDDPSIFITKIIPGGAAAQDGRLRVNDSILFVNEVDVREVTHSAAVEALKEAGSIVRLYVMRRKPPAEKVMEIKLIKGPKGLGFSIAGGVGNQHIPGDNSIYVTKIIEGGAAHKDGRLQIGDKILAVNSVGLEDVMHEDAVAALKNTYDVVYLKVAKPSNAYLSDSYAPPDITTSYSQHLDNEISHSSYLGTDYPTAMTPTSPRRYSPVAKDLLGEEDIPREPRRIVIHRGSTGLGFNIVGGEDGEGIFISFILAGGPADLSGELRKGDQILSVNGVDLRNASHEQAAIALKNAGQTVTIIAQYKPEEYSRFEAKIHDLREQLMNSSLGSGTASLRSNPKRGFYIRALFDYDKTKDCGFLSQALSFRFGDVLHVIDASDEEWWQARRVHSDSETDDIGFIPSKRRVERREWSRLKAKDWGSSSGSQGREDSVLSYETVTQMEVHYARPIIILGPTKDRANDDLLSEFPDKFGSCVPHTTRPKREYEIDGRDYHFVSSREKMEKDIQAHKFIEAGQYNSHLYGTSVQSVREVAEQGKHCILDVSANAVRRLQAAHLHPIAIFIRPRSLENVLEINKRITEEQARKAFDRATKLEQEFTECFSAIVEGDSFEEIYHKVKRVIEDLSGPYIWVPARERL

SEQ ID NO: 4267 - protein, 296 aa, Homo Sapiens
MDCLCIVTTKKYRYQDEDTPPLEHSPAHLPNQANSPPVIVNTDTLEAPGYVNGTEGEMEYEEITLERGNSGLGFSIAGGTDNPHIGDDPSIFITKIIPGGAAAQDGRLRVNDSILFVNEVDVREVTHSAAVEALKEAGSIVRLYVMRRKPPAEKVMEIKLIKGPKGLGFSIAGGVGNQHIPGDNSIYVTKIIEGGAAHKDGRLQIGDKILAVNSVGLEDVMHEDAVAALKNTYDVVYLKVAKPSNAYLSDSYAPPDITTCESPSNTKVPHDPSRLTHDMQSHDIPVAVPLQIFPMK

SEQ ID NO: 4268 - protein, 234 aa, Homo Sapiens
MDCLCIVTTKKYRYQDEDTPPLEHSPAHLPNQVNAPELVHVAERNLSHLEAGHGVVGHAHLSPFKANSPPVIVNTDTLEAPGYVNGTEGEMEYEEITLERGNSGLGFSIAGGTDNPHIGDDPSIFITKIIPGGAAAQDGRLRVNDSILFVNEVDVREVTHSAAVEALKEAGSIVRLYVMRRKPPAEKVMEIKLIKGPKGLGFSIAGGVGNQHIPGDNSIYVTKIIEGGAAHKDG

SEQ ID NO: 4269 - protein, 91 aa, Homo Sapiens
MEYEEITLERGNSGLGFSIAGGTDNPHIGDDPSIFITKIIPGGAAAQDGRLRVNDSILFVNEVDVREVTHSAAVEALKEAGSIVRLYVMRR

SEQ ID NO: 4270 - protein, 116 aa, Homo Sapiens
MEYEEITLERGNSGLGFSIAGGTDNPHIGDDPSIFITKIIPGGAAAQDGRLRVNDSILFVNEVDVREVTHSAAVEALKEAGSIVRLYVMRRKPPAEKVMEIKLIKGPKGLGFSIAG

SEQ ID NO: 4271 - protein, 281 aa, Homo Sapiens
MPINGVNLAWKYRYQDEDTPPLEHSPAHLPNQVNAPELVHVAERNLSHLEAGHGVVGHAHLSPFKANSPPVIVNTDTLEAPGYELQVNGTEGEMEYEEITLERGNSGLGFSIAGGTDNPHIGDDPSIFITKIIPGGAAAQDGRLRVNDSILFVNEVDVREVTHSAAVEALKEAGSIVRLYVMRRKPPAEKVMEIKLIKGPKGLGFSIAGGVGNQHIPGDNSIYVTKIIEGGAAHKDGRLQIGDKILAVNSVGLEDVMHEDAVAALKNTYDVVYLKVAKPSN

SEQ ID NO: 4272 - protein, 767 aa, Homo Sapiens
MSQRPRAPRSALWLLAPPLLRWAPPLLTVLHSDLFQALLDILDYYEASLSESQKYRYQDEDTPPLEHSPAHLPNQANSPPVIVNTDTLEAPGYELQVNGTEGEMEYEEITLERGNSGLGFSIAGGTDNPHIGDDPSIFITKIIPGGAAAQDGRLRVNDSILFVNEVDVREVTHSAAVEALKEAGSIVRLYVMRRKPPAEKVMEIKLIKGPKGLGFSIAGGVGNQHIPGDNSIYVTKIIEGGAAHKDGRLQIGDKILAVNSVGLEDVMHEDAVAALKNTYDVVYLKVAKPSNAYLSDSYAPPDITTSYSQHLDNEISHSSYLGTDYPTAMTPTSPRRYSPVAKDLLGEEDIPREPRRIVIHRGSTGLGFNIVGGEDGEGIFISFILAGGPADLSGELRKGDQILSVNGVDLRNASHEQAAIALKNAGQTVTIIAQYKPEEYSRFEAKIHDLREQLMNSSLGSGTASLRSNPKRGFYIRALFDYDKTKDCGFLSQALSFRFGDVLHVIDASDEEWWQARRVHSDSETDDIGFIPSKRRVERREWSRLKAKDWGSSSGSQGREDSVLSYETVTQMEVHYARPIIILGPTKDRANDDLLSEFPDKFGSCVPHTTRPKREYEIDGRDYHFVSSREKMEKDIQAHKFIEAGQYNSHLYGTSVQSVREVAEQGKHCILDVSANAVRRLQAAHLHPIAIFIRPRSLENVLEINKRITEEQARKAFDRATKLEQEFTECFSAIVEGDSFEEIYHKVKRVIEDLSGPYIWVPARERL

SEQ ID NO: 4273 - protein, 85 aa, Homo Sapiens
  misc_feature (1)..(1): Xaa can be any naturally occurring amino acid
XGPTKDRANDDLLSEFPDKFGSCVPHTTRPKREYEIDGRDYHFVSSREKMEKDIQAHKFIEAGQYNSHLYGTSVQSVREVAEQRD

SEQ ID NO: 4274 - protein, 97 aa, Homo Sapiens
MTATEALLRVLLLLLAFGHSTYGAECFPACNPQNGFCEDDNVCRCQPGWQGPLCDQCVTSPGCLHGLCGEPGQCICTDGWDGELCDRDVRACSSAPC

SEQ ID NO: 4275 - protein, 310 aa, Homo Sapiens
MTATEALLRVLLLLLAFGHSTYGAECFPACNPQNGFCEDDNVCRCQPGWQGPLCDQCVTSPGCLHGLCGEPGQCICTDGWDGELCDRDVRACSSAPCANNRTCVSLDDGLYECSCAPGYSGKDCQKKDGPCVINGSPCQHGGTCVDDEGRASHASCLCPPGFSGNFCEIVANSCTPNPCENDGVCTDIGGDFRCRCPAGFIDKTCSRPVTNCASSPCQNGGTCLQHTQGQAICFTILGVLTSLVVLGTVGIVFLNKCETWVSNLRYNHMLRKKKNLLLQYNSGEDLAVNIIFPEKIDMTTFSKEAGDEEI

SEQ ID NO: 4276 - protein, 383 aa, Homo Sapiens
MTATEALLRVLLLLLAFGHSTYGAECFPACNPQNGFCEDDNVCRCQPGWQGPLCDQCVTSPGCLHGLCGEPGQCICTDGWDGELCDRDVRACSSAPCANNRTCVSLDDGLYECSCAPGYSGKDCQKKDGPCVINGSPCQHGGTCVDDEGRASHASCLCPPGFSGNFCEIVANSCTPNPCENDGVCTDIGGDFRCRCPAGFIDKTCSRPVTNCASSPCQNGGTCLQHTQVSYECLCKPEFTGLTCVKKRALSPQQVTRLPSGYGLAYRLTPGVHELPVQQPEHRILKVSMKELNKKTPLLTEGQAICFTILGVLTSLVVLGTVGIVFLNKCETWVSNLRYNHMLRKKKNLLLQYNSGEDLAVNIIFPEKIDMTTFSKEAGDEEI

SEQ ID NO: 4277 - protein, 136 aa, Homo Sapiens
MTATEALLRVLLLLLAFGHSTYGAECFPACNPQNGFCEDDNVCRCQPGWQGPLCDQCVTSPGCLHGLCGEPGQCICTDGWDGELCDRGWHSPLFTSALRPYLPALAPTTSSQSPVAGVPHFLIPAHSVPCILKICL

SEQ ID NO: 4278 - protein, 54 aa, Homo Sapiens
MGSRCALALAVLSALLCQVWSSGVFELKLQEFVNKKGLLGNRNCCRGGAGPPPC

SEQ ID NO: 4279 - protein, 723 aa, Homo Sapiens
MGSRCALALAVLSALLCQVWSSGVFELKLQEFVNKKGLLGNRNCCRGGAGPPPCACRTFFRVCLKHYQASVSPEPPCTYGSAVTPVLGVDSFSLPDGGGADSAFSNPIRFPFGFTWPGTFSLIIEALHTDSPDDLATENPERLISRLATQRHLTVGEEWSQDLHSSGRTDLKYSYRFVCDEHYYGEGCSVFCRPRDDAFGHFTCGERGEKVCNPGWKGPYCTEPICLPGCDEQHGFCDKPGECKCRVGWQGRYCDECIRYPGCLHGTCQQPWQCNCQEGWGGLFCNQDLNYCTHHKPCKNGATCTNTGQGSYTCSCRPGYTGATCELGIDECDPSPCKNGGSCTDLENSYSCTCPPGFYGKICELSAMTCADGPCFNGGRCSDSPDGGYSCRCPVGYSGFNCEKKIDYCSSSPCSNGAKCVDLGDAYLCRCQAGFSGRHCDDNVDDCASSPCANGGTCRDGVNDFSCTCPPGYTGRNCSAPVSRCEHAPCHNGATCHERGHRYVCECARGYGGPNCQFLLPELPPGPAVVDLTEKLEGQGGPFPWVAVCAGVILVLMLLLGCAAVVVCVRLRLQKHRPPADPCRGETETMNNLANCQREKDISVSIIGATQIKNTNKKADFHGDHSADKNGFKARYPAVDYNLVQDLKGDDTAVRDAHSKRDTKCQPQGSSGEEKGTPTTLRGGEASERKRPDSGCSTSKDTKYQSVYVISEEKDECVIATEV

SEQ ID NO: 4280 - protein, 220 aa, Homo Sapiens
MVSPRMSGLLSQTVILALIFLPQTRPAGVFELQIHSFGPGPGPGAPRSPCSARLPCRLFFRVCLKPGLSEEAAESPCALGAALSARGPVYTEQPGAPAPDLPLPDGLLQVPFRDAWPGTFSFIIETWREELGDQIGGGLCLDLGHALRCRCRAGFAGPRCEHDLDDCAGRACANGGTCVEGGGAHRCSCALGFGGRDCRERADPCAARPCAHGGRCYAHF

SEQ ID NO: 4281 - protein, 618 aa, Homo Sapiens
MVSPRMSGLLSQTVILALIFLPQTRPAGVFELQIHSFGPGPGPGAPRSPCSARLPCRLFFRVCLKPGLSEEAAESPCALGAALSARGPVYTEQPGAPAPDLPLPDGLLQVPFRDAWPGTFSFIIETWREELGDQIGGPAWSLLARVAGRRRLAAGGPWARDIQRAGAWELRFSYRARCEPPAVGTACTRLCRPRSAPSRCGPGLRPCAPLEDECEAPLVCRAGCSPEHGFCEQPGECRCLEGWTGPLCTVPVSTSSCLSPRGPSSATTGCLVPGPGPCDGNPCANGGSCSETPRSFECTCPRGFYGLRCEVSGVTCADGPCFNGGLCVGGADPDSAYICHCPPGFQGSNCEKRVDRCSLQPCRNGGLCLDLGHALRCRCRAGFAGPRCEHDLDDCAGRACANGGTCVEGGGAHRCSCALGFGGRDCRERADPCAARPCAHGGRCYAHFSGLVCACAPGYMGARCEFPVHPDGASALPAAPPGLRPGDPQRYLLPPALGLLVAAGVAGAALLLVHVRRRGHSQDAGSRLLAGTPEPSVHALPDALNNLRTQEGSGDGPSSSVDWNRPEDVDPQGIYVISAPSIYAREVATPLFPPLHTGRAGQRQHLLFPYPSSILSVK

SEQ ID NO: 4282 - protein, 587 aa, Homo Sapiens
MVSPRMSGLLSQTVILALIFLPQTRPAGVFELQIHSFGPGPGPGAPRSPCSARLPCRLFFRVCLKPGLSEEAAESPCALGAALSARGPVYTEQPGAPAPDLPLPDGLLQVPFRDAWPGTFSFIIETWREELGDQIGGPAWSLLARVAGRRRLAAGGPWARDIQRAGAWELRFSYRARCEPPAVGTACTRLCRPRSAPSRCGPGLRPCAPLEDECEAPLVCRAGCSPEHGFCEQPGECRCLEGWTGPLCTVPVSTSSCLSPRGPSSATTGCLVPGPGPCDGNPCANGGSCSETPRSFECTCPRGFYGLRCEVSGVTCADGPCFNGGLCVGGADPDSAYICHCPPGFQGSNCEKRVDRCSLQPCRNGGLCLDLGHALRCRCRAGFAGPRCEHDLDDCAGRACANGGTCVEGGGAHRCSCALGFGGRDCRERADPCAARPCAHGGRCYAHFSGLVCACAPGYMGARCEFPVHPDGASALPAAPPGLRPGDPQRYLLPPALGLLVAAGVAGAALLLVHVRRRGHSQDAGSRLLAGTPEPSVHALPDALNNLRTQEGSGDGPSSSVDWNRPEDVDPQGIYVISAPSIYAREA

SEQ ID NO: 4283 - protein, 1785 aa, Homo Sapiens
MGISTVILEMCLLWGQVLSTGGWIPRTTDYASLIPSEVPLDPTVAEGSPFPSESTLESTVAEGSPISLESTLESTVAEGSLIPSESTLESTVAEGSDSGLALRLVNGDGRCQGRVEILYRGSWGTVCDDSWDTNDANVVCRQLGCGWAMSAPGNAWFGQGSGPIALDDVRCSGHESYLWSCPHNGWLSHNCGHGEDAGVICSAAQPQSTLRPESWPVRISPPVPTEGSESSLALRLVNGGDRCRGRVEVLYRGSWGTVCDDYWDTNDANVVCRQLGCGWAMSAPGNAQFGQGSGPIVLDDVRCSGHESYLWSCPHNGWLTHNCGHSEDAGVICSAPQSRPTPSPDTWPTSHASTAGPESSLALRLVNGGDRCQGRVEVLYRGSWGTVCDDSWDTSDANVVCRQLGCGWATSAPGNARFGQGSGPIVLDDVRCSGYESYLWSCPHNGWLSHNCQHSEDAGVICSAAHSWSTPSPDTLPTITLPASTVGSESSLALRLVNGGDRCQGRVEVLYQGSWGTVCDDSWDTNDANVVCRQLGCGWAMSAPGNARFGQGSGPIVLDDVRCSGHESYLWSCPHNGWLSHNCGHSEDAGVICSASQSRPTPSPDTWPTSHASTAGSESSLALRLVNGGDRCQGRVEVLYRGSWGTVCDDYWDTNDANVVCRQLGCGWAMSAPGNARFGQGSGPIVLDDVRCSGHESYLWSCPHNGWLSHNCGHHEDAGVICSASQSQPTPSPDTWPTSHASTAGSESSLALRLVNGGDRCQGRVEVLYRGSWGTVCDDYWDTNDANVVCRQLGCGWATSAPGNARFGQGSGPIVLDDVRCSGHESYLWSCPHNGWLSHNCGHHEDAGVICSASQSQPTPSPDTWPTSRASTAGSESTLALRLVNGGDRCRGRVEVLYQGSWGTVCDDYWDTNDANVVCRQLGCGWAMSAPGNAQFGQGSGPIVLDDVRCSGHESYLWSCPHNGWLSHNCGHHEDAGVICSAAQSQSTPRPDTWLTTNLPALTVGSESSLALRLVNGGDRCRGRVEVLYRGSWGTVCDDSWDTNDANVVCRQLGCGWAMSAPGNARFGQGSGPIVLDDVRCSGNESYLWSCPHKGWLTHNCGHHEDAGVICSATQINSTTTDWWHPTTTTTARPSSNCGGFLFYASGTFSSPSYPAYYPNNAKCVWEIEVNSGYRINLGFSNLKLEAHHNCSFDYVEIFDGSLNSSLLLGKICNDTRQIFTSSYNRMTIHFRSDISFQNTGFLAWYNSFPSDATLRLVNLNSSYGLCAGRVEIYHGGTWGTVCDDSWTIQEAEVVCRQLGCGRAVSALGNAYFGSGSGPITLDDVECSGTESTLWQCRNRGWFSHNCNHREDAGVICSGNHLSTPAPFLNITRPNTDYSCGGFLSQPSGDFSSPFYPGNYPNNAKCVWDIEVQNNYRVTVIFRDVQLEGGCNYDYIEVFDGPYRSSPLIARVCDGARGSFTSSSNFMSIRFISDHSITRRGFRAEYYSSPSNDSTNLLCLPNHMQASVSRSYLQSLGFSASDLVISTWNGYYECRPQITPNLVIFTIPYSGCGTFKQADNDTIDYSNFLTAAVSGGIIKRRTDLRIHVSCRMLQNTWVDTMYIANDTIHVANNTIQVEEVQYGNFDVNISFYTSSSFLYPVTSRPYYVDLNQDLYVQAEILHSDAVLTLFVDTCVASPYSNDFTSLTYDLIRSGCVRDDTYGPYSSPSLRIARFRFRAFHFLNRFPSVYLRCKMVVCRAYDPSSRCYRGCVLRSKRDVGSYQEKVDVVLGPIQLQTPPRREEEPR

SEQ ID NO: 4284 - protein, 2413 aa, Homo Sapiens
MGISTVILEMCLLWGQVLSTGGWIPRTTDYASLIPSEVPLDPTVAEGSPFPSESTLESTVAEGSPISLESTLESTVAEGSLIPSESTLESTVAEGSDSGLALRLVNGDGRCQGRVEILYRGSWGTVCDDSWDTNDANVVCRQLGCGWAMSAPGNAWFGQGSGPIALDDVRCSGHESYLWSCPHNGWLSHNCGHGEDAGVICSAAQPQSTLRPESWPVRISPPVPTEGSESSLALRLVNGGDRCRGRVEVLYRGSWGTVCDDYWDTNDANVVCRQLGCGWAMSAPGNAQFGQGSGPIVLDDVRCSGHESYLWSCPHNGWLTHNCGHSEDAGVICSAPQSRPTPSPDTWPTSHASTAGPESSLALRLVNGGDRCQGRVEVLYRGSWGTVCDDSWDTSDANVVCRQLGCGWATSAPGNARFGQGSGPIVLDDVRCSGYESYLWSCPHNGWLSHNCQHSEDAGVICSAAHSWSTPSPDTLPTITLPASTVGSESSLALRLVNGGDRCQGRVEVLYRGSWGTVCDDSWDTNDANVVCRQLGCGWAMLAPGNARFGQGSGPIVLDDVRCSGNESYLWSCPHNGWLSHNCGHSEDAGVICSGPESSLALRLVNGGDRCQGRVEVLYRGSWGTVCDDSWDTNDANVVCRQLGCGWATSAPGNARFGQGSGPIVLDDVRCSGHESYLWSCPNNGWLSHNCGHHEDAGVICSAAQSRSTPRPDTLSTITLPPSTVGSESSLTLRLVNGSDRCQGRVEVLYRGSWGTVCDDSWDTNDANVVCRQLGCGWATSAPGNARFGQGSGPIVLDDVRCSGHESYLWSCPHNGWLSHNCGHHEDAGVICSVSQSRPTPSPDTWPTSHASTAGPESSLALRLVNGGDRCQGRVEVLYRGSWGTVCDDSWDTSDANVVCRQLGCGWATSAPGNARFGQGSGPIVLDDVRCSGYESYLWSCPHNGWLSHNCQHSEDAGVICSAAHSWSTPSPDTLPTITLPASTVGSESSLALRLVNGGDRCQGRVEVLYQGSWGTVCDDSWDTNDANVVCRQLGCGWAMSAPGNARFGQGSGPIVLDDVRCSGHESYLWSCPHNGWLSHNCGHSEDAGVICSASQSRPTPSPDTWPTSHASTAGSESSLALRLVNGGDRCQGRVEVLYRGSWGTVCDDYWDTNDANVVCRQLGCGWAMSAPGNARFGQGSGPIVLDDVRCSGHESYLWSCPHNGWLSHNCGHHEDAGVICSASQSQPTPSPDTWPTSHASTAGSESSLALRLVNGGDRCQGRVEVLYRGSWGTVCDDYWDTNDANVVCRQLGCGWATSAPGNARFGQGSGPIVLDDVRCSGHESYLWSCPHNGWLSHNCGHHEDAGVICSASQSQPTPSPDTWPTSHASTAGSESSLALRLVNGGDRCQGRVEVLYRGSWGTVCDDYWDTNDANVVCRQLGCGWATSAPGNARFGQGSGPIVLDDVRCSGHESYLWSCPHNGWLSHNCGHHEDAGVICSASQSQPTPSPDTWPTSRASTAGSESTLALRLVNGGDRCRGRVEVLYQGSWGTVCDDYWDTNDANVVCRQLGCGWAMSAPGNAQFGQGSGPIVLDDVRCSGHESYLWSCPHNGWLSHNCGHHEDAGVICSAAQSQSTPRPDTWLTTNLPALTVGSESSLALRLVNGGDRCRGRVEVLYRGSWGTVCDDSWDTNDANVVCRQLGCGWAMSAPGNARFGQGSGPIVLDDVRCSGNESYLWSCPHKGWLTHNCGHHEDAGVICSATQINSTTTDWWHPTTTTTARPSSNCGGFLFYASGTFSSPSYPAYYPNNAKCVWEIEVNSGYRINLGFSNLKLEAHHNCSFDYVEIFDGSLNSSLLLGKICNDTRQIFTSSYNRMTIHFRSDISFQNTGFLAWYNSFPSDATLRLVNLNSSYGLCAGRVEIYHGGTWGTVCDDSWTIQEAEVVCRQLGCGRAVSALGNAYFGSGSGPITLDDVECSGTESTLWQCRNRGWFSHNCNHREDAGVICSGNHLSTPAPFLNITRPNTDYSCGGFLSQPSGDFSSPFYPGNYPNNAKCVWDIEVQNNYRVTVIFRDVQLEGGCNYDYIEVFDGPYRSSPLIARVCDGARGSFTSSSNFMSIRFISDHSITRRGFRAEYYSSPSNDSTNLLCLPNHMQASVSRSYLQSLGFSASDLVISTWNGYYECRPQITPNLVIFTIPYSGCGTFKQADNDTIDYSNFLTAAVSGGIIKRRTDLRIHVSCRMLQNTWVDTMYIANDTIHVANNTIQVEEVQYGNFDVNISFYTSSSFLYPVTSRPYYVDLNQDLYVQAEILHSDAVLTLFVDTCVASPYSNDFTSLTYDLIRSGCVRDDTYGPYSSPSLRIARFRFRAFHFLNRFPSVYLRCKMVVCRAYDPSSRCYRGCVLRSKRDVGSYQEKVDVVLGPIQLQTPPRREEEPR

SEQ ID NO: 4285 - protein, 2403 aa, Homo Sapiens
MGISTVILEMCLLWGQVLSTGGWIPRTTDYASLIPSEVPLDPTVAEGSPFPSESTLESTVAEGSPISLESTLESTVAEGSLIPSESTLESTVAEGSDSGLALRLVNGDGRCQGRVEILYRGSWGTVCDDSWDTNDANVVCRQLGCGWAMSAPGNAWFGQGSGPIALDDVRCSGHESYLWSCPHNGWLSHNCGHGEDAGVICSAAQPQSTLRPESWPVRISPPVPTEGSESSLALRLVNGGDRCRGRVEVLYRGSWGTVCDDYWDTNDANVVCRQLGCGWAMSAPGNAQFGQGSGPIVLDDVRCSGHESYLWSCPHNGWLTHNCGHSEDAGVICSAPQSRPTPSPDTWPTSHASTAGPESSLALRLVNGGDRCQGRVEVLYRGSWGTVCDDSWDTSDANVVCRQLGCGWATSAPGNARFGQGSGPIVLDDVRCSGYESYLWSCPHNGWLSHNCQHSEDAGVICSDTLPTITLPASTVGSESSLALRLVNGGDRCQGRVEVLYRGSWGTVCDDSWDTNDANVVCRQLGCGWAMLAPGNARFGQGSGPIVLDDVRCSGNESYLWSCPHNGWLSHNCGHSEDAGVICSGPESSLALRLVNGGDRCQGRVEVLYRGSWGTVCDDSWDTNDANVVCRQLGCGWATSAPGNARFGQGSGPIVLDDVRCSGHESYLWSCPNNGWLSHNCGHHEDAGVICSAAQSRSTPRPDTLSTITLPPSTVGSESSLTLRLVNGSDRCQGRVEVLYRGSWGTVCDDSWDTNDANVVCRQLGCGWATSAPGNARFGQGSGPIVLDDVRCSGHESYLWSCPHNGWLSHNCGHHEDAGVICSVSQSRPTPSPDTWPTSHASTAGPESSLALRLVNGGDRCQGRVEVLYRGSWGTVCDDSWDTSDANVVCRQLGCGWATSAPGNARFGQGSGPIVLDDVRCSGYESYLWSCPHNGWLSHNCQHSEDAGVICSAAHSWSTPSPDTLPTITLPASTVGSESSLALRLVNGGDRCQGRVEVLYQGSWGTVCDDSWDTNDANVVCRQLGCGWAMSAPGNARFGQGSGPIVLDDVRCSGHESYLWSCPHNGWLSHNCGHSEDAGVICSASQSRPTPSPDTWPTSHASTAGSESSLALRLVNGGDRCQGRVEVLYRGSWGTVCDDYWDTNDANVVCRQLGCGWAMSAPGNARFGQGSGPIVLDDVRCSGHESYLWSCPHNGWLSHNCGHHEDAGVICSASQSQPTPSPDTWPTSHASTAGSESSLALRLVNGGDRCQGRVEVLYRGSWGTVCDDYWDTNDANVVCRQLGCGWATSAPGNARFGQGSGPIVLDDVRCSGHESYLWSCPHNGWLSHNCGHHEDAGVICSASQSQPTPSPDTWPTSHASTAGSESSLALRLVNGGDRCQGRVEVLYRGSWGTVCDDYWDTNDANVVCRQLGCGWATSAPGNARFGQGSGPIVLDDVRCSGHESYLWSCPHNGWLSHNCGHHEDAGVICSASQSQPTPSPDTWPTSRASTAGSESTLALRLVNGGDRCRGRVEVLYQGSWGTVCDDYWDTNDANVVCRQLGCGWAMSAPGNAQFGQGSGPIVLDDVRCSGHESYLWSCPHNGWLSHNCGHHEDAGVICSAAQSQSTPRPDTWLTTNLPALTVGSESSLALRLVNGGDRCRGRVEVLYRGSWGTVCDDSWDTNDANVVCRQLGCGWAMSAPGNARFGQGSGPIVLDDVRCSGNESYLWSCPHKGWLTHNCGHHEDAGVICSATQINSTTTDWWHPTTTTTARPSSNCGGFLFYASGTFSSPSYPAYYPNNAKCVWEIEVNSGYRINLGFSNLKLEAHHNCSFDYVEIFDGSLNSSLLLGKICNDTRQIFTSSYNRMTIHFRSDISFQNTGFLAWYNSFPSDATLRLVNLNSSYGLCAGRVEIYHGGTWGTVCDDSWTIQEAEVVCRQLGCGRAVSALGNAYFGSGSGPITLDDVECSGTESTLWQCRNRGWFSHNCNHREDAGVICSGNHLSTPAPFLNITRPNTDYSCGGFLSQPSGDFSSPFYPGNYPNNAKCVWDIEVQNNYRVTVIFRDVQLEGGCNYDYIEVFDGPYRSSPLIARVCDGARGSFTSSSNFMSIRFISDHSITRRGFRAEYYSSPSNDSTNLLCLPNHMQASVSRSYLQSLGFSASDLVISTWNGYYECRPQITPNLVIFTIPYSGCGTFKQADNDTIDYSNFLTAAVSGGIIKRRTDLRIHVSCRMLQNTWVDTMYIANDTIHVANNTIQVEEVQYGNFDVNISFYTSSSFLYPVTSRPYYVDLNQDLYVQAEILHSDAVLTLFVDTCVASPYSNDFTSLTYDLIRSGCVRDDTYGPYSSPSLRIARFRFRAFHFLNRFPSVYLRCKMVVCRAYDPSSRCYRGCVLRSKRDVGSYQEKVDVVLGPIQLQTPPRREEEPR

SEQ ID NO: 4286 - protein, 2542 aa, Homo Sapiens
MGISTVILEMCLLWGQVLSTGGWIPRTTDYASLIPSEVPLDPTVAEGSPFPSESTLESTVAEGSPISLESTLESTVAEGSLIPSESTLESTVAEGSDSGLALRLVNGDGRCQGRVEILYRGSWGTVCDDSWDTNDANVVCRQLGCGWAMSAPGNAWFGQGSGPIALDDVRCSGHESYLWSCPHNGWLSHNCGHGEDAGVICSAAQPQSTLRPESWPVRISPPVPTEGSESSLALRLVNGGDRCRGRVEVLYRGSWGTVCDDYWDTNDANVVCRQLGCGWAMSAPGNAQFGQGSGPIVLDDVRCSGHESYLWSCPHNGWLTHNCGHSEDAGVICSAPQSRPTPSPDTWPTSHASTAGPESSLALRLVNGGDRCQGRVEVLYRGSWGTVCDDSWDTSDANVVCRQLGCGWATSAPGNARFGQGSGPIVLDDVRCSGYESYLWSCPHNGWLSHNCQHSEDAGVICSAAHSWSTPSPDTLPTITLPASTVGSESSLALRLVNGGDRCQGRVEVLYRGSWGTVCDDSWDTNDANVVCRQLGCGWAMLAPGNARFGQGSGPIVLDDVRCSGNESYLWSCPHNGWLSHNCGHSEDAGVICSGPESSLALRLVNGGDRCQGRVEVLYRGSWGTVCDDSWDTNDANVVCRQLGCGWATSAPGNARFGQGSGPIVLDDVRCSGHESYLWSCPNNGWLSHNCGHHEDAGVICSAAQSRSTPRPDTLSTITLPPSTVGSESSLTLRLVNGSDRCQGRVEVLYRGSWGTVCDDSWDTNDANVVCRQLGCGWATSAPGNARFGQGSGPIVLDDVRCSGHESYLWSCPHNGWLSHNCGHHEDAGVICSVSQSRPTPSPDTWPTSHASTAGPESSLALRLVNGGDRCQGRVEVLYRGSWGTVCDDSWDTSDANVVCRQLGCGWATSAPGNARFGQGSGPIVLDDVRCSGYESYLWSCPHNGWLSHNCQHSEDAGVICSAAHSWSTPSPDTLPTITLPASTVGSESSLALRLVNGGDRCQGRVEVLYQGSWGTVCDDSWDTNDANVVCRQLGCGWAMSAPGNARFGQGSGPIVLDDVRCSGHESYLWSCPHNGWLSHNCGHSEDAGVICSASQSRPTPSPDTWPTSHASTAGSESSLALRLVNGGDRCQGRVEVLYRGSWGTVCDDYWDTNDANVVCRQLGCGWAMSAPGNARFGQGSGPIVLDDVRCSGHESYLWSCPHNGWLSHNCGHHEDAGVICSASQSQPTPSPDTWPTSHASTAGSESSLALRLVNGGDRCQGRVEVLYRGSWGTVCDDYWDTNDANVVCRQLGCGWATSAPGNARFGQGSGPIVLDDVRCSGHESYLWSCPHNGWLSHNCGHHEDAGVICSASQSQPTPSPDTWPTSHASTAGSESSLALRLVNGGDRCQGRVEVLYRGSWGTVCDDYWDTNDANVVCRQLGCGWATSAPGNARFGQGSGPIVLDDVRCSGHESYLWSCPHNGWLSHNCGHHEDAGVICSASQSQPTPSPDTWPTSHASTAGSESSLALRLVNGGDRCQGRVEVLYRGSWGTVCDDYWDTNDANVVCRQLGCGWATSAPGNARFGQGSGPIVLDDVRCSGHESYLWSCPHNGWLSHNCGHHEDAGVICSASQSQPTPSPDTWPTSRASTAGSESTLALRLVNGGDRCRGRVEVLYQGSWGTVCDDYWDTNDANVVCRQLGCGWAMSAPGNAQFGQGSGPIVLDDVRCSGHESYLWSCPHNGWLSHNCGHHEDAGVICSAAQSQSTPRPDTWLTTNLPALTVGSESSLALRLVNGGDRCRGRVEVLYRGSWGTVCDDSWDTNDANVVCRQLGCGWAMSAPGNARFGQGSGPIVLDDVRCSGNESYLWSCPHKGWLTHNCGHHEDAGVICSATQINSTTTDWWHPTTTTTARPSSNCGGFLFYASGTFSSPSYPAYYPNNAKCVWEIEVNSGYRINLGFSNLKLEAHHNCSFDYVEIFDGSLNSSLLLGKICNDTRQIFTSSYNRMTIHFRSDISFQNTGFLAWYNSFPSDATLRLVNLNSSYGLCAGRVEIYHGGTWGTVCDDSWTIQEAEVVCRQLGCGRAVSALGNAYFGSGSGPITLDDVECSGTESTLWQCRNRGWFSHNCNHREDAGVICSGNHLSTPAPFLNITRPNTDYSCGGFLSQPSGDFSSPFYPGNYPNNAKCVWDIEVQNNYRVTVIFRDVQLEGGCNYDYIEVFDGPYRSSPLIARVCDGARGSFTSSSNFMSIRFISDHSITRRGFRAEYYSSPSNDSTNLLCLPNHMQASVSRSYLQSLGFSASDLVISTWNGYYECRPQITPNLVIFTIPYSGCGTFKQADNDTIDYSNFLTAAVSGGIIKRRTDLRIHVSCRMLQNTWVDTMYIANDTIHVANNTIQVEEVQYGNFDVNISFYTSSSFLYPVTSRPYYVDLNQDLYVQAEILHSDAVLTLFVDTCVASPYSNDFTSLTYDLIRSGCVRDDTYGPYSSPSLRIARFRFRAFHFLNRFPSVYLRCKMVVCRAYDPSSRCYRGCVLRSKRDVGSYQEKVDVVLGPIQLQTPPRREEEPR

SEQ ID NO: 4287 - protein, 1785 aa, Homo Sapiens; identical to SEQ ID NO: 4283

SEQ ID NO: 4288 - protein, 2403 aa, Homo Sapiens; identical to SEQ ID NO: 4285

SEQ ID NO: 4289 - protein, 2413 aa, Homo Sapiens; identical to SEQ ID NO: 4284

SEQ ID NO: 4290 - protein, 33 aa, Homo Sapiens
MFNFDTFWKNFKSKLGFINWDAINKDQRSSRIP

SEQ ID NO: 4291 - protein, 33 aa, Homo Sapiens; identical to SEQ ID NO: 4290

SEQ ID NO: 4292 - protein, 95 aa, Homo Sapiens
MFNFDTFWKNFKSKLGFINWDAINKNQVPPPSTRALLYFSRLWEDFKQNTPFLNWKAIIEGADASSLQKRAGRDDQNYNYNQHAYPTAYGGKYSV

SEQ ID NO: 4293 - protein, 123 aa, Homo Sapiens
MFNFDTFWKNFKSKLGFINWDAINKNQVPPPSTRALLYFSRLWEDFKQNTPFLNWKAIIEGADASSLQKRAGRDDQNYNYNQHAYPTAYGGKYSVKTPAKGGVSPSSSASRVQPGLLQWVKFW

SEQ ID NO: 4294 - protein, 123 aa, Homo Sapiens; identical to SEQ ID NO: 4293

SEQ ID NO: 4295 - protein, 476 aa, Homo Sapiens
MKFQGPLACLLLALCLGSGEAGPLQSGEESTGTNIGEALGHGLGDALSEGVGKAIGKEAGGAAGSKVSEALGQGTREAVGTGVRQVPGFGVADALGNRVGEAAHALGNTGHEIGRQAEDVIRHGADAVRGSWQGVPGHNGAWETSGGHGIFGSQGGLGGQGQGNPGGLGTPWVHGYPGNSAGSFGMNPQGAPWGQGGNGGPPNFGTNTQGAVAQPGYGSVRASNQNEGCTNPPPSGSGGGSSNSGGGSGSQSGSSGSGSNGDNNNGSSSGGSSSGSSSGGSSGGSSGGSSGNSGGSRGDSGSESSWGSSTGSSSGNHGGSGGGNGHKPGCEKPGNEARGSGESGIQNSETSPGMFNFDTFWKNFKSKLGFINWDAINKNQVPPPSTRALLYFSRLWEDFKQNTPFLNWKAIIEGADASSLQKRAGRDDQNYNYNQHAYPTAYGGKYSVKTPAKGGVSPSSSASRVQPGLLQWVKFW

SEQ ID NO: 4296 - protein, 386 aa, Homo Sapiens
MKFQGPLACLLLALCLGSGEAGPLQSGEESTGTNIGEALGHGLGDALSEGVGKAIGKEAGGAAGSKVSEALGQGTREAVGTGVRQVPGFGVADALGNRVGEAAHALGNTGHEIGRQAEDVIRHGADAVRGSWQGVPGHNGAWETSGGHGIFGSQGGLGGQGQGNPGGLGTPWVHGYPGNSAGSFGMNPQGAPWGQGGNGGPPNFGTNTQGAVAQPGYGSVRASNQNEGCTNPPPSGSGGGSSNSGGGSGSQSGSSGSGSNGDNNNGSSSGGSSSGSSSGGSSGGSSGGSSGNSGGSRGDSGSESSWGSSTGSSSGNHGGSGGGNGHKPGCEKPGNEARGSGESGIQNSETSPGMFNFDTFWKNFKSKLGFINWDAINKDQRSSRIP

SEQ ID NO: 4297 - protein, 436 aa, Homo Sapiens
MKFQGPLACLLLALCLGSGEAGPLQSGEESTGTNIGEALGHGLGDALSEGVGKAIGKEAGGAAGSKVSEALGQGTREAVGTGVRQVPGFGVADALGNRVGEAAHALGNTGHEIGRQAEDVIRHGADAVRGSWQGVPGHNGAWETSGGHGIFGSQGGLGGQGQGNPGGLGTPWVHGYPGNSAGSFGMNPQGAPWGQGGNGGPPNFGTNTQGAVAQPGYGSVRASNQNEGCTNPPPSGSGGGSSNSGGGSGSQSGSSGSGSNGDNNNGSSSGGSSSGSSSGGSSGGSSGGSSGNSGGSRGDSGSESSWGSSTGSSSGNHGGSGGGNGHKPGCEKPGNEARGSGESGIQGFRGQGVSSNMREISKEGNRLLGGSGDNYRGQGSSWGSGGGDAVGGVNTVNSETSPGMFNFDTFWKNFKSKLGFINWDAINKDQRSSRIP

SEQ ID NO: 4298 - protein, 398 aa, Homo Sapiens
MKFQGPLACLLLALCLGSGEAGPLQSGEESTGTNIGEALGHGLGDALSEGVGKAIGKEAGGAAGSKVSEALGQGTREAVGTGVRQVPGFGVADALGNRVGEAAHALGNTGHEIGRQAEDVIRHGADAVRGSWQGVPGHNGAWETSGGHGIFGSQGGLGGQGQGNPGGLGTPWVHGYPGNSAGSFGMNPQGAPWGQGGNGGPPNFGTNTQGAVAQPGYGSVRASNQNEGCTNPPPSGSGGGSSNSGGGSGSQSGSSGSGSNGDNNNGSSSGGSSSGSSSGGSSGGSSGGSSGNSGGSRGDSGSESSWGSSTGSSSGNHGGSGGGNGHKPGCEKPGNEARGSGESGIQGFRGQGVSSNMRNSETSPGMFNFDTFWKNFKSKLGFINWDAINKDQRSSRIP

SEQ ID NO: 4299 - protein, 369 aa, Homo Sapiens
MKFQGPLACLLLALCLGSGEAGPLQSGEESTGTNIGEALGHGLGDALSEGVGKAIGKEAGGAAGSKVSEALGQGTREAVGTGVRQVPGFGVADALGNRVGEAAHALGNTGHEIGRQAEDVIRHGADAVRGSWQGVPGHNGAWETSGGHGIFGSQGGLGGQGQGNPGGLGTPWVHGYPGNSAGSFGMNPQGAPWGQGGNGGPPNFGTNTQGAVAQPGYGSVRASNQNEGCTNPPPSGSGGGSSNSGGGSGSQSGSSGSGSNGDNNNGSSSGGSSSGSSSGGSSGGSSGGSSGNSGGSRGDSGSESSWGSSTGSSSGNHGGSGGGNGHKPGNSETSPGMFNFDTFWKNFKSKLGFINWDAINKDQRSSRIP

SEQ ID NO: 4300 - protein, 449 aa, Homo Sapiens
MKFQGPLACLLLALCLGSGEAGPLQSGEESTGTNIGEALGHGLGDALSEGVGKAIGKEAGGAAGSKVSEALGQGTREAVGTGVRQVPGFGVADALGNRVGEAAHALGNTGHEIGRQAEDVIRHGADAVRGSWQGVPGHNGAWETSGGHGIFGSQGGLGGQGQGNPGGLGTPWVHGYPGNSAGSFGMNPQGAPWGQGGNGGPPNFGTNTQGAVAQPGYGSVRASNQNEGCTNPPPSGSGGGSSNSGGSSTGSSSGNHGGSGGGNGHKPGCEKPGNEARGSGESGIQGQGSSWGSGGGDAVGGVNTVNSETSPGMFNFDTFWKNFKSKLGFINWDAINKNQVPPPSTRALLYFSRLWEDFKQNTPFLNWKAIIEGADASSLQKRAGRDDQPGAGWQEVAAVTSKNYNYNQHAYPTAYGGKYSVKTPAKGGVSPSSSASRVQPGLLQWVKFW

SEQ ID NO: 4301 - protein, 465 aa, Homo Sapiens
MKFQGPLACLLLALCLGSGEAGPLQSGEESTGTNIGEALGHGLGDALSEGVGKAIGKEAGGAAGSKVSEALGQGTREAVGTGVRQVPGFGVADALGNRVGEAAHALGNTGHEIGRQAEDVIRHGADAVRGSWQGVPGHNGAWETSGGHGIFGSQGGLGGQGQGNPGGLGTPWVHGYPGNSAGSFGMNPQGAPWGQGGNGGPPNFGTNTQGAVAQPGYGSVRASNQNEGCTNPPPSGSGGGSSNSGGSSTGSSSGNHGGSGGGNGHKPGCEKPGNEARGSGESGIQGFRGQGVSSNMREISKEGNRLLGGSGDNYRGQGSSWGSGGGDAVGGVNTVNSETSPGMFNFDTFWKNFKSKLGFINWDAINKNQVPPPSTRALLYFSRLWEDFKQNTPFLNWKAIIEGADASSLQKRAGRDDQNYNYNQHAYPTAYGGKYSVKTPAKGGVSPSSSASRVQPGLLQWVKFW

SEQ ID NO: 4302 - protein, 36 aa, Homo Sapiens
MLGITSCSDQQAKEGEGIQHRLLLRQPRWERRRKWT

SEQ ID NO: 4303 - protein, 36 aa, Homo Sapiens; identical to SEQ ID NO: 4302

SEQ ID NO: 4304 - protein, 36 aa, Homo Sapiens; identical to SEQ ID NO: 4302

SEQ ID NO: 4305 - protein, 36 aa, Homo Sapiens; identical to SEQ ID NO: 4302

SEQ ID NO: 4306 - protein, 36 aa, Homo Sapiens; identical to SEQ ID NO: 4302

SEQ ID NO: 4307 - protein, 36 aa, Homo Sapiens; identical to SEQ ID NO: 4302

SEQ ID NO: 4308 - protein, 36 aa, Homo Sapiens; identical to SEQ ID NO: 4302

SEQ ID NO: 4309 - protein, 36 aa, Homo Sapiens; identical to SEQ ID NO: 4302

SEQ ID NO: 4310 - protein, 36 aa, Homo Sapiens; identical to SEQ ID NO: 4302

SEQ ID NO: 4311 - protein, 36 aa, Homo Sapiens; identical to SEQ ID NO: 4302

SEQ ID NO: 4312 - protein, 36 aa, Homo Sapiens; identical to SEQ ID NO: 4302

SEQ ID NO: 4313 - protein, 36 aa, Homo Sapiens; identical to SEQ ID NO: 4302

SEQ ID NO: 4314 - protein, 36 aa, Homo Sapiens; identical to SEQ ID NO: 4302

SEQ ID NO: 4315 - protein, 36 aa, Homo Sapiens; identical to SEQ ID NO: 4302

SEQ ID NO: 4316 - protein, 36 aa, Homo Sapiens; identical to SEQ ID NO: 4302

SEQ ID NO: 4317 - protein, 36 aa, Homo Sapiens; identical to SEQ ID NO: 4302

SEQ ID NO: 4318 - protein, 36 aa, Homo Sapiens; identical to SEQ ID NO: 4302

SEQ ID NO: 4319 - protein, 253 aa, Homo Sapiens
MLGITSCSDQQAKEGEGLEGSSTGSSSGNHGGSGGGNGHKPGCEKPGNEARGSGESGIQGFRGQGVSSNMREISKEGNRLLGGSGDNYRGQGSSWGSGGGDAVGGVNTVNSETSPGMFNFDTFWKNFKSKLGFINWDAINKNQVPPPSTRALLYFSRLWEDFKQNTPFLNWKAIIEGADASSLQKRAGRDDQPGAGWQEVAAVTSKNYNYNQHAYPTAYGGKYSVKTPAKGGVSPSSSASRVQPGLLQWVKFW

SEQ ID NO: 4320 - protein, 131 aa, Homo Sapiens
MLGITSCSDQQAKEGEGLEGSSTGSSSGNHGGSGGGNGHKPGCEKPGNEARGSGESGIQGFRGQGVSSNMRGQGSSWGSGGGDAVGGVNTVNSETSPGMFNFDTFWKNFKSKLGFINWDAINKDQRSSRIP

SEQ ID NO: 4321 - protein, 201 aa, Homo Sapiens
MLGITSCSDQQAKEGEGLEGSSTGSSSGNHGGSGGGNGHKPGCEKPGNEARGSGESGIQGFRGQGVSSNMRNSETSPGMFNFDTFWKNFKSKLGFINWDAINKNQVPPPSTRALLYFSRLWEDFKQNTPFLNWKAIIEGADASSLQKRAGRDDQNYNYNQHAYPTAYGGKYSVKTPAKGGVSPSSSASRVQPGLLQWVKFW

SEQ ID NO: 4322 - protein, 116 aa, Homo Sapiens
MLGITSCSDQQAKEGEGLEGSSTGSSSGNHGGSGGGNGHKPGCEKPGNEARGSGESGIQGQGSSWGSGGGDAVGGVNTVNSETSPGMFNFDTFWKNFKSKLGFINWDAINKDQRSS

SEQ ID NO: 4323 - protein, 184 aa, Homo Sapiens
MLGITSCSDQQAKEGEGLEGSSTGSSSGNHGGSGGGNGHKPGCEKPGNEARGSGESGIQNSETSPGMFNFDTFWKNFKSKLGFINWDAINKDFKQNTPFLNWKAIIEGADASSLQKRAGRDDQPGAGWQEVAAVTSKNYNYNQHAYPTAYGGKYSVKTPAKGGVSPSSSASRVQPGLLQWVKFW

SEQ ID NO: 4324 - protein, 99 aa, Homo Sapiens
MLGITSCSDQQAKEGEGLEGSSTGSSSGNHGGSGGGNGHKPGCEKPGNEARGSGESGIQNSETSPGMFNFDTFWKNFKSKLGFINWDAINKDQRSSRIP

SEQ ID NO: 4325 - protein, 189 aa, Homo Sapiens
MLGITSCSDQQAKEGEGLEGSSTGSSSGNHGGSGGGNGHKPGCEKPGNEARGSGESGIQNSETSPGMFNFDTFWKNFKSKLGFINWDAINKNQVPPPSTRALLYFSRLWEDFKQNTPFLNWKAIIEGADASSLQKRAGRDDQNYNYNQHAYPTAYGGKYSVKTPAKGGVSPSSSASRVQPGLLQWVKFW

SEQ ID NO: 4326 - protein, 203 aa, Homo Sapiens
MLGITSCSDQQAKEGEGLEGSSTGSSSGNHGGSGGGNGHKPGCEKPGNEARGSGESGIQNSETSPGMFNFDTFWKNFKSKLGFINWDAINKNQVPPPSTRALLYFSRLWEDFKQNTPFLNWKAIIEGADASSLQKRAGRDDQPGAGWQEVAAVTSKNYNYNQHAYPTAYGGKYSVKTPAKGGVSPSSSASRVQPGLLQWVKFW

SEQ ID NO: 4327 - protein, 203 aa, Homo Sapiens; identical to SEQ ID NO: 4326

SEQ ID NO: 4328 - protein, 82 aa, Homo Sapiens
MLGITSCSDQQAKEGEGLEGSSTGSSSGNHGGSGGGNGHKPGNSETSPGMFNFDTFWKNFKSKLGFINWDAINKDQRSSRIP

SEQ ID NO: 4329 - protein, 172 aa, Homo Sapiens
MLGITSCSDQQAKEGEGLEGSSTGSSSGNHGGSGGGNGHKPGNSETSPGMFNFDTFWKNFKSKLGFINWDAINKNQVPPPSTRALLYFSRLWEDFKQNTPFLNWKAIIEGADASSLQKRAGRDDQNYNYNQHAYPTAYGGKYSVKTPAKGGVSPSSSASRVQPGLLQWVKFW

SEQ ID NO: 4330 - protein, 90 aa, Homo Sapiens
MNMKPATASALLLLLLGLAWTQGSHGWGADASSLQKRAGRDDQNYNYNQHAYPTAYGGKYSVKTPAKGGVSPSSSASRVQPGLLQWVKFW

SEQ ID NO: 4331 - protein, 36 aa, Homo Sapiens
SGNHGGSGGGNGHKPGISRLWLTKWVLLSSHISLVP

SEQ ID NO: 4332 - protein, 152 aa, Homo Sapiens
SSTGSSSGNHGGSGGGNGHKPGNSETSPGMFNFDTFWKNFKSKLGFINWDAINKNQVPPPSTRALLYFSRLWEDFKQNTPFLNWKAIIEGADASSLQKRAGRDDQNYNYNQHAYPTAYGGKYSVKTPAKGGVSPSSSASRVQPGLLQWVKFW

SEQ ID NO: 4333 - protein, 74 aa, Homo Sapiens
  misc_feature (1)..(1): Xaa can be any naturally occurring amino acid
XALLLLLLGLAWTQGSHGWGADASSLQKRAGRDDQNYNYNQHAYPTAYGGKYSVKTPAKASRVQPGLLQWVKFW

SEQ ID NO: 4334 - protein, 201 aa, Homo Sapiens
  misc_feature (1)..(1): Xaa can be any naturally occurring amino acid
XGGGNGHKPGCEKPGNEARGSGESGIQGFRGQGVSSNMREISKEGNRLLGGSGDNYRNSETSPGMFNFDTFWKNFKSKLGFINWDAINKNQVPPPSTRALLYFSRLWEDFKQNTPFLNWKAIIEGADASSLQKRAGRDDQPGAGWQEVAAVTSKNYNYNQHAYPTAYGGKYSVKTPAKGGVSPSSSASRVQPGLLQWVKFW

SEQ ID NO: 4335 - protein, 109 aa, Homo Sapiens
  misc_feature (1)..(1): Xaa can be any naturally occurring amino acid
XPATASALLLLLLGLAWTQGSHGWVGTAGCTGCGRVITAETCRQRRSELQLQPACVSHCLWWEVLSQDPCKGGSLTFFLGFPGATWPAAVGEVLVGNFLQPPPRPRKAL

SEQ ID NO: 4336 - protein, 96 aa, Homo Sapiens
  misc_feature (1)..(1): Xaa can be any naturally occurring amino acid
XPPPSTRALLYFSRLWEDFKQNTPFLNWKAIIEGADASSLQKRAGRDDQNYNYNQHAYPTAYGGKYSVKTPAKGGVSPSSSASRVQPGLLQWVKFW

SEQ ID NO: 4337 - protein, 497 aa, Homo Sapiens
MKISILLMFLWGLSCALPVTRYQNNESEDSEEWKGHLAQAPTPPLANEDPSDSTQSEEGLGSDDHQYIYRLAGGFSRSTGKGGDDKDDDEDDSGDDTFGDDDSGPGPKDRQEGGNSRLGSDEDSDDTIQASEESAPQGQDSAQDTTSESRELDNEDRVDSKPEGGDSTQESESEEHWVGGGSDGESSHGDGSELDDEGMQSDDPESIRSERGNSRMNSAGMKSKESGENSEQANTQDSGGSQLLEHPSRKIFRKSRISEEDDRSELDDNNTMEEVKSDSTENSNSRDTGLSQPRRDSKGDSQEDSKENLSQEESQNVDGPSSESSQEANLSSQENSSESQEEVVSESRGDNPDPTTSYVEDQEDSDSSEEDSSHTLSHSKSESREEQADSESSESLNFSEESPESPEDENSSSQEGLQSHSSSAESQSEESHSEEDDSDSQDSSRSKEDSNSTESKSSSEEDGQLKNIEIESRKLTVDAYHNKPIGDQDDNDCQDGY

SEQ ID NO: 4338 - protein, 513 aa, Homo Sapiens
MKISILLMFLWGLSCALPVTRYQNNESEDSEEWKGHLAQAPTPPLESSESSEGSKVSSEEQANEDPSDSTQSEEGLGSDDHQYIYRLAGGFSRSTGKGGDDKDDDEDDSGDDTFGDDDSGPGPKDRQEGGNSRLGSDEDSDDTIQASEESAPQGQDSAQDTTSESRELDNEDRVDSKPEGGDSTQESESEEHWVGGGSDGESSHGDGSELDDEGMQSDDPESIRSERGNSRMNSAGMKSKESGENSEQANTQDSGGSQLLEHPSRKIFRKSRISEEDDRSELDDNNTMEEVKSDSTENSNSRDTGLSQPRRDSKGDSQEDSKENLSQEESQNVDGPSSESSQEANLSSQENSSESQEEVVSESRGDNPDPTTSYVEDQEDSDSSEEDSSHTLSHSKSESREEQADSESSESLNFSEESPESPEDENSSSQEGLQSHSSSAESQSEESHSEEDDSDSQDSSRSKEDSNSTESKSSSEEDGQLKNIEIESRKLTVDAYHNKPIGDQDDNDCQDGY

SEQ ID NO: 4339 - protein, 542 aa, Homo Sapiens
MELRSELPSVPGAATAAAATATGPPVASVASVAAAAAAAASLPVSVAGGLLRGPPLLLRAAEKYPRTPKCARCRNHGVVSALKGHKRYCRWKDCLCAKCTLIAERQRVMAAQVALRRQQAQEENEARELQLLYGTAEGLALAAANGIIPPRPAYEVFGSVCAADGGGPGAGAPAGTGGGAAGAGGSEAKLQKFDLFPKTLLQAGRPGSPLPPPVKPLSPDGADSGPGTSSPEVRPGSGSENGDGESFSGSPLARASKEAGGSCPGSAGPGGGGEEDSPGSASPLGSESGSEADKEEGEAAPAPGLGGGSGPRQRTPLDILTRVFPGHRRGVLELVLQGCGGDVVQAIEQVLNHHRGGLAAGLGPAAPPDKAAVGAAAAADDAWPSRVDAAAAAAAAAGGPGLPAPLQAGPAAPPHHRPLLAGAMAPGALGSLSSRSAFSPLQPNASHFGADAGAYPLGAPLGLSPLRLAYSAAAAHSRGLAFMAPYSTAGLVPTLGFRPPMDYAFSDLMRDRSAAAAAAVHKEPTYGGGLYGPMVNGAPEKQ

SEQ ID NO: 4340 - protein, 542 aa, Homo Sapiens; identical to SEQ ID NO: 4339

SEQ ID NO: 4341 - protein, 855 aa, Homo Sapiens
MAALGVAEAVAAPHPAEGAETAEAVELSRALSRLLPGLEADSKPGRRRALEALRRALEEPGPAADPTAFQGPWARLLLPRLLRCLSDPAEGCRALAVHLLDLGLRRAARPRDALPRLLPALAARLAGPVPARRPPEACEELRLALVQLLGLAVDLCGAALAPHLDDALRALRCSLLDPFAAVRRESCSCAAALAQATPDHFHMQSESLIGPLMQTISHQHWKVRVAAIEATGAVIHFGNGKSVDDVLSHFAQRLFDDVPQVRRAVASVVGGWLLCLRDRYSFFHKLIPLLLSSLNDEVPEVRQLAASLWEDVGLQWQKENEEDLKDKLDFAPPTPPHYPPHERRPVLGCRELVFRNLSKILPALCHDITDWVVGTRVKSAQLLPVLLLHAEDHATQHLEVVLRTLFQACTDEEAAVVQSCTRSAELVGTFVSPEVFLKLILSTLKKTPSASGLLVLASAMRGCPREALQPHLAAIATELAQAHICQASENDLYLERLLLCVQALVSVCHEDCGVASLQLLDVLLTIVALAGATGLRDKAQETMDSLAMVEGVSSCQDLYRKHIGPLLERVTASHLDWTAHSPELLQFSVIVAQSGPALGEALPHVVPTLRACLQPSQDPQMRLKLFSILSTVLLRATDTINSQGQFPSYLETVTKDILAPNLQWHAGRTAAAIRTAAVSCLWALTSSEVLSAEQIRDVQETLMPQVLTTLEEDSKMTRLISCRIINTFLKTSGGMTDPEKLIRIYPELLKRLDDVSNDVRMAAASTLVTWLQCVKGANAKSYYQSSVQYLYRELLVHLDDPERAIQDAILEVLKEGSGLFPDLLVRETEAVIHKHRSATYCEQLLQHVQAVPATQ

SEQ ID NO: 4342 - protein, 280 aa, Homo Sapiens
MTGGAREKAHIARSPATAQGPALGEALPHVVPTLRACLQPSQDPQMRLKLFSILSTVLLRATDTINSQGQFPSYLETVTKDILAPNLQWHAGRTAAAIRTAAVSCLWALTSSEVLSAEQIRDVQETLMPQVLTTLEEDSKMTRLISCRIINTFLKTSGGMTDPEKLIRIYPELLKRLDDVSNDVRMAAASTLVTWLQCVKGANAKSYYQSSVQYLYRELLVHLDDPERAIQDAILEVLKEGSGLFPDLLVRETEAVIHKHRSATYCEQLLQHVQAVPATQ

SEQ ID NO: 4343 - protein, 196 aa, Homo Sapiens
  misc_feature (1)..(1): Xaa can be any naturally occurring amino acid
XLCARCAAPCSTPSPPCAARAAAAPPPWRRPRPVRRAVASVVGGWLLCLRDRYSFFHKLIPLLLSSLNDEVPEVRQLAASLWEDVGLQWQKENEEDLKDKLDFAPPTPPHYPPHERRPVLGCRELVFRNLSKILPALCHDITDWVVGTRVKSAQLLPVLLLHAEDHATQHLEVVLRTLFQACTDEEAAVVQSCTRS

SEQ ID NO: 4344 - protein, 657 aa, Homo Sapiens
  misc_feature (1)..(1): Xaa can be any naturally occurring amino acid
XSPPCAARAAAAPPPWRRPRPHWKVRVAAIEATGAVIHFGNGKSVDDVLSHFAQRLFDDVPQVRRAVASVVGGWLLCLRDRYSFFHKLIPLLLSSLNDEVPEVRQLAASLWEDVGLQWQKENEEDLKDKLDFAPPTPPHYPPHERRPVLGCRELVFRNLSKILPALCHDITDWVVGTRVKSAQLLPVLLLHAEDHATQHLEVVLRTLFQACTDEEAAVVQSCTRSAELVGTFVSPEVFLKLILSTLKKTPSASGLLVLASAMRGCPREALQPHLAAIATELAQAHICQASENDLYLERLLLCVQALVSVCHEDCGVASLQLLDVLLTIVALAGATGLRDKAQETMDSLAMVEGVSSCQDLYRKHIGPLLERVTASHLDWTAHSPELLQFSVIVAQSGPALGEALPHVVPTLRACLQPSQDPQMRLKLFSILSTVLLRATDTINSQGQFPSYLETVTKDILAPNLQWHAGRTAAAIRTAAVSCLWALTSSEVLSAEQIRDVQETLMPQVLTTLEEDSKMTRLISCRIINTFLKTSGGMTDPEKLIRIYPELLKRLDDVSNDVRMAAASTLVTWLQCVKGANAKSYYQSSVQYLYRELLVHLDDPERAIQDAILEVLKEGSGLFPDLLVRETEAVIHKHRSATYCEQLLQHVQAVPATQ

SEQ ID NO: 4345 - protein, 68 aa, Homo Sapiens
AEGEGLVLPKKIRVRSAVEQWLVNVEKSMFDVLKKFLSQGIEDWNCQMFSQWVLSHPGQVVLTVTFAI

SEQ ID NO: 4346 - protein, 130 aa, Homo Sapiens
DYLEVKRLIFPRFYFLSNAELLDILADSRNPESVQPHLVKCFENIKQLLIWKQDIGPPAVKMLISAEGEGLVLPKYDKCYKLFRFCTTSLFKISALKFLIYYKSALSKLFLQRLYPYVNILLPFHIPYNT

SEQ ID NO: 4347 - protein, 430 aa, Homo Sapiens
METFIPIDLTTENQEMDKEETKTKPRLLRYEEKKYEDVKPLETQPAEIAEKETLEYKTVRTFSESLKSEKTEDYLRESIIQQHMVSPEPASLKEKGKSRRKKDQTHACPNVRKARPVSYDRTEPKDDDVIRNIIRLREKLGWQTILPQHSLKYGSSKIAIQKITLKKPLEDDGEFVYCLPRKSPKSLYNPYDLQVINIVGSVKEVELIPTLEWLSERRHYYLLRQFKIFSDFRMNKAFVTWKLNVKRIKTEKSRSFLYHHLFLADDLFQTCLVYIRGLCEDAINLKNYNDHENNLSAICLVKLDSSRTYSLDEFCEEQLQQATQALKQLEDIRNKAISEMKSTFLKVAEKNEIKEYFESKLSEDDTTHFKLPKYRRLLETFFKFVMLVDYIFQELIRQLMNTAVTLLLELFNGSAGMPFSVEKKNENLIR

SEQ ID NO: 4348 - protein, 228 aa, Homo Sapiens
METFIPIDLTTENQEMDKEETKTKPRLLRYEEKKYEDVKPLETQPAEIAEKETLEYKTVRTFSESLKSEKTEDYLRESIIQQHMVSPEPASLKEKGKSRRKKDQTHACPNVRKARPVSYDRTEPKDDDVIRNIIRLREKLGWQTILPQHSLKYGSSKIAIQKITLKKPLEDDGEFVYCLPRKSPKSLYNPYDLQVVSAHTAKHCKEFWVITASFISKRYLVICGAVYI

SEQ ID NO: 4349 - protein, 228 aa, Homo Sapiens; identical to SEQ ID NO: 4348

SEQ ID NO: 4350 - protein, 4515 aa, Homo Sapiens
METFIPIDLTTENQEMDKEETKTKPRLLRYEEKKYEDVKPLETQPAEIAEKETLEYKTVRTFSESLKSEKTEDYLRESIIQQHMVSPEPASLKEKGKSRRKKDQTHACPNVRKARPVSYDRTEPKDDDVIRNIIRLREKLGWQTILPQHSLKYGSSKIAIQKITLKKPLEDDGEFVYCLPRKSPKSLYNPYDLQVVSAHTAKHCKEFWVITASFISKVINIVGSVKEVELIPTLEWLSERRHYYLLRQFKIFSDFRMNKAFVTWKLNVKRIKTEKSRSFLYHHLFLADDLFQTCLVYIRGLCEDAINLKNYNDHENNLSAICLVKLDSSRTYSLDEFCEEQLQQATQALKQLEDIRNKAISEMKSTFLKVAEKNEIKEYFESKLSEDDTTHFKLPKYRRLLETFFKFVMLVDYIFQELIRQLMNTAVTLLLELFNGSAGMPFSVEKKNENLIRTFKDNSFPTGKTTNDCEELVDNSKLHAISVQKSEVKTDTDINEILNSVEVGKDLRKTYAPIFEVNLCLRIPAESDSSENSKENFHESDQCPEECVMFEDEMSENKDNCVKKHSSEELLPKAKKSKEISYNLEDIISDTEIETEFENKYMYYEFPEFPTNLFIDPNRLEFSVKIQNMLTNMEKCITTITPLCQDPQLSIFIDLVSIMDLPNKTGSIIHYKEQTRWPDCHILFETDPAYQNIIVNLLTIIGNSMGLVNAYSHKFIKYCTMTEKAKIMSMKISSMGELTSKEFEAILNRFRNYFRHIVNMAIEKRIGIFNVVSLDYQSECLLYIDNVIHMSHTLIQSVIEKKNKNLLEVVESSLQQLECDPTEIEEFLEHFIFLNAISSKISKLEKEFLTMSQLYSVAKHHQIHISEEQIAIFQVLLLKFSQLKSSMKLSKINKDTAITKFRDNLEACISGLHVDVGNLKAKIRTPLLLCAGTQVSTAMEMIQTLSGEAASLTNKAKAYSHYQDCFSDSQSHMHSVNVEEITQIVLSEISDIEGDLTLRKKLWEAQEEWKRASWEWRNSSLQSIDVESVQRNVSKLMHIISVLEKGLPKSDMVTHLKQVVTEFKQELPIIIALGNPCLKPRHWEALQEIIGKSVPLDKNCKVENLLALKMFQYENEINDMSTSATNEAALEKMLFKIIDFWNTTPLPLILHHTEIYSIFIIPSIDDISAQLEESQVILATIKGSPHIGPIKDLVNEWDQNLTLFSYTLEEWMNCQRNWLYLEPVFHSSEIRRQLPAETELFSQVISMWKKIMSKIQNKQNALQITTSAGVLEILQNCNIHLEHIKKSLEDYLEVKRLIFPRFYFLSNAELLDILADSRNPESVQPHLVKCFENIKQLLIWKQDIGPPAVKMLISAEGEGLVLPKKIRVRSAVEQWLVNVEKSMFDVLKKERYIYNIILLFQSQIMFYNDCVKSFVSSYSREKLEKVHAGLMCHLEEVADLVVLDTSNSRTKAILGALLILYVHCRDIVINLLLKNIFNAEDFEWTRHLQYKWNEKQKLCYVSQGNASFTYGYEYLGCTSRLVITPLTDRCWLTLMEALHLNLGGCPAGPAGTGKTETVKDLAKSLGKHCVVFNCFEDLDYKIVRKFFFGLVQSGAWSCFDEFNLIDLEVLSVIASQILTIKAAKDNYSARFVLEGKEIRINMSCAVFITMNPRYGGGVELPDNLKSLFRPVAMMVPHYQMIAEIILFSFGFKSANSLSGKLTNLYELARKQLSQQDHYNFGLRSLKIVLIMAGTKKREFKCLSEADETLIVIEAIREASLPKCPPEDVPLFENIIGDIFPEVTVLKVNQLALEKVIYTATQQLGLQNWSSQKEKIIQFYNQLQVCVGVMLVGPTGGGKTTVRRILEKALTLLPIADFLSVAERKSASKISERKGKVDICVLNPKCVTLSELYGQLDPNTMEWTDGLLSATIRSYVYFNTPKNTKKDIDLRLKSRISDLSNVFKLDSSDTTETDDNIFEEIEKVVKIPENHNFDWQWIILDGPVDTFWVENLNSVLDDTRTLCLANSERIALTNKIRVIFEVDNLSQASPATVSRCAMVYMDPVDLGWEPYVKSWLLKTSKIISQSGVDCLEFMIKNSVTDGLQFIRNRQKFQPYPMEDITVVITLCRILDAFFDFMGKNGGFEQSDDLNDTSSKEANSQRESVTFKDIEKRDENTWYPEKNPDKLTKIIQKLFVFAFTWAFGGALNREDEHRENIPFCPSLEPDSLAKVTYDFDKLVHELFGNSSQVGWKHWGQSQGRRRKGNCINLPTGECSIFGYFVDIEQCEFIPWSDLVPNDQTLIQRGTSLLTNLQRSGGNFLKITECGECINYTATRDTTCLSFLMSLLLKNSCPVLLTGESGVGKTAAINQMLEKLEGPGAFDIKHGSILGDTLLYSEIKKSSSLKQNITILIPETHKTATGSSDNPTKKPEVRTNKKLLKNNDHKGVVVSTINFSTNVTAAKTKEMILKKLIRRTKDTLGAPKNNRILIFIDDMNMPVSDMYGAQPPLELIRQLLDLGGVYDTEKNTWKNIQDLSIVAACVPVVNDISPRLLKHFSMLVLPHPSQDILCTIFQAHLGIYFSINNFTPEVQKSKDQIISCSLAIYHQVRQNMLPTPTKCHYMFNLRDMFKLLLGLLQADRTVVNSKEMAALLFVHEATRVFHDRLIDFTDKSLFYRLLSRELENCFQIGIDGCGKKTCATLACYLTDNKLYRVPISHKCAYIEFKEVFKKVFIHAGLKGKPTVLMVPNLNIEQDSFLEDLNYIISSGRIPDLFENVELDSIAMKIRYLTEQSGHMDNRQSLLSFFQKRIYKNLHIFVIMSPEGPSFRQNCRVYPSMISSCTIDWYERWPEEALLIVANSFLKEKVNFENRENLKEKLAPTCVQIHKSMKDLNRKYFEETGRFYYTTPNSYLQFMETFAHILRAREEEMQTKRDRFHMGLSTILEATTLVTEMQEELLILGPQVEQKTKETETLMEKLRKDSQVVEKVQMLVKQDEEIVAEEVRIVEDYAQKTANELKSVLPAFDKAIVALNALDKADVAELRVYTRPPFLVLTVMNAVCILLQKKPNWATAKLLLSETGFLKKLINLDKDSIPDKVFVKLKKIVTLPDFNPHKISLVSVACCSLCQWVIALNNYHEVQKVVGPKQIQVAEAQNVLKIARQRLAEKQRGLQLVEEHLLFLQAAYKDTVAEKQLLANRKTMASRRFQCASVLLTVLEDEKTRWQETINQIDNKLEGILGDILLSAACIVYSGILTPEFRQLIVNKWETFCIENGISLSSKFSLIKVMAQKYEISRWHNQGLPHGQYSVENAILIKNGQQWPLLIDPHRQAHKWIRQMEGSRLQKLSIEDSNYTKKIENAMKTGGSVLLQNLLETLAPGLKAILKKDIYQKKGHYFIRVGDAEFEYNSNFRLYLSTEIDNPHFLPSVYNFVTMINFTVTFQGLQDQLLSTVVTHEVPHLEDQRSKLLESISLDAITLEELEEKTLNLLQKALGSILDDDKIVDTLRKSKMTSNEISKRIEATKKAESEIQAIRKNYLPIATRGALLYFLVADLTQINYMYQFSLDWFHQVFVSSVVSKSKEQEHSFKREKVSPKEVHEFISISKEPNLENEKNLLDKHIKSAIDMLTKSIFKVVSSALFNEDKLCFSFRLCTVIMQNNANGNLIQDDIGFLPEEEWNIFLYSGILINIKSALSQSRLTSTFEIGESQHLQWLSDSRWRQCQYVSTHLEPFSLLCKSLLSNVSQWDTFKNSKAVYSLISTPFSSENASLEENTKPPEETELLNENKETCNPINFPWEKLTSFQRLILVKVLRPESLNNSVRKFITEKMGNKYLQRTGVNLKDAYKGSNARTPLILIQTHGIDLTNILLRFAQELKGTTHHVTIISLGRDQAAKAEDLILKALTKTQQWVFLQNCHLATSFMPRLCTIVESFNSPNVTIDPEFRLWLSSKSYSSFPIPVLKKGLKIAVESPQGLKSNLLQTFGCTGSGEVTEEIFENPDCGQWWKKLLFSLCFFNAVINERKNYGILGWNIAYKFNSSDLGVAIKVLENSLRGQPSISWQALRYLIGEVIYGGRVIDNWDKRCLKTLLYKFCNPEVLKDDFSFSRSASIKDYIHIIQSLPDDDLPEVLGIHPEAIRSCWETQGEKFIENLIAMQPKTTTANLMIRPEQSKDELVMEILSDLLKRLPLTVEKEEIAVGTPSTLKSMMSSSIWESLSKNLKDHDPLIHCVLLTFLKQEIKRFDKLLFVIHKSLKDLQLAIKGEIILTQELEEIFNSFLNMRVPTLWQKHAYRSCKPLSSWIDDLIQRLNFFNTWAKVAYTAIQRRYMRFVTVWKQSIPSTSQKCKHPEDSENNFFEGFPSRYWLPAFFFPQAFLAAVLQDYGRSRGIAVDALTFTHHVISNTTDKDEKFSVFMPKKLNIVRRAFKGSASSHTGVYIFGLFIEGARWNREQKILEDSLPLEMCCDFPDIYFLPTKISTKTPNASNQTDSELYAFECPVYQTPERSRILATTGLPTNFLTSVYLSTKKPPSHWITMRVALLCEKNEK

SEQ ID NO: 4351 - protein, 453 aa, Homo Sapiens
METFIPIDLTTENQEMDKEETKTKPRLLRYEEKKYEDVKPLETQPAEIAEKETLEYKTVRTFSESLKSEKTEDYLRESIIQQHMVSPEPASLKEKGKSRRKKDQTHACPNVRKARPVSYDRTEPKDDDVIRNIIRLREKLGWQTILPQHSLKYGSSKIAIQKITLKKPLEDDGEFVYCLPRKSPKSLYNPYDLQVVSAHTAKHCKEFWVITASFISKVINIVGSVKEVELIPTLEWLSERRHYYLLRQFKIFSDFRMNKAFVTWKLNVKRIKTEKSRSFLYHHLFLADDLFQTCLVYIRGLCEDAINLKNYNDHENNLSAICLVKLDSSRTYSLDEFCEEQLQQATQALKQLEDIRNKAISEMKSTFLKVAEKNEIKEYFESKLSEDDTTHFKLPKYRRLLETFFKFVMLVDYIFQELIRQLMNTAVTLLLELFNGSAGMPFSVEKKNENLIR

SEQ ID NO: 4352 - protein, 4515 aa, Homo Sapiens; identical to SEQ ID NO: 4350

SEQ ID NO: 4353 - protein, 3507 aa, Homo Sapiens
MGRRSQWIWAMRCQMLVPVLSLHIGLARALGCGCIASKIECLIRCNAPFPLLDAVGSVASQELQSLTGTVGVTSGAAAYPRWNLARARAPPHLPGTQDPLRRVRDPTPIVASSPGRRRGSWSGGYGQEASEPGVVGLCCAVLPIHPSLALAGVGGPDLRRFQEGPQRPSDHGAAEKHMETFIPIDLTTENQEMDKEETKTKPRLLRYEEKKYEDVKPLETQPAEIAEKETLEYKTVRTFSESLKSEKTEEPKDDDVIRNIIRLREKLGWQTILPQHSLKYGSSKIAIQKITLKKPLEDDGEFVYCLPRKSPKSLYNPYDLQVVSAHTAKHCKEFWVITASFISKLDSSRTYSLDEFCEEQLQQATQALKQLEDIRNKAISEMKSTFLKVAEKNEIKEYFESKLSEDDTTHFKLPKYRRLLETFFKFVMLVDYIFQELIRQLMNTAVTLLLELFNGSAGMPFSVEKKNENLIRTFKDNSFPTGKTTNDCEELVDNSKLHAISVQKSEVKTDTDINEILNSVEVGKDLRKTYAPIFEVNLCLRIPAESDSSENSKENFHESDQCPEECVMFEDEMSENKDNCVKKHSSEELLPKAKKSKEISYNLEDIISATITPLCQDPQLSIFIDLVSIMDLPNKTGSIIHYKEQTRWPDCHILFETDPAYQNIIVNLLTIIGNSMGLVNAYSHKFIKYCTMTEKAKIMSMKISSMGELTSKEFEAILNRFRNYFRHIVNMAIEKRIGIFNVVVESSLQQLECDPTEIEEFLEHFIFLNAISSKISKLEKEFLTMSQLYSVAKHHQIHISEEQIAIFQVLLLKFSQLKSSMKLSKINKDTAITKFRDNLEACISGLHVDVGNLKAKIRTPLLLCAGTQVSTAMEMIQTLSGEAASLTNKAKAYSHYQDCFSDSQSHMHSVNVEEITQIVLSEISDIEGDLTLRKKLWEAQEEWKRASWEWRNSSLQSIDVESVQRNVSKLMHIISVLEKEIYSIFIIPSIDDISAQLEESQVILATIKGSPHIGPIKSQIMFYNDCVKSFVSSYSREKLEKVHAGLMCHLEEVADLVVLDTSNSRTKAILGALLILYVHCRDIVINLLLKNIFNAEDFEWTRHLQYKWNEKQKLCYVSQGNASFTYGYEYLGCTSRLVITPLTDRCWLTLMEALHLNLGGCPAGPAGTGKTETVKDLAKCALFAFKCNTALIKLPNSLIVLTCFGLEKTVLVMNTVMSFRFVLEGKEIRINMSCAVFITMNPRYGGGVELPDNLKSLFRPVAMMVPHYQMIAEIILFSFGFKSANSLSGKLTNLYELARKQLSQQDHYNFGLRSLKIVLIMAGTKKREFKCDTSDSLSEADETLIVIEAIREASLPKCPPEDVPLFENIIGDIFPEVTVLKVNQLALEKVIYTATQQLGLQNWSSQKEKIIQFYNQLQVCVGVMLVGPTGGGKTTVRRILEKALTLLPIADFLSVAERKSASKISERKGKVDICVLNPKCVTLSELYGQLDPNTMEWTDGLLSATIRSYVYFNTPKNTKKDIDLRLKSRISDLSNVFKLDSSDTTETDDNIFEEIEKVVKIPENHNFDWQWIILDGPVDTFWVENLNSVLDDTRTLCLANSERIALTNKIRVIFEVDNLSQASPATVSRCAMVYMDPVDLGWEPYVKSWLLKTSKIISQSGVDCLEFMIKNSVTDGLQFIRNRQKFQPYPMEDITVVITLCRILDAFFDFMGKNGGFEQSDDLNDTSSKEANSQRESVTFKDIEKRDENTWYPEKNPDKLTKIIQKLFVFAFTWAFGGALNREDEHRENIPFCPSLEPDSLAKVTYDFDKLVHELFGNSSQVGINLPTGECSIFGYFVDIEQCEFIPWSDLVPNDQTLIQRDNPTKKPEVRTNKKLLKNNDHKGVVVSTINFSTNVTAAKTKEMILKKLIRRTKDTLGAPKNNRILIFIDDMNMPVSDMYGAQPPLELIRQLLDLGGVYDTEKNTWKNIQDLSIVAACVPVVNDISPRLLKHFSMLVLPHPSQDILCTIFQIGIDGCGKKTCATLACYLTDNKLYRVPISHKCAYIEFKEVFKKVFIHAGLKGKPTVLMVPNLNIEQDSFLEDLNYIISSGRIPDLFENVELDSIAMKIRYLTEQSGHMDNRQSLLSFFQKRIYKNLHIFVIMSPEGPSFRQNCRVYPSMISSCTIDWYERWPEEALLIVANSFLKEKVNFENRENLKEKLAPTCVQIHKSMKDLNRKYFEETGRFYYTTPNSYLQFMETFAHILRAREEEMQTKRDRFHMGLSTILEATTLVTEMQEELLILGPQVEQKTKETETLMEKLRKDSQVVEKVQMLVKQDEEIVAEEVRIVEDYAQKTANELKSVLPAFDKAIVALNALDKADVAELRVYTRPPFLVLTVMNAVCILLQKKPNWATAKLLLSETGFLKKLINLDKDSIPDKVFVKLKKIVTLPDFNPHKISLVSVACCSLCQWVIALNNYHEVQKVVGPKQIQVAEAQNVLKIARQRLAEKQRGLQLISRWHNQGLPHGQYSVENAILIKNGQQWPLLIDPHRQAHKWIRQMEGSRLQKLSIEDSNYTKKIENAMKTGGSVLLQSCQASTWRKKLYLSTEIDNPHFLPSVYNFVTMINFTVTFQGLQDQLLSTVVTHEVPHLEDQRSKLLESISLDAITLEELEEKTLNLLQKALGSILDDDKIVDTLRKSKMTSNEISKRIEATKKAESEIQAIRKNYLPIATRGALLYFLVADLTQINYMYQFSLDWFHQVFVSSVVSKSKEQEHSFKREKVSPKEVHEFISISKEPNLENEKNLLDKHIKSAIDMLTKSIFKVVSSALFNEDKLCFSFRLCTVIMQNNANGNLIQDDIGFLPEEEWNIFLYSGILINIKSALSQSRLTSTFEIGESQHLQWLSDSRWRQCQYVSTHLEPFSLLCKSLLSNVSQWDTFKNSKAVYSLISTPFSSENASLEENTKPPEEKHTFCLLLRAINHTGTDLGPVGRGQWLTSTACDRHTDVCSFSFALNDGVPDVEHVQDIFYGHCVDKYHVKVLRPESLNNSVRKFITEKMGNKYLQRTGVNLKDAYKGSNARTPLILIQTHGSASIKDYIHIIQSLPDDDLPEVLGIHPEAIRSCWETQGEKFIENLIAMQPKTTTANLMIRPEQSKDELVMEILSDLLKRLPLTVEKEEIAVGTPSTLKSMMSSSIWESLSKNLKDHDPLIHCVLLTFLKQEIKRFDKLLFVIHKSLKDLQLAIKGEIILTQELEEIFNSFLNMRVPTLWQKHAYRSCKPLSSWIDDLIQRLNFFNTWAKVAYTAIQRRYMRFVTVWKQSIPSTSQKCKHPEDSENNFFEGFPSRYWLPAFFFPQAFLAAVLQDYGRSRGIAVDALTFTHHVISNTTDKDEKFSVFMPKKLNIVRRAFKGSASSHTGVYIFGLFIEGARWNREQKILEDSLPLEMCCDFPDIYFLPTKISTKTPNASNQTDSELYAFECPVYQTPERSRILATTGLPTNFLTSVYLSTKKPPSHWITMRVALLCEKNEK

SEQ ID NO: 4354 - protein, 1481 aa, Homo Sapiens
  misc_feature (1)..(1): Xaa can be any naturally occurring amino acid
XELFGNSSQVGINLPTGECSIFGYFVDIEQCEFIPWSDLVPNDQTLIQRGTSLLTNLQRSGGNFLKITECGECINYTATRDTTCLSFLMSLLLKNSCPVLLTGESGVGKTAAINQMLEKLEGPGAFDIKHGSILGDTLLYSEIKKSSSLKQNITILIPETHKTATGSSDNPTKKPEVRTNKKLLKNNDHKGVVVSTINFSTNVTAAKTKEMILKKLIRRTKDTLGAPKNNRILIFIDDMNMPVSDMYGAQPPLELIRQLLDLGGVYDTEKNTWKNIQDLSIVAACVPVVNDISPRLLKHFSMLVLPHPSQDILCTIFQLLLGLLQADRTVVNSKEMAALLFVHEATRVFHDRLIDFTDKSLFYRLLSRELENCFQIQWTQENLMNHSTVFLDFLDINKTHRKKIYQNTSDYNKLASVLDEFQMKLGSISLELSHSMVFFKEAIEHIIRATRVLRQPGSHMLLIGIDGCGKKTCATLACYLTDNKLYRVPISHKCAYIEFKEVFKKVFIHAGLKGKPTVLMVPNLNIEQDSFLEDLNYIISSGRIPDLFENVELDSIAMKIRYLTEQSGHMDNRQSLLSFFQKRIYKNLHIFVIMSPEGPSFRQNCRVYPSMISSCTIDWYERWPEEALLIVANSFLKEKVNFENRENLKEKLAPTCVQIHKSMKDLNRKYFEETGRFYYTTPNSYLQFMETFAHILRAREEEMQTKRDRFHMGLSTILEATTLVTEMQEELLILGPQVEQKTKETETLMEKLRKDSQVVEKVQMLVKQDEEIVAEEVRIVEDYAQKTANELKSVLPAFDKAIVALNALDKADVAELRVYTRPPFLVLTVMNAVCILLQKKPNWATAKLLLSETGFLKKLINLDKDSIPDKVFVKLKKIVTLPDFNPHKISLVSVACCSLCQWVIALNNYHEVQKVVGPKQIQVAEAQNVLKIARQRLAEKQRGLQLVEEHLLFLQAAYKDTVAEKQLLANRKTMASRRFQCASVLLTVLEDEKISRWHNQGLPHGQYSVENAILIKNGQQWPLLIDPHRQAHKWIRQMEGSRLQKLSIEDSNYTKKIENAMKTGGSVLLQNLLETLAPGLKAILKKDIYQKKGHYFIRVGDAEFEYNSNFRLYLSTEIDNPHFLPSVYNFVTMINFTVTFQGLQDQLLSTVVTHEVPHLEDQRSKLLESISLDAITLEELEEKTLNLLQKALGSILDDDKIVDTLRKSKMTSNEISKRIEATKKAESEIQAIRKNYLPIATRGALLYFLVADLTQINYMYQFSLDWFHQVFVSSVVSKSKEQEHSFKREKVSPKEVHEFISISKEPNLENEKNLLDKHIKSAIDMLTKSIFKVVSSALFNEDKLCFSFRLCTVIMQNNANGNLIQDDIGFLPEEEWNIFLYSGILINIKSALSQSRLTSTFEIGESQHLQWLSDSRWRQCQYVSTHLEPFSLLCKSLLSNVSQWDTFKNSKAVYSLISTPFSSENASLEENTKPPEESKSS

SEQ ID NO: 4355 - protein, 1477 aa, Homo Sapiens
  misc_feature (1)..(1): Xaa can be any naturally occurring amino acid
XELFGNSSQVGINLPTGECSIFGYFVDIEQCEFIPWSDLVPNDQTLIQRGTSLLTNLQRSGGNFLKITECGECINYTATRDTTCLSFLMSLLLKNSCPVLLTGESGVGKTAAINQMLEKLEGPGAFDIKHGSILGDTLLYSEIKKSSSLKQNITILIPETHKTATGSSDNPTKKPEVRTNKKLLKNNDHKGVVVSTINFSTNVTAAKTKEMILKKLIRRTKDTLGAPKNNRILIFIDDMNMPVSDMYGAQPPLELIRQLLDLGGVYDTEKNTWKNIQDLSIVAACVPVVNDISPRLLKHFSMLVLPHPSQDILCTIFQLLLGLLQADRTVVNSKEMAALLFVHEATRVFHDRLIDFTDKSLFYRLLSRELENCFQIQWTQENLMNHSTVFLDFLDINKTHRKKIYQNTSDYNKLASVLDEFQMKLGSISLELSHSMVFFKEAIEHIIRATRVLRQPGSHMLLIGIDGCGKKTCATLACYLTDNKLYRVPISHKCAYIEFKEVFKKVFIHAGLKGKPTVLMVPNLNIEQDSFLEDLNYIISSGRIPDLFENVELDSIAMKIRYLTEQSGHMDNRQSLLSFFQKRIYKNLHIFVIMSPEGPSFRQNCRVYPSMISSCTIDWYERWPEEALLIVANSFLKEKVNFENRENLKEKLAPTCVQIHKSMKDLNRKYFEETGRFYYTTPNSYLQFMETFAHILRAREEEMQTKRDRFHMGLSTILEATTLVTEMQEELLILGPQVEQKTKETETLMEKLRKDSQVVEKVQMLVKQDEEIVAEEVRIVEDYAQKTANELKSVLPAFDKAIVALNALDKADVAELRVYTRPPFLVLTVMNAVCILLQKKPNWATAKLLLSETGFLKKLINLDKDSIPDKVFVKLKKIVTLPDFNPHKISLVSVACCSLCQWVIALNNYHEVQKVVGPKQIQVAEAQNVLKIARQRLAEKQRGLQLVEEHLLFLQAAYKDTVAEKQLLANRKTMASRRFQCASVLLTVLEDEKISRWHNQGLPHGQYSVENAILIKNGQQWPLLIDPHRQAHKWIRQMEGSRLQKLSIEDSNYTKKIENAMKTGGSVLLQNLLETLAPGLKAILKKDIYQKKGHYFIRVGDAEFEYNSNFRLYLSTEIDNPHFLPSVYNFVTMINFTVTFQGLQDQLLSTVVTHEVPHLEDQRSKLLESISLDAITLEELEEKTLNLLQKALGSILDDDKIVDTLRKSKMTSNEISKRIEATKKAESEIQAIRKNYLPIATRGALLYFLVADLTQINYMYQFSLDWFHQVFVSSVVSKSKEQEHSFKREKVSPKEVHEFISISKEPNLENEKNLLDKHIKSAIDMLTKSIFKVVSSALFNEDKLCFSFRLCTVIMQNNANGNLIQDDIGFLPEEEWNIFLYSGILINIKSALSQSRLTSTFEIGESQHLQWLSDSRWRQCQYVSTHLEPFSLLCKSLLSNVSQWDTFKNSKAVYSLISTPFSSENASLEENTKPPEE

SEQ ID NO: 4356 - protein, 126 aa, Homo Sapiens
  misc_feature (1)..(1): Xaa can be any naturally occurring amino acid
XLEYKTVRTFSESLKSEKTEEPKDDDVIRNIIRLREKLGWQTILPQHSLKYGSSKIAIQKITLKKPLEDDGEFVYCLPRKSPKSLYNPYDLQVVSAHTAKHCKEFWVITASFISKRYLVICGAVYI

SEQ ID NO: 4357 - protein, 204 aa, Homo Sapiens
  misc_feature (1)..(1): Xaa can be any naturally occurring amino acid
XMLISAEGEGLVLPKKIRVRSAVEQWLVNVEKSMFDVLKKFLSQGIEDWNCQMFSQWVLSHPGQVVLTVSQIMFYNDCVKSFVSSYSREKLEKVHAGLMCHLEEVADLVVLDTSNSRTKAILGALLILYVHCRDIVINLLLKNIFNAEDFEWTRHLQYKWNEKQKLCYVSQGNASFTYGYEYLGCTSRLVITPLTDRCWLTLME

SEQ ID NO: 4358 - protein, 219 aa, Homo Sapiens
  misc_feature (1)..(1): Xaa can be any naturally occurring amino acid
XRFVTVWKQSIPSTSQKCKHPEDSENNFFEGFPSRYWLPAFFFPQAFLAAVLQDYGRSRGIAVDALTFTHHVISNTTDKDEKFSVFMPKKLNIVRRAFKGSASSHTGVYIFGLFIEGARWNREQKILEDSLPLEMCCDFPDIYFLPTKISTKTPNASNQTDSELYAFECPVYQTPERSRILATTGLPTNFLTSVYLSTKKPPSHWITMRVALLCEKNEK

SEQ ID NO: 4359 - protein, 300 aa, Homo Sapiens
  misc_feature (1)..(1): Xaa can be any naturally occurring amino acid
XTGVSHRADGERGTVGINLPTGECSIFGYFVDIEQCEFIPWSDLVPNDQTLIQRGTSLLTNLQRSGGNFLKITECGECINYTATRDTTCLSFLMSLLLKNSCPVLLTGESGVGKTAAINQMLEKLEGPGAFDIKHGSILGDTLLYSEIKKSSSLKQNITILIPETHKTATGSSDNPTKKPEVRTNKKLLKNNDHKGVVVSTINFSTNVTAAKTKEMILKKLIRRTKDTLGAPKNNRILIFIDDMNMPVSDMYGAQPPLELIRQLLDLGGVYDTEKNTWKNIQDLSIVAACVPVVNDISPR

SEQ ID NO: 4360 - protein, 358 aa, Homo Sapiens
MAPQNLSTFCLLLLYLIGAVIAGRDFYKILGVPRSASIKDIKKAYRKLALQLHPDRNPDDPQAQEKFQDLGAAYEVLSDSEKRKQYDTYGEEGLKDGHQSSHGDIFSHFFGDFGFMFGGTPRQQDRNIPRGSDIIVDLEVTLEEVYAGNFVEVVRNKPVARQAPGKRKCNCRQEMRTTQLGPGRFQMTQEVVCDECPNVKLVNEERTLEVEIEPGVRDGMEYPFIGEGEPHVDGEPGDLRFRIKVVKHPIFERRGDDLYTNVTISLVESLVGFEMDITHLDGHKVHISRDKITRPGAKLWKKGEGLPNFDNNNIKGSLIITFDVDFPKEQLTEEAREGIKQLLKQGSVQKVYNGLQGY

SEQ ID NO: 4361 - protein, 358 aa, Homo Sapiens; identical to SEQ ID NO: 4360

SEQ ID NO: 4362 - protein, 223 aa, Homo Sapiens
MATPQSIFIFAICILMITELILASKSYYDILGVPKSASERQIKKAFHKLAMKYHPDKNKSPDAEAKFREIAEAYETLSDANRRKEYDTLGHSAFTSGKGQRGSGSSFEQSFNFNFDDLFKDFGFFGQNQNTGSKKRFENHFQTRQDGGSSRQRHHFQEFSFGGGLFDDMFEDMEKMFSFSGFDSTNQHTVQTENRFHGSSKHCRTVTQRRGNMVTTYTDCSGQ

SEQ ID NO: 4363 - protein, 153 aa, Homo Sapiens
MGAPLLSPGWGAGAAGRRWWMLLAPLLPALLLVRPAGALVEGLYCGTRDCYEVLGVSRSAGKAEIARAYRQLARRYHPDRYRPQPGDEGPGRTPQSAEEAFLLVATAYETLKVSQAAAELQQYCMQNACKDALLVGVPAGSNPFREPRSCALL

SEQ ID NO: 4364 - protein, 504 aa, Homo Sapiens
MVAPGSVTSRLGSVFPFLLVLVDLQYEGAECGVNADVEKHLELGKKLLAAGQLADALSQFHAAVDGDPDNYIAYYRRATVFLAMGKSKAALPDLTKVIQLKMDFTAARLQRGHLLLKQGKLDEAEDDFKKVLKSNPSENEEKEAQSQLIKSDEMQRLRSQALNAFGSGDYTAAIAFLDKILEVCVWDAELRELRAECFIKEGEPRKAISDLKAASKLKNDNTEAFYKISTLYYQLGDHELSLSEVRECLKLDQDHKRCFAHYKQVKKLNKLIESAEELIRDGRYTDATSKYESVMKTEPSIAEYTVRSKERICHCFSKDEKPVEAIRVCSEVLQMEPDNVNALKDRAEAYLIEEMYDEAIQDYETAQEHNENDQQIREGLEKAQRLLKQSQKRDYYKILGVKRNAKKQEIIKAYRKLALQWHPDNFQNEEEKKKAEKKFIDIAAAKEVLSDPEMRKKFDDGEDPLDAESQQGGGGNPFHRSWNSWQGFNPFSSGGPFRFKFHFN

SEQ ID NO: 4365 - protein, 453 aa, Homo Sapiens
MVAPGSVTSRLGSVFPFLLVLVDLQYEGAECGVNADVEKHLELGKKLLAAGQLADALSQFHAAVDGDPDNYIAYYRRATVFLAMGKSKAALPDLTKVIQLKMDFTAARLQRGHLLLKQGKLDEAEDDFKKVVCVWDAELRELRAECFIKEGEPRKAISDLKAASKLKNDNTEAFYKISTLYYQLGDHELSLSEVRECLKLDQDHKRCFAHYKQVKKLNKLIESAEELIRDGRYTDATSKYESVMKTEPSIAEYTVRSKERICHCFSKDEKPVEAIRVCSEVLQMEPDNVNALKDRAEAYLIEEMYDEAIQDYETAQEHNENDQQIREGLEKAQRLLKQSQKRDYYKILGVKRNAKKQEIIKAYRKLALQWHPDNFQNEEEKKKAEKKFIDIAAAKEVLSDPEMRKKFDDGEDPLDAESQQGGGGNPFHRSWNSWQGFNPFSSGGPFRFKFHFN

SEQ ID NO: 4366 - protein, 60 aa, Homo Sapiens
MRGMKLLGALLALAALLQGAVSLKIAAFNIQTFGETKMSNATLVSYIVQGCTRHLSLRGQ

SEQ ID NO: 4367 - protein, 60 aa, Homo Sapiens; identical to SEQ ID NO: 4366

SEQ ID NO: 4368 - protein, 60 aa, Homo Sapiens; identical to SEQ ID NO: 4366

SEQ ID NO: 4369 - protein, 282 aa, Homo Sapiens [sequence omitted]

SEQ ID NO: 4370 - protein, 282 aa, Homo Sapiens [sequence omitted]

SEQ ID NO: 4371 - protein, 86 aa, Homo Sapiens
MRGMKLLGALLALAALLQGAVSLKIAAFNIQTFGETKMSNATLVSYIVQILSRYDIALVQEVRDSHLTAVGKLLDNLNQWVTVAGS

SEQ ID NO: 4372 - protein, 108 aa, Homo Sapiens
NREPAIVRFFSRFTEVREFAIVPLHAAPGDAVAEIDALYDVYLDVQEKWGLEDVMLMGDFNAGCSYVRPSQWSSIRLWTSPTFQWLIPDSADTTATPTHCAYDRLPMA

SEQ ID NO: 4373 - protein, 72 aa, Homo Sapiens
SIRLWTSPTFQWLIPDSADTTATPTHCAYDRIVVAGMLLRGAVVPDSALPFNFQAAYGLSDQLVCVLPCTAT

SEQ ID NO: 4374 - protein, 90 aa, Homo Sapiens
  misc_feature (1)..(1): Xaa can be any naturally occurring amino acid
XHYVVSEPLGRNSYKERYLFVYRPDQVSAVDSYYYDDGCEPCGNDTFNREPAIVRFFSRFTGSVPHTTWLSPQRSGSLPLFPCMRPRGTQ

SEQ ID NO: 4375 - protein, 75 aa, Homo Sapiens
  misc_feature (1)..(1): Xaa can be any naturally occurring amino acid
XRYLFVYRPDQVSAVDSYYYDDGCEPCGNDTFNREPAIVRFFSRFTGSVPHTTWLSPQRSGSLPLFPCMRPRGTQ

SEQ ID NO: 4376 - protein, 65 aa, Homo Sapiens
  misc_feature (1)..(1): Xaa can be any naturally occurring amino acid
XTFQWLIPDSADTTATPTHCAYDRIVVAGMLLRGAVVPDSALPFNFQAAYGLSDQLVCVLPCTAT

SEQ ID NO: 4377 - protein, 26 aa, Homo Sapiens
MHYPTALLFLILANGAQAFRICAFNA

SEQ ID NO: 4378 - protein, 85 aa, Homo Sapiens
MHYPTALLFLILANGAQAFRICAFNAQRLTLAKVAREQVMDTLVRALNISDHYPVEVELKLSQAHSVQPLSLTVLLLLSLLSPQL

SEQ ID NO: 4379 - protein, 62 aa, Homo Sapiens
MHYPTALLFLILANGAQAFRICAFNAQRLTLAKVAREQVMDTLVRDVILLGDFNADCASLTK

SEQ ID NO: 4380 - protein, 104 aa, Homo Sapiens
MHYPTALLFLILANGAQAFRICAFNAQRLTLAKVAREQVMDTLVRILARCDIMVLQEVVDSSGSAIPLLLRELNRFDGSGPYSTLSSPQLGRSTYMETYVYFYR

(The sequence listing continues in the following parts.)
